United States Patent Application Publication US 2024/0327476 A1 - sequence listing, part 10

SEQ ID NO: 10337 - DNA, 2399 bp, Homo sapiens
  source 1..2399: mol_type = unassigned DNA
gcagcactgagccgccgacggggcgggtgggctttgctgccgagcaggcggcgccgtcttggggcctagcggcgaggcgacccgcacagtactgtaagattgatgttaaaggcatggtgttcaccccacttcatcagcgtacataagttatctcttcttttggacccttattttatgccataatgcaacaagctttagaactagctttggatcgtgcagagtatgtcattgaaagtgcccgacagagacctcctaaaaggaaatacctatcaagtggaagaaaatctgtatttcaaaaactttatgacttgtatattgaagaatgtgaaaaagaacctgaagttaagaaattaagaagaaatgtgaacttgttagagaagcttgttatgcaagagactttgtcatgtttagtggtcaatctatacccaggaaatgagggatattctctgatgctcaggggaaaaaacggatcagattccgagaccattcgactgccctatgaagaaggagagttgcttgaatatttggatgcagaagaattacctcctattttggttgatctcctagaaaaatctcaggttaatatttttcattgcggatgtgtcatagcagaaatacgtgactacaggcagtccagtaacatgaaatctcctggttaccaaagtcggcacattctcttacgtccaacaatgcagactttaatttgtgatgtacattcaataacaagtgataaccacaaatggacccaggaagacaaacttttgcttgagagccagctcatcctagctacagctgaaccactctgtcttgatccttctatagcagtcacctgcactgcaaacagactgctctataacaagcaaaagatgaacactcgcccaatgaaacggtgtttcaagaggtattccagatcctctctgaatcggcagcaagatctatctcattgtccacctcctcctcagctgaggttacttgatttcttacaaaaaagaaaggaaagaaaagcaggtcagcattatgacctcaaaatttctaaggcaggaaattgtgtagatatgtggaaacggagtccctgtaatttggccataccttctgaagtagatgtggagaaatatgctaaagtggaaaagtctatcaaatctgatgactcacagccaacagtctggccagcccatgatgtaaaagatgattatgtatttgaatgtgaagctggtactcagtatcagaaaacaaagctgaccatcttgcagtcgcttggagatccactttactatggtaaaatacagccatgtaaagcagatgaagaaagtgacagccagatgtctccatcacactcgtccacagatgatcattcaaattggttcattattggatcaaagaccgatgctgagagggtagtcaatcagtaccaagaattagtccagaatgaagccaaatgtccggtcaagatgtcacacagctccagtggctcagccagtctgagtcaggtttctccagggaaagaaacagatcaaactgaaaccgtgtcagttcagtcttcggtattggggaagggtgtaaaacatcgacccccaccaatcaaacttccctcaagctcaggaaatagttcctcaggtaactattttacaccacaacagacaagcagctttctcaaatctccaactcctcctccttcttctaagccatcaagtattcctcggaaatcatctgtggatctcaatcaagttagcatgctttctccagctgccctatcacctgccagctcatcacaaagaaccacggccacccaggtcatggcaaactctgctggacttaacttcatcaatgtagtgggctctgtttgtggggcccaggctttgatgagtggttcaaaccccatgctgggctgtaacactggtgccataactcctgcaggaataaacctgagcggccttctaccctcaggaggtctgctaccaaatgcactgcccagtgcaatgcaggcagcttctcaagcaggtgttccatttggtttaaaaaatacttcaagtctcaggcccttaaatctactccagcttccaggtggttcacttatttttaacactctgcagcagcagcaacagcagctctcccagtttacaccacaacaacctcagcagcccacaacttgtagtcctcaacagccaggggagcagggttctgagcaaggttcaaccagtcaagaacaggccttatctgctcagcaagctgctgttattaaccttactggagtaggaagttttatgcagtcacaggcagctgcagttgcgattcttgcagcatcaaatggctatggcagcagcagcagcacaaacagctcagctacatcatcatcggcatacaggcagccagacacaagagcactgaatcaaaagaattga

SEQ ID NO: 10338 - DNA, 2062 bp, Homo sapiens
  source 1..2062: mol_type = unassigned DNA
aatcggaagtgcggccgccggaactggctgttggtgggggtgcagcactgagccgccgacggggcgggtgggctttgctgccgagcaggcggcgccgtcttggggcctagcggcgaggcgacccgcacagtactgtaagattgatgttaaaggcatggtgttcaccccacttcatcagcgtacataagttatctcttcttttggacccttattttatgccataatgtatgtcattgaaagtgcccgacagagacctcctaaaaggaaatacctatcaagtggaagaaaatctgtatttcaaaaactttatgacttgtatattgaagaatgtgaaaaagaacctgaagttaagaaattaagaagaaatgtgaacttgttagagaagcttgttatgcaagagactttgtcatgtttagtggtcaatctatacccaggaaatgagggatattctctgatgctcaggggaaaaaacggatcagattccgagaccattcgactgccctatgaagaaggagagttgcttgaatatttggatgcagaagaattacctcctattttggttgatctcctagaaaaatctcaggttaatatttttcattgcggatgtgtcatagcagaaatacgtgactacaggcagtccagtaacatgaaatctcctggttaccaaagtcggcacattctcttacgtccaacaatgcagactttaatttgtgatgtacattcaataacaagtgataaccacaaatggacccaggaagacaaacttttgcttgagagccagctcatcctagctacagctgaaccactctgtcttgatccttctatagcagtcacctgcactgcaaacagactgctctataacaagcaaaagatgaacactcgcccaatgaaacggtgtttcaagaggtattccagatcctctctgaatcggcagcaagatctatctcattgtccacctcctcctcagctgaggttacttgatttcttacaaaaaagaaaggaaagaaaagcaggtcagcattatgacctcaaaatttctaaggcaggaaattgtgtagatatgtggaaacggagtccctgtaatttggccataccttctgaagtagatgatgtaaaagatgattatgtatttgaatgtgaagctggtactcagtatcagaaaacaaagctgaccatcttgcagtcgcttggagatccactttactatggtaaaatacagccatgtaaagcagatgaagaaagtgacagccagatgtctccatcacactcgtccacagatgatcattcaaattggttcattattggatcaaagaccgatgctgagagggtagtcaatcagtaccaagaattagtccagaatgaagccaaatgtccggtcaagatgtcacacagctccagtggctcagccagtctgagtcaggtttctccagggaaagaaacagatcaaactgaaaccgtgtcagttcagtcttcggtattggggaagggtgtaaaacatcgacccccaccaatcaaacttccctcaagctcaggaaatagttcctcaggtaactattttacaccacaacagacaagcagctttctcaaatctccaactcctcctccttcttctaagccatcaagtattcctcggaaatcatctgtggatctcaatcaagttagcatgctttctccagctgccctatcacctgccagctcatcacaaagacatgaaagctaaaaaagaaaacacctcaagagcttttggttttacttttttggtttttgttttttgtttttgttttttaaaaaattgataaactgtgcatacttcattcacaacagattttctatacattctacatttaaacagaagtacacagttactgttaaagatgcagtattatctctcagatatttgctttattactgttttttgtaaatttgtttgtcaggataaacttgatgtgttaggaattaaacatgtatatttaggtgccaaatatgattgttaaccatatgtaacttattaaatatgtttacagtttatctcagacttttacactaaataagcaatattttt

SEQ ID NO: 10339 - DNA, 1983 bp, Homo sapiens
  source 1..1983: mol_type = unassigned DNA
agccacgcggcgccagcgaggcggccggacccgcagccccgatgctgctgacgctggccgggggcgcgctcttcttcccggggctcttcgcgctctgcacctgggcgctgcgccgctcccagcccggatggagccgcaccgactgcgtgatgatcagcaccaggctggtttcctcggtgcacgccgtgctggccaccggctcggggatcgtcatcattcgctcctgcgacgacgtgatcaccggcaggcactggcttgcccgggaatatgtgtggtttctgattccatacatgatctatgactcgtacgccatgtacctctgtgaatggtgccgaaccagagaccagaaccgtgcgccctccctcactcttcgaaacttcctaagtcgaaaccgcctcatgatcacacatcatgcggtcattctctttgtccttgtgccagtcgcacagctaaagcagcagcacacccttctgtacaaggtgaatggaatcctcacgctggccaccttcctttcctgccggatccttctcttccccttcatgtactggtcctatggccgccagcagggactaagcctgctccaagtacccttcagcatcccattctactgcaacgtggccaatgccttcctcgtagctcctcagatctactggttctgtctgctgtgcaggaaggcagtccggctctttgacactccccaagccaaaaaggatggctaaatgctcctgggagtcaggcgcagcctcacaccagctgcctcctccactcagcattccatggaccaaattgtgccctgggtagcctcagactttgggtattgataagccgatggatttgagtttttctaaagaatattcatattacctccttcttctaacttgccctatttgcaaaagcacttttgtagtaacaactattgggtcctgtcagacctccacggacagcaaagtggttttaatgcaagcccaaggatccttcttaaggtcttatctcaagagctctgggaggtggaagcatggggtgggatcggtggaccagggtggtaagtgtctgcacatctgcctgtccctgtatcagcggctacccaccttccaaaccactcaggacagtacccgtggcactgggcccgcagaagcaagggatgacttggttcttggaagtaatgtcgtcttgtgacattggcctgggacaatcattgtgggtaggtagttattgatcgtttactagataacccattggttctttgcctcatcctctcatccatgggtcagagttgaattcttatgtctatagacttccaatcagaagtctcactggtggggctgggggtgggggcaggcaggaggcatggatgggaacctgagtaggtagtgtggccaagagatcagcacaacctttgcaggctgacttgctaagtctgacagtgacaaacttgtgagcttactgcagtcagtcacagaggctgttctttttcacacaccccttcatgcccggctttccccatatccacatgcagagggcgagctcataaaactacagggaagcgtgaaatgatggctttggtagctgtttactgggtaaccccactgtgacactgtccttttcatgtgatgtggaaacctacttctgtcctccaaaccatgaaatgtgtcatctagactgcagagtacttgagtgctttgcctcccgatatgccagagcttgtggtccaaagcccattcctgtgtgtccgtcctgccatttagccacagaaggctgcggagtgaggcggcagctagcctggccagtggctgtcccgtggaccgacacctgcgcccccttctgcaagcaggattttctggtgccaacactcattcatcattcccgatcaactaggatgaatttaagactgtgctaccatgtgttctcaagtggtagtttaaaaagtggatttttaaagtgcctttcaattgtctgtgaacgtctaaaggactgatttgtctc

SEQ ID NO: 10340 - DNA, 2079 bp, Homo sapiens
  source 1..2079: mol_type = unassigned DNA
agccacgcggcgccagcgaggcggccggacccgcagccccgatgctgctgacgctggccgggggcgcgctcttcttcccggggctcttcgcgctctgcacctgggcgctgcgccgctcccagcccggatggagccgcaccgactgcgtgatgatcagcaccaggctggtttcctcggtgcacgccgtgctggccaccggctcggggatcgtcatcattcgctcctgcgacgacgtgatcaccggcaggcactggcttgcccgggaatatgtgtggtttctgattccatacatgatctatgactcgtacgccatgtacctctgtgaatggtgccgaaccagagaccagaaccgtgcgccctccctcactcttcgaaacttcctaagtcgaaaccgcctcatgatcacacatcatgcggtcattctctttgtccttgtgccagtcgcacagaggctccggggagaccttggggacttctttgtcggctgcatcttcacggcagaactgagcactccgtttgtgtcgctgggcagggttctgattcagctaaagcagcagcacacccttctgtacaaggtgaatggaatcctcacgctggccaccttcctttcctgccggatccttctcttccccttcatgtactggtcctatggccgccagcagggactaagcctgctccaagtacccttcagcatcccattctactgcaacgtggccaatgccttcctcgtagctcctcagatctactggttctgtctgctgtgcaggaaggcagtccggctctttgacactccccaagccaaaaaggatggctaaatgctcctgggagtcaggcgcagcctcacaccagctgcctcctccactcagcattccatggaccaaattgtgccctgggtagcctcagactttgggtattgataagccgatggatttgagtttttctaaagaatattcatattacctccttcttctaacttgccctatttgcaaaagcacttttgtagtaacaactattgggtcctgtcagacctccacggacagcaaagtggttttaatgcaagcccaaggatccttcttaaggtcttatctcaagagctctgggaggtggaagcatggggtgggatcggtggaccagggtggtaagtgtctgcacatctgcctgtccctgtatcagcggctacccaccttccaaaccactcaggacagtacccgtggcactgggcccgcagaagcaagggatgacttggttcttggaagtaatgtcgtcttgtgacattggcctgggacaatcattgtgggtaggtagttattgatcgtttactagataacccattggttctttgcctcatcctctcatccatgggtcagagttgaattcttatgtctatagacttccaatcagaagtctcactggtggggctgggggtgggggcaggcaggaggcatggatgggaacctgagtaggtagtgtggccaagagatcagcacaacctttgcaggctgacttgctaagtctgacagtgacaaacttgtgagcttactgcagtcagtcacagaggctgttctttttcacacaccccttcatgcccggctttccccatatccacatgcagagggcgagctcataaaactacagggaagcgtgaaatgatggctttggtagctgtttactgggtaaccccactgtgacactgtccttttcatgtgatgtggaaacctacttctgtcctccaaaccatgaaatgtgtcatctagactgcagagtacttgagtgctttgcctcccgatatgccagagcttgtggtccaaagcccattcctgtgtgtccgtcctgccatttagccacagaaggctgcggagtgaggcggcagctagcctggccagtggctgtcccgtggaccgacacctgcgcccccttctgcaagcaggattttctggtgccaacactcattcatcattcccgatcaactaggatgaatttaagactgtgctaccatgtgttctcaagtggtagtttaaaaagtggatttttaaagtgcctttcaattgtctgtgaacgtctaaaggactgatttgtctc

SEQ ID NO: 10341 - DNA, 2257 bp, Homo sapiens
  source 1..2257: mol_type = unassigned DNA
atgatcagcaccaggtaccggcgccgccgagacgccccccgaggcccggggcgctgcccaccgcaccccacccggccgcggggcccagggcggaaaaggggggcggcaggaagcccgggggctgctccctccgcgtcccggcggcccgagtttccgaagcccctccgcgtcctcccctggcgggagcggggccggggcgggcgggaatggccgatgagcctccggagcccgctccccacatctgcctgcggctggggagagtcaggccgaaggccgggccgggctccctgcggtcctcggaccggactgagcgcgcgcgctgttctctccgcccgcgctaggctggtttcctcggtgcacgccgtgctggccaccggctcggggatcgtcatcattcgctcctgcgacgacgtgatcaccggcaggcactggcttgcccgggaatatgtgtggtttctgattccatacatgatctatgactcgtacgccatgtacctctgtgaatggtgccgaaccagagaccagaaccgtgcgccctccctcactcttcgaaacttcctaagtcgaaaccgcctcatgatcacacatcatgcggtcattctctttgtccttgtgccagtcgcacagaggctccggggagaccttggggacttctttgtcggctgcatcttcacggcagaactgagcactccgtttgtgtcgctgggcagggttctgattcagctaaagcagcagcacacccttctgtacaaggtgaatggaatcctcacgctggccaccttcctttcctgccggatccttctcttccccttcatgtactggtcctatggccgccagcagggactaagcctgctccaagtacccttcagcatcccattctactgcaacgtggccaatgccttcctcgtagctcctcagatctactggttctgtctgctgtgcaggaaggcagtccggctctttgacactccccaagccaaaaaggatggctaaatgctcctgggagtcaggcgcagcctcacaccagctgcctcctccactcagcattccatggaccaaattgtgccctgggtagcctcagactttgggtattgataagccgatggatttgagtttttctaaagaatattcatattacctccttcttctaacttgccctatttgcaaaagcacttttgtagtaacaactattgggtcctgtcagacctccacggacagcaaagtggttttaatgcaagcccaaggatccttcttaaggtcttatctcaagagctctgggaggtggaagcatggggtgggatcggtggaccagggtggtaagtgtctgcacatctgcctgtccctgtatcagcggctacccaccttccaaaccactcaggacagtacccgtggcactgggcccgcagaagcaagggatgacttggttcttggaagtaatgtcgtcttgtgacattggcctgggacaatcattgtgggtaggtagttattgatcgtttactagataacccattggttctttgcctcatcctctcatccatgggtcagagttgaattcttatgtctatagacttccaatcagaagtctcactggtggggctgggggtgggggcaggcaggaggcatggatgggaacctgagtaggtagtgtggccaagagatcagcacaacctttgcaggctgacttgctaagtctgacagtgacaaacttgtgagcttactgcagtcagtcacagaggctgttctttttcacacaccccttcatgcccggctttccccatatccacatgcagagggcgagctcataaaactacagggaagcgtgaaatgatggctttggtagctgtttactgggtaaccccactgtgacactgtccttttcatgtgatgtggaaacctacttctgtcctccaaaccatgaaatgtgtcatctagactgcagagtacttgagtgctttgcctcccgatatgccagagcttgtggtccaaagcccattcctgtgtgtccgtcctgccatttagccacagaaggctgcggagtgaggcggcagctagcctggccagtggctgtcccgtggaccgacacctgcgcccccttctgcaagcaggattttctggtgccaacactcattcatcattcccgatcaactaggatgaatttaagactgtgctaccatgtgttctcaagtggtagtttaaaaagtggatttttaaagtgcctttcaattgtctgtgaacgtctaaaggactgatttgtctc

SEQ ID NO: 10342 - DNA, 1218 bp, Homo sapiens
  source 1..1218: mol_type = unassigned DNA
gcgcgccggggccgcctctccttccgccggtgccgcggcgcctcatggaagccccggaggcggcggaggggggcctgcagcgcggggcccggagggcagccggcgcccgaagccagggtgcacttccgagtggcgaggttcatcatggaggtgtcaagctagggatgcggtccattcccattgccactgcttgcaccatttaccataagttcttttgcgagaccaacctggacgcctatgacccttacctgattgccatgtcttcaatttacttggccggcaaagtggaagagcagcacctgcggactcgtgacatcatcaatgtgtccaacaggtactttaacccaagcggtgagcccctggaattggactcccgcttctgggaactccgggacagcatcgtgcagtgtgagcttctcatgctgagagttctgcgcttccaggtctccttccagcatccacacaagtacctgctccactacctggtttccctccagaactggctgaaccgccacagctggcagcggacccctgttgccgtcaccgcctgggccctgctgcgggacagctaccatggggcgctgtgcctccgcttccaggcccagcacatcgccgtggcggtgctctacctggccctgcaggtctacggagttgaggtgcccgccgaggtcgaggctgagaagccgtggtggcaggtgtttaatgacgaccttaccaagccaatcattgataatattgtgtctgatctcattcagatttataccatggacacagagatcccctaaggtcctggcccaggcctgcccaaagagaagcccaggatggtcggctgcctggggacattgtcaccacgtcgccatgacggctggtccccacaggaccagctgggaggactggttgtgctgctggagaagggctggagaaggcaatggcatgctgccgctttgccagtccctagaagtcgcggtgcaggtgatggtgggagccgcgcctccagcgggcaggccgggagtgtactgtgtgcagctgacccaaggcagccacatctgcgtttgtcctttgagaggactttgactacaatacaggcatgacatcaatgaaaggaaagtcatgaaatcgatgagactgaatccctacggatttcttaaaagccagatttgtagggagaatgaatgtgcaacgtggctgaaatctattttgtgtaataaaaggtgatac

SEQ ID NO: 10343 - DNA, 1162 bp, Homo sapiens
  source 1..1162: mol_type = unassigned DNA
gcgcgccggggccgcctctccttccgccggtgccgcggcgcctcatggaagccccggaggcggcggaggggggcctgcagcgcggggcccggagggcagccggcgcccgaagccagggtgcacttccgagtggcgaggttcatcatggaggcaggtgtcaagctagggatgcggtccattcccattgccactgcttgcaccatttaccataagttcttttgcgagaccaacctggacgcctatgacccttacctgattgccatgtcttcaatttacttggccggcaaagtggaagagcagcacctgcggactcgtgacatcatcaatgtgtccaacaggtactttaacccaagcggtgagcccctggaattggactcccgcttctgggaactccgggacagcatcgtgcagtgtgagcttctcatgctgagagttctgcgcttccaggtctccttccagcatccacacaagtacctgctccactacctggtttccctccagaactggctgaaccgccacagctggcagcggacccctgttgccgtcaccgcctgggccctgctgcgggacagctaccatggggcgctgtgcctccgcttccaggcccagcacatcgccgtggcggtgctctacctggccctgcaggtctacggagttgaggtgcccgccgaggtcgaggctgagaagccgtggtggcagatttataccatggacacagagatcccctaaggtcctggcccaggcctgcccaaagagaagcccaggatggtcggctgcctggggacattgtcaccacgtcgccatgacggctggtccccacaggaccagctgggaggactggttgtgctgctggagaagggctggagaaggcaatggcatgctgccgctttgccagtccctagaagtcgcggtgcaggtgatggtgggagccgcgcctccagcgggcaggccgggagtgtactgtgtgcagctgacccaaggcagccacatctgcgtttgtcctttgagaggactttgactacaatacaggcatgacatcaatgaaaggaaagtcatgaaatcgatgagactgaatccctacggatttcttaaaagccagatttgtagggagaatgaatgtgcaacgtggctgaaatctattttgtgtaataaaaggtgatac

SEQ ID NO: 10344 - DNA, 1158 bp, Homo sapiens
  source 1..1158: mol_type = unassigned DNA
gcgcgccggggccgcctctccttccgccggtgccgcggcgcctcatggaagccccggaggcggcggaggggggcctgcagcgcggggcccggagggcagccggcgcccgaagccagggtgcacttccgagtggcgaggttcatcatggaggtgtcaagctagggatgcggtccattcccattgccactgcttgcaccatttaccataagttcttttgcgagaccaacctggacgcctatgacccttacctgattgccatgtcttcaatttacttggccggcaaagtggaagagcagcacctgcggactcgtgacatcatcaatgtgtccaacaggtactttaacccaagcggtgagcccctggaattggactcccgcttctgggaactccgggacagcatcgtgcagtgtgagcttctcatgctgagagttctgcgcttccaggtctccttccagcatccacacaagtacctgctccactacctggtttccctccagaactggctgaaccgccacagctggcagcggacccctgttgccgtcaccgcctgggccctgctgcgggacagctaccatggggcgctgtgcctccgcttccaggcccagcacatcgccgtggcggtgctctacctggccctgcaggtctacggagttgaggtgcccgccgaggtcgaggctgagaagccgtggtggcagatttataccatggacacagagatcccctaaggtcctggcccaggcctgcccaaagagaagcccaggatggtcggctgcctggggacattgtcaccacgtcgccatgacggctggtccccacaggaccagctgggaggactggttgtgctgctggagaagggctggagaaggcaatggcatgctgccgctttgccagtccctagaagtcgcggtgcaggtgatggtgggagccgcgcctccagcgggcaggccgggagtgtactgtgtgcagctgacccaaggcagccacatctgcgtttgtcctttgagaggactttgactacaatacaggcatgacatcaatgaaaggaaagtcatgaaatcgatgagactgaatccctacggatttcttaaaagccagatttgtagggagaatgaatgtgcaacgtggctgaaatctattttgtgtaataaaaggtgatac

SEQ ID NO: 10345 - DNA, 1303 bp, Homo sapiens
  source 1..1303: mol_type = unassigned DNA
ggcggggccggacgcggccgggtggggcggcacgcccgccgcgagcacctccagttctgccggcttctgcgcgccggggccgcctctccttccgccggtgccgcggcgcctcatggaagccccggaggcggcggaggggggcctgcagcgcggggcccggagggcagccggcgcccgaagccagggtgcacttccgagtggcgaggttcatcatggaggcaggtgtcaagctagggatgcggtccattcccattgccactgcttgcaccatttaccataagttcttttgcgagaccaacctggacgcctatgacccttacctgattgccatgtcttcaatttacttggccggcaaagtggaagagcagcacctgcggactcgtgacatcatcaatgtgtccaacaggtactttaacccaagcggtgagcccctggaattggactcccgcttctgggaactccgggacagcatcgtgcagtgtgagcttctcatgctgagagttctgcgcttccaggtctccttccagcatccacacaagtacctgctccactacctggtttccctccagaactggctgaaccgccacagctggcagcggacccctgttgccgtcaccgcctgggccctgctgcgggacagctaccatggggcgctgtgcctccgcttccaggcccagcacatcgccgtggcggtgctctacctggccctgcaggtctacggagttgaggtgcccgccgaggtcgaggctgagaagccgtggtggcaggtgtttaatgacgaccttaccaagccaatcattgataatattgtgtctgatctcattcagatttataccatggacacagagatcccctaaggtcctggcccaggcctgcccaaagagaagcccaggatggtcggctgcctggggacattgtcaccacgtcgccatgacggctggtccccacaggaccagctgggaggactggttgtgctgctggagaagggctggagaaggcaatggcatgctgccgctttgccagtccctagaagtcgcggtgcaggtgatggtgggagccgcgcctccagcgggcaggccgggagtgtactgtgtgcagctgacccaaggcagccacatctgcgtttgtcctttgagaggactttgactacaatacaggcatgacatcaatgaaaggaaagtcatgaaatcgatgagactgaatccctacggatttcttaaaagccagatttgtagggagaatgaatgtgcaacgtggctgaaatctattttgtgtaataaaaggtgatacaagtcaataggga

SEQ ID NO: 10346 - DNA, 1282 bp, Homo sapiens
  source 1..1282: mol_type = unassigned DNA
ggacgcggccgggtggggcggcacgcccgccgcgagcacctccagttctgccggcttctgcgcgccggggccgcctctccttccgccggtgccgcggcgcctcatggaagccccggagggcggaggggggcctgcagcgcggggcccggagggcccggcgcccgaagccagggtgcacttccgagtggcgaggttcatcatggaggcaggtgtcaagctagggatgcggtccattcccattgccactgcttgcaccatttaccataagttcttttgcgagaccaacctggacgcctatgacccttacctgattgccatgtcttcaatttacttggccggcaaagtggaagagcagcacctgcggactcgtgacatcatcaatgtgtccaacaggtactttaacccaagcggtgagcccctggaattggactcccgcttctgggaactccgggacagcatcgtgcagtgtgagcttctcatgctgagagttctgcgcttccaggtctccttccagcatccacacaagtacctgctccactacctggtttccctccagaactggctgaaccgccacagctggcagcggacccctgttgccgtcaccgcctgggccctgctgcgggacagctaccatggggcgctgtgcctccgcttccaggcccagcacatcgccgtggcggtgctctacctggccctgcaggtctacggagttgaggtgcccgccgaggtcgaggctgagaagccgtggtggcaggtgtttaatgacgaccttaccaagccaatcattgataatattgtgtctgatctcattcagatttataccatggacacagagatcccctaaggtcctggcccaggcctgcccaaagagaagcccaggatggtcggctgcctggggacattgtcaccacgtcgccatgacggctggtccccacaggaccagctgggaggactggttgtgctgctggagaagggctggagaaggcaatggcatgctgccgctttgccagtccctagaagtcgcggtgcaggtgatggtgggagccgcgcctccagcgggcaggccgggagtgtactgtgtgcagctgacccaaggcagccacatctgcgtttgtcctttgagaggactttgactacaatacaggcatgacatcaatgaaaggaaagtcatgaaatcgatgagactgaatccctacggatttcttaaaagccagatttgtagggagaatgaatgtgcaacgtggctgaaatctattttgtgtaataaaaggtgatacaagtc

SEQ ID NO: 10347 - DNA, 508 bp, Homo sapiens
  source 1..508: mol_type = unassigned DNA
gcggaggggggcctgcagcgcggggcccggagggcagccggcgcccgaagccagggtgcacttccgagtggcgaggttcatcatggaggcaggtgtcaagctagggatgcggtccattcccattgccactgcttgcaccatttaccataagttcttttgcgagaccaacctggacgcctatgacccttacctgattgccatgtcttcaatttacttggccggcaaagtggaagagcagcacctgcggactcgtgacatcatcaatgtgtccaacagatttataccatggacacagagatcccctaaggtcctggcccaggcctgcccaaagagaagcccaggatggtcggctgcctggggacattgtcaccacgtcgccatgacggctggtccccacaggaccagctgggaggactggttgtgctgctggagaagggctggagaaggcaatggcatgctgccgctttgccagtccctagaagtcgcggtgcaggtgatggtgggagcc

SEQ ID NO: 10348 - DNA, 593 bp, Homo sapiens
  source 1..593: mol_type = unassigned DNA
ggccggcaaagtggaagagcagcacctgcggactcgtgacatcatcaatgtgtccaacaggtactttaacccaagcggtgagcccctggaattggactcccgcttctgggaactccgggacagcatcgtgcagtgtgagcttctcatgctgagagttctgcgcttccaggtctccttccagcatccacacaaggtgtttaatgacgaccttaccaagccaatcattgataatattgtgtctgatctcattcagatttataccatggacacagagatcccctaaggtcctggcccaggcctgcccaaagagaagcccaggatggtcggctgcctggggacattgtcaccacgtcgccatgacggctggtccccacaggaccagctgggaggactggttgtgctgctggagaagggctggagaaggcaatggcatgctgccgctttgccagtccctagaagtcgcggtgcaggtgatggtgggagccgcgcctccagcgggcaggccgggagtgtactgtgtgcagctgacccaaggcagccacatctgcgtttgtcctttgagaggactttgactacaatacaggcatgacatc

SEQ ID NO: 10349 - DNA, 573 bp, Homo sapiens
  source 1..573: mol_type = unassigned DNA
caggtactttaacccaagcggtgagcccctggaattggactcccgcttctgggaactccgggacagcatcgtgcagtgtgagcttctcatgctgagagttctgcgcttccaggtctccttccagcatccacacaagaactggctgaaccgccacagctggcagcggacccctgttgccgtcaccgcctgggccctgctgcgggacagctaccatggggcgctgtgcctccgcttccaggcccagcacatcgccgtggcggtgctctacctggccctgcaggtctacggagttgaggtgcccgccgaggtcgaggctgagaagccgtggtggcagatttataccatggacacagagatcccctaaggtcctggcccaggcctgcccaaagagaagcccaggatggtcggctgcctggggacattgtcaccacgtcgccatgacggctggtccccacaggaccagctgggaggactggttgtgctgctggagaagggctggagaaggcaatggcatgctgccgctttgccagtccctagaagtcgcggtgcaggtgatggtgggagccgcgcctc

SEQ ID NO: 10350 - DNA, 5471 bp, Homo sapiens
  source 1..5471: mol_type = unassigned DNA
ccggggtccccttcacccaagtgagccagctcaggctgtctgcaaagccggaggtgcgggcagctccgggcattgcattggtgcggaggcttttatatgccagagaaccctgagtgtgcccctgacatgacaaggagccgtcgtcgttaggactaccgaccagactcccggaaatcatgttggtaggatcccagtctttttcgcctggagggcccaatgggatcattagaagccagtcctttgcgggtttcagcggcctccaggaaaggcgatccaggtgtaactccttcattgaaaattcctccgctctcaagaagcctcaggccaaactgaagaaaatgcacaatttaggccacaaaaacaacaatccccccaaagagcctcagcctaaaagggtggaagaagtctacagggccttgaaaaatggacttgatgaatatctggaggttcaccagacggagctggacaagttgacagctcagttaaaagatatgaaaagaaactctcgcctgggtgtactgtatgacctagacaagcaaattaaaacaattgaaagatacatgagacgcctggagtttcatataagtaaggtagatgaactctatgaagcttattgtatccagcgacgcctccaggatggtgccagcaaaatgaagcaagccttcgcaacatcccctgccagcaaagctgcccgggagagtctgacagagatcaatcggagcttcaaggagtacacagagaatatgtgcaccattgaagtggagctagagaatctgctgggagaattctccatcaagatgaaaggtctggctggctttgcacgcctctgtcctggagatcaatatgaaattttcatgaagtatggccggcagcggtggaaactgaaaggcaaaatagaagtaaatggcaagcagagctgggatggagaagaaacagtttttctgcccctgatagttgggttcatctccatcaaggtcacggagctcaaagggctagcaactcacatcctggtaggtagcgtgacctgtgagaccaaagagctgtttgcagcccgacctcaggtagtggctgtcgacatcaatgaccttggtaccatcaaactgaacctggaaatcacctggtatccatttgacgtggaggacatgaccgcatcctcaggcgctgggaacaaggcagcagcccttcagaggagaatgtccatgtacagccagggtaccccggaaacgcccaccttcaaagaccactccttctttaggtggctgcatccttccccagacaagcccaggcggctgtctgtcttgagtgccttgcaagacactttctttgccaagctgcaccgcagccgctccttcagtgacctgccctccctcaggccgagtcccaaggccgtgctagagctctattcaaatctacctgatgacatctttgaaaatggaaaggcagccgaggagaaaatgccactgtcgctcagcttcagtgacctgcccaacggggactgcgccctcacctcccactcaacaggctccccttccaactcaacaaatccagaaattaccatcacccctgcggagtttaacctcagcagcttggcctcccagaatgagggtatggatgacaccagctcagcatcttccaggaactccctgggagaaggccaagagccaaagtcacacctgaaggaggaagacccagaggagcccagaaaacctgcctcggccccatctgaggcttgccgccgacagtcctcaggtgctggggctgagcacctgttccttgagaatgatgttgcagaagcacttctgcaagagtctgaggaggcctctgagctcaagcctgtggaactggacacttcggaaggaaacatcacaaagcagctggtcaagaggctcacatctgcagaggtgccaatggccacagacaggctgctctctgagggttctgttggtggagaatctgaaggctgcagatcctttctagatggaagcttagaggatgcttttaatgggcttttacttgcattagaaccacataaagagcagtataaagagtttcaggatctgaaccaagaagtcatgaatttggatgatattctaaaatgcaagccagcagtaagccgcagcaggtcttccagtttaagtctcacagttgaaagtgctttagaaagctttgatttcctgaacacctctgattttgacgaggaggaggatggtgatgaggtttgtaatgttggcggaggtgctgactcagtattttcagacactgagactgagaaacacagttacaggtcggttcacccagaagccagggggcatctcagtgaagcgctcactgaagacacaggagttgggaccagtgtggcaggaagtcctctcccactgaccacaggcaacgagagcctggacatcaccatcgtcaggcacctccagtactgcacccaactcgtgcagcaaattgttttctcaagcaaaaccccatttgtggcaagaagtctcttagagaagctttctaggcagatccaagtgatggagaaactcgcagctgtcagtgatgagaacataggaaatatcagttctgttgtggaagccataccagaatttcacaaaaagctgtctttgctgtcattctggaccaagtgctgcagccctgttggtgtctaccacagcccagcggacagagtgatgaagcagctggaggccagctttgccagaactgtcaacaaagaatatccaggacttgcagacccagtgtttcgaaccctggtgtcccaaattctggaccgggctgagcctctgctttcctccagcctgtcctcggaagtcgtcactgttttccagtattacagttacttcaccagccacggcgtcagtgacctggagagttacctgagccagctggccaggcaagtttccatggttcagactctgcaatcactaagagatgaaaaactgctacaaaccatgagtgaccttgctcccagcaacctcctggcccagcaggaagtactcaggactctggctctgctattaaccagagaggacaacgaagttagtgaggctgtgacgctttacttggcagcagcctccaaaaatcagcatttcagggaaaaggccttgctctattactgtgaagcactaacaaagacaaacctccagctccagaaagcagcttgcctggctctgaaaatccttgaggctactgaaagcattaaaatgctggtgacattgtgtcaatctgatactgaagaaatcagaaatgtggcctcagaaaccctcttgtctctgggagaagatgggcggctggcatatgaacaattggacaaatttcctcgagactgtgttaaagtcggaggtcgtcatggaactgaagttgccacagccttttaattacaggttaactgcctaacagctgtcttaatatctggcccttttcatcaggatggtgctgtggtttgggctggaaattgtttagagcctgagagacacgacaactgaaataaaaatgtaggccaggtgcagtggctcatgcctgtaatcccagtactttgggaggccaacgcaggagaattgcttaagcccaggaggttcaagaccaacctgggcaacatagcaaggccctgtctctacaaaaaaaatagtttaattagtcaggcgtggtggcatgcacctgtagtcccagctacttgggaggctaaggtgggaggattgcttgagcccagaagattcaggctgcagtgagccataattgccccactgcactccagactgggtgacagagcaaaaccctgtctcaaaaaacaaaacaacaacaacaactaaaaaaacatgttatagaaagaattcagagtctcgtttcacagtacctatctacttttcctttggccaatatagaatagggctatggtataattcaaatatattacatcgtcgattgtgtctaataatactcagtgaaagagtccatcttatcttaatatgtatgaaatttaaaaatagccatctttgtacttttttgcaagtttctctataagcttgaaatagtcatgtgatacttcgacaaacatcatatgccttgcagtttttctcggtcgtgttctcagggttgagtagtccccttagctacctaactttactttcaatacaaagcacaaaaaagaatatcttcaaataaaagtttgcctgcagaacctggcaaaatgacccattaggagagtttagatgttttaattttatgtgctcccagctactctggagtctgaggtgggaggatcacttgaggcagaggttgcagtaagctgagattacactactgcactccagcccatgtgacagaggaatgagagccagtctcaaaaaaaaaaacaaaaaactcccataatttattttgtttcttttccccatcctgaaaattcccaaatcatgtttccattatggaaaaatgataagtaaatgactaagaactacattaagattatgcctatacacttaaacaaaaaactcaaagcttatgcttttttttttttaattaatgagagctattttttatgatattcttaccataggggtgttttgctgctaagacaaatcaaaaccaaaagctgtagattcacaaacctgtgatgctctttgaggtggaggaacctagaagtcagagaaatcctaatggagtaggagtggaggaacatttaaagtggtccctccttctgtaaaaatgaccgtgggattagaaagaaggacatcctgaggggtggttactgcccccagggaaatcactcactggtaggattccctggccaaatagttcaaacatcaggtcccattattgcttcagtatcagagatgcaagttcattaagcaaagtacaagaccattcagtagctcttattaaaatatcttttcttcctctaaagagtgtacaaggtggggtatgccaaggtatcaaaacaatatatgtgagtgtaatttaaactgtggaatatcaactgtactatggacgtgtttgtatcatttagatgtcattttaaatatttacattttagcaagacttttaaaaaggactcatttcatttcaaagtgcaaattgtttgccaggcttctggcaaatggttctttcaactgtgaacttatcgtgtacatatctgtatatttataaatattatatatattcatacatccttcactttaaaggtacattgtacagtctgtagttaggaggtatagcctatagcttatgttaaatggttgaaatggttctttttatagaaagtcaaacacagatgttacaggattttgtgtttggtttgtcatttttttattttttattttgactattgcatgagtaattaattccagatcttttgtattcacttctgtattttatgtttggttgaggggtgcttttagttgtgtggcatttgtattcattgatctttcagtcatgtaagttaaaataaaaattatttttgaattactagc

SEQ ID NO: 10351 - DNA, 2442 bp, Homo sapiens
  source 1..2442: mol_type = unassigned DNA
cgcaagaatgcatacaaactccagggctgctctctcctggagagggagggaggggatttaaaaacctgcagcaacatgggggaggaggctgtttgtccttctctctctggggaagtaactcgctcaaactgccttccttgctgagctgcttcgcgtagctttgaggaaggtctagtgaaattggtctttccattacatctggatgtactaccagagagttctgctgctgttgttttttttagcttttctttctttgagtctttaaagggcaattgtcgacactctgcaaacataccgatttgttgtctgcccactttggagtcttcaatctgggcagtaactatttaccctttttcctgctagcctgtccccctctctggattgaagtcacctgctaagacaatggactaccgaccagactcccggaaatcatgttggtaggatcccagtctttttcgcctggagggcccaatgggatcattagaagccagtcctttgcgggtttcagcggcctccaggaaaggcgatccaggtgtaactccttcattgaaaattcctccgctctcaagaagcctcaggccaaactgaagaaaatgcacaatttaggccacaaaaacaacaatccccccaaagagcctcagcctaaaagggtggaagaagtctacagggccttgaaaaatggacttgatgaatatctggaggttcaccagacggagctggacaagttgacagctcagttaaaagatatgaaaagaaactctcgcctgggtgtactgtatgacctagacaagcaaattaaaacaattgaaagatacatgagacgcctggagtttcatataagtaaggtagatgaactctatgaagcttattgtatccagcgacgcctccaggatggtgccagcaaaatgaagcaagccttcgcaacatcccctgccagcaaagctgcccgggagagtctgacagagatcaatcggagcttcaaggagtacacagagaatatgtgcaccattgaagtggagctagagaatctgctgggagaattctccatcaagatgaaaggtctggctggctttgcacgcctctgtcctggagatcaatatgaaattttcatgaagtatggccggcagcggtggaaactgaaaggcaaaatagaagtaaatggcaagcagagctgggatggagaagaaacagtttttctgcccctgatagttgggttcatctccatcaaggtcacggagctcaaagggctagcaactcacatcctggtaggtagcgtgacctgtgagaccaaagagctgtttgcagcccgacctcaggtagtggctgtcgacatcaatgaccttggtaccatcaaactgaacctggaaatcacctggtatccatttgacgtggaggacatgaccgcatcctcaggcgctgggaacaaggcagcagcccttcagaggagaatgtccatgtacagccagggtaccccggaaacgcccaccttcaaagaccactccttcttttcaaatctacctgatgacatctttgaaaatggaaaggcagccgaggagaaaatgccactgtcgctcagcttcagtgacctgcccaacggggactgcgccctcacctcccactcaacaggctccccttccaactcaacaaatccagaaattaccatcacccctgcggagtttaacctcagcagcttggcctcccagaatgagggtatggatgacaccagctcagcatcttccaggaactccctgggagaaggccaagagccaaagtcacacctgaaggaggaagacccagaggagcccagaaaacctgcctcggccccatctgaggcttgccgccgacagtcctcaggtgctggggctgagcacctgttccttgagaatgatgttgcagaagcacttctgcaagagtctgaggaggcctctgagctcaagcctgtggaactggacacttcggaaggaaacatcacaaagcagctggtcaagaggctcacatctgcagaggtgccaatggccacagacaggctgctctctgagggttctgttggtggagaatctgaaggctgcagatcctttctagatggaagcttagaggatgcttttaatgggcttttacttgcattagaaccacataaagagcagtataaagagtttcaggatctgaaccaagaagtcatgaatttggatgatattctaaaaaagtagagaagatcctctaatggatcccagtgtgcccatccctcaacctcctcagtgatcaactcatggccaatcttgtttcctattcttcaacctgctgacttccctctggattcttctgcaaccagtcccagatattgtgccattttatccatggttgtacttcttttttggatataaagatttttaaatgcattttttaaatgctaacaaaaaataaaaacttgaaacaaaaaaaaaa

SEQ ID NO: 10352 - DNA, 2407 bp, Homo sapiens
  source 1..2407: mol_type = unassigned DNA
acgtctggacttaacttccaggatagctgcaagacccttttgttcctttgccatgagcaggttttaggccgctctgttgggaccatggtgttaccttcgcgattacactggatcagaaacaggccatggagggacaggatccggaggcgccagctcaaccgactaccgaccagactcccggaaatcatgttggtaggatcccagtctttttcgcctggagggcccaatgggatcattagaagccagtcctttgcgggtttcagcggcctccaggaaaggcgatccaggtgtaactccttcattgaaaattcctccgctctcaagaagcctcaggccaaactgaagaaaatgcacaatttaggccacaaaaacaacaatccccccaaagagcctcagcctaaaagggtggaagaagtctacagggccttgaaaaatggacttgatgaatatctggaggttcaccagacggagctggacaagttgacagctcagttaaaagatatgaaaagaaactctcgcctgggtgtactgtatgacctagacaagcaaattaaaacaattgaaagatacatgagacgcctggagtttcatataagtaaggtagatgaactctatgaagcttattgtatccagcgacgcctccaggatggtgccagcaaaatgaagcaagccttcgcaacatcccctgccagcaaagctgcccgggagagtctgacagagatcaatcggagcttcaaggagtacacagagaatatgtgcaccattgaagtggagctagagaatctgctgggagaattctccatcaagatgaaaggtctggctggctttgcacgcctctgtcctggagatcaatatgaaattttcatgaagtatggccggcagcggtggaaactgaaaggcaaaatagaagtaaatggcaagcagagctgggatggagaagaaacagtttttctgcccctgatagttgggttcatctccatcaaggtcacggagctcaaagggctagcaactcacatcctggtaggtagcgtgacctgtgagaccaaagagctgtttgcagcccgacctcaggtagtggctgtcgacatcaatgaccttggtaccatcaaactgaacctggaaatcacctggtatccatttgacgtggaggacatgaccgcatcctcaggcgctgggaacaaggcagcagcccttcagaggagaatgtccatgtacagccagggtaccccggaaacgcccaccttcaaagaccactccttcttttcaaatctacctgatgacatctttgaaaatggaaaggcagccgaggagaaaatgccactgtcgctcagcttcagtgacctgcccaacggggactgcgccctcacctcccactcaacaggctccccttccaactcaacaaatccagaaattaccatcacccctgcggagtttaacctcagcagcttggcctcccagaatgagggtatggatgacaccagctcagcatcttccaggaactccctgggagaaggccaagagccaaagtcacacctgaaggaggaagacccagaggagcccagaaaacctgcctcggccccatctgaggcttgccgccgacagtcctcaggtgctggggctgagcacctgttccttgagaatgatgttgcagaagcacttctgcaagagtctgaggaggcctctgagctcaagcctgtggaactggacacttcggaaggaaacatcacaaagcagctggtcaagaggctcacatctgcagaggtgccaatggccacagacaggctgctctctgagggttctgttggtggagaatctgaaggctgcagatcctttctagatggaagcttagaggatgcttttaatgggcttttacttgcattagaaccacataaagagcagtataaagagtttcaggatctgaaccaagaagtcatgaatttggatgatattctaaaagatgctaaacaccttgacgatcagaaactaaatggtgctgcctcttggacggagatcactgagggtgaatgagacaactgtgatttaaaagaccgaaagacgttttcccatgtgcttttgtgccatcttgagtgtcagagacagatccctgcaaggcccttcctaccttgcgctaagaaatcagcaaggagtgtcacctaactggatggaggacatttagtgcttctaacttgcagaatttgtcccattcgacccaccccagcatcctcttgaatatttggaaatacttctctccaactctgtgcccatagcaactggcattgttttgcttgtaatgtttctgcatgtggccagcattatagaatgctccaggccagagaatgggattgctcccatgatgccagggcctggtcagggaagtggtgggacttgttccctttgaggcagagct

SEQ ID NO: 10353 - DNA, 3256 bp, Homo sapiens
  source 1..3256: mol_type = unassigned DNA
agtgtgactgctgagactgccggggctgctgcctgctgcttctcgcgcctgtcctctccaagatgcagttttttgatgctgaggagctcctggtcgatgaagaggatgatgtttttggtgaaggactaccgaccagactcccggaaatcatgttggtaggatcccagtctttttcgcctggagggcccaatgggatcattagaagccagtcctttgcgggtttcagcggcctccaggaaaggcgatccaggtgtaactccttcattgaaaattcctccgctctcaagaagcctcaggccaaactgaagaaaatgcacaatttaggccacaaaaacaacaatccccccaaagagcctcagcctaaaagggtggaagaagtctacagggccttgaaaaatggacttgatgaatatctggaggttcaccagacggagctggacaagttgacagctcagttaaaagatatgaaaagaaactctcgcctgggtgtactgtatgacctagacaagcaaattaaaacaattgaaagatacatgagacgcctggagtttcatataagtaaggtagatgaactctatgaagcttattgtatccagcgacgcctccaggatggtgccagcaaaatgaagcaagccttcgcaacatcccctgccagcaaagctgcccgggagagtctgacagagatcaatcggagcttcaaggagtacacagagaatatgtgcaccattgaagtggagctagagaatctgctgggagaattctccatcaagatgaaaggtctggctggctttgcacgcctctgtcctggagatcaatatgaaattttcatgaagtatggccggcagcggtggaaactgaaaggcaaaatagaagtaaatggcaagcagagctgggatggagaagaaacagtttttctgcccctgatagttgggttcatctccatcaaggtcacggagctcaaagggctagcaactcacatcctggtaggtagcgtgacctgtgagaccaaagagctgtttgcagcccgacctcaggtagtggctgtcgacatcaatgaccttggtaccatcaaactgaacctggaaatcacctggtatccatttgacgtggaggacatgaccgcatcctcaggcgctgggaacaaggcagcagcccttcagaggagaatgtccatgtacagccagggtaccccggaaacgcccaccttcaaagaccactccttcttttcaaatctacctgatgacatctttgaaaatggaaaggcagccgaggagaaaatgccactgtcgctcagcttcagtgacctgcccaacggggactgcgccctcacctcccactcaacaggctccccttccaactcaacaaatccagaaattaccatcacccctgcggagtttaacctcagcagcttggcctcccagaatgagggtatggatgacaccagctcagcatcttccaggaactccctgggagaaggccaagagccaaagtcacacctgaaggaggaagacccagaggagcccagaaaacctgcctcggccccatctgaggcttgccgccgacagtcctcaggtgctggggctgagcacctgttccttgagaatgatgttgcagaagcacttctgcaagagtctgaggaggcctctgagctcaagcctgtggaactggacacttcggaaggaaacatcacaaagcagctggtcaagaggctcacatctgcagaggtgccaatggccacagacaggctgctctctgagggttctgttggtggagaatctgaaggctgcagatcctttctagatggaagcttagaggatgcttttaatgggcttttacttgcattagaaccacataaagagcagtataaagagtttcaggatctgaaccaagaagtcatgaatttggatgatattctaaaatgcaagccagcagtaagccgcagcaggtcttccagtttaagtctcacagttgaaagtgctttagaaagctttgatttcctgaacacctctgattttgacgaggaggaggatggtgatgaggtttgtaatgttggcggaggtgctgactcagtattttcagacactgagactgagaaacacagttacaggtcggttcacccagaagccagggggcatctcagtgaagcgctcactgaagacacaggagttgggaccagtgtggcaggaagtcctctcccactgaccacaggcaacgagagcctggacatcaccatcgtcaggcacctccagtactgcacccaactcgtgcagcaaattgttttctcaagcaaaaccccatttgtggcaagaagtctcttagagaagctttctaggcagatccaagtgatggagaaactcgcagctgtcagtgatgagaacataggaaatatcagttctgttgtggaagccataccagaatttcacaaaaagctgtctttgctgtcattctggaccaagtgctgcagccctgttggtgtctaccacagcccagcggacagagtgatgaagcagctggaggccagctttgccagaactgtcaacaaagaatatccaggacttgcagacccagtgtttcgaaccctggtgtcccaaattctggaccgggctgagcctctgctttcctccagcctgtcctcggaagtcgtcactgttttccagtattacagttacttcaccagccacggcgtcagtgacctggagagttacctgagccagctggccaggcaagtttccatggttcagactctgcaatcactaagagatgaaaaactgctacaaaccatgagtgaccttgctcccagcaacctcctggcccagcaggaagtactcaggactctggctctgctattaaccagagaggacaacgaagttagtgaggctgtgacgctttacttggcagcagcctccaaaaatcagcatttcagggaaaaggccttgctctattactgtgaagcactaacaaagacaaacctccagctccagaaagcagcttgcctggctctgaaaatccttgaggctactgaaagcattaaaatgctggtgacattgtgtcaatctgatactgaagaaatcagaaatgtggcctcagaaaccctcttgtctctgggagaagatgggcggctggcatatgaacaattggacaaatttcctcgagactgtgttaaagtcggaggtcgtcatggaactgaagttgccacagccttttaattacaggttaactgcctaacagctgtcttaatatctggcccttttcatca

SEQ ID NO: 10354 - DNA, 2812 bp, Homo sapiens
  source 1..2812: mol_type = unassigned DNA
agggagggaggggatttaaaaacctgcagcaacatgggggaggaggctgtttgtccttctctctctggggaagtaactcgctcaaactgccttccttgctgagctgcttcgcgtagctttgaggaaggtctagtgaaattggtctttccattacatctggatgtactaccagagagttctgctgctgttgttttttttagcttttctttctttgagtctttaaagggcaattgtcgacactctgcaaacataccgatttgttgtctgcccactttggagtcttcaatctgggcagtaactatttaccctttttcctgctagcctgtccccctctctggattgaagtcacctgctaagacaatggactaccgaccagactcccggaaatcatgttggtaggatcccagtctttttcgcctggagggcccaatgggatcattagaagccagtcctttgcgggtttcagcggcctccaggaaaggcgatccaggtgtaactccttcattgaaaattcctccgctctcaagaagcctcaggccaaactgaagaaaatgcacaatttaggccacaaaaacaacaatccccccaaagagcctcagcctaaaagggtggaagaagtctacagggccttgaaaaatggacttgatgaatatctggaggttcaccagacggagctggacaagttgacagctcagttaaaagatatgaaaagaaactctcgcctgggtgtactgtatgacctagacaagcaaattaaaacaattgaaagatacatgagacgcctggagtttcatataagtaaggtagatgaactctatgaagcttattgtatccagcgacgcctccaggatggtgccagcaaaatgaagcaagccttcgcaacatcccctgccagcaaagctgcccgggagagtctgacagagatcaatcggagcttcaaggagtacacagagaatatgtgcaccattgaagtggagctagagaatctgctgggagaattctccatcaagatgaaaggtctggctggctttgcacgcctctgtcctggagatcaatatgaaattttcatgaagtatggccggcagcggtggaaactgaaaggcaaaatagaagtaaatggcaagcagagctgggatggagaagaaacagtttttctgcccctgatagttgggttcatctccatcaaggtcacggagctcaaagggctagcaactcacatcctggtaggtagcgtgacctgtgagaccaaagagctgtttgcagcccgacctcaggtagtggctgtcgacatcaatgaccttggtaccatcaaactgaacctggaaatcacctggtatccatttgacgtggaggacatgaccgcatcctcaggcgctgggaacaaggcagcagcccttcagaggagaatgtccatgtacagccagggtaccccggaaacgcccaccttcaaagaccactccttcttttcaaatctacctgatgacatctttgaaaatggaaaggcagccgaggagaaaatgccactgtcgctcagcttcagtgacctgcccaacggggactgcgccctcacctcccactcaacaggctccccttccaactcaacaaatccagaaattaccatcacccctgcggagtttaacctcagcagcttggcctcccagaatgagggtatggatgacaccagctcagcatcttccaggaactccctgggagaaggccaagagccaaagtcacacctgaaggaggaagacccagaggagcccagaaaacctgcctcggccccatctgaggcttgccgccgacagtcctcaggtgctggggctgagcacctgttccttgagaatgatgttgcagaagcacttctgcaagagtctgaggaggcctctgagctcaagcctgtggaactggacacttcggaaggaaacatcacaaagcagctggtcaagaggctcacatctgcagaggtgccaatggccacagacaggctgctctctgagggttctgttggtggagaatctgaaggctgcagatcctttctagatggaagcttagaggatgcttttaatgggcttttacttgcattagaaccacataaagagcagtataaagagtttcaggatctgaaccaagaagtcatgaatttggatgatattctaaaagatgctaaacaccttgacgatcagaaactaaatggtgctgcctcttggacggagatcactgagggtgaatgagacaactgtgatttaaaagaccgaaagacgttttcccatgtgcttttgtgccatcttgagtgtcagagacagatccctgcaaggcccttcctaccttgcgctaagaaatcagcaaggagtgtcacctaactggatggaggacatttagtgcttctaacttgcagaatttgtcccattcgacccaccccagcatcctcttgaatatttggaaatacttctctccaactctgtgcccatagcaactggcattgttttgcttgtaatgtttctgcatgtggccagcattatagaatgctccaggccagagaatgggattgctcccatgatgccagggcctggtcagggaagtggtgggacttgttccctttgaggcagagctccagaggaagcagggctgcttcttgtcatgcccaaggcattcattctttcctcagtcctcagaggaaaaattatatgctgtgagcaggtgcggtggctcatgcctgtaatcccaacactttgggaagcccaggattgctggagcccaagagttcaagaccggtatggtcaacatagggagaccctgtctctgcaataaaaga

SEQ ID NO: 10355 - DNA, 1985 bp, Homo sapiens
  source 1..1985: mol_type = unassigned DNA
cacatgcagcttgagcattcagtcttctgacctgttccacctctacagggcattttatggcttaaggatgacggcctagaagggaagggagagacttactttggattaaatttacaatgggaaagtgcttaagctgctgcaaagaggaccagagcttccaacgatgttctccagaagatcaagttagtacagacgcccagcatcgtggagcctcttctatttcacaaccaagtatatctcttggtcataaaacatcttattcccctgtaacacataaagtcaatgcagccaaagcaagtagaaggttattatctgtatcaagtccatctttctctgaaagaagatattctttatttgttggatttcaaaaaagaaatgcttccccttactggcaacaaagtagagctaactttgattctgaagaagacacaggcttcactgatataaaatcttcctcagaccattgtggtagctttatttcccgcagaagacgtttctcatcccgtaaactaagtatagtttcctattacaagagtgccattttttttgatcctcaagcaagtggccagaatgtgtttaatctaaatgaaatcgaaatcttttctaaaacttcaagtaatactgatgctaaaaaacatataaccatctctgctcctgaatataacactaaaaattttaagaattttgaaacaaacactacttctccagcctttgggaacactattgatacagcctcctatcaacaaagcacatcatccttcttttctcttgcaagtgatatttcctctcccgatcaacaaaatggaattgccaatgatattcaacaaaggggccaattatgtaaagatttaaaagatttccttcatcctcgtcctgaaagttacagcacaggtcattctccaatcatgattccacagcatccctctcaaagtggaactttcccattcctccataaagctggattttcttcatcttataaaaattctggttgctttatcccacctcaaagcgaattaacttcaggcctgtttgaagatgaagactttgctgtcttgtttcaagatgaagacagatcttcacctattgaaattcctaaaataaggtatattacagctaatactgacacagaagaacagagttttccagtccctaaggcatttaacacacgtgtagaggaattaaatttagatgtccttcttcagaaggtagatcatttacgtatgagtgagtctggcaagtcggagagttttgaactacttcgtgaccacaaagaaaagtttagagatgaaatagagtttatgtggcgatttgctcgtgcttatggagacatgtatgaactatctacaaacacacaagaaaagaaacattatgctaatattggaaaaactttaagtgaaagagctattaatagagcacccatgaatggacattgtcatctgtggtatgcagttttgtgtggctatgtatctgagtttgagggtttacaaaacaaaatcaactatgggcacctcttcaaggaacatctagatatagcaatcaaacttttaccagaggaaccctttctatattacctcaaagggagatactgctatactgtctcaaaactgagctggattgagaaaaaaatggctgctactctgtttggaaaaataccatcttcaactgtacaagaagctttacacaatttccttaaggctgaagaactatgccctggttattctaatcccaattacatgtacttagcaaagtgttatactgatcttgaggaaaaccagaatgctttgaagttctgtaatttggctttattgcttcctactgttaccaaagaggagctgtagtctggaagataaagagcctttggtaccgcaagccctgtcatctgtgagtgtggcacagtgaaggcctggagagtcatgacctaggccctgtgaagtcaagtatttttaccaagtaaaaagattggcaataaaacatttccacatagt

SEQ ID NO: 10356 - DNA, 1381 bp, Homo sapiens
  source 1..1381: mol_type = unassigned DNA
gaccttaggacccgcgggctccagggctactgtccgtccgccactgcgcgccagcaggtcctggtctccgctctccaacagctgaaaggccggcgcagtgaacacagaaacgaaaaccaagaaatgccttattccacaaacaaagagttgatacttggcatcatggtgggcactgctggaatcagcttgctgctcttgtggtaccacaaggtccgtaaaccagggatagcaatgaagttacctgaatttctttctctgggtaatacatttaattcaataactttgcaagatgaaatacatgatgaccaaggaacaacagtaatctttcaagaaaggcaacttcagatactggagaagttaaacgaattactgacaaatatggaagaactcaaagaggaaatcagatttcttaaagaagctattccaaagctggaggaatatatacaagatgaacttggagggaaaataactgttcataagataagccctcagcacagagcgagaaaaagaagactccccacaattcaaagttcagcaacaagtaatagttcagaggaagcagaaagtgaaggagggtatattacagctaatactgacacagaagaacagagttttccagtccctaaggcatttaacacacgtgtagaggaattaaatttagatgtccttcttcagaaggtagatcatttacgtatgagtgagtctggcaagtcggagagttttgaactacttcgtgaccacaaagaaaagtttagagatgaaatagagtttatgtggcgatttgctcgtgcttatggagacatgtatgaactatctacaaacacacaagaaaagaaacattatgctaatattggaaaaactttaagtgaaagagctattaatagagcacccatgaatggacattgtcatctgtggtatgcagttttgtgtggctatgtatctgagtttgagggtttacaaaacaaaatcaactatgggcacctcttcaaggaacatctagatatagcaatcaaacttttaccagaggaaccctttctatattacctcaaagggagatactgctatactgtctcaaaactgagctggattgagaaaaaaatggctgctactctgtttggaaaaataccatcttcaactgtacaagaagctttacacaatttccttaaggctgaagaactatgccctggttattctaatcccaattacatgtacttagcaaagtgttatactgatcttgaggaaaaccagaatgctttgaagttctgtaatttggctttattgcttcctactgttaccaaagaggataaagaggcacagaaagagatgcaaaaaataatgacttccttgaagaggtaaataaacgaatttactcttcaacaaa

SEQ ID NO: 10357 - DNA, 1932 bp, Homo sapiens
  source 1..1932: mol_type = unassigned DNA
tacttcatcaatttttcttttctttttatggactcttttctgttggcaaaaaaaacctgttatttcttgatcttttggcaccattttcgcacttaataatggcgtaatttctcttctatttgttttctatttgcccatctgttcttttttctccttttcctgccttcttttggaccaaaaacgaaaaccaagaaatgccttattccacaaacaaagagttgatacttggcatcatggtgggcactgctggaatcagcttgctgctcttgtggtaccacaaggtccgtaaaccagggatagcaatgaagttacctgaatttctttctctgggtaatacatttaattcaataactttgcaagatgaaatacatgatgaccaaggaacaacagtaatctttcaagaaaggcaacttcagatactggagaagttaaacgaattactgacaaatatggaagaactcaaagaggaaatcagatttcttaaagaagctattccaaagctggaggaatatatacaagatgaacttggagggaaaataactgttcataagataagccctcagcacagagcgagaaaaagaagactccccacaattcaaagttcagcaacaagtaatagttcagaggaagcagaaagtgaaggagggtatattacagctaatactgacacagaagaacagagttttccagtccctaaggcatttaacacacgtgtagaggaattaaatttagatgtccttcttcagaaggtagatcatttacgtatgagtgagtctggcaagtcggagagttttgaactacttcgtgaccacaaagaaaagtttagagatgaaatagagtttatgtggcgatttgctcgtgcttatggagacatgtatgaactatctacaaacacacaagaaaagaaacattatgctaatattggaaaaactttaagtgaaagagctattaatagagcacccatgaatggacattgtcatctgtggtatgcagttttgtgtggctatgtatctgagtttgagggtttacaaaacaaaatcaactatgggcacctcttcaaggaacatctagatatagcaatcaaacttttaccagaggaaccctttctatattacctcaaagggagatactgctatactgtctcaaaactgagctggattgagaaaaaaatggctgctactctgtttggaaaaataccatcttcaactgtacaagaagctttacacaatttccttaaggctgaagaactatgccctggttattctaatcccaattacatgtacttagcaaagtgttatactgatcttgaggaaaaccagaatgctttgaagttctgtaatttggctttattgcttcctactgttaccaaagaggataaagaggcacagaaagagatgcaaaaaataatgacttccttgaagaggtaaataaacgaatttactcttcaacaaatcagatgtggtctaccaaaatttaaatgaatcaaagttgtgcttttattatccttcatttttgatgtaagggtattgtgcttagatttgaaggtaaagccatgtttctgcagaatgcattccactagtagcactacaaaattaattatgttatttggagaatctatatactataatgtcaatacataatctataaacatgtatgctttatatttttcttatcaataaactgcagccttaagaatatttctttaaataaaatatttaaatccaataaaatgaattctcatgaatattttattgtttcaatggagacttcgtaagacaaaataatttcattaatgtggatgaaaaatggaaaactcagcaaaggacatgaacaagttgttggcagaagaggaaaaacaaacaaatgtagtattgtaactggtaatcaaaagatgtgaataaaattacaataaaatactgttttaccatcaaa

SEQ ID NO: 10358 - DNA, 724 bp, Homo sapiens
  source 1..724: mol_type = unassigned DNA
agttacagctttgccaaggtcaatggttgtcactgtccctgagtttctacctttcagataatttttactcatcaaggaatagaaacaaatgtattggaaaggagcaagtgtgacatagtctatgtcctgaacctgaagatcaagtcagtatcagctgccatcttcctcttggaatagactgaaacgaaaaccaagaaatgccttattccacaaacaaagagttgatacttggcatcatggtgggcactgctggaatcagcttgctgctcttgtggtaccacaaggtccgtaaaccagggatagcaatgaagttacctgaatttctttctctgggtaatacatttaattcaataactttgcaagatgaaatacatgatgaccaaggaacaacagtaatctttcaagaaaggcaacttcagatactggagaagttaaacgaattactgacaaatatggaagaactcaaagaggaaatcagatttcttaaagaagctattccaaagctggaggaatatatacaagatgaacttggagggaaaataactgttcataagataagccctcagcacagagcgagaaaaagaagactccccacaattcaaagttcagcaacaagtaatagttcagaggaagcagaaagtgaaggagggtatattacagctaatactgacacagaagaacagagttttccagtccctaaggcatttaacacacgtgtagagga

SEQ ID NO: 10359 - DNA, 1426 bp, Homo sapiens
  source 1..1426: mol_type = unassigned DNA
atgttaactccacatgcagcttgagcattcagtcttctgacctgttccacctctacagggcattttatggcttaaggatgacggcctagaagggaagggagagacttactttggattaaatttacaatgggaaagtgcttaaggtatattacagctaatactgacacagaagaacagagttttccagtccctaaggcatttaacacacgtgtagaggaattaaatttagatgtccttcttcagaaggtagatcatttacgtatgagtgagtctggcaagtcggagagttttgaactacttcgtgaccacaaagaaaagtttagagatgaaatagagtttatgtggcgatttgctcgtgcttatggagacatgtatgaactatctacaaacacacaagaaaagaaacattatgctaatattggaaaaactttaagtgaaagagctattaatagagcacccatgaatggacattgtcatctgtggtatgcagttttgtgtggctatgtatctgagtttgagggtttacaaaacaaaatcaactatgggcacctcttcaaggaacatctagatatagcaatcaaacttttaccagaggaaccctttctatattacctcaaagggagatactgctatactgtctcaaaactgagctggattgagaaaaaaatggctgctactctgtttggaaaaataccatcttcaactgtacaagaagctttacacaatttccttaaggctgaagaactatgccctggttattctaatcccaattacatgtacttagcaaagtgttatactgatcttgaggaaaaccagaatgctttgaagttctgtaatttggctttattgcttcctactgttaccaaagaggataaagaggcacagaaagagatgcaaaaaataatgacttccttgaagaggtaaataaacgaatttactcttcaacaaatcagatgtggtctaccaaaatttaaatgaatcaaagttgtgcttttattatccttcatttttgatgtaagggtattgtgcttagatttgaaggtaaagccatgtttctgcagaatgcattccactagtagcactacaaaattaattatgttatttggagaatctatatactataatgtcaatacataatctataaacatgtatgctttatatttttcttatcaataaactgcagccttaagaatatttctttaaataaaatatttaaatccaataaaatgaattctcatgaatattttattgtttcaatggagacttcgtaagacaaaataatttcattaatgtggatgaaaaatggaaaactcagcaaaggacatgaacaagttgttggcagaagaggaaaaacaaacaaatgtagtattgtaactggtaatcaaaagatgtgaataaaattacaataaaatactgttttaccatc

SEQ ID NO: 10360 - DNA, 582 bp, Homo sapiens
  source 1..582: mol_type = unassigned DNA
agttttgtgtggctatgtatctgagtttgagggtttacaaaacaaaatcaactatgggcacctcttcaaggaacatctagatatagcaatcaaacttttaccagaggaaccctttctatattacctcaaagggagatactgctatactgtctcaaaactgagctggattgagaaaaaaatggctgctactctgtttggaaaaataccatcttcaactgtacaagaagctttacacaatttccttaaggctgaagaactatgccctggttattctaatcccaattacatgtacttagcaaagtgttatactgatcttgaggaaaaccagaatgctttgaagttctgtaatttggctttattgcttcctactgttaccaaagaggataaagaggcacagaaagagatgcaaaaaataatgacttccttgaagagacttcgtaagacaaaataatttcattaatgtggatgaaaaatggaaaactcagcaaaggacatgaacaagttgttggcagaagaggaaaaacaaacaaatgtagtattgtaactggtaatcaaaagatgtgaataaaattacaataaaat

SEQ ID NO: 10361 - DNA, 830 bp, Homo sapiens
  source 1..830: mol_type = unassigned DNA
acatgcagcttgagcattcagtcttctgacctgttccacctctacagggcattttatggcttaaggatgacggcctagaagggaagggagagacttactttggattaaatttacaatgggaaagtgcttaaggtatattacagctaatactgacacagaagaacagagttttccagtccctaaggcatttaacacacgtgtagaggaattaaatttagatgtccttcttcagaaggtagatcatttacgtatgagtgagtctggcaagtcggagagttttgaactacttcgtgaccacaaagaaaagtttagagatgaaatagagtttatgtggcgatttgctcgtgcttatggagacatgtatgaactatctacaaacacacaagaaaagaaacattatgctaatattggaaaaactttaagtgaaagagctattaatagagcacccatgaatggacattgtcatctgtggtatgcagttttgtgtggctatgtatctgagtttgagggtttacaaaacaaaatcaactatgggcacctcttcaaggaacatctagatatagcaatcaaacttttaccagaggaaccctttctatattacctcaaagggagatactgctatactgtctcaaaactgagctggattgagaaaaaaatggctgctactctgtttggaaaaataccatcttcaactgtacaagaagctttacacaatttccttaaggctgaagaactatgccctggttattctaatcccaattacatgtacttagcaaagtgttatactgatcttgaggaaaaccagaatgctttgaagttctgtaatttgg

SEQ ID NO: 10362 - DNA, 3138 bp, Homo sapiens
  source 1..3138: mol_type = unassigned DNA
tgttatcatagtccataaaatcggtctttttagttgccacaattataagaagttgcatacaattacaagagtaaaacagaattataagacagcacgttaggtttaagatttatggccgggtgcggcggctcacgcactttgggagcccgaggcgggcggatcgcactttgagagaccaggagagcgggacccagtctctacaaaataaaaataaaaataaaatgtggggagagcgtgacgttttccaggtacagaggggaggtccaggcagaagcgcaggtagaaagtgtgaatatgctgagcgtattccgggagcagcaagttaagccggtgtgaccggagggaaatggaggcctggctgccggacggtgagggtgactgcgcgagcgtccgcccaagaagtctccctgccttcccgcctttcccctgtcttgggccccttcttgctttcctttcgcgctctgtgctgactccgcccctccggcggcgcccgtggccccgcccctgagggaaacagacaaggggcggggccggcgcggtcatctctctgcgccttcccgcagggcgccgagcacctggcgccgcctgcctgacgtcacggtcactgacagcgtgagcccgcggcggctgctgccatggtggctggcggccgggtaagggtctgagtggatctcctgccaggccagagcgccttcgggggccgcggcggaaggccaggagtttgcagccagggcgccgggtttgtggtctgcagtgtcgtgaggctgaggtgggggttgaaggcccagaagccggactctgtgacccgggtcggggggtgtactggaggggcggctacgtccaggctgggtgagaagagaggcagtggggcccaggaggctggaggaagccttagggttcagactggggtgcacgtagtcgagagctcagggtttgggcaaggggatacctgccggggttcagccttgagggtgggtttaccgggttcacgaatctctctctctccttacccccgcccgcccgcccgcctgcctgctcccggtgacttctgctggccgcaggtgcagcatgtctagactgggagccctgggtggtgcccgtgccgggctgggactgttgctgggtaccgccgccggccttggattcctgtgcctcctttacagccagcgatggaaacggacccagcgtcatggccgcagccagagcctgcccaactccctggactatacgcagacttcagatcccggacgccacgtgatgctcctgcgggctgtcccaggtggggctggagatgcctcagtgctgcccagccttccacgggaaggacaggagaaggtgctggaccgcctggactttgtgctgaccagccttgtggcgctgcggcgggaggtggaggagctgagaagcagcctgcgagggcttgcgggggagattgttggggaggtccgatgccacatggaagagaaccagagagtggctcggcggcgaaggtttccgtttgtccgggagaggagtgactccactggctccagctctgtctacttcacggcctcctcgggagccacgttcacagatgctgagagtgaagggggttacacaacagccaatgcggagtctgacaatgagcgggactctgacaaagaaagtgaggacggggaagatgaagtgagctgtgagactgtgaagatggggagaaaggattctcttgacttggaggaagaggcagcttcaggtgcctccagtgccctggaggctggaggttcctcaggcttggaggatgtgctgcccctcctgcagcaggccgacgagctgcacaggggtgatgagcaaggcaagcgggagggcttccagctgctgctcaacaacaagctggtgtatggaagccggcaggactttctctggcgcctggcccgagcctacagtgacatgtgtgagctcactgaggaggtgagcgagaagaagtcatatgccctagatggaaaagaagaagcagaggctgctctggagaagggggatgagagtgctgactgtcacctgtggtatgcggtgctttgtggtcagctggctgagcatgagagcatccagaggcgcatccagagtggctttagcttcaaggagcatgtggacaaagccattgctctccagccagaaaaccccatggctcactttcttcttggcaggtggtgctatcaggtctctcacctgagctggctagaaaaaaaaactgctacagccttgcttgaaagccctctcagtgccactgtggaagatgccctccagagcttcctaaaggctgaagaactacagccaggattttccaaagcaggaagggtatatatttccaagtgctacagagaactagggaaaaactctgaagctagatggtggatgaagttggccctggagctgccagatgtcacgaaggaggatttggctatccagaaggacctggaagaactggaagtcattttacgagactaaccacgtttcactggccttcatgacttgatgccactatttaaggtgggggggcggggaggcttttttccttagaccttgctgagatcaggaaaccacacaaatctgtctcctgggtctgactgctacccactaccactccccattagttaatttattctaacctctaacctaatctagaattggggcagtactcatggcttccgtttctgttgttctctcccttgagtaatctcttaaaaaaatcaagattcacacctgccccaggattacacatgggtagagcctgcaagacctgagaccttccaattgctggtgaggtggatgaacttcaaagctataggaacaaagcacataacttgtcactttaatctttttcactgactaataggactcagtacatatagtcttaagatcataccttacctaccaaggtaaaaagagggatcagagtggcccacagacattgctttcttatcacctatcatgtgaattctacctgtattcctgggctggaccacttgataacttccagtgtcctggcagcttttggaatgacagcagtggtatggggtttatgatgctataaaacaatgtctgaaaagttgcctagaatatattttgttacaaacttgaaataaaccaaatttgatgttatca

SEQ ID NO: 10363 - DNA, 2251 bp, Homo sapiens
  source 1..2251: mol_type = unassigned DNA
gacgtcacggtcactgacagcgtgagcccgcggcggctgctgccatggtggctggcggccgggtaagggtctgagtggatctcctgccaggccagagcgccttcgggggccgcggcggaaggccaggagtttgcagccagggcgccgggtttgtggtctgcagtgtcgtgaggctgaggtgcagcatgtctagactgggagccctgggtggtgcccgtgccgggctgggactgttgctgggtaccgccgccggccttggattcctgtgcctcctttacagccagcgatggaaacggacccagcgtcatggccgcagccagagcctgcccaactccctggactatacgcagacttcagatcccggacgccacgtgatgctcctgcgggctgtcccaggtggggctggagatgcctcagtgctgcccagccttccacgggaaggacaggagaaggtgctggaccgcctggactttgtgctgaccagccttgtggcgctgcggcgggaggtggaggagctgagaagcagcctgcgagggcttgcgggggagattgttggggaggtccgatgccacatggaagagaaccagagagtggctcggcggcgaaggtttccgtttgtccgggagaggagtgactccactggctccagctctgtctacttcacggcctcctcgggagccacgttcacagatgctgagagtgaagggggttacacaacagccaatgcggagtctgacaatgagcgggactctgacaaagaaagtgaggacggggaagatgaagtgagctgtgagactgtgaagatggggagaaaggattctcttgacttggaggaagaggcagcttcaggtgcctccagtgccctggaggctggaggttcctcaggcttggaggatgtgctgcccctcctgcagcaggccgacgagctgcacaggggtgatgagcaaggcaagcgggagggcttccagctgctgctcaacaacaagctggtgtatggaagccggcaggactttctctggcgcctggcccgagcctacagtgacatgtgtgagctcactgaggaggtgagcgagaagaagtcatatgccctagatggaaaagaagaagcagaggctgctctggagaagggggatgagagtgctgactgtcacctgtggtatgcggtgctttgtggtcagctggctgagcatgagagcatccagaggcgcatccagagtggctttagcttcaaggagcatgtggacaaagccattgctctccagccagaaaaccccatggctcactttcttcttggcaggtggtgctatcaggtctctcacctgagctggctagaaaaaaaaactgctacagccttgcttgaaagccctctcagtgccactgtggaagatgccctccagagcttcctaaaggctgaagaactacagccaggattttccaaagcaggaagggtatatatttccaagtgctacagagaactagggaaaaactctgaagctagatggtggatgaagttggccctggagctgccagatgtcacgaaggaggatttggctatccagaaggacctggaagaactggaagtcattttacgagactaaccacgtttcactggccttcatgacttgatgccactatttaaggtgggggggcggggaggcttttttccttagaccttgctgagatcaggaaaccacacaaatctgtctcctgggtctgactgctacccactaccactccccattagttaatttattctaacctctaacctaatctagaattggggcagtactcatggcttccgtttctgttgttctctcccttgagtaatctcttaaaaaaatcaagattcacacctgccccaggattacacatgggtagagcctgcaagacctgagaccttccaattgctggtgaggtggatgaacttcaaagctataggaacaaagcacataacttgtcactttaatctttttcactgactaataggactcagtacatatagtcttaagatcataccttacctaccaaggtaaaaagagggatcagagtggcccacagacattgctttcttatcacctatcatgtgaattctacctgtattcctgggctggaccacttgataacttccagtgtcctggcagcttttggaatgacagcagtggtatggggtttatgatgctataaaacaatgtctgaaaagttgcctagaatatattttgttacaaacttgaaataaaccaaatttgatgtt

SEQ ID NO: 10364 - DNA, 2139 bp, Homo sapiens
  source 1..2139: mol_type = unassigned DNA
tgacagcgtgagcccgcggcggctgctgccatggtggctggcggccgggtaagggtctgagtggatctcctgccaggccagagcgccttcgggggccgcggcggaaggccaggagtttgcagccagggcgccgggtttgtggtctgcagtgtcgtgaggctgaggtgcagcatgtctagactgggagccctgggtggtgcccgtgccgggctgggactgttgctgggactatacgcagacttcagatcccggacgccacgtgatgctcctgcgggctgtcccaggtggggctggagatgcctcagtgctgcccagccttccacgggaaggacaggagaaggtgctggaccgcctggactttgtgctgaccagccttgtggcgctgcggcgggaggtggaggagctgagaagcagcctgcgagggcttgcgggggagattgttggggaggtccgatgccacatggaagagaaccagagagtggctcggcggcgaaggtttccgtttgtccgggagaggagtgactccactggctccagctctgtctacttcacggcctcctcgggagccacgttcacagatgctgagagtgaagggggttacacaacagccaatgcggagtctgacaatgagcgggactctgacaaagaaagtgaggacggggaagatgaagtgagctgtgagactgtgaagatggggagaaaggattctcttgacttggaggaagaggcagcttcaggtgcctccagtgccctggaggctggaggttcctcaggcttggaggatgtgctgcccctcctgcagcaggccgacgagctgcacaggggtgatgagcaaggcaagcgggagggcttccagctgctgctcaacaacaagctggtgtatggaagccggcaggactttctctggcgcctggcccgagcctacagtgacatgtgtgagctcactgaggaggtgagcgagaagaagtcatatgccctagatggaaaagaagaagcagaggctgctctggagaagggggatgagagtgctgactgtcacctgtggtatgcggtgctttgtggtcagctggctgagcatgagagcatccagaggcgcatccagagtggctttagcttcaaggagcatgtggacaaagccattgctctccagccagaaaaccccatggctcactttcttcttggcaggtggtgctatcaggtctctcacctgagctggctagaaaaaaaaactgctacagccttgcttgaaagccctctcagtgccactgtggaagatgccctccagagcttcctaaaggctgaagaactacagccaggattttccaaagcaggaagggtatatatttccaagtgctacagagaactagggaaaaactctgaagctagatggtggatgaagttggccctggagctgccagatgtcacgaaggaggatttggctatccagaaggacctggaagaactggaagtcattttacgagactaaccacgtttcactggccttcatgacttgatgccactatttaaggtgggggggcggggaggcttttttccttagaccttgctgagatcaggaaaccacacaaatctgtctcctgggtctgactgctacccactaccactccccattagttaatttattctaacctctaacctaatctagaattggggcagtactcatggcttccgtttctgttgttctctcccttgagtaatctcttaaaaaaatcaagattcacacctgccccaggattacacatgggtagagcctgcaagacctgagaccttccaattgctggtgaggtggatgaacttcaaagctataggaacaaagcacataacttgtcactttaatctttttcactgactaataggactcagtacatatagtcttaagatcataccttacctaccaaggtaaaaagagggatcagagtggcccacagacattgctttcttatcacctatcatgtgaattctacctgtattcctgggctggaccacttgataacttccagtgtcctggcagcttttggaatgacagcagtggtatggggtttatgatgctataaaacaatgtctgaaaagttgcctagaatatattttgttacaaacttgaaataaaccaaatttgatgtt

SEQ ID NO: 10365 - DNA, 1008 bp, Homo sapiens
  source 1..1008: mol_type = unassigned DNA
agacaaggggcggggccggcgcggtcatctctctgcgccttcccgcagggcgccgagcacctggcgccgcctgcctgacgtcacggtcactgacagcgtgagcccgcggcggctgctgccatggtggctggcggccgggtgcagcatgtctagactgggagccctgggtggtgcccgtgccgggctgggactgttgctgggtaccgccgccggccttggattcctgtgcctcctttacagccagcgatggaaacggacccagcgtcatggccgcagccagagcctgcccaactccctggactatacgcagacttcagatcccggacgccacgtgatgctcctgcgggctgtcccaggtggggctggagatgcctcagtgctgcccagccttccacgggaaggacaggagaaggtgctggaccgcctggactttgtgctgaccagccttgtggcgctgcggcgggaggtggaggagctgagaagcagcctgcgagggcttgcgggggagattgttggggaggtccgatgccacatggaagagaaccagagagtggctcggcggcgaaggtttccgtttgtccgggagaggagtgactccactggctccagctctgtctacttcacggcctcctcgggagccacgttcacagatgctgagagtgaagggggttacacaacagccaatgcggagtctgacaatgagcgggactctgacaaagaaagtgaggacggggaagatgaagtgagctgtgagactgtgaagatggggagaaaggattctcttgacttggaggaagaggcagcttcaggtgcctccagtgccctggaggctggaggttcctcaggcttggaggatgtgctgcccctcctgcagcaggccgacgagctgcacaggggtgatgagcaaggcaagcgggagggcttccagctgctgctcaacaacaagctggtgtatggaagccggcaggactttctctggcgcctggcccgagcctacagtgacatgtg

SEQ ID NO: 10366 - DNA, 3063 bp, Homo sapiens
  source 1..3063: mol_type = unassigned DNA
aaaccatgggggcggaagaggtgctgggcaggaggcggaagaggtgctgtgcaggaggcgggcgggcgcggttctttccggaaggattgaatctcctttagccccgcccgcctccgtagctgcctgaagtagtgcagggtcagcccgcaagttgcaggtcatggcgctggctgctcgactgtggcgccttctgcctttccgacgtggagccgccccggggtctcgtctccctgcggggacttcgggcagccgcgggcattgcggcccctgtcgattccgcggcttcgaggtaatgggaaacccaggaactttcaaaagaggccttttactctcagctttgtcgtatttgggttttgaaacttaccaggttatctctcaggctgctgtggttcatgccacagccaaagttgaagaaatacttgaacaagcagactacctgtatgaaagcggagaaacagaaaaactttatcagttgctaacccaatacaaggaaagtgaagatgcagagttactgtggcgtttggcacgggcatcacgtgatgtagctcagcttagcagaacctcagaagaggagaaaaagctattggtgtatgaagccctagagtatgcaaaaagagcactagaaaaaaatgaatcaagttttgcatctcataagtggtatgcaatctgccttagtgatgttggagattatgaaggcatcaaggctaaaattgcaaatgcatatatcatcaaggagcattttgagaaagcaattgaactgaaccctaaagatgctacttcaattcaccttatgggtatttggtgctatacatttgccgaaatgccttggtatcaaagaagaattgctaaaatgctgtttgcaactcctcctagttccacctatgagaaggccttaggctactttcacagggcagaacaagtggatccaaacttctacagcaaaaacttacttcttttaggaaagacatacttgaaactacacaacaaaaagcttgctgctttctggctaatgaaagccaaggactatccagcacacacagaggaggataaacagatacagacagaagctgctcagttgcttacaagtttcagtgagaagaattgagaacttttcagagaagatttatgaaatagctaataaacattgccttttcttttaattctaaacttaatatatgaactataactgttctacggctttttaaatgttgtgaccatttaaccgtgtaaatataaaatattctaggcttcttcacaaataatagggtaaaataaataatcgccataagagtggtagaaataaatctccatggctcaggcaaagagattattttgcatcctggataccagcaatgcaaaatggtatgagatttctaaggattgatcacattgggatgggagatcaagcaaagaaatatttgtagaggaggggaaatggatctataggggatatacagggggatggattttcaaattggattgattctaagttgaaatcttgaagagaaggtgtggtgacagtggttaggatgttgtgggttcctgacataaagtagttaaatgatatatcttggagctaacctgtgtaagtaaagaactaagtaaggagatgactaaaaatggagtagtttccttttttatttttttgagacagagtctcactttgtttcccaggctggtgtgcagtggcacaatctcggcccactgcagcctccgcctcccgggttcaagtgattctcctgccttagcctcctgagtggctgggattacagggttgtaccaccacactcggctaacttttgtatttttggtagagatggggttttgccatgttggctaggctggtctcaaactcctggcctcaagtgatctgcccgccttggcctcccaaattgctgggattacaggcgtgagccaccgcacctggccagtttactttaaatgtggtgtagtctcatggtaaactgaatttgtcatcagatgcaaagttctattccctaatggaatggaaggaacacaaaacttaagagtgaaatggaatactaagatgtttttaaataggcaggactatgctactcacttgaggctggagtgccaccactgcaaaatctttttaagttttgtaaaaaggagcatcttgaatccacttagataaagacagactgtgtgtgtaggtggatttttcccaaaggatttgggaattgtaatgttacaatgaactgtatggatatgtttgtcatgtacattttcaaacaaaaaggaaaactgaaagtagtgatctttgtatacccatctcttagattcagtgattttgctatataggttgtgtatcccttatctgaaatacttgggactagtagaagcatcttggatttgggatgtttttccaaattttggaatacctgcatacacacaataagatatcttggagatgggacccaagtttaaacacaaattcacttgtttcatatataccttatgcacatagcttgaaggtaactttatataacattatttttaataattttgtgcattgagaccaagtttgcataccttgaaccatcagaaagcaaaggtgtcattatctcagccactcatgtgggtaatttgtggttggttgatgtcaccatcattcctgactgaatgtatatgctaccaataagcagttattttcttatacttattcatgcataagtacttaacagtaaaaaatatgacataactcgcacaggaacaaggatggcaaaaaaaaaaatatgacacaccactgatacagtgaaaaaataatgtggtcagggtagctaggcaacagtagcatcaccagaaacctgtatcagctgttaaacggcaacaacaatggcaggctttcagtttcccacttaatgatgctgtattttaaaaggttattgtatactgtaattttatttttgtaggtgaagagaaacagaagcagctgaagggccaggaagtgggtctttctagggatgtggcattctgctggatggctttttaaaatgggttttttcctttagggagaccgaataaactgtgttgtgcacctgc

SEQ ID NO: 10367 - DNA, 1106 bp, Homo sapiens
  source 1..1106: mol_type = unassigned DNA
gcccgcctccgtagctgcctgaagtagtgcagggtcagcccgcaagttgcaggtcatggcgctggctgctcgactgtggcgccttctgcctttccgacgtggagccgccccggggtctcgtctccctgcggggacttcgggcagccgcgggcattgcggcccctgtcgattccgcggcttcgaggtaatgggaaacccaggaactttcaaaagaggccttttactctcagctttgtcgtatttgggttttgaaacttaccaggttatctctcaggctgctgtggttcatgccacagccaaagttgaagaaatacttgaacaagcagactacctgtatgaaagcggagaaacagaaaaactttatcagttgctaacccaatacaaggaaagtgaagatgcagagttactgtggcgtttggcacgggcatcacgtgatgtagctcagcttagcagaacctcagaagaggagaaaaagctattggtgtatgaagccctagagtatgcaaaaagagcactagaaaaaaatgaatcaagttttgcatctcataagaaagcaattgaactgaaccctaaagatgctacttcaattcaccttatgggtatttggtgctatacatttgccgaaatgccttggtatcaaagaagaattgctaaaatgctgtttgcaactcctcctagttccacctatgagaaggccttaggctactttcacagggcagaacaagtggatccaaacttctacagcaaaaacttacttcttttaggaaagacatacttgaaactacacaacaaaaagcttgctgctttctggctaatgaaagccaaggactatccagcacacacagaggaggataaacagatacagacagaagctgctcagttgcttacaagtttcagtgagaagaattgagaacttttcagagaagatttatgaaatagctaataaacattgccttttcttttaattctaaacttaatatatgaactataactgttctacggctttttaaatgttgtgaccatttaaccgtgtaaatataaaatattctaggcttcttcacaaataatagggtaaaataaataatcgccataagagtggtagaaat

SEQ ID NO: 10368 - DNA, 5654 bp, Homo sapiens
  source 1..5654: mol_type = unassigned DNA
ggccgggcgggccgcggcagggagtggctgccggaccgaccggaccgcgaggccgctgggcggcggtcggctcctgctgcccctgtgccgagaccccgcgcacctggccaggcccctggccccaacatggcccgtcgctctcagagctcctcgcagggggacaacccactggcacccgggtacctgccgcctcactacaaagagtactaccgcctggcggtggatgcactggccgagggtggctcggaggcctacagccgcttcctcgctaccgagggggcaccagacttcctgtgccctgaagagctggaacatgtgagccgacaccttcggcctccgcagtatgttacccgagagccacctgaaggcagccttctcgacgtggacatggatggctcctcgggtacatactggccagtgaactcagaccaggccgtgcctgagcttgatttgggctggcctctgaccttcggcttccagggcaccgaggtgaccaccttggtgcagccaccgccccccgacagccccagtatcaaggatgaggcccgcaggatgatccgttccgcccagcaggtggtggccgtggtgatggacatgttcactgatgtggacctgctcagcgaagtgctggaggccgcggcccgtcgggtcccagtctacatcctgctggatgagatgaacgcgcagcacttcctggacatggccgacaagtgccgtgtcaacctgcagcacgtggatttcctgcgcgtacggactgtggcgggccccacctactactgccgcactgggaagtccttcaagggccacgtcaaggagaagttcctgctggtggactgtgccgtggtgatgagtgggagctacagcttcatgtggtcctttgagaagatccaccgcagcctggcgcacgtgttccaaggagagctggtctccagcttcgacgaggagttccgcatcctcttcgcgcagtccgagccgcttgtgccctcggccgcggccctggcccgcatggacgcctatgccctggctccgtatgccggggccgggcctctcgtgggcgtccctggggtcggggcgccaacccccttctccttccctaaacgagcgcacctcctgttcccgccaccccgggaagagggcctgggcttcccctccttcctcgacccggaccgccacttcctgtcggccttccgccgggaggagccgccgcggatgccggggggcgcgctggaaccgcacgcggggctgcggccgctctcgcggcgcctggaggccgaggccgggccggctggggagctcgcgggcgcgcggggcttcttccaggcgcggcacctggagatggacgccttcaagcggcacagcttcgcgaccgagggcgcgggcgccgtggagaacttcgcggccgcgcggcaggtgtcgcggcagacgttcctcagccacggcgacgacttccgcttccagaccagccacttccaccgtgaccagctctaccagcagcagtaccagtgggacccgcagctcacgccggcgcgcccgcaaggcctgttcgagaagcttcgcgggggccgcgcgggtttcgcggacccggatgacttcaccctgggcgccgggccccgcttcccggagctcggacccgacgggcaccagcggctggactacgtgccgtccagcgcgtcccgcgaggtgcgccacggctcggaccccgccttcgcgcccggaccccgcggcctggagcccagcggagccccgcgccccaacctgacccagcgcttcccatgccaggccgcggcgaggccgggcccagaccccgctcccgaggcggagccggagcgcaggggcgggcccgaggggcgggcagggctgcggcgctggcgtttggcctcctacttgagcggctgccacggcgaggatgggggcgacgacggcctaccggcgcccatggaagcggaggcttacgaagacgacgtgctggctcccgggggccgggcacctgccggcgacctgctcccctcggccttccgcgtcccagcagccttccccaccaaggtcccggtgccaggcccgggcagcggcggcaacggcccagagcgcgagggcccggaggagcctggcctggccaagcaggactcattccgctcgcgcctgaaccccctggtccagcgcagctccaggctgcgctcctcgctcatcttcagcacgtcacaggccgagggcgcggccggggctgcggcggccactgagaaggtgcagctgctgcacaaggagcagacggtcagcgagacgctggggcccggcggagaggccgtgcgctccgcggcttccaccaaggtggcggagctgctggagaagtacaagggcccagcccgtgatcccggcggcggcgcgggcgccatcaccgttgccagccacagcaaggccgtcgtgtcccaggcgtggcgggaagaggtggcggccccaggtgccgtggggggcgagcgccgcagcctcgagagctgcctgctggacctgcgcgactcctttgcacagcagctgcaccaggaggcggagcggcagccgggagccgcgtcgctcaccgcggcgcagctgctcgacacactgggccggagcggctccgaccgcctgccttcccgcttcctctctgcccagagccactcaacgtccccgcaagggctggacagccctctgccgctggaagggtccggagcgcaccaggtgctccataatgagtcaaaagggagccccacctcggcttaccctgagcggaaggggagccccacgcctgggttttccactcgaagaggaagtccaactacaggatttatcgagcagaaggggagccccacctcagcctaccccgagcgcaggggtagtccggtgccccccgtgccggagcgcaggagcagtccggtgccccccgtgccggagcgcaggggcagcctcacccttaccatctccggggagtccccgaaggccgggcccgcggaggaggggccgagcggccccatggaagtcctgcgcaaaggctccttgcgtcttaggcagctgctgagccccaagggcgagcggcgcatggaggatgagggtggcttcccagtgccgcaggagaacggccaacccgagagcccgcggcgtctgtcactgggccagggtgacagcacggaggctgccacagaagagcggggtccgcgggcgcgcctgtcctcagccacggccaacgccttgtacagcagcaaccttcgggatgacacgaaggccattctggagcagatcagtgcccacggccagaagcaccgtgcggtccctgccccgagccccggcccgacccacaacagccccgagctaggccgtccaccggctgctggcgtcctggccccagatatgtccgacaaggacaagtgttcagccatcttccgctcggacagcttggggacccagggccggctgagccgcacgctgccagccagcgcggaggagcgcgatcggctgctgcgccgcatggagagcatgcgcaaggagaagcgcgtgtacagccgcttcgaggtcttctgcaagaaagaggaggccagcagccctggggcaggggaaggccccgcggaggagggcaccagggacagcaaggtgggcaagttcgtgcccaagatcctgggcacgttcaaaagcaagaagtgagtcttctggcctggcaacccaggccagggtgcccgcatcgctgccccggtcatccagaagccccgcggaacagagagccctgctcatctgcttgagcagcggctgtcaggccacggccgcttggggcttggctgagtgcgccagacctcggctccactggaggctcacctggcagctgccgtctctgccccctggcctccccaacgctggggctgcacccctcgccaccagtgcctttctcccctcagcaccttcatctctgcaccgtcagccttgcgtggcgcagcgtctggctccgccatctctttgtgcctcagtcccccccgccccctttatttttttgagacctagggctggagtgcagttgagcggtctgggctcactgcaacctctgcctcccgggttccagcgattctcctgcctcagcctcctgagtagctgggattacagatgtatgctaccacgcccaggtagtttttgtatttttagtagagacagggtttcactatgttggccaggctggtctccaactcctggcctcaaatgatcagcccgcttcagcctcccaaagtggggggattacaggcgtgagccttgcaccccgctaagtcccctatcctcttgcaagggtctcgcctctgtgcctcaattcctcattctctgggcccttctcctcctcagggcctcctgttctcagggcctcccccctccccgctccctccctctctcaaggtctcctccttccctcccccccccccccccccgtctcccccctcccccgcctgggcttcacttcctttcctacttggattctcctgctcgctgcctcccagcatcttttttggaggcccgtctcttgctgtggggaagactgggctggctgcgggcagtttgcaaggggtgggtggggcaggggggggggagctggaccagaagatgccccttggagtggcaaggaagctggacagggcaggcctctggggacgggacacagggaagcccgaaggggcgccttggccaggtctgccatctcctccagcgaggctctggccagcactgggtgagagtggggagggggcattggcctttgcagcacagtaaaacatggtccagacaacctgtggccccggcctcatgagcaccccctgcacaggcccggcccaagccaggcgctagaagggctggttgtggagtgcttatccttgacaggtatggggccaggtgagggcaggggacaaggtgcagctgaggccgagcccaactaggtcctgggcacccctgcaggtgggagtggtccttgtcctcctggtatccagcagacacccccctctccccaccagccccattctcaggtcctttcctctttgtcaccaacaccaagaatctgtccagggttcttggcttatcttttatctcttttcactcctagagaggaattgcaattgactcagaatgacacattttggcaccacgtgtgtagaaagcccccactgttagatgatagcctcgtgaaattcatgtttctgtattctcctatttcttttcaaaaactaattttttttttagtgtaataaatcctaagagggaactgatttaagaaacaaggccgccaaacaaaggcagcagttccgactccagcagctgggaaaggaaggaaagtgaccccactttcactcctgcacagcccactggttaccaaaaccaccgtgcaagtcgggatgacagcagggacttctggccaggtgggaaaggtgcctggaagcgggatgcgcctgtgcgtctcttggccatgatgttcttgtgggcatgttattcttggtgctgcctggggtgttgctgagcggacaggctctccagctggagtccatggagaggccagaggctggcggccctgcctgggccttcggagcctcctgcctgcaccctccacctcttctaaaccatgatgtggcacattttggtgttaataaaacacaacacacaaagta

SEQ ID NO: 10369 - DNA, 5404 bp, Homo sapiens
  source 1..5404: mol_type = unassigned DNA
ttgttgctcgcccggcccaagcgggagctgttgccgccaggctgcgaggctgccgtcctctcctcctcgcgccccacctcccccgagagctggctgaggaggggcagcagccccagctggcgggaggaagcgcggtgtgaacagggattgccccccgccttcaagtatcggggcgctacgcagccgcgggggaaagacatgcccctagtctgcccgctgcgctgccctctgcccagcctcgctgccgcccgcgccgggagaggagggactgccgagcctacaccttcaaactcgccctagaagtctcggggcgcggcagggagcccttccccaggccccacggccttcacctctccgcgggtagcctcagcccctgtccggggacctgtgcaaatgaccctggagttggtttcgctttctccccttgcggcggtgtgaacgtgtgtccgcagcgtgatgggcaaccaggtggagaaattgacccacctaagttacaaggaagttcccacggccgacccgactggcgtggaccgggacgacgggccccgcattggggtctcctacattttctccaatgacgatgaggacgtggagccgcagccgccgcctcaggggccagatggcggcggcttgcccgacggtggggacgggccgccgccgccccagccgcagccctacgatccgcggctgcacgaggtggaatgctccgtgttctaccgggacgaatgcatctaccagaagagcttcgcgccgggctcggcggcgctgagtacctacacgcccgagaacctgctcaacaagtgcaagccgggcgatctggtggagttcgtgtcgcaggctcagtacccgcactgggccgtatatgtgggtaacttccaggtggtgcacctgcaccggctggaggtgattaacagcttcctgactgacgccagccagggccgtcgcggccgcgtggtcaacgatctgtaccgctacaagccgctaagctccagcgccgtggtgcgcaacgcgctggcgcacgtgggtgccaaggagcgcgagctgagctggcgcaactcggagagtttcgccgcctggtgccgctacggcaagcgcgagttcaagatcggcggcgagctgcgcatcggcaagcagccctaccggctgcagattcagctgtcggcgcagcgcagccacacgctcgagttccagagtctagaggacctgatcatggagaagcgacgcaacgaccagatcgggcgcgcggccgtgctgcaggagctcgccacgcacctgcacccggcggagccggaggagggcgacagcaacgtggcgcggactacgccgcctcccgggcgcccccctgcgcccagctccgaggaggaggacggagaggcagtggcacactgatgggcgagctgagcgcagagctgcgaaggggaactgtttgcagtagcagccgctgctccctttctccctctcttcctccctcttttgccactgtctgggccccatctgggattcctgggccctttggaaaagagttggtgaaatgcgcagccggctgtggacgggggaggaggaaggggacagagggagcaggtaggaaacactttagttgggggtggggggcgtctccctctggccccctgtctgtcttcctctccgcggtggagcaaactgtggacttgcctggcacttaaaccttggtagatctgggtttataatcggccattcttaagcacgtggggttgggggaaagttcggagtacccattcctgccgttgcttcctatcctgggcttggaagaatcctggtagaaaggccagagtgggtttgtggagtcgccactgcgggaccagcacgaaagctgcttgtctgctttggcggagctgagctgtgtatgggatccaggaggctggggtgatttattttatgggattcctggagcgcagggctggtgaatccatgacaaggtccgggagcagcagaccaaaaccacagcagcctcctattaagtgtaacaaatagttaagcaaactcgggctacaaacaaagactttgctacctccctcctccacaacccccaagtaattagccttctggagctggctcttagctgaggctcctgctacctcctgctccacccgccccttcctaggttacaagtaaatcattgtcaagggccagccaggggaaggtttcaattaaggttctgttctgctgcctttgtttctcccctgctgttgtaggcacttacagctgcgttgttatgaaaggagggaatagccctttgtgtctttgatctaattaaacctgcttggctgtgtttatccgcagggcaggtcacagatagggttggctgtgccactccataaagtatctattgtggaagcagccaaaaagggctgctgtggcaggaattggttaatttctccttccacttcccttcctgaatagtgaagggagcccttttaaaacaaggctttggtggtaatcctgtgatttttttttctcccccatcccctcactggcccatccctctcaccctcacttttgttctgctggtgggtaaaatcttaggctgaacacatatttcaatggtaagatacttattttgctatccacacttgatgcaattgaattcaaggtgcaaagtcttgtactgaagcagtctccttgttgcttggagaacacctccttcagagccctttgttaaataagaggggcgacgttgatcatagatgccacctggttagcaccgaatctgactttggtgacagtcctaaagcacagttggtgattgtgagatctgttagcggcaggctgagcagatactacttggttttgcttggtatgagatactactgtttgcttagtatgagattttttccagcctgtctcttaaactcctgtgacatcttcaatgatatgtgccctcagttgcagcatagcttctctgctgcctattgccattgctgtctcaaaagttgagtgaattttgaggcgtctttttttttttttcctctcttgggagtcgttgtaaactactgtgtacaagtcattttgtgatatgattctgaacagttggaatagaatcatagttaagtggtacagccatggctatcgtcaggcctgttgcctggagatctctaagttaaggcaacaagacttaaagaattttctaatacacttgtttcacacatggacgttgaggccatagtctttaaaagcttggacctttgtagcacctcaacatgaaagggcattagctatgtttcctgtttttacagtgatcaccaaacagatcttgccactttgattgttaaaaatgaaccacattctagccctggtctgggactttggagggagatgaatttcttgttggaaatgtaaatctagtgtccatatttaatactctcacagctttgtgtttattctctttgctcatggaatagcagaacaagataaacatgggttaagacatttaggagaacctgctgtatctaacccagttggattttctttcatgcttaacacagtagtgaaaatagaaggtaggccgggcacagtggctcatgcctgtaatcccagcactttgggaggctgaggcaggtagatcacctgaagttaggagttcgagaccagcctggccaacatggcgaaaccctgtctctaccacaaatacagaaaattagctgggcgtggtggcaggcgcctgtaatgcctgctacttgggagcctgaggcagaagaattgcttgaagctgggaagcagaggttgcagtgagccgagatcgcaccactgcactccagcctgggcagcagagcaagtagtaataaccaccgtgtagacaagtgggagggaagaatagaatggcactgtccagctctgggctagccagatcaactcccccacccgtcttcttcctctgtcccagaatggaaaatgatgtatggtcagtcacgctgaagtatagcagcgactgtgttaagagagagcagtgactctctcttctagagaagaggttttcaataacagggcttggaaatgaactagaataggaaatagatcttttcagatgctgctttcccatgtaatacaagcgtttctacagggtaccagaggtgtgaaatatgtgacacttaagaacagtgatttttattgggaattttcttagggttattacacttaaagcaacaaccaactagtaacagctccaggaaaggggaatgaatcaactcttggttctttcctgaagacggcagtgttgtggataagtgagtttttaatgccctggcagtggctacatttgacactttagaaaaaataaacatatttaataatttttgtttctccttaggaataagactgtagaactgttttgtactgtgaattacggatgctctttgaaggaaagaaatatcgattctaatgttcttcagaagttctggcagggataagcaggacatcgactggaacgtatgctaaatgaaagcagacaaatttctattttcttacctgagcaaatattttattgaaactgcttatgtatgtcaaaggagcccacaacttcagctacacaactttttgtattgaaagaactcatactttttgtagcttttatttcacatttaatttaaagtgacttttagcactaaaatgcctagaagattttactccagacctataaggaaatgtttagtttttatgaaaaatgacaagtcgatggttaaacttctcatgtctttggtgctttggccctaatagcactggacaacaccacgaccacatggaaacatatttttggaagcaaaactttaattttatataacgtatgctatggagagctaagacaatttaaggactacttgttttctattttttttcttaataaaatggaatccactgtgttgaagactcttgatatcatgtgcttgtctaaccattttttgttttataaattagaataaaatatagttgtgataatggtcatcgaatggatttgtttggaaagctacatcttatttgtgaaatgttttttaaatcagagtaactatcaactgattcagctttttgttgttttgttcttggctataatacttgtgactcatgaagaattatgttgacaaacaggataaattccacatgcattttatttcccagtgagttgtataaactttatttttgttgaaggttgtatgttaaatcaatgttacattcttatatcacttcttgagaaggaagttccgatttgaaattgtatcatttccttcaaaatgaagggcagtgcttagttaaataaaagattgatgatatcttttaagccatttcctcttcactatgtcttattaaaataaaacctgtcaagttcttttcaaaagatgctatgagcgtttccaataaaccatctattagagttcac

SEQ ID NO: 10370 - DNA, 1519 bp, Homo sapiens
  source 1..1519: mol_type = unassigned DNA
catttttctaagagagcgtcgtggtgccagtgcctgcaggttctgtgaggaagcggcatcaggggtccctcaggttcagggatcgcctctaacttcccaggacagccaaccatggagcccgtgggcaggaagcgcagcaggaaggctgccaaagctcagttggaagctcaagttacggccgcccagggggccacgaaagaaggttcagggatcgcctctaacttcccaggacagccaaccatggagcccgtgggcaggaagcgcagcaggaaggctgccaaagctcagttggaagctcaagttagggccgccccggcgaagaagcacacaggaaaggatccagtccgtgatgaatgtgaggaaagaaacccttttacagaaacaagggaggaagatgtaactgatgagcatggggaaagagaaccttttgctgaaaaagatgaacacacggggattcataccatgaagctagaacatattgcagctgacattaaaaagggccttgctgcaaaaagagaaatgataaaaatagataaagcagcttacaggaaaaccaagaacacaattgaacgtgctttgaaaaaaaaacaactaaaaaggcagaaacgtgattatagacatactcggaagttgctgaatgtccttaaagaatacatcgcagagaagcagaaagatgatgaagcagaagaagcagaagccgcagcagcagcagcagaagccgcagcagcagcagaagccgcagcagcagcagcagaagtaatagtagtagaagacgaagaggaggaagagaaggaggaggaggaggagaaagaagaggaggaagaagaaggagaagaagaaggaggaggagaagaaggagaagaaggaggaggaggaggagaaggagaagaaacagaagaagaggaagaggaagaagaagaagaggaagaggaagaacaaattaaagcatttcaagaaaaacagaagaggtggcaacaacctacaggtgttaggagctggaggctgagagagatgaagccgctacttgagcaattactaaaggctgccaaggacactaaagacaattattgcatcatttcttccagtgaagaaagtgaacttgataactagccgtgtttttaaaaagaatcgtgtcagaactcttttggaagagttggcacttcattgtctcttcaacctctgttattctgatgactgaagaaagaacttgaacctatgttatatgatacgagcacaacttgagctacagtaaactacatgacagtgttttgataattgttgtataaatcggtatagctcctctgtcacttgtctgttaaatgccagacctcgtttctatgatctgttgaatgaatcctagacacttctgtgagaaggcagggattgcacagttatgtacatggtcaattaaattttaacattaaagataatttagatttcagttcacctctgtggatctgtatcagtttcaaaaacgtagaaagcacgggcatagaaaagtacatttttctctaataaa

SEQ ID NO: 10371 - DNA, 1544 bp, Homo sapiens
  source 1..1544: mol_type = unassigned DNA
gaggaagcggcatcaggggtccctcaggtgaagcgctcgcggtggggaggcaggaagtcgagcatgcggccctctcgcaaccagggtgtgaagcgcaggttcagggatcgcctctaacttcccaggacagccaaccatggagcccgtgggcaggaagcgcagcaggaaggctgccaaagctcagttggaagctcaagttacggccgcccagggggccacgaaagaaggttcagggatcgcctctaacttcccaggacagccaaccatggagcccgtgggcaggaagcgcagcaggaaggctgccaaagctcagttggaagctcaagttagggccgccccggcgaagaagcacacaggaaaggatccagtccgtgatgaatgtgaggaaagaaacccttttacagaaacaagggaggaagatgtaactgatgagcatggggaaagagaaccttttgctgaaaaagatgaacacacggggattcataccatgaagctagaacatattgcagctgacattaaaaagggccttgctgcaaaaagagaaatgataaaaatagataaagcagcttacaggaaaaccaagaacacaattgaacgtgctttgaaaaaaaaacaactaaaaaggcagaaacgtgattatagacatactcggaagttgctgaatgtccttaaagaatacatcgcagagaagcagaaagatgatgaagcagaagaagcagaagccgcagcagcagcagcagaagccgcagcagcagcagaagccgcagcagcagcagcagaagtaatagtagtagaagacgaagaggaggaagagaaggaggaggaggaggagaaagaagaggaggaagaagaaggagaagaagaaggaggaggagaagaaggagaagaaggaggaggaggaggagaaggagaagaaacagaagaagaggaagaggaagaagaagaagaggaagaggaagaacaaattaaagcatttcaagaaaaacagaagaggtggcaacaacctacaggtgttaggagctggaggctgagagagatgaagccgctacttgagcaattactaaaggctgccaaggacactaaagacaattattgcatcatttcttccagtgaagaaagtgaacttgataactagccgtgtttttaaaaagaatcgtgtcagaactcttttggaagagttggcacttcattgtctcttcaacctctgttattctgatgactgaagaaagaacttgaacctatgttatatgatacgagcacaacttgagctacagtaaactacatgacagtgttttgataattgttgtataaatcggtatagctcctctgtcacttgtctgttaaatgccagacctcgtttctatgatctgttgaatgaatcctagacacttctgtgagaaggcagggattgcacagttatgtacatggtcaattaaattttaacattaaagataatttagatttcagttcacctctgtggatctgtatcagtttcaaaaacgtagaaagcacgggcatagaaaagtacatttttctctaataaa

SEQ ID NO: 10372 - DNA, 1340 bp, Homo sapiens
  source 1..1340: mol_type = unassigned DNA
aggaagtcctgcctgcagctctcacgagaactgaggacccgttttctttacttttctttttttttgtttttttgttttgttttttttgggacggagtctggctcttgctgcctaggctgcagtgcagtggtgtgatctgggctcactgcaacctccgcctcctgggttcaagcaattctcctgcctcagcttcctgagaggacccgttttctaagaggtcctagtggtgccgctgcctgcaggttctttgagggcgccacatcaggggtccctcaggttcggggatcgcctctagcttcccaggacaaccagccacggatcctgtgggcaggagggctgccaaggcccagttggaggctcaatttatggcggcctgggggaagaagcatgcaggaaaggatccagtccgtgatgaatgtgaggaaagaaaccgttttacagaaacaagggaggaagatgtaactgatgagcatggggaaagagaaccttttgctgaaacagatgaacacacgggggctaataccaagaagccagaagatactgcagaggatcttactgcaaaaagaaaaaggatgaaaatggataaaacttgcagcaaaacaaagaacaaaagtaaacatgctttgagaaaaaagcaacttaaaaggcagaaacgtgattatatacattctctgaagttgctaaatgtccttgaagaatacatcacagacgagcagaaagaggaagaagaagaagagggagaagaggaagaactaattagaatatttcaagaacaacagaagaagtggcaacaatatagaagtgttaggagagagaggctgaaagagatgaagctgctacgtgaccaattcgtaaaggctcttgaggactttgaagacctttgtgacagagttttttccgatgaagacagtgaacttgataactagacatgtttttaaataaaatcatgtcagaactcttttggaaaagttggcacttacccagttgtctcttcaacctctgttattctgatgactgaagaaagaacttgaacctatgttatatgatacaagcacaacttgagctacagtaaactacatgacagtgttttgataattgttgtataaatcggtatagctcctctgtcactcgtctgttaaatgccagacctcgtttctatgatctgttgaatgaatcctagacacttctgtgagaaagcagggattgcatagttatgtacacggtcaattaaattttaacattaaagataatttagatttcgatttggcctctgtggatttgtatcagttccaaaaatgtagaaagcacaggcatagaaaagtacatttttctctaataaa

SEQ ID NO: 10373 - DNA, 2047 bp, Homo sapiens
  source 1..2047: mol_type = unassigned DNA
gcagaggccgtggagttcaggtgtgaggggcagctgtgagctttgcagccagccccggggacgggctggacgggccaggacaggaggggacactggcatcttttccgtcccttcctgctcccacatgagacccagggcgggccagccccacccttcttgaacctgtgatcccaatggctttcctttccgatgccaggtttccttagcttccttagtgtgtctttgcgctcaccaggttcggggatcgcctctagcttcccaggacaaccagccacggatcctgtgggcaggagggctgccaaggcccagttggaggctcaatttatggcggcctgggggaagaagcatgcaggaaaggatccagtccgtgatgaatgtgaggaaagaaaccgttttacagaaacaagggaggaagatgtaactgatgagcatggggaaagagaaccttttgctgaaacagatgaacacacgggggctaataccaagaagccagaagatactgcagttggtgcaaataatttcaaaaactatcctgtacatattggcgtctctagtgaacaacatattttacttgattgttctctaagtaggcagaaacgtgattatatacattctctgaagttgctaaatgtccttgaagaatacatcacagacgagcagaaagaggaagaagaagaagagggagaagaggaagaactaattagaatatttcaagaacaacagaagaagtggcaacaatatagaagtgttaggagagagaggctgaaagagatgaagctgctacgtgaccaattcgtaaaggctcttgaggactttgaagacctttgtgacagagttttttccgatgaagacagtgaacttgataactagacatgtttttaaataaaatcatgtcagaactcttttggaaaagttggcacttacccagttgtctcttcaacctctgttattctgatgactgaagaaagaacttgaacctatgttatatgatacaagcacaacttgagctacagtaaactacatgacagtgttttgataattgttgtataaatcggtatagctcctctgtcactcgtctgttaaatgccagacctcgtttctatgatctgttgaatgaatcctagacacttctgtgagaaagcagggattgcatagttatgtacacggtcaattaaattttaacattaaagataatttagatttcgatttggcctctgtggatttgtatcagttccaaaaatgtagaaagcacaggcatagaaaagtacatttttctctaataaaagaagacaatatctgctgggtgtggtggctcacgcctgtaatcccagcactttgggaggccgaggggagtggatcacttgaggtcaggagtttgagaccagcctggccaacatggtgaaaccccatctctgctaaaaataccaaaattacccgggcgtggtggcacgcacgtgtagttccagctactcaggaagctgaggcaggaggatctcttgaacccgggagttggaggttgcagtaagccaagattgtgccactgcactccagcctgggcgacagagcaagactctttctcagaaaacaagaagaagaagacaaaagctatcttatctgtgcgttcttttgtatttactcattaggataaagaggcaattccaatgaaagtaggacttcaaaaaatagatatactctatggccatatcaaaattattaaaagcaccttactgtctgtgttcttaaaaaaaattatactgctgtaaatgattaaggcaactgagcaagatatattaatatcagtgctgagccactggtttgtgggtatgtcatttccacagacatcaaaatgctatttagtttgttttggtccatcattcaatgatacctccccttagaattgaatgaaagcattttgttaacatttatgtatgcttacaattatttcacatctgtggcaaggtaaattttgtagagtgctttgtttatccagtttaatattcgtggattatgtggaagtttatatggacatctaaaaacttgaatgatg

SEQ ID NO: 10374 - DNA, 1064 bp, Homo sapiens
  source 1..1064: mol_type = unassigned DNA
gttcggggatcgcctctagcttcccaggacaaccagccacggatcctgtgggcaggagggctgccaaggcccagttggaggctcaatttatggcggcctgggggaagaagcatgcaggaaaggatccagtccgtgatgaatgtgaggaaagaaaccgttttacagaaacaagggaggaagatgtaactgatgagcatggggaaagagaaccttttgctgaaacagatgaacacacgggggctaataccaagaagccagaagatactgcagaggatcttactgcaaaaagaaaaaggatgaaaatggataaaacttgcagcaaaacaaagaacaaaagtaaacatgctttgagaaaaaagcaacttaaaaggcagaaacgtgattatatacattctctgaagttgctaaatgtccttgaagaatacatcacagacgagcagaaagaggaagaagaagaagagggagaagaggaagaactaattagaatatttcaagaacaacagaagaagtggcaacaatatagaagtgttaggagagagaggctgaaagagatgaagctgctacgtgaccaattcgtaaaggctcttgaggactttgaagacctttgtgacagagttttttccgatgaagacagtgaacttgataactagacatgtttttaaataaaatcatgtcagaactcttttggaaaagttggcacttacccagttgtctcttcaacctctgttattctgatgactgaagaaagaacttgaacctatgttatatgatacaagcacaacttgagctacagtaaactacatgacagtgttttgataattgttgtataaatcggtatagctcctctgtcactcgtctgttaaatgccagacctcgtttctatgatctgttgaatgaatcctagacacttctgtgagaaagcagggattgcatagttatgtacacggtcaattaaattttaacattaaagataatttagatttcgatttggcctctgtggatttgtatcagttccaaaaatgtagaaagcacaggcatagaaaagtacatttttctctaataaa

SEQ ID NO: 10375 - DNA, 3361 bp, Homo sapiens
  source 1..3361: mol_type = unassigned DNA
gaggagcttcgcggtgccagcctctgcaggtcctctgagggagcaacatcagggctccctcaggttcagaggtcgcctctagcttcccaggccagtcagccacggagcccgtgggcaggaagggcagcaggatggctgccaaggaccagttggaggttcaagttatggccgcccaggaaatggagcttgcaggaaaggatccagtaagtcatgagcatgaggaaagaaaacctgttacagagacaaaggagggagatgtaactgatgagcatggggaaagaggatcttttgctgaaacagatgaacacacgggggttgataccaaggagctagaagatattgcagctgacattaaagagcatcttgctgcaaagagaaaaaggattgaaaagattgcaaaagcttgcagcgaaataaagaacagaattaaaaatgttttgagaacaacacaactaaaaaggcagaaacgtgattatagaatttctctgaagttgccgaatgtccttgaagagttcatcacagatgagcagaaagatgaggaaggagatggagaaaaggaagaacaaattaaaatatttcaagagcaacaaaagaggtggcaacaagatgggaaaggaactgaaagagattgagccaccacacgagcaattcacaaaggtctgttctatttggtaacacaatacgttcttataaaatacaacacatgcataaaaatagaagacaatctgcttgtttctgaatgtatggaaagacattttggttatacattttaaattacttaccattttcactttgaatgtgttgttccagatttaacataagtagtaaataacataaaataacataaaacagtatttttaggattcatgaatagttttgtaggagttatttagaacaggaaaaggtaaattggaaattttacctagaaatatacatcttgtgtataaaaattgataccttatgaacacattaatgaagactttattttcagtttttaggagatcagcgacaaatctttagtggaaggcagaaagtccataagtcctttctggatgtcttttttacttgtgttgtttcaagagttttagttaaataggaagtaggcaaatgtaactactgagtatctcttttgttttctgctgtaatgtaggagtgttttatggcatattcactttcaaaattattagtgactagtaatggttttacatgacaatttgtaatcataagagatggttcagatgtataacagaatgggaaagccagcagattattaacatgttgtgaattgtgaattatctgctgtcgtacagcacattagcaaattgtcatcggacaatgaccgcttcttcatgtagatgtatattatttaggaagcaatggaattcccttctgggaggtaagatattctttttaataaccttgtggaaagacatgttcatatgtcactcctctacactaactgagatgtgttaaataaactgggaaaagagtttgaaaatagaattttcaagcaactcaaagattatctatacacaaaacggttatttatatagaagtcacaagtagagaacatgttgctataatgttccccagaaaccatttattaattggtatgaacatgagactagaaaagttttcctgtcaatgttaatgctacatgttaccacttagggtaggaacttcggtatcatcttggactcttctgagtccattatctttcacatacagttttcatgaggcaagttttactctgcaatggtccttaaatttcttttttttaaattgccactgaggcaaccctagttcaagaactcattcttccttgcttgtactattaaactcttttctgagttctctcttctcttctgagccacccttcattgatcagaaatactatcttcctaaaactcttcccttcctaaaatgcttctagcccttcactcttcccagcctatcagtggtatccacatgtcagttcttagatattcagagactctcccctttacatgaccccctcttaggcttgttttactgccttctgtctttcttcccgcctctccaggttgacagccttctctgaacgacctctccattactctcatgctttgctcatgctcttccctcacaatgcttttaaagtccttttttttttttgatcgattgaaatcttttgccaactaagtggacatcagtctccatttttggctacatgtccgagtgagttgctcttccacagcagttacataagttttgtattattttttttattcgtgcatatttgctcatgtcacaggaatatggaagagattgtgtattcattttttacatcttcctcagcattaacataccactttttagggagtaggaactgttgaactatttgttgagagaatagtatatatttcaaacatagttatgttttctctaacttgatgaggtcatgtcacagaccattttatcccttcagtggaaaccatgttatgtcgactattagtgataacaaatgggtcactatctggtgaaaaaatatggtatttcatgatctaagactaccagtctttttctgtttttgctccatcttgaccataacatattcatcaaaccattttcttcaagcaaagtacatgactgttggacctgctataataatatttcactaaaatctggcattaaaaattttaagtatttggagctccatgtactgattacagtttttaaatttgaaataaatgaccagcatcctttgaatattaaaagctgtttccttttgacatttaatttactctctttaaaatgtgagttgtaaagtgatggtttgtcagtgaactagactttttgttttagagtgtgaggacttggaagagtataatgaaagccctctttttggtgaagagagtcaacttaaaaaataaattgccatgttccaaaataatattgtggtaattgtaagtagtgcatattttatcttaaaaactcaggattgatgtaagcactggaatattttatttgtagaaatgtgtatcgcaattacttaaatttatttttttgaaacagctgcagcaagagttggcacttattcagatgtatcttcaacctctgttattctggtgactgacaaaagaacttgaacctatgttatatgatacatgcataacttgagctacactaaaccacatgacagtgtttagttaattcttgtataaattagtatatctcttctattattagtctgtttgttaaatgccagaccacgtttctatgatctgttgaatgaaccctagacagttctgtgagaaagcagcaattgcacagttacatacacagtcaattaaattttaacattaaagataatttagtttta

SEQ ID NO: 10376 - DNA, 1122 bp, Homo sapiens
  source 1..1122: mol_type = unassigned DNA
ctgggccgaccaatcagcgaggagcgcgggcagccggggcggctgctgctctcgtgagaacagaggacccaggccctcggaggagcttcgcggtgccagcctctgcaggtcctctgagggagcaacatcagggctccctcaggttcagaggtcgcctctagcttcccaggccagtcagccacggagcccgtgggcaggaagggcagcaggatggctgccaaggaccagttggaggttcaagttatggccgcccaggaaatggagcttgcaggaaaggatccagtaagtcatgagcatgaggaaagaaaacctgttacagagacaaaggagggagatgtaactgatgagcatggggaaagaggatcttttgctgaaacagatgaacacacgggggttgataccaaggagctagaagatattgcagctgacattaaagagcatcttgctgcaaagagaaaaaggattgaaaagattgcaaaagcttgcagcgaaataaagaacagaattaaaaatgttttgagaacaacacaactaaaaaggcagaaacgtgattatagaatttctctgaagttgccgaatgtccttgaagagttcatcacagatgagcagaaagatgaggaaggagatggagaaaaggaagaacaaattaaaatatttcaagagcaacaaaagaggtggcaacaagatgggaaaggaactgaaagagattgagccaccacacgagcaattcacaaagctgcagcaagagttggcacttattcagatgtatcttcaacctctgttattctggtgactgacaaaagaacttgaacctatgttatatgatacatgcataacttgagctacactaaaccacatgacagtgtttagttaattcttgtataaattagtatatctcttctattattagtctgtttgttaaatgccagaccacgtttctatgatctgttgaatgaaccctagacagttctgtgagaaagcagcaattgcacagttacatacacagtcaattaaattttaacattaaagataatttagttttaggtttggcctctgtggatctgtatcagttccaaaatgtggaaagcacgggcatggaaaagtacatttttctctaataaa

SEQ ID NO: 10377 - DNA, 472 bp, Homo sapiens
  source 1..472: mol_type = unassigned DNA
gagatgtaactgatgagcatggggaaagaggatcttttgctgaaacagatgaacacacgggggttgataccaaggagctagaagatattgcagctgacattaaagagcatcttgctgcaaagagaaaaaggattgaaaagattgcaaaagcttgcagcgaaataaagaacagaattaaaaatgttttgagaacaacacaactaaaaaggcagaaacgtgattatagaatttctctgaagttgccgaatgtccttgaagagttcatcacagatgagcagaaagatgaggaaggagatggagaaaaggaagaacaaattaaaatatttcaagagcaacaaaagaggtggcaacaagatgggaaaggaactgaaagagattgagccaccacacgagcaattcacaaaggtctgttctatttggtaacacaatacgttcttataaaatacaacacatgcataaaaatagaagacaa

SEQ ID NO: 10378 - DNA, 5858 bp, Homo sapiens
  source 1..5858: mol_type = unassigned DNA
actgggccgaccaatcagcgaggagcgcgggcagccggggcggctgctgctctcgtgagaacagaggacccaggccctcggaggagcttcgcggtgccagcctctgcaggtcctctgagggagcaacatcagggctccctcaggttcagaggtcgcctctagcttcccaggccagtcagccacggagcccgtgggcaggaagggcagcaggatggctgccaaggaccagttggaggttcaagttatggccgcccaggaaatggagcttgcaggaaaggatccagtaagtcatgagcatgaggaaagaaaacctgttacagagacaaaggagggagatgtaactgatgagcatggggaaagaggatcttttgctgaaacagatgaacacacgggggttgataccaaggagctagaagatattgcaggtatgttttacgagctatttgtggtttatgaaaattgttttcaaccatacaacccttacagtaggttatatgaattagtggatgacaagactgtcttaaatgccttcttctcatatatagcatttaatgtaatctgtttaataatttttcttacttacttttttaattgttgatgtggaatgtgagaatgcttctaataatggtgaagcaagaggggtggcttttctttcatacacgtggaaatttaattgtttgggggatattagaggacattggaggagaaacagctctattcgttcctttcagtgtacacacattaagtcatatatcaggtttttttttagcttttactttatgtttgggggtacatgtgcaggttcgttatatagataaattgcgtgtcacaggggtttggtatacagattattttgtcacccagattataagcatcgtacctgatgggtggttttccatcctcaccttcctcctaccctccaacctcaagtaggcccaggtgtgtgttgttcacctcttcctgtccgtatgtactcagtttttaatatgagtttttcatcttcctaatttagctattgtcacaactttctaattttgttttctttaaagtaccagagaaaattgaattctctaaaatgatgattttctattattattccagtaacaagctgtgtagtagaaaaggaaagacaacttttctacccagtgagaagcatacaattggatccaaaaactcataaactttatattgccatgtgaaatattagttgcactgttatgggaccatattttcaaaaaagtttgagaaaatttctgtagagattatgaagacaatactcttatttttaaaaagcttactttagttttcagctcttctatagcgataattcatataagcagtatatttggaaagctttgctctgcttggtggtgacaaagtgccggttttgtctaatacaatgagcattatagatggatactgtatgtaaaaaaatttgtattatggtgcagctcttttatgattgctcaaaactattctcagcaattgatggtagatctctcatgtgaaaccatgtttaggaaagcattccttgcagtattacagttttctgaaacactgcactgtggataaaaatgtcatataaaaagctctcagaaaatatttcaaatgtgttttgaatgtatttatctatttaaacctaaatgtttacacccatggacattgcttcttttattaaaatatagttaatagcatcaactattgattaaaaatactttctttattgtgtattaagttatttctacccttttgatggtcttattaaatcagatacttttttgtgctttacataatgagttgtgacagtatttcacggaaacatgtcctttgaattgtaggacattttataaatgtagaaattaaagtctgtggctgggcacggttgctcacacctgtaatcccagcactttgggaggccgaggtgggtggatcacgaggtcaggagatcaagaccatcctggctaacacggtgaaaccccgtctccactaaaaatataaaaattagccgggcgtggtggcgggcgcctgtagtcccagctactcgggaggctaaggcaggagaatggcgtgaacccgggaggcggaggctgcagtgagccaagatcgtgccacagcactccagcctgggtgacagagcgagactctgtctcaaaaaaaaaaaaaaagaaattaaagtctgtgtttgtaaccctttctgcacacttaaaaaatagaaacttttaattatttgctttttttcattatctgtcaattaagtgatttgctgttataccaactgaaattggaatactaatacctgaaaggttttacataaagtaagtaaatcttgctttttgaaatgatctttgcattttacattttaaatgtccttctgatattgctgaaccatcaagtcccatattgattttaatatatgcaaagaaactacttttcaacatgaacatttaatgcatattcatttactatctagctgacattaaagagcatcttgctgcaaagagaaaaaggattgaaaagattgcaaaagcttgcagcgaaataaagaacagaattaaaaatgttttgagaacaacacaactaaaaaggtatgattgttggcttttttgaataatgatatttatatcatttctttgtattcattggtgcaaataatttccagaactatcctgtacatattggtgtctctagggaacaacatattttacttgattgttccctaaacaggtaagtttctttagttttataacctcaatttaacagaattgagagatattacctagaagccaatgaagatgacctctttttgccttccagataaaaagtcttcctgtaaaattaatgtttatccatttctagaaatacggcagaaacgtgattatagaatttctctgaagttgccgaatgtccttgaagagttcatcacagatgagcagaaagatgaggaaggagatggagaaaaggaagaacaaattaaaatatttcaagagcaacaaaagaggtggcaacaagatgggaaaggaactgaaagagattgagccaccacacgagcaattcacaaaggtctgttctatttggtaacacaatacgttcttataaaatacaacacatgcataaaaatagaagacaatctgcttgtttctgaatgtatggaaagacattttggttatacattttaaattacttaccattttcactttgaatgtgttgttccagatttaacataagtagtaaataacataaaataacataaaacagtatttttaggattcatgaatagttttgtaggagttatttagaacaggaaaaggtaaattggaaattttacctagaaatatacatcttgtgtataaaaattgataccttatgaacacattaatgaagactttattttcagtttttaggagatcagcgacaaatctttagtggaaggcagaaagtccataagtcctttctggatgtcttttttacttgtgttgtttcaagagttttagttaaataggaagtaggcaaatgtaactactgagtatctcttttgttttctgctgtaatgtaggagtgttttatggcatattcactttcaaaattattagtgactagtaatggttttacatgacaatttgtaatcataagagatggttcagatgtataacagaatgggaaagccagcagattattaacatgttgtgaattgtgaattatctgctgtcgtacagcacattagcaaattgtcatcggacaatgaccgcttcttcatgtagatgtatattatttaggaagcaatggaattcccttctgggaggtaagatattctttttaataaccttgtggaaagacatgttcatatgtcactcctctacactaactgagatgtgttaaataaactgggaaaagagtttgaaaatagaattttcaagcaactcaaagattatctatacacaaaacggttatttatatagaagtcacaagtagagaacatgttgctataatgttccccagaaaccatttattaattggtatgaacatgagactagaaaagttttcctgtcaatgttaatgctacatgttaccacttagggtaggaacttcggtatcatcttggactcttctgagtccattatctttcacatacagttttcatgaggcaagttttactctgcaatggtccttaaatttcttttttttaaattgccactgaggcaaccctagttcaagaactcattcttccttgcttgtactattaaactcttttctgagttctctcttctcttctgagccacccttcattgatcagaaatactatcttcctaaaactcttcccttcctaaaatgcttctagcccttcactcttcccagcctatcagtggtatccacatgtcagttcttagatattcagagactctcccctttacatgaccccctcttaggcttgttttactgccttctgtctttcttcccgcctctccaggttgacagccttctctgaacgacctctccattactctcatgctttgctcatgctcttccctcacaatgcttttaaagtccttttttttttttgatcgattgaaatcttttgccaactaagtggacatcagtctccatttttggctacatgtccgagtgagttgctcttccacagcagttacataagttttgtattattttttttattcgtgcatatttgctcatgtcacaggaatatggaagagattgtgtattcattttttacatcttcctcagcattaacataccactttttagggagtaggaactgttgaactatttgttgagagaatagtatatatttcaaacatagttatgttttctctaacttgatgaggtcatgtcacagaccattttatcccttcagtggaaaccatgttatgtcgactattagtgataacaaatgggtcactatctggtgaaaaaatatggtatttcatgatctaagactaccagtctttttctgtttttgctccatcttgaccataacatattcatcaaaccattttcttcaagcaaagtacatgactgttggacctgctataataatatttcactaaaatctggcattaaaaattttaagtatttggagctccatgtactgattacagtttttaaatttgaaataaatgaccagcatcctttgaatattaaaagctgtttccttttgacatttaatttactctctttaaaatgtgagttgtaaagtgatggtttgtcagtgaactagactttttgttttagagtgtgaggacttggaagagtataatgaaagccctctttttggtgaagagagtcaacttaaaaaataaattgccatgttccaaaataatattgtggtaattgtaagtagtgcatattttatcttaaaaactcaggattgatgtaagcactggaatattttatttgtagaaatgtgtatcgcaattacttaaatttatttttttgaaacagctgcagcaagagttggcacttattcagatgtatcttcaacctctgttattctggtgactgacaaaagaacttgaacctatgttatatgatacatgcataacttgagctacactaaaccacatgacagtgtttagttaattcttgtataaattagtatatctcttctattattagtctgtttgttaaatgccagaccacgtttctatgatctgttgaatgaaccctagacagttctgtgagaaagcagcaattgcacagttacatacacagtcaattaaattttaacattaaagataatttagttttaggtttggcctctgtggatctgtatcagttccaaaatgtggaaagcacgggcatggaaaagtacatttttctctaataaaagaagacaaaccctt

SEQ ID NO: 10379 - DNA, 2342 bp, Homo sapiens
  source 1..2342: mol_type = unassigned DNA
atccgggcccttccagaagcaacccaggagccccgagacctgcagggatgtgtgcaccctgacccctgacgcatagccctgcacctgcagccagctggcctcgggcttgaaaacatggcgggtgcgctccaattcacggtggtttccaagcgcattctggaggagaaaacacatgagtgtgtggtcagggttctctgctgacagacctaccgtggggaagaaagagaagctctgaagatggatcatggccgtgactgcatgtcaaggagaatctccatgatgacacggaggcctacgtcgagatagagtaaatatggtccaattaaaaggtgacccgacaatcaacccctgaaaaaggcggtcataaaacccccaggagacgaagatgatggcacgtcgtgaccccaaacctggggcaaagagactggtgagagcccagaccctccagaagcagcggagggccccagttgggccaagggctcccccgcccgatgaagaagatcccaggctcaagtgcaaaaactgtgaggcctttggccacacggccagaagtaccaggtgccccatgaagtgctggaaggcagccctggttccaccgaactttggggaaaaggaagggaaggaaaacctgaaaccatggaagccccaggttgaagcgaaccctgggcccttgaacaaggataagggagagaaggaagagagaccaaggccacaagacccgcagaggaaggctctcctccacatattttccaggaaacctccagagaagccgctgccaaatcaaaaaggatccacggaatcttctgattatctgagggttgcaagcgggccaatgccggtccacacaaccagtaagaggccgcgtgtggaccctgtcctctctgatcgctcagctaccgaaatgtctgacaggggctccgtcttagcttcactgtctcccctcagaaaagccagtctgagctcctcctcaagtcttggaccaaaggaaagacagacaggggctgcggccgacatccctcagactgcagtcaggcaccagggccccgagcctctcctcgtggtgaagccgacacacagcagccctgcgggtggctgtcgagaagttccccaggctgcctccaaaacccacggcctgctccaggccgtcagcccccaggcacaagacaaacgtcctgcggtgacctcacagccctgcccaccagccgccacacacagcttgggcctaggctccaatctcagcttcgggccaggagccaagagatctgccccggctccgattcaggcttgcctgaacttccccaagaaaccgagactgggtcccttccagatccccgaaagcgccatccagggaggtgagctgggggccccggagaatctccaacctccgccagccgcaaccgaacttggaccacgtacgtcaccccagacaggcacgaggacacccgcccaggtgcttagcggcgaccggcagcctccgcacagcagaccttgcctgcctactgcccaggcctgcaccatgtcccatcacccagcggccagccatgatggggcccagcctctcagagtgctctttcggagactggaaaacggacgctggagctccagcctgctgacggccccctcatttcactctcctgagaagccgggagccttcctcgctcagagccctcatgtctcagagaagtctgagggtccctgtgttcgtgtcccaccaagcgtcctctatgaggaccttcaggttccctcctcctcagaggacagcgattctgacctggagtgagactgcaggtggcaggggctccttggcctccagctcccgtgacttggaggggactgtgggactgaggagcacagagcagagagcagactctgtgcggtgactccgaagctccccggctgtggcccttctgtggatgtgggagcccaggccaggcagggagcagatgcagggactctgccacgttgaattctggtgagggacattgtagttcgcatggttctctggaaacgcgccaggaaaagcttccgtgccagtgattcgttgcctcagaaactgcatgacgcgcaggagtcagacttccgctgggacgtcaataggaaacgggggaattactgtgtatttgctctctagacgactgaataagggaaaagttagggaaccctgagaggtgcagcccttccgctgtgccccgccctgagagcagtgtttcggacgctgggaagcgcgctgtgcaaagcgctctcggggtctttcctcagcctcgaaaagtgggctctggaatccctttgtaaataggtgtgttgaatttgttttgaagtgaataaaattctcaaaaagatga

SEQ ID NO: 10380 - DNA, 592 bp, Homo sapiens
  source 1..592: mol_type = unassigned DNA
agaagcaacccaggagccccgagacctgcagggatgtgtgcaccctgacccctgacgcatagccctgcacctgcagccagctggcctcgggcttgaaaacatggcgggtgcgctccaattcacggtggtttccaagcgcattctggaggagaaaacacatgagtgtgtggtcagggttctctgctgacagacctaccgtggggaagaaagagaagctctgaagatggatcatggccgtgactgcatgtcaaggagaatctccatgatgacacggaggcctacgtcgagatagagtaaatatggtccaattaaaaggttagggtacgttccacgtcaggtgaccagaggcagtataaaaggcagcctggaaagcagaggtccctctctgccccttcctccgtcttcctggatgctgcatcgcttccagcggggctgctccagcacctgcccatctcagcgccagccggggaaagaaagtagacgtgtaatttcaggtgacccgacaatcaacccctgaaaaaggcggtcataaaacccccaggagacgaagatgatggcacgtcgtgaccccaaacctggggcaaagagactg

SEQ ID NO: 10381 - DNA, 2513 bp, Homo sapiens
  source 1..2513: mol_type = unassigned DNA
agctccagtcaggccccatccgggcccttccagaagcaacccaggagccccgagacctgcagggatgtgtgcaccctgacccctgacgcatagccctgcacctgcagccagctggcctcgggcttgaaaacatggcgggtgcgctccaattcacggtggtttccaagcgcattctggaggagaaaacacatgagtgtgtggtcagggttctctgctgacagacctaccgtggggaagaaagagaagctctgaagatggatcatggccgtgactgcatgtcaaggagaatctccatgatgacacggaggcctacgtcgagatagagtaaatatggtccaattaaaaggtgaccagaggcagtataaaaggcagcctggaaagcagaggtccctctctgccccttcctccgtcttcctggatgctgcatcgcttccagcggggctgctccagcacctgcccatctcagcgccagccggggaaagaaagtagacgtgtaatttcaggtgacccgacaatcaacccctgaaaaaggcggtcataaaacccccaggagacgaagatgatggcacgtcgtgaccccaaacctggggcaaagagactggtgagagcccagaccctccagaagcagcggagggccccagttgggccaagggctcccccgcccgatgaagaagatcccaggctcaagtgcaaaaactgtgaggcctttggccacacggccagaagtaccaggtgccccatgaagtgctggaaggcagccctggttccaccgaactttggggaaaaggaagggaaggaaaacctgaaaccatggaagccccaggttgaagcgaaccctgggcccttgaacaaggataagggagagaaggaagagagaccaaggccacaagacccgcagaggaaggctctcctccacatattttccaggaaacctccagagaagccgctgccaaatcaaaaaggatccacggaatcttctgattatctgagggttgcaagcgggccaatgccggtccacacaaccagtaagaggccgcgtgtggaccctgtcctctctgatcgctcagctaccgaaatgtctgacaggggctccgtcttagcttcactgtctcccctcagaaaagccagtctgagctcctcctcaagtcttggaccaaaggaaagacagacaggggctgcggccgacatccctcagactgcagtcaggcaccagggccccgagcctctcctcgtggtgaagccgacacacagcagccctgcgggtggctgtcgagaagttccccaggctgcctccaaaacccacggcctgctccaggccgtcagcccccaggcacaagacaaacgtcctgcggtgacctcacagccctgcccaccagccgccacacacagcttgggcctaggctccaatctcagcttcgggccaggagccaagagatctgccccggctccgattcaggcttgcctgaacttccccaagaaaccgagactgggtcccttccagatccccgaaagcgccatccagggaggtgagctgggggccccggagaatctccaacctccgccagccgcaaccgaacttggaccacgtacgtcaccccagacaggcacgaggacacccgcccaggtgcttagcggcgaccggcagcctccgcacagcagaccttgcctgcctactgcccaggcctgcaccatgtcccatcacccagcggccagccatgatggggcccagcctctcagagtgctctttcggagactggaaaacggacgctggagctccagcctgctgacggccccctcatttcactctcctgagaagccgggagccttcctcgctcagagccctcatgtctcagagaagtctgagggtccctgtgttcgtgtcccaccaagcgtcctctatgaggaccttcaggttccctcctcctcagaggacagcgattctgacctggagtgagactgcaggtggcaggggctccttggcctccagctcccgtgacttggaggggactgtgggactgaggagcacagagcagagagcagactctgtgcggtgactccgaagctccccggctgtggcccttctgtggatgtgggagcccaggccaggcagggagcagatgcagggactctgccacgttgaattctggtgagggacattgtagttcgcatggttctctggaaacgcgccaggaaaagcttccgtgccagtgattcgttgcctcagaaactgcatgacgcgcaggagtcagacttccgctgggacgtcaataggaaacgggggaattactgtgtatttgctctctagacgactgaataagggaaaagttagggaaccctgagaggtgcagcccttccgctgtgccccgccctgagagcagtgtttcggacgctgggaagcgcgctgtgcaaagcgctctcggggtctttcctcagcctcgaaaagtgggctctggaatccctttgtaaataggtgtgttgaatttgttttgaagtgaataaaattctcaaaaaga

SEQ ID NO: 10382 - DNA, 1698 bp, Homo sapiens
  source 1..1698: mol_type = unassigned DNA
gtctagagcttttctgtgtttctccggacttcgagccatggcggtgacggaagcgagcctgttgcgccagtgccccctgcttctgccccagaaccggtcgaaaaccgtgtatgagggattcatctcggctcagggaagagacttccaccttaggatagtgttgcctgaagatttacaactgaagaatgcaagattattatgtagttggcagctgagaacaatacttagtggataccatcgaatagtacaacagagaatgcagcactctcctgatctaatgagctttatgatggagttgaagatgcttttggaagttgccttaaagaatagacaagagctgtatgcactacctcctcctccccagttctactcaagccttattgaagagataggaactcttggttgggataaacttgtgtatgcggatacctgcttcagtaccatcaagttaaaagcagaagatgcttctggtagagagcatttaatcactctcaagttgaaggcaaagtatcctgcagaatcaccagattattttgtggattttcctgttccattttgtgcctcctggacacctcaggtaaattctcctcagagctccttaataagcatttatagtcagtttttggcagcaatagaatcactaaaggcattctgggatgttatggatgaaatcgatgagaagacctgggtacttgagccagaaaaacctccacggagtgcaacagcacgcagaattgcattaggtaataatgtttccataaatatagaggtagaccccaggcatcctactatgcttcctgagtgcttctttcttggagctgaccatgtggtaaaacccctgggaattaagctgagcaggaacatacatttgtgggatccagaaaatagtgtgttacaaaatttgaaagatgttttagaaattgattttccagctcgtgctatcctggaaaaatctgattttactatggattgtggaatttgttatgcttatcaacttgacggtaccattcctgatcaagtgtgtgataattctcagtgtggacaacctttccatcaaatatgcttatatgagtggctgagaggactactaactagtagacagagttttaacatcatatttggtgaatgtccatattgtagtaagccaattaccttaaaaatgtctggaaggaaacactgaaataagaatacaacatttcggtgaagagctggaaacttaaaaaattatcaaaaggaattttggtatcatcttcagagaaaaaataaagcaagaaatactaacatcaaaaggacaggtatgatgatgcgataataataaacatctgcgtttgtctcttcactaagagtaaactgggaaattgtaggccaaagtccagttgaactttctaagtctgtgatccccgtgctgactgtggaagtgtatttataccaagatggagatcttgacttcttgaatatatctggactggtaaaatcttgatgaggctcataaaatgagtttgggaattgtgtatagctgattttttgtgggaaactgtttacttcattcaaaggttcttgagactcttgatatttctgtcttctccttgtgctttcctatggaaaaaatacatatatagtttagtttgttagacgtgagttatccaagtatttattttgtgtagtgtgtaagaatgctaaataaaatgttatacaaga

SEQ ID NO: 10383 - DNA, 2894 bp, Homo sapiens
  source 1..2894: mol_type = unassigned DNA
aggatgcagcgcgctggcgggaggtttggagcagatggataccgtatcgacgtggggcctccggtatgttgccgctgcgttgaggtttagaaacatcaactggaatcaatttgcatttgaaaattagatcagcacaaagacttgatattgtggaatgactagcaaacaagcaatgtcatctaacgaacaagaaaggctcttgtgttataatggggaagtccttgttttccagttgtctaaaggaaattttgcagataaagagcctacaaaaacacccatattacatgtcagaagaatggtatttgacagaggaacaaaagtatttgttcagaagtccactggattttttaccataaaggaagaaaactctcatttaaaaatcatgtgttgcaactgtgtgtcagatttcagaactggaattaacctcccttacattgtgatagaaaaaaataaaaagaataatgtttttgaatattttttactaatccttcacagtactaataaatttgaaatgcgtttgagttttaaactaggctatgagatgaaggatggcctaagggtccttaatggccctttaattttatggaggcatgtcaaagcattcttctttatctcttctcaaactggcaaagttgttagtgtgtcaggtaacttttcctctattcagtgggcaggggagattgaaaatttaggtatggttttattgggactaaaggaatgttgtttatctgaggaagaatgtactcaagagccttcaaaatcagattatgcaatttggaataccaaattttgtgtatattctcttgaaagtcaagaagtattaagtgatatatacattattcctcctgcttacagcagtgtggtgacttatgtacatatttgtgcaactgagatcatcaaaaaccagttaagaatatctctcattgcccttactcgaaagaatcagctgatttcatttcagaatggaactcctaaaaatgtgtgccagcttccatttggagatccttgtgcagttcaacttatggattcaggtggaggaaacctctttttcgttgtatcctttatatccaataatgcttgtgctgtatggaaagagagctttcaggttgctgctaaatgggaaaaacttagcttagtactgatagatgactttattggaagtggaactgaacaagtactcctactttttaaggactccttgaactcagactgcctgacttcatttaaaataacggatcttggaaaaataaactattcgagtgaaccatcagattgcaatgaagatgacttatttgaagacaaacaagagaatcgttacctggtggttccacctctagaaacaggactgaaagtttgtttttcttcttttcgggaattacggcagcatctgttgcttaaggaaaaaattatttcaaaatcttacaaagctttaataaacctagttcaaggaaaagatgataatacgtcaagtgcagaggagaaggaatgtcttgttcctctttgtggtgaagaagaaaattctgtccatatcttagatgaaaagttatcagacaattttcaagattcagaacagctagtagagaagatatggtatcgtgtaatagatgatagcttggttgttggagtgaaaactacatcttctttgaagctgtccctgaatgatgtgactttatcattgttaatggatcaagcccatgactccagatttcggcttctaaagtgtcaaaatagggtgattaagttgagtacaaatcctttcccagcaccatacttgatgccatgtgaaataggattggaagcaaaaagggtcacgttgacccctgatagcaagaaagaggaaagctttgtttgtgaacacccatctaagaaagagtgtgtacagataattactgctgtaacatctctttcaccacttttaacattcagtaaattttgttgcactgtactgctacaaattatggagagagaaagtggtaactgtcctaaagatcgttatgttgtgtgtggcagagtttttttaagtctagaagatctttcaactgggaagtacctactgacatttccaaagaagaaacctatagagcacatggaagatctttttgcacttcttgcagcattccataaatcttgttttcaaatcacatcacccggctatgccctgaattcaatgaaggtgtggctcttagaacatatgaaatgtgaaataatcaaagaatttccagaagtgtacttttgtgaaagaccgggaagtttctatgggacactcttcacttggaaacagagaacaccattcgaagggattttaataatctattccaggaatcaaacagttatgttccagtgccttcataatctcatcagaattctccctataaactgtttcctcaaaaatctaaaatcaggaagtgagaatttcctaattgataatatggcatttactttggagaaggaactagtcacccttagttctctttcttctgccatagctaaacatgaaagcaattttatgcagaggtgtgaagtgagcaaaggaaagagtagtgtcgtcgcggctgctttatcagacagaagggaaaatatccatccctacagaaaagaacttcagagagaaaagaagaaaatgttgcaaacgaacctaaaagtgagtggtgccctttacagagaaataactttgaaagtagctgaggttcagttgaaatcagactttgctgcacagaaactgagtaatttataattataatttcaatttgatcatattttaaaatatgttttcaccaccatataagattttggttctacttgctatatgcctcctttgtaaaaataaacaccgaggcttactgtagtagaaactttagttttgatgatgcacaaaataaacagcagtggttctc

SEQ ID NO: 10384 - DNA, 3008 bp, Homo sapiens
  source 1..3008: mol_type = unassigned DNA
agcgcgctggcgggaggtttggagcagatggataccgtatcgacgtggggcctccggtatgttgccgctgcgttgagtttcataagtacaagccagacctttgatttacctaccctatcttctttactgatgaagctgaaactactttgtgatgcctattgtcccagatctttctgttaattgcctaacaacaaaccagtttagaaacatcaactggaatcaatttgcatttgaaaattagatcagcacaaagacttgatattgtggaatgactagcaaacaagcaatgtcatctaacgaacaagaaaggctcttgtgttataatggggaagtccttgttttccagttgtctaaaggaaattttgcagataaagagcctacaaaaacacccatattacatgtcagaagaatggtatttgacagaggaacaaaagtatttgttcagaagtccactggattttttaccataaaggaagaaaactctcatttaaaaatcatgtgttgcaactgtgtgtcagatttcagaactggaattaacctcccttacattgtgatagaaaaaaataaaaagaataatgtttttgaatattttttactaatccttcacagtactaataaatttgaaatgcgtttgagttttaaactaggctatgagatgaaggatggcctaagggtccttaatggccctttaattttatggaggcatgtcaaagcattcttctttatctcttctcaaactggcaaagttgttagtgtgtcaggtaacttttcctctattcagtgggcaggggagattgaaaatttaggtatggttttattgggactaaaggaatgttgtttatctgaggaagaatgtactcaagagccttcaaaatcagattatgcaatttggaataccaaattttgtgtatattctcttgaaagtcaagaagtattaagtgatatatacattattcctcctgcttacagcagtgtggtgacttatgtacatatttgtgcaactgagatcatcaaaaaccagttaagaatatctctcattgcccttactcgaaagaatcagctgatttcatttcagaatggaactcctaaaaatgtgtgccagcttccatttggagatccttgtgcagttcaacttatggattcaggtggaggaaacctctttttcgttgtatcctttatatccaataatgcttgtgctgtatggaaagagagctttcaggttgctgctaaatgggaaaaacttagcttagtactgatagatgactttattggaagtggaactgaacaagtactcctactttttaaggactccttgaactcagactgcctgacttcatttaaaataacggatcttggaaaaataaactattcgagtgaaccatcagattgcaatgaagatgacttatttgaagacaaacaagagaatcgttacctggtggttccacctctagaaacaggactgaaagtttgtttttcttcttttcgggaattacggcagcatctgttgcttaaggaaaaaattatttcaaaatcttacaaagctttaataaacctagttcaaggaaaagatgataatacgtcaagtgcagaggagaaggaatgtcttgttcctctttgtggtgaagaagaaaattctgtccatatcttagatgaaaagttatcagacaattttcaagattcagaacagctagtagagaagatatggtatcgtgtaatagatgatagcttggttgttggagtgaaaactacatcttctttgaagctgtccctgaatgatgtgactttatcattgttaatggatcaagcccatgactccagatttcggcttctaaagtgtcaaaatagggtgattaagttgagtacaaatcctttcccagcaccatacttgatgccatgtgaaataggattggaagcaaaaagggtcacgttgacccctgatagcaagaaagaggaaagctttgtttgtgaacacccatctaagaaagagtgtgtacagataattactgctgtaacatctctttcaccacttttaacattcagtaaattttgttgcactgtactgctacaaattatggagagagaaagtggtaactgtcctaaagatcgttatgttgtgtgtggcagagtttttttaagtctagaagatctttcaactgggaagtacctactgacatttccaaagaagaaacctatagagcacatggaagatctttttgcacttcttgcagcattccataaatcttgttttcaaatcacatcacccggctatgccctgaattcaatgaaggtgtggctcttagaacatatgaaatgtgaaataatcaaagaatttccagaagtgtacttttgtgaaagaccgggaagtttctatgggacactcttcacttggaaacagagaacaccattcgaagggattttaataatctattccaggaatcaaacagttatgttccagtgccttcataatctcatcagaattctccctataaactgtttcctcaaaaatctaaaatcaggaagtgagaatttcctaattgataatatggcatttactttggagaaggaactagtcacccttagttctctttcttctgccatagctaaacatgaaagcaattttatgcagaggtgtgaagtgagcaaaggaaagagtagtgtcgtcgcggctgctttatcagacagaagggaaaatatccatccctacagaaaagaacttcagagagaaaagaagaaaatgttgcaaacgaacctaaaagtgagtggtgccctttacagagaaataactttgaaagtagctgaggttcagttgaaatcagactttgctgcacagaaactgagtaatttataattataatttcaatttgatcatattttaaaatatgttttcaccaccatataagattttggttctacttgctatatgcctcctttgtaaaaataaacaccgaggcttactgtagtagaaactttagttttgatgatgcacaaaataaacagcagtggttctc

SEQ ID NO: 10385 - DNA, 2712 bp, Homo sapiens
  source 1..2712: mol_type = unassigned DNA
cgggaggtttggagcagatggataccgtatcgacgtggggcctccggtatgttgccgctgcgttgagtttcataagtacaagccagacctttgatttacctaccctatcttctttactgatgaagctgaaactactttgtgatgcctattgtcccagatctttctgttaattgcctaacaacaaaccagtttagaaacatcaactggaatcaatttgcatttgaaaattagatcagcacaaagacttgatattgtggaatgactagcaaacaagcaatgtcatctaacgaacaagaaaggctcttgtgttataatggggaagtccttgttttccagttgtctaaaggaaattttgcagataaagagcctacaaaaacacccatattacatgtcagaagaatggtatttgacagaggaacaaaagtatttgttcagaagtccactggattttttaccataaaggaagaaaactctcatttaaaaatcatgtgttgcaactgtgtgtcagatttcagaactggaattaacctcccttacattgtgatagaaaaaaataaaaagaataatgtttttgaatattttttactaatccttcacagtactaataaatttgaaatgcgtttgagttttaaactaggctatgagatgaaggatggcctaagggtccttaatggccctttaattttatggaggcatgtcaaagcattcttctttatctcttctcaaactggcaaagttgttagtgtgtcaggtaacttttcctctattcagtgggcaggggagattgaaaatttaggtatggttttattgggactaaaggaatgttgtttatctgaggaagaatgtactcaagagccttcaaaatcagattatgcaatttggaataccaaattttgtgtatattctcttgaaagtcaagaagtattaagtgatatatacattattcctcctgcttacagcagtgtggtgacttatgtacatatttgtgcaactgagatcatcaaaaaccagttaagaatatctctcattgcccttactcgaaagaatcagctgatttcatttcagaatggaactcctaaaaatgtgtgccagcttccatttggagatccttgtgcagttcaacttatggattcaggtggaggaaacctctttttcgttgtatcctttatatccaataatgcttgtgctgtatggaaagagagctttcaggttgctgctaaatgggaaaaacttagcttagtactgatagatgactttattggaagtggaactgaacaagtactcctactttttaaggactccttgaactcagactgcctgacttcatttaaaataacggatcttggaaaaataaactattcgagtgaaccatcagattgcaatgaagatgacttatttgaagacaaacaagagaatcgttacctggtggttccacctctagaaacaggactgaaagtttgtttttcttcttttcgggaattacggcagcatctgttgcttaaggaaaaaattatttcaaaatcttacaaagctttaataaacctagttcaaggaaaagatgataatacgtcaagtgcagaggagaaggaatgtcttgttcctctttgtggtgaagaagaaaattctgtccatatcttagatgaaaagttatcagacaattttcaagattcagaacagctagtagagaagatatggtatcgtgtaatagatgatagcttggttgttggagtgaaaactacatcttctttgaagctgtccctgaatgatgtgactttatcattgttaatggatcaagcccatgactccagatttcggcttctaaagtgtcaaaatagggtgattaagttgagtacaaatcctttcccagcaccatacttgatgccatgtgaaataggattggaagcaaaaagggtcacgttgacccctgatagcaagaaagaggaaagctttgtttgtgaacacccatctaagaaagagtgtgtacagataattactgctgtaacatctctttcaccacttttaacattcagtaaattttgttgcactgtactgctacaaattatggagagagaaagtggtaactgtcctaaagatcgttatgttgtgtgtggcagagtttttttaagtctagaagatctttcaactgggaagtacctactgacatttccaaagaagaaacctatagagcacatggaagatctttttgcacttcttgcagcattccataaatcttgttttcaaatcacatcacccggctatgccctgaattcaatgaaggtgtggctcttagaacatatgaaatgtgaaataatcaaagaatttccagaagtgtacttttgtgaaagaccgggaagtttctatgggacactcttcacttggaaacagagaacaccattcgaagggattttaataatctattccaggaatcaaacagttatgttccagtgccttcataatctcatcagaattctccctataaactgtttcctcaaaaatctaaaatcaggaagtgagaatttcctaattgataatatggcatttactttggagaaggaactagtcacccttagttctctttcttctgccatagctaaacatgaaagcaattttatgcagaggtgtgaagtgagcaaaggaaagagtagtgtcgtcgcggctgctttatcagacagaagggaaaatatccatccctacagaaaagaacttcagaga

SEQ ID NO: 10386 - DNA, 4585 bp, Homo sapiens
  source 1..4585: mol_type = unassigned DNA
actgctgacacgtgtgcgcgcgcgcggctccactgccgggcgaccgcgggaaaattccaaaaaaactcaaaaagccaatacgaggcaaagccaaattttcaagccacagatcccgggcggtggcttcctttccgccactgcccaaactgctgaagcagctcccgcgaggaccacccgatttaatgtgtgccgaccatttccttcagtgctggacaggctgctgtgaagggacatcaccttttcgctttttccaagatggctcaagattcagtagatctttcttgtgattatcagttttggatgcagaagctttctgtatgggatcaggcttccactttggaaacccagcaagacacctgtcttcacgtggctcagttccaggagttcctaaggaagatgtatgaagccttgaaagagatggattctaatacagtcattgaaagattccccacaattggtcaactgttggcaaaagcttgttggaatccttttattttagcatatgatgaaagccaaaaaattctaatatggtgcttatgttgtctaattaacaaagaaccacagaattctggacaatcaaaacttaactcctggatacagggtgtattatctcatatactttcagcactcagatttgataaagaagttgctcttttcactcaaggtcttgggtatgcacctatagattactatcctggtttgcttaaaaatatggttttatcattagcgtctgaactcagagagaatcatcttaatggatttaacactcaaaggcgaatggctcccgagcgagtggcgtccctgtcacgagtttgtgtcccacttattaccctgacagatgttgaccccctggtggaggctctcctcatctgtcatggacgtgaacctcaggaaatcctccagccagagttctttgaggctgtaaacgaggccattttgctgaagaagatttctctccccatgtcagctgtagtctgcctctggcttcggcaccttcccagccttgaaaaagcaatgctgcatctttttgaaaagctaatctccagtgagagaaattgtctgagaaggatcgaatgctttataaaagattcatcgctgcctcaagcagcctgccaccctgccatattccgggttgttgatgagatgttcaggtgtgcactcctggaaaccgatggggccctggaaatcatagccactattcaggtgtttacgcagtgctttgtagaagctctggagaaagcaagcaagcagctgcggtttgcactcaagacctactttccttacacttctccatctcttgccatggtgctgctgcaagaccctcaagatatccctcggggacactggctccagacactgaagcatatttctgaactgctcagagaagcagttgaagaccagactcatgggtcctgcggaggtccctttgagagctggttcctgttcattcacttcggaggatgggctgagatggtggcagagcaattactgatgtcggcagccgaaccccccacggccctgctgtggctcttggccttctactacggcccccgtgatgggaggcagcagagagcacagactatggtccaggtgaaggccgtgctgggccacctcctggcaatgtccagaagcagcagcctctcagcccaggacctgcagacggtagcaggacagggcacagacacagacctcagagctcctgcacaacagctgatcaggcaccttctcctcaacttcctgctctgggctcctggaggccacacgatcgcctgggatgtcatcaccctgatggctcacactgctgagataactcacgagatcattggctttcttgaccagaccttgtacagatggaatcgtcttggcattgaaagccctagatcagaaaaactggcccgagagctccttaaagagctgcgaactcaagtctagaaggcacgcaggccgtgtgggtgcccggcgtgagggatcaggctcgccagggccacaggacaggtgatgacctgtggccacgcatttgtggagtaagtgccctcgctgggctgtgagaatgagctgtacacatcttgggacaatctgctagtatctattttacaaaatgcagagccaggtccctcagcccagactcagtcagacatgttcactaatgactcaagtgagccttcggtactcctggtgcccgcccggccagaccgtcagcttgataattactaaagcaaaggcctgggtgggagaacaggtttctagtttttacccaagtcaagctgcacatctattatttaaaaattcaaagtcttagaaccaagaatttggtcatgaaccattaaagaatttagagagaacttagctctttttagactctttttaggagtcagggatctgggataaagccacactgtcttgctgtatggagaaattcttcaaggggagtcagggtccctcaggcttcccttgtgtctccctggacctgcctgacaggccacaggagcagacagcacacccaagcccgggcctccggcacactctttccactctgtatttgctaaatgatgctaactgctaccaaaaggcccttgggacatcagaggagccggcaggcgaaggtagaggatgtgttccagaaacattagaaggcaggattaattcagttagttagttctcttgttaaatggaaatgggaattggaaattcctgataaagaattggcctggctgggtgcagtggctcacacctgtgatcccagcactttgggaggccaaggcagggggattacttcagcccaggagttccagactgcctggctaacatggcaataccctatctctactaaaaatacaaaaattatcggggtgcaatggcatgcatctgtaatcccagctattcaagaggctgaggcatgaggatctcttgaacccgggaggtgggagttgtagtgagccgagatcatgacactgcactccagcctgggcaacagagcgagaccatctcttaaaaaaaggcattgttagtgtaatctcaaggttaacatttatttcatgtcagtacagggtgctttttcctttcagggacattctggaattgtattggttgtacattcttttgtgtctattctgtttgtcaagtgagtcaagacttgcttttgtccattttgatttgtgtgtattagtctgagtcttggctccgttttgaggtatgagcaaagttttgctggattagaagttaacctttagggaaattccttattttggtatgtggcaatgctaatagatccactgaagatctggaaaattccaggaacttttcacctgagcctttcttctgagaaatgctgcagtcagaagggtgtgctggtaaagtattttggtggcagctgccatcatggtcattgccttcatataacatgcttcgtgctcatggtcattgccttcatataacatgcttcgtgccatcatgatccttgccttcatataacaaacatgcttcgtcagaggtgttggggttgaaaaaggagctgcatgcttcactggagttgagggcctctctcctgttctgactttaagccagaacttgtggctgggccatggaagctgtgactcctctgtggacatggtggcagcagggaacccctagagagaggggccactgggaccaggcctcctgttgtggagggactcctgggacagtcctccaccctgtcctgtggtcctgtgtacagggttggcctcttcctcctcccctgccaggcctctgcccatgccccttccttccttctcctgggactggtgaagctaggcatctggaagacttcttcctagcctggaagccctgacctcggcccatctgcagaatctcccagttccttcacagctgccgagtcctctcacgggtgcggtggaggcggccttgccggtggtgctttctgggcagccaggggttcctgggtgggaggactgtccctctggggacgtggcactgaagtgcctgctggcttcatgtggccctttgccctttcccagcctgagagatgctcaaaggtggggagctgggggagccacccctcggccattccctccacctccaagacaggtggcggccgggcaggcactcttaagcccacctccccctcttgttgccttcgatttcggcaaagcctgggcaggtgccaccgggaaggaatggcatccgagatgctgggcggggacgcggcgtggccgagggggccttgacggcgttggcggggcctgggcacaggggcagccgcagggaggcagggatggcaaggcgtgaagccaccctggaaggaactggaccaaggtcttcagaggtgcgacagggtctggaatctgaccttactctagcaggagtttttgtagactctccctgatagtttagtttttgataaagcatgctggtaaaaccactaccctcagagagagccaaaaatacagaagaggcggagagcgcccctccaaccaggctgttattcccctggactccgtgacatctgtggaattttttagctctttaaaatctgtaatttgttgtctattttttcattctaaataaaacttcagtttgcacctaa

SEQ ID NO: 10387 - DNA, 4504 bp, Homo sapiens
  source 1..4504: mol_type = unassigned DNA
gagcccccggagaggcgggagccgggtgttggcgttttggttctttttgttcattgagcgcaggcagctatgtcttcttcaaaggagaggagcaaagatttaatgtgtgccgaccatttccttcagtgctggacaggctgctgtgaagggacatcaccttttcgctttttccaagatggctcaagattcagtagatctttcttgtgattatcagttttggatgcagaagctttctgtatgggatcaggcttccactttggaaacccagcaagacacctgtcttcacgtggctcagttccaggagttcctaaggaagatgtatgaagccttgaaagagatggattctaatacagtcattgaaagattccccacaattggtcaactgttggcaaaagcttgttggaatccttttattttagcatatgatgaaagccaaaaaattctaatatggtgcttatgttgtctaattaacaaagaaccacagaattctggacaatcaaaacttaactcctggatacagggtgtattatctcatatactttcagcactcagatttgataaagaagttgctcttttcactcaaggtcttgggtatgcacctatagattactatcctggtttgcttaaaaatatggttttatcattagcgtctgaactcagagagaatcatcttaatggatttaacactcaaaggcgaatggctcccgagcgagtggcgtccctgtcacgagtttgtgtcccacttattaccctgacagatgttgaccccctggtggaggctctcctcatctgtcatggacgtgaacctcaggaaatcctccagccagagttctttgaggctgtaaacgaggccattttgctgaagaagatttctctccccatgtcagctgtagtctgcctctggcttcggcaccttcccagccttgaaaaagcaatgctgcatctttttgaaaagctaatctccagtgagagaaattgtctgagaaggatcgaatgctttataaaagattcatcgctgcctcaagcagcctgccaccctgccatattccgggttgttgatgagatgttcaggtgtgcactcctggaaaccgatggggccctggaaatcatagccactattcaggtgtttacgcagtgctttgtagaagctctggagaaagcaagcaagcagctgcggtttgcactcaagacctactttccttacacttctccatctcttgccatggtgctgctgcaagaccctcaagatatccctcggggacactggctccagacactgaagcatatttctgaactgctcagagaagcagttgaagaccagactcatgggtcctgcggaggtccctttgagagctggttcctgttcattcacttcggaggatgggctgagatggtggcagagcaattactgatgtcggcagccgaaccccccacggccctgctgtggctcttggccttctactacggcccccgtgatgggaggcagcagagagcacagactatggtccaggtgaaggccgtgctgggccacctcctggcaatgtccagaagcagcagcctctcagcccaggacctgcagacggtagcaggacagggcacagacacagacctcagagctcctgcacaacagctgatcaggcaccttctcctcaacttcctgctctgggctcctggaggccacacgatcgcctgggatgtcatcaccctgatggctcacactgctgagataactcacgagatcattggctttcttgaccagaccttgtacagatggaatcgtcttggcattgaaagccctagatcagaaaaactggcccgagagctccttaaagagctgcgaactcaagtctagaaggcacgcaggccgtgtgggtgcccggcgtgagggatcaggctcgccagggccacaggacaggtgatgacctgtggccacgcatttgtggagtaagtgccctcgctgggctgtgagaatgagctgtacacatcttgggacaatctgctagtatctattttacaaaatgcagagccaggtccctcagcccagactcagtcagacatgttcactaatgactcaagtgagccttcggtactcctggtgcccgcccggccagaccgtcagcttgataattactaaagcaaaggcctgggtgggagaacaggtttctagtttttacccaagtcaagctgcacatctattatttaaaaattcaaagtcttagaaccaagaatttggtcatgaaccattaaagaatttagagagaacttagctctttttagactctttttaggagtcagggatctgggataaagccacactgtcttgctgtatggagaaattcttcaaggggagtcagggtccctcaggcttcccttgtgtctccctggacctgcctgacaggccacaggagcagacagcacacccaagcccgggcctccggcacactctttccactctgtatttgctaaatgatgctaactgctaccaaaaggcccttgggacatcagaggagccggcaggcgaaggtagaggatgtgttccagaaacattagaaggcaggattaattcagttagttagttctcttgttaaatggaaatgggaattggaaattcctgataaagaattggcctggctgggtgcagtggctcacacctgtgatcccagcactttgggaggccaaggcagggggattacttcagcccaggagttccagactgcctggctaacatggcaataccctatctctactaaaaatacaaaaattatcggggtgcaatggcatgcatctgtaatcccagctattcaagaggctgaggcatgaggatctcttgaacccgggaggtgggagttgtagtgagccgagatcatgacactgcactccagcctgggcaacagagcgagaccatctcttaaaaaaaggcattgttagtgtaatctcaaggttaacatttatttcatgtcagtacagggtgctttttcctttcagggacattctggaattgtattggttgtacattcttttgtgtctattctgtttgtcaagtgagtcaagacttgcttttgtccattttgatttgtgtgtattagtctgagtcttggctccgttttgaggtatgagcaaagttttgctggattagaagttaacctttagggaaattccttattttggtatgtggcaatgctaatagatccactgaagatctggaaaattccaggaacttttcacctgagcctttcttctgagaaatgctgcagtcagaagggtgtgctggtaaagtattttggtggcagctgccatcatggtcattgccttcatataacatgcttcgtgctcatggtcattgccttcatataacatgcttcgtgccatcatgatccttgccttcatataacaaacatgcttcgtcagaggtgttggggttgaaaaaggagctgcatgcttcactggagttgagggcctctctcctgttctgactttaagccagaacttgtggctgggccatggaagctgtgactcctctgtggacatggtggcagcagggaacccctagagagaggggccactgggaccaggcctcctgttgtggagggactcctgggacagtcctccaccctgtcctgtggtcctgtgtacagggttggcctcttcctcctcccctgccaggcctctgcccatgccccttccttccttctcctgggactggtgaagctaggcatctggaagacttcttcctagcctggaagccctgacctcggcccatctgcagaatctcccagttccttcacagctgccgagtcctctcacgggtgcggtggaggcggccttgccggtggtgctttctgggcagccaggggttcctgggtgggaggactgtccctctggggacgtggcactgaagtgcctgctggcttcatgtggccctttgccctttcccagcctgagagatgctcaaaggtggggagctgggggagccacccctcggccattccctccacctccaagacaggtggcggccgggcaggcactcttaagcccacctccccctcttgttgccttcgatttcggcaaagcctgggcaggtgccaccgggaaggaatggcatccgagatgctgggcggggacgcggcgtggccgagggggccttgacggcgttggcggggcctgggcacaggggcagccgcagggaggcagggatggcaaggcgtgaagccaccctggaaggaactggaccaaggtcttcagaggtgcgacagggtctggaatctgaccttactctagcaggagtttttgtagactctccctgatagtttagtttttgataaagcatgctggtaaaaccactaccctcagagagagccaaaaatacagaagaggcggagagcgcccctccaaccaggctgttattcccctggactccgtgacatctgtggaattttttagctctttaaaatctgtaatttgttgtctattttttcattctaaataaaacttcagtttgcaccta

SEQ ID NO: 10388 - DNA, 591 bp, Homo sapiens
  source 1..591: mol_type = unassigned DNA
cttccctccattctttttgtggacgccaggccatatcttcaaagcccgtgagagatttttcagatttaatgtgtgccgaccatttccttcagtgctggacaggctgctgtgaagggacatcaccttttcgctttttccaagatggctcaagattcagtagatctttcttgtgattatcagttttggatgcagaagctttctgtatgggatcaggcttccactttggaaacccagcaagacacctgtcttcacgtggctcagttccaggagttcctaaggaagatgtatgaagccttgaaagagatggattctaatacagtcattgaaagattccccacaattggtcaactgttggcaaaagcttgttggaatccttttattttagcatatgatgaaagccaaaaaattctaatatggtgcttatgttgtctaattaacaaagaaccacagaattctggacaatcaaaacttaactcctggatacagggtgtattatctcatatactttcagcactcagatttgataaagaagttgctcttttcactcaaggtcttgggtatgcacctatagattactatcctggtttgctt

SEQ ID NO: 10389 - DNA, 5219 bp, Homo sapiens
  source 1..5219: mol_type = unassigned DNA
gtcagagcggcgtcgggcctggcgggaaagtcgaaaactacgggcggcgacggcttctcggaagtaatttaagtgcacaagacattggtcaaaatggtttccaaaagaagactgtcaaaatctgaggataaagagagcctgacagaagatgcctccaaaaccaggaagcaaccactttccaaaaagacaaagaaatctcatattgctaatgaagttgaagaaaatgacagcatctttgtaaagcttcttaagatatcaggaattattcttaaaacgggagagagtcagaatcaactagctgtggatcaaatagctttccaaaagaagctctttcagaccctgaggagacacccttcctatcccaaaataatagaagaatttgttagtggcctggagtcttacattgaggatgaagacagtttcaggaactgccttttgtcttgtgagcgtctgcaggatgaggaagccagtatgggtgcatcttattctaagagtctcatcaaactgcttctggggattgacatactgcagcctgccattatcaaaaccttatttgagaagttgccagaatatttttttgaaaacaagaacagtgatgaaatcaacatacctcgactcattgtcagtcaactaaaatggcttgacagagttgtggatggcaaggacctcaccaccaagatcatgcagctgatcagtattgctccagagaacctgcagcatgacatcatcaccagcctacctgagatcctaggggattcccagcacgctgatgtggggaaagaactcagtgacctactgatagagaatacttcactcactgtcccaatcctggatgtcctttcaagcctccgacttgacccaaacttcctattgaaggttcgccagttggtgatggataagttgtcgtctattagattggaggatttacctgtgataataaagttcattcttcattccgtaacagccatggatacacttgaggtaatttctgagcttcgggagaagttggatctgcagcattgtgttttgccatcacggttacaggcttcccaagtaaagttgaaaagtaaaggacgagcaagttcctcaggaaatcaagaaagcagcggtcagagctgtattattctcctctttgatgtaataaagtcagctattagatatgagaaaaccatttcagaagcctggattaaggcaattgaaaacactgcctcagtatctgaacacaaggtgtttgacctggtgatgcttttcatcatctatagcaccaatactcagacaaagaagtacattgacagggtgctaagaaataagattcgatcaggctgcattcaagaacagctgctccagagtacattctctgttcattacttagttcttaaggatatgtgttcatccattctgtcgctggctcagagtttgcttcactctctagaccagagtataatttcatttggcagtctcctatacaaatatgcatttaagttttttgacacgtactgccagcaggaagtggttggtgccttagtgacccatatctgcagtgggaatgaagctgaagttgatactgccttagatgtccttctagagttggtagtgttaaacccatctgctatgatgatgaatgctgtctttgtaaagggcattttagattatctggataacatatcccctcagcaaatacgaaaactcttctatgttctcagcacactggcatttagcaaacagaatgaagccagcagccacatccaggatgacatgcacttggtgataagaaagcagctctctagcaccgtattcaagtacaagctcattgggattattggtgctgtgaccatggctggcatcatggcggcagacagaagtgaatcacctagtttgacccaagagagagccaacctgagcgatgagcagtgcacacaggtgacctccttgttgcagttggttcattcctgcagtgagcagtctcctcaggcctctgcactttactatgatgaatttgccaacctgatccaacatgaaaagctggatccaaaagccctggaatgggttgggcataccatctgtaatgatttccaggatgccttcgtagtggactcctgtgttgttccggaaggtgactttccatttcctgtgaaagcactgtacggactggaagaatacgacactcaggatgggattgccataaacctcctgccgctgctgttttctcaggactttgcaaaagatgggggtccggtgacctcacaggaatcaggccaaaaattggtgtctccgctgtgcctggctccgtatttccggttactgagactttgtgtggagagacagcataacggaaacttggaggagattgatggtctactagattgtcctatattcctaactgacctggagcctggagagaagttggagtccatgtctgctaaagagcgttcattcatgtgttctctcatatttcttactctcaactggttccgagagattgtaaatgccttctgccaggaaacatcacctgagatgaaggggaaggtgctcactcggttaaagcacattgtagaattgcaaataatcctggaaaagtacttggcagtcaccccagactatgtccctcctcttggaaactttgatgtggaaactttagatataacacctcatactgttactgctatttcagcaaaaatcagaaagaaaggaaaaatagaaaggaaacaaaaaacagatggcagcaagacatcctcctctgacacactttcagaagagaaaaattcagaatgtgaccctacgccatctcatagaggccagctaaacaaggagttcacagggaaggaagaaaagacatcattgttactacataattcccatgcttttttccgagagctggacattgaggtcttctctattctacattgtggacttgtgacgaagttcatcttagatactgaaatgcacactgaagctacagaagttgtgcaacttgggccccctgagctgcttttcttgctggaagatctctcccagaagctggagagtatgctgacacctcctattgccaggagagtcccctttctcaagaacaaaggaagccggaatattggattctcacatctccaacagagatctgcccaagaaattgttcattgtgtttttcaactgctgaccccaatgtgtaaccacctggagaacattcacaactattttcagtgtttagctgctgagaatcacggtgtagttgatggaccaggagtgaaagttcaggagtaccacataatgtcttcctgctatcagaggctgctgcagatttttcatgggctttttgcttggagtggattttctcaacctgaaaatcagaatttactgtattcagccctccatgtccttagtagccgactgaaacagggagaacacagccagcctttggaggaactactcagccagagcgtccattacttgcagaatttccatcaaagcattcccagtttccagtgtgctctttatctcatcagacttttgatggttattttggagaaatcaacagcttctgctcagaacaaagaaaaaattgcttcccttgccagacaattcctctgtcgggtgtggccaagtggggataaagagaagagcaacatctctaatgaccagctccatgctctgctctgtatctacctggagcacacagagagcattctgaaggccatagaggagattgctggtgttggtgtcccagaactgatcaactctcctaaagatgcatcttcctccacattccctacactgaccaggcatacttttgttgttttcttccgtgtgatgatggctgaactagagaagacggtgaaaaaaattgagcctggcacagcagcagactcgcagcagattcatgaagagaaactcctctactggaacatggctgttcgagacttcagtatcctcatcaacttgataaaggtatttgatagtcatcctgttctgcatgtatgtttgaagtatgggcgtctctttgtggaagcatttctgaagcaatgtatgccgctcctagacttcagttttagaaaacaccgggaagatgttctgagcttactggaaaccttccagttggacacaaggctgcttcatcacctgtgtgggcattccaagattcaccaggacacgagactcacccaacatgtgcctctgctcaaaaagaccctggaacttttagtttgcagagtcaaagctatgctcactctcaacaattgtagagaggctttctggctgggcaatctaaaaaaccgggacttgcagggtgaagagattaagtcccaaaattcccaggagagcacagcagatgagagtgaggatgacatgtcatcccaggcctccaagagcaaagccactgaggtatctctacaaaacccaccagagtctggcactgatggttgcattttgttaattgttctaagttggtggagcagaactttgcctacttatgtttattgtcaaatgcttctatgcccatttccattccctccataacagcttctgtgcttatataatttttgggacccagaagaaacaacgacacaatcttagaatcactcctgagtatctcgagttgtggcatttgttatagagttgacaattttctgcattatagcctctcattttccatgaattcatatctgaaaccattttagaagggagaagtcatcgaagtattttctgagtgttgagaagaatgagttaaaccatttaaacacatttgaaacatacaaaaatagaaatgtgaaagcatttggtgaaagccaaagcacagagtcagaagctgccaccttagagaactgaaataaaaatagaagttcttacgcttttttgtggtacagatgctttcgacaatttaaagaaagctaaataaaaatgtagacatggctggcgcagtggctcatgcttgtaatcctagcactttttgaggccaaggtaggaggattgcttgagtccgggagctcaaggcaaagctgcacaacataacaagaccctatctccacaaaaaaaatgaaaaataaacctgggtgcggtggctcacacctgtaatcccagcactttgggaggccgatgtgggcagatcacaaggtcaggagttcaagaccagcctggccaacatagtgaaaccccatctctactgaaaatacaaaaattagctgggtgtggtggcacgtgcctgttatctcagctacttgggaggctga

SEQ ID NO: 10390 - DNA, 5008 bp, Homo sapiens
  source 1..5008: mol_type = unassigned DNA
ggcctggcgggaaagtcgaaaactacgggcggcgacggcttctcggaagtaatttaagtgcacaagacattggtcaaaatggtttccaaaagaagactgtcaaaatctgaggataaagagagcctgacagaagatgcctccaaaaccaggaagcaaccactttccaaaaagacaaagaaatctcatattgctaatgaagttgaagaaaatgacagcatctttgtaaagcttcttaagatatcaggaattattcttaaaacgggagagagtcagaatcaactagctgtggatcaaatagctttccaaaagaagctctttcagaccctgaggagacacccttcctatcccaaaataatagaagaatttgttagtggcctggagtcttacattgaggatgaagacagtttcaggaactgccttttgtcttgtgagcgtctgcaggatgaggaagccagtatgggtgcatcttattctaagagtctcatcaaactgcttctggggattgacatactgcagcctgccattatcaaaaccttatttgagaagttgccagaatatttttttgaaaacaagaacagtgatgaaatcaacatacctcgactcattgtcagtcaactaaaatggcttgacagagttgtggatggcaaggacctcaccaccaagatcatgcagctgatcagtattgctccagagaacctgcagcatgacatcatcaccagcctacctgagatcctaggggattcccagcacgctgatgtggggaaagaactcagtgacctactgatagagaatacttcactcactgtcccaatcctggatgtcctttcaagcctccgacttgacccaaacttcctattgaaggttcgccagttggtgatggataagttgtcgtctattagattggaggatttacctgtgataataaagttcattcttcattccgtaacagccatggatacacttgaggtaatttctgagcttcgggagaagttggatctgcagcattgtgttttgccatcacggttacaggcttcccaagtaaagttgaaaagtaaaggacgagcaagttcctcaggaaatcaagaaagcagcggtcagagctgtattattctcctctttgatgtaataaagtcagctattagatatgagaaaaccatttcagaagcctggattaaggcaattgaaaacactgcctcagtatctgaacacaaggtgtttgacctggtgatgcttttcatcatctatagcaccaatactcagacaaagaagtacattgacagggtgctaagaaataagattcgatcaggctgcattcaagaacagctgctccagagtacattctctgttcattacttagttcttaaggatatgtgttcatccattctgtcgctggctcagagtttgcttcactctctagaccagagtataatttcatttggcagtctcctatacaaatatgcatttaagttttttgacacgtactgccagcaggaagtggttggtgccttagtgacccatatctgcagtgggaatgaagctgaagttgatactgccttagatgtccttctagagttggtagtgttaaacccatctgctatgatgatgaatgctgtctttgtaaagggcattttagattatctggataacatatcccctcagcaaatacgaaaactcttctatgttctcagcacactggcatttagcaaacagaatgaagccagcagccacatccaggatgacatgcacttggtgataagaaagcagctctctagcaccgtattcaagtacaagctcattgggattattggtgctgtgaccatggctggcatcatggcggcagacagaagtgaatcacctagtttgacccaagagagagccaacctgagcgatgagcagtgcacacaggtgacctccttgttgcagttggttcattcctgcagtgagcagtctcctcaggcctctgcactttactatgatgaatttgccaacctgatccaacatgaaaagctggatccaaaagccctggaatgggttgggcataccatctgtaatgatttccaggatgccttcgtagtggactcctgtgttgttccggaaggtgactttccatttcctgtgaaagcactgtacggactggaagaatacgacactcaggatgggattgccataaacctcctgccgctgctgttttctcaggactttgcaaaagatgggggtccggtgacctcacaggaatcaggccaaaaattggtgtctccgctgtgcctggctccgtatttccggttactgagactttgtgtggagagacagcataacggaaacttggaggagattgatggtctactagattgtcctatattcctaactgacctggagcctggagagaagttggagtccatgtctgctaaagagcgttcattcatgtgttctctcatatttcttactctcaactggttccgagagattgtaaatgccttctgccaggaaacatcacctgagatgaaggggaaggtgctcactcggttaaagcacattgtagaattgcaaataatcctggaaaagtacttggcagtcaccccagactatgtccctcctcttggaaactttgatgtggaaactttagatataacacctcatactgttactgctatttcagcaaaaatcagaaagaaaggaaaaatagaaaggaaacaaaaaacagatggcagcaagacatcctcctctgacacactttcagaagagaaaaattcagaatgtgaccctacgccatctcatagaggccagctaaacaaggagttcacagggaaggaagaaaagacatcattgttactacataattcccatgcttttttccgagagctggacattgaggtcttctctattctacattgtggacttgtgacgaagttcatcttagatactgaaatgcacactgaagctacagaagttgtgcaacttgggccccctgagctgcttttcttgctggaagatctctcccagaagctggagagtatgctgacacctcctattgccaggagagtcccctttctcaagaacaaaggaagccggaatattggattctcacatctccaacagagatctgcccaagaaattgttcattgtgtttttcaactgctgaccccaatgtgtaaccacctggagaacattcacaactattttcagtgtttagctgctgagaatcacggtgtagttgatggaccaggagtgaaagttcaggagtaccacataatgtcttcctgctatcagaggctgctgcagatttttcatgggctttttgcttggagtggattttctcaacctgaaaatcagaatttactgtattcagccctccatgtccttagtagccgactgaaacagggagaacacagccagcctttggaggaactactcagccagagcgtccattacttgcagaatttccatcaaagcattcccagtttccagtgtgctctttatctcatcagacttttgatggttattttggagaaatcaacagcttctgctcagaacaaagaaaaaattgcttcccttgccagacaattcctctgtcgggtgtggccaagtggggataaagagaagagcaacatctctaatgaccagctccatgctctgctctgtatctacctggagcacacagagagcattctgaaggccatagaggagattgctggtgttggtgtcccagaactgatcaactctcctaaagatgcatcttcctccacattccctacactgaccagattcatgaagagaaactcctctactggaacatggctgttcgagacttcagtatcctcatcaacttgataaaggtatttgatagtcatcctgttctgcatgtatgtttgaagtatgggcgtctctttgtggaagcatttctgaagcaatgtatgccgctcctagacttcagttttagaaaacaccgggaagatgttctgagcttactggaaaccttccagttggacacaaggctgcttcatcacctgtgtgggcattccaagattcaccaggacacgagactcacccaacatgtgcctctgctcaaaaagaccctggaacttttagtttgcagagtcaaagctatgctcactctcaacaattgtagagaggctttctggctgggcaatctaaaaaaccgggacttgcagggtgaagagattaagtcccaaaattcccaggagagcacagcagatgagagtgaggatgacatgtcatcccaggcctccaagagcaaagccactgaggatggtgaagaagacgaagtaagtgctggagaaaaggagcaagatagtgatgagagttatgatgactctgattagaccccagataaattgttgcctgcttctgtgtctctgccagcctgtgatcattttgtgttagagtttgaaatccgctgtttgcctttcttactggtaggatccttttttgttcctctttttttttttttttttttttttttaaagacggggactcgctgtgtttcccaggctggagtgcagtgctgcaatcttggctcactgcaacctccatctcctaggttcaagcgattctcctgcctcagcctcctgagtagctgggacgacaggcacatgccaccatgcccagctaatttttgtatttttagtagatacggggttttaccatgtcggccagatggtctcaatctcctgaactcatgatccacctgcctcagcctcccaaagtgctgggattacaggcatgagccaccgctcccagccatattttgttcttaaagtggggtctttattaacttgtggacatcatggattgtctaacaccatcacagtccctggctcaggattctaatgtagcattatttattggtttggataaacccagctgtgctacactgcagagtaaaatctctgagtcatgattctggactttgggagctagttttgaaactctgatttattgtagaacttaggcttgtaccaattttacaaataaattctgttctaagttc

SEQ ID NO: 10391 - DNA, 5102 bp, Homo sapiens
  source 1..5102: mol_type = unassigned DNA
ggcctggcgggaaagtcgaaaactacgggcggcgacggcttctcggaagtaatttaagtgcacaagacattggtcaaaatggtttccaaaagaagactgtcaaaatctgaggataaagagagcctgacagaagatgcctccaaaaccaggaagcaaccactttccaaaaagacaaagaaatctcatattgctaatgaagttgaagaaaatgacagcatctttgtaaagcttcttaagatatcaggaattattcttaaaacgggagagagtcagaatcaactagctgtggatcaaatagctttccaaaagaagctctttcagaccctgaggagacacccttcctatcccaaaataatagaagaatttgttagtggcctggagtcttacattgaggatgaagacagtttcaggaactgccttttgtcttgtgagcgtctgcaggatgaggaagccagtatgggtgcatcttattctaagagtctcatcaaactgcttctggggattgacatactgcagcctgccattatcaaaaccttatttgagaagttgccagaatatttttttgaaaacaagaacagtgatgaaatcaacatacctcgactcattgtcagtcaactaaaatggcttgacagagttgtggatggcaaggacctcaccaccaagatcatgcagctgatcagtattgctccagagaacctgcagcatgacatcatcaccagcctacctgagatcctaggggattcccagcacgctgatgtggggaaagaactcagtgacctactgatagagaatacttcactcactgtcccaatcctggatgtcctttcaagcctccgacttgacccaaacttcctattgaaggttcgccagttggtgatggataagttgtcgtctattagattggaggatttacctgtgataataaagttcattcttcattccgtaacagccatggatacacttgaggtaatttctgagcttcgggagaagttggatctgcagcattgtgttttgccatcacggttacaggcttcccaagtaaagttgaaaagtaaaggacgagcaagttcctcaggaaatcaagaaagcagcggtcagagctgtattattctcctctttgatgtaataaagtcagctattagatatgagaaaaccatttcagaagcctggattaaggcaattgaaaacactgcctcagtatctgaacacaaggtgtttgacctggtgatgcttttcatcatctatagcaccaatactcagacaaagaagtacattgacagggtgctaagaaataagattcgatcaggctgcattcaagaacagctgctccagagtacattctctgttcattacttagttcttaaggatatgtgttcatccattctgtcgctggctcagagtttgcttcactctctagaccagagtataatttcatttggcagtctcctatacaaatatgcatttaagttttttgacacgtactgccagcaggaagtggttggtgccttagtgacccatatctgcagtgggaatgaagctgaagttgatactgccttagatgtccttctagagttggtagtgttaaacccatctgctatgatgatgaatgctgtctttgtaaagggcattttagattatctggataacatatcccctcagcaaatacgaaaactcttctatgttctcagcacactggcatttagcaaacagaatgaagccagcagccacatccaggatgacatgcacttggtgataagaaagcagctctctagcaccgtattcaagtacaagctcattgggattattggtgctgtgaccatggctggcatcatggcggcagacagaagtgaatcacctagtttgacccaagagagagccaacctgagcgatgagcagtgcacacaggtgacctccttgttgcagttggttcattcctgcagtgagcagtctcctcaggcctctgcactttactatgatgaatttgccaacctgatccaacatgaaaagctggatccaaaagccctggaatgggttgggcataccatctgtaatgatttccaggatgccttcgtagtggactcctgtgttgttccggaaggtgactttccatttcctgtgaaagcactgtacggactggaagaatacgacactcaggatgggattgccataaacctcctgccgctgctgttttctcaggactttgcaaaagatgggggtccggtgacctcacaggaatcaggccaaaaattggtgtctccgctgtgcctggctccgtatttccggttactgagactttgtgtggagagacagcataacggaaacttggaggagattgatggtctactagattgtcctatattcctaactgacctggagcctggagagaagttggagtccatgtctgctaaagagcgttcattcatgtgttctctcatatttcttactctcaactggttccgagagattgtaaatgccttctgccaggaaacatcacctgagatgaaggggaaggtgctcactcggttaaagcacattgtagaattgcaaataatcctggaaaagtacttggcagtcaccccagactatgtccctcctcttggaaactttgatgtggaaactttagatataacacctcatactgttactgctatttcagcaaaaatcagaaagaaaggaaaaatagaaaggaaacaaaaaacagatggcagcaagacatcctcctctgacacactttcagaagagaaaaattcagaatgtgaccctacgccatctcatagaggccagctaaacaaggagttcacagggaaggaagaaaagacatcattgttactacataattcccatgcttttttccgagagctggacattgaggtcttctctattctacattgtggacttgtgacgaagttcatcttagatactgaaatgcacactgaagctacagaagttgtgcaacttgggccccctgagctgcttttcttgctggaagatctctcccagaagctggagagtatgctgacacctcctattgccaggagagtcccctttctcaagaacaaaggaagccggaatattggattctcacatctccaacagagatctgcccaagaaattgttcattgtgtttttcaactgctgaccccaatgtgtaaccacctggagaacattcacaactattttcagtgtttagctgctgagaatcacggtgtagttgatggaccaggagtgaaagttcaggagtaccacataatgtcttcctgctatcagaggctgctgcagatttttcatgggctttttgcttggagtggattttctcaacctgaaaatcagaatttactgtattcagccctccatgtccttagtagccgactgaaacagggagaacacagccagcctttggaggaactactcagccagagcgtccattacttgcagaatttccatcaaagcattcccagtttccagtgtgctctttatctcatcagacttttgatggttattttggagaaatcaacagcttctgctcagaacaaagaaaaaattgcttcccttgccagacaattcctctgtcgggtgtggccaagtggggataaagagaagagcaacatctctaatgaccagctccatgctctgctctgtatctacctggagcacacagagagcattctgaaggccatagaggagattgctggtgttggtgtcccagaactgatcaactctcctaaagatgcatcttcctccacattccctacactgaccaggcatacttttgttgttttcttccgtgtgatgatggctgaactagagaagacggtgaaaaaaattgagcctggcacagcagcagactcgcagcagattcatgaagagaaactcctctactggaacatggctgttcgagacttcagtatcctcatcaacttgataaaggtatttgatagtcatcctgttctgcatgtatgtttgaagtatgggcgtctctttgtggaagcatttctgaagcaatgtatgccgctcctagacttcagttttagaaaacaccgggaagatgttctgagcttactggaaaccttccagttggacacaaggctgcttcatcacctgtgtgggcattccaagattcaccaggacacgagactcacccaacatgtgcctctgctcaaaaagaccctggaacttttagtttgcagagtcaaagctatgctcactctcaacaattgtagagaggctttctggctgggcaatctaaaaaaccgggacttgcagggtgaagagattaagtcccaaaattcccaggagagcacagcagatgagagtgaggatgacatgtcatcccaggcctccaagagcaaagccactgaggatggtgaagaagacgaagtaagtgctggagaaaaggagcaagatagtgatgagagttatgatgactctgattagaccccagataaattgttgcctgcttctgtgtctctgccagcctgtgatcattttgtgttagagtttgaaatccgctgtttgcctttcttactggtaggatccttttttgttcctctttttttttttttttttttttttttaaagacggggactcgctgtgtttcccaggctggagtgcagtgctgcaatcttggctcactgcaacctccatctcctaggttcaagcgattctcctgcctcagcctcctgagtagctgggacgacaggcacatgccaccatgcccagctaatttttgtatttttagtagatacggggttttaccatgtcggccagatggtctcaatctcctgaactcatgatccacctgcctcagcctcccaaagtgctgggattacaggcatgagccaccgctcccagccatattttgttcttaaagtggggtctttattaacttgtggacatcatggattgtctaacaccatcacagtccctggctcaggattctaatgtagcattatttattggtttggataaacccagctgtgctacactgcagagtaaaatctctgagtcatgattctggactttgggagctagttttgaaactctgatttattgtagaacttaggcttgtaccaattttacaaataaattctgttctaagttc

SEQ ID NO: 10392 - DNA, 5185 bp, Homo sapiens
  source 1..5185: mol_type = unassigned DNA
gtctctcgaggccccgctcccctgcggcctaatctctaagtccgggccgcggtcggcgttctcctctggggctccgcgccccgaaccttggcttcctcatctgccctgagatgggataatccccacaggaagtaatttaagtgcacaagacattggtcaaaatggtttccaaaagaagactgtcaaaatctgaggataaagagagcctgacagaagatgcctccaaaaccaggaagcaaccactttccaaaaagacaaagaaatctcatattgctaatgaagttgaagaaaatgacagcatctttgtaaagcttcttaagatatcaggaattattcttaaaacgggagagagtcagaatcaactagctgtggatcaaatagctttccaaaagaagctctttcagaccctgaggagacacccttcctatcccaaaataatagaagaatttgttagtggcctggagtcttacattgaggatgaagacagtttcaggaactgccttttgtcttgtgagcgtctgcaggatgaggaagccagtatgggtgcatcttattctaagagtctcatcaaactgcttctggggattgacatactgcagcctgccattatcaaaaccttatttgagaagttgccagaatatttttttgaaaacaagaacagtgatgaaatcaacatacctcgactcattgtcagtcaactaaaatggcttgacagagttgtggatggcaaggacctcaccaccaagatcatgcagctgatcagtattgctccagagaacctgcagcatgacatcatcaccagcctacctgagatcctaggggattcccagcacgctgatgtggggaaagaactcagtgacctactgatagagaatacttcactcactgtcccaatcctggatgtcctttcaagcctccgacttgacccaaacttcctattgaaggttcgccagttggtgatggataagttgtcgtctattagattggaggatttacctgtgataataaagttcattcttcattccgtaacagccatggatacacttgaggtaatttctgagcttcgggagaagttggatctgcagcattgtgttttgccatcacggttacaggcttcccaagtaaagttgaaaagtaaaggacgagcaagttcctcaggaaatcaagaaagcagcggtcagagctgtattattctcctctttgatgtaataaagtcagctattagatatgagaaaaccatttcagaagcctggattaaggcaattgaaaacactgcctcagtatctgaacacaaggtgtttgacctggtgatgcttttcatcatctatagcaccaatactcagacaaagaagtacattgacagggtgctaagaaataagattcgatcaggctgcattcaagaacagctgctccagagtacattctctgttcattacttagttcttaaggatatgtgttcatccattctgtcgctggctcagagtttgcttcactctctagaccagagtataatttcatttggcagtctcctatacaaatatgcatttaagttttttgacacgtactgccagcaggaagtggttggtgccttagtgacccatatctgcagtgggaatgaagctgaagttgatactgccttagatgtccttctagagttggtagtgttaaacccatctgctatgatgatgaatgctgtctttgtaaagggcattttagattatctggataacatatcccctcagcaaatacgaaaactcttctatgttctcagcacactggcatttagcaaacagaatgaagccagcagccacatccaggatgacatgcacttggtgataagaaagcagctctctagcaccgtattcaagtacaagctcattgggattattggtgctgtgaccatggctggcatcatggcggcagacagaagtgaatcacctagtttgacccaagagagagccaacctgagcgatgagcagtgcacacaggtgacctccttgttgcagttggttcattcctgcagtgagcagtctcctcaggcctctgcactttactatgatgaatttgccaacctgatccaacatgaaaagctggatccaaaagccctggaatgggttgggcataccatctgtaatgatttccaggatgccttcgtagtggactcctgtgttgttccggaaggtgactttccatttcctgtgaaagcactgtacggactggaagaatacgacactcaggatgggattgccataaacctcctgccgctgctgttttctcaggactttgcaaaagatgggggtccggtgacctcacaggaatcaggccaaaaattggtgtctccgctgtgcctggctccgtatttccggttactgagactttgtgtggagagacagcataacggaaacttggaggagattgatggtctactagattgtcctatattcctaactgacctggagcctggagagaagttggagtccatgtctgctaaagagcgttcattcatgtgttctctcatatttcttactctcaactggttccgagagattgtaaatgccttctgccaggaaacatcacctgagatgaaggggaaggtgctcactcggttaaagcacattgtagaattgcaaataatcctggaaaagtacttggcagtcaccccagactatgtccctcctcttggaaactttgatgtggaaactttagatataacacctcatactgttactgctatttcagcaaaaatcagaaagaaaggaaaaatagaaaggaaacaaaaaacagatggcagcaagacatcctcctctgacacactttcagaagagaaaaattcagaatgtgaccctacgccatctcatagaggccagctaaacaaggagttcacagggaaggaagaaaagacatcattgttactacataattcccatgcttttttccgagagctggacattgaggtcttctctattctacattgtggacttgtgacgaagttcatcttagatactgaaatgcacactgaagctacagaagttgtgcaacttgggccccctgagctgcttttcttgctggaagatctctcccagaagctggagagtatgctgacacctcctattgccaggagagtcccctttctcaagaacaaaggaagccggaatattggattctcacatctccaacagagatctgcccaagaaattgttcattgtgtttttcaactgctgaccccaatgtgtaaccacctggagaacattcacaactattttcagtgtttagctgctgagaatcacggtgtagttgatggaccaggagtgaaagttcaggagtaccacataatgtcttcctgctatcagaggctgctgcagatttttcatgggctttttgcttggagtggattttctcaacctgaaaatcagaatttactgtattcagccctccatgtccttagtagccgactgaaacagggagaacacagccagcctttggaggaactactcagccagagcgtccattacttgcagaatttccatcaaagcattcccagtttccagtgtgctctttatctcatcagacttttgatggttattttggagaaatcaacagcttctgctcagaacaaagaaaaaattgcttcccttgccagacaattcctctgtcgggtgtggccaagtggggataaagagaagagcaacatctctaatgaccagctccatgctctgctctgtatctacctggagcacacagagagcattctgaaggccatagaggagattgctggtgttggtgtcccagaactgatcaactctcctaaagatgcatcttcctccacattccctacactgaccaggcatacttttgttgttttcttccgtgtgatgatggctgaactagagaagacggtgaaaaaaattgagcctggcacagcagcagactcgcagcagattcatgaagagaaactcctctactggaacatggctgttcgagacttcagtatcctcatcaacttgataaaggtatttgatagtcatcctgttctgcatgtatgtttgaagtatgggcgtctctttgtggaagcatttctgaagcaatgtatgccgctcctagacttcagttttagaaaacaccgggaagatgttctgagcttactggaaaccttccagttggacacaaggctgcttcatcacctgtgtgggcattccaagattcaccaggacacgagactcacccaacatgtgcctctgctcaaaaagaccctggaacttttagtttgcagagtcaaagctatgctcactctcaacaattgtagagaggctttctggctgggcaatctaaaaaaccgggacttgcagggtgaagagattaagtcccaaaattcccaggagagcacagcagatgagagtgaggatgacatgtcatcccaggcctccaagagcaaagccactgaggatggtgaagaagacgaagtaagtgctggagaaaaggagcaagatagtgatgagagttatgatgactctgattagaccccagataaattgttgcctgcttctgtgtctctgccagcctgtgatcattttgtgttagagtttgaaatccgctgtttgcctttcttactggtaggatccttttttgttcctctttttttttttttttttttttttttaaagacggggactcgctgtgtttcccaggctggagtgcagtgctgcaatcttggctcactgcaacctccatctcctaggttcaagcgattctcctgcctcagcctcctgagtagctgggacgacaggcacatgccaccatgcccagctaatttttgtatttttagtagatacggggttttaccatgtcggccagatggtctcaatctcctgaactcatgatccacctgcctcagcctcccaaagtgctgggattacaggcatgagccaccgctcccagccatattttgttcttaaagtggggtctttattaacttgtggacatcatggattgtctaacaccatcacagtccctggctcaggattctaatgtagcattatttattggtttggataaacccagctgtgctacactgcagagtaaaatctctgagtcatgattctggactttgggagctagttttgaaactctgatttattgtagaacttaggcttgtaccaattttacaaataaattctgttctaagttc

SEQ ID NO: 10393 - DNA, 2554 bp, Homo sapiens
  source 1..2554: mol_type = unassigned DNA
aacggctgcggcttcgggcggccgggtttctccggtctcccaacgccgaggagagcttgtaacaggcgctggagctggcccgccaccgccgcgtcagggacggcgctggagtcctccgttcccctcagcctctgagctgaggccccacaccagagtagggggcggcgcggcacccgtgccccggcatggcgacaccggacgcggggctccctggggctgagggcgtggagccggcgccctgggcgcagctggaggcccccgcccgcctcctgctgcaggcgctgcaggcggggcctgagggggcgcggcgcggcctgggggtgctccgggcgctgggcagccgcggctgggagcccttcgactggggtcgcttgctcgaggccctgtgccgggaggagccggtcgtgcaggggcctgacggccgtctggagctgaaaccactgttgctgcgattgccccggatatgccagaggaacctgatgtccctgctgatggccgttcggccatcgctgccggaaagtgggctcctctctgtgctgcagattgcccagcaggacctagcccctgacccagatgcctggctccgtgccctgggggaattgctgcgaagggatttgggggtggggacctccatggagggagcttctccactgtctgaaagatgccagagacagctccaaagtctatgtagggggctgggcctggggggcaggaggttgaaatccccccaggctccagaccctgaagaagaggagaacagggactcccagcagcctgggaaacgcagaaaggactcagaggaagaggctgccagtcctgaggggaagagggtccccaaaagattacggtgttgggaagaggaagaagatcatgagaaggagagacccgaacataagtcactggaatccctggcagatggaggaagtgcatctcctattaaggaccagcctgtcatggcagttaagactggcgaggacggttcgaatctggatgatgctaaaggtctggctgagagtttggagttgcccaaagctatccaggaccagcttcccaggctgcagcagctgctgaagaccttggaggaggggttagagggattggaggatgcccccccagttgagctacagcttcttcacgaatgtagtcccagccagatggacttgctgtgtgcccagctgcagctccctcagctctcagacctcggtctcctgcggctctgcacctggctgctggccctttcacctgatctcagcctcagcaatgctactgtgctgaccagaagcctctttcttggacggatcctctccttgacttcctcagcctcccgcctgcttacaactgccctgacctccttctgtgccaaatatacataccctgtctgcagcgccctccttgaccctgtgctccaggccccaggcacaggtcctgctcaaacagagttactgtgttgccttgtgaagatggagtccctggagccagatgcacaggttctaatgctgggacagatcttggagctgccctggaaggaggaaactttcttggtgttgcagtcactcctagagcggcaggtggagatgacccctgagaagttcagtgtcttaatggagaagctctgtaaaaaggggctggcagccaccacctccatggcctatgccaagctcatgctgacagtgatgaccaagtatcaggctaacatcactgagacccagaggctgggcctggctatggccctagaacctaacaccaccttcctgaggaagtccctgaaggccgccttgaaacatttgggcccctgaccatccaccaagggaccaccctcttggtgctccatcaccagcttcctgaagggcatttctttcttcaccaccttgtcttgagccctagcctgaggataaaggctgagcctggccatcccagattgcaactgcctccctgttacaggctgcatagggaatattggcttcccagccagcagggaggctcctgggctaagggagctcagctatattttctttttcatttcttttgtttttgagagaaggtattgctctgtcatccaggctggagtgcagtgatgcgattgatcatggctcactgtaacctctgcctcccaggctcgatcctcccatgtcagcctcccaagtagctgggactacatgcacatgacactatgcccagctaattttttattttgtagataatatgctggtcagggctggtcttgaactcctgagctcaagtgatcttcctgccttggcacccaaagtgttgagatttacaggtgtgagccaccacaccaggccagagctatatttccaaaggctgctggccccaggcacactcctcatcaattctcaggctgcagggacaaactttccgatagggctcagtaggatcaagccgacccagagtgggcatgggatgctccaggaggtctggggtaccagtgggctcagatgaagctcttgtgctcatgtatattatgaccttctgtgtttttgtttctgacttgaataatttatcaatggtgttgaataaaagcaagttcaataat

SEQ ID NO: 10394 - DNA, 3309 bp, Homo sapiens
  source 1..3309: mol_type = unassigned DNA
tgaaagcggaagtagggccttcgcgcacctcatggaatcccttctgcagcacctggatcgcttttccgagcttctggcggtctcaagcactacctacgtcagcacctgggaccccgccaccgtgcgccgggccttgcagtgggcgcgctacctgcgccacatccatcggcgctttggtcggcatggccccattcgcacggctctggagcggcggctgcacaaccagtggaggcaagagggcggctttgggcggggtccagttccgggattagcgaacttccaggccctcggtcactgtgacgtcctgctctctctgcgcctgctggagaaccgggccctcggggatgcagctcgttaccacctggtgcagcaactctttcccggcccgggcgtccgggacgccgatgaggagacactccaagagagcctggcccgccttgcccgccggcggtctgcggtgcacatgctgcgcttcaatggctatagagagaacccaaatctccaggaggactctctgatgaagacccaggcggagctgctgctggagcgtctgcaggaggtggggaaggccgaagcggagcgtcccgccaggtttctcagcagcctgtgggagcgcttgcctcagaacaacttcctgaaggtgatagcggtggcgctgttgcagccgcctttgtctcgtcggccccaagaagagttggaacccggcatccacaaatcacctggagaggggagccaagtgctagtccactggcttctggggaattcggaagtctttgctgccttttgtcgcgccctcccagccgggcttttgactttagtgactagccgccacccagcgctgtctcctgtctatctgggtctgctaacagactggggtcaacgtttgcactatgaccttcagaaaggcatttgggttggaactgagtcccaagatgtgccctgggaggagttgcacaataggtttcaaagcctctgtcaggcccctccacctctgaaagataaagttctaactgccctggagacctgtaaagcgcaggatggagattttgaagtacctggtcttagcatctggacagacctcttattagctcttcgtagtggtgcatttaggaaaagacaagttttgggtctcagcgcaggcctcagttctgtataggcaatgctgtgttattacttgaatatagaatatatagtttacaaaatgaaaattacaatgttctcaccaaatatatgccttcgtgtgtccaaagtataattattttagatgctaattttgaatagtttattaaacagttataaatatgcaaagtagctggcatgtagtgtcacggattttctggatagaggaagtgattggaagtactccacttaaagccatggaattagcaatagtttgctttttaatagaaggcccatttgtaagaatgttgaaaatatgtgtaccgtttaaagaaaaagcagctttaaagtgacaaacaaaataccctttttcttttagtatggtttatttttctaggttttctgtccctccctcagtagtgaagagttttctttattcctggcagtgtcaggaatattggtttgaaaagctgttggcctatctggagtttggccttgttaacctagtattctaaccagttaaccagccttagtatgcattaaaattgtattgttcagaaagtttgtttctcattttctgcaaattcttactttgaaaatgaatcaccacatagtatgtccctttaaagcattgacgcacagacaaatgtttaaagcacagtaaatacgaatatatgcctttggatattaaattaatgcttgatgataaaagaatcaaacttttttttttttgagatggagtctcgctctgtcacccagactggagtgcagtggtgtgatcactgctcagtgcaacctctgcctcccaggatcaagcaattctgactcagcctcccaagtagctgggattacaggcgcaggccaccatgcccggctaattttttgtatttttagtagagacggggtttcaccatgctggccaggctggtctcaaacacctgaccttgtgatccgtccgccttggcctcccaaagtgctgggattacaggcgtgagccaccgcgcctggccaaaacaacattttaagtagaagatccaggttttagtgcagcttctgccgttaactaggttaataaatcacaaccttggggccacagttgccttatatgtaaatgaagtgtttagaataaaatagttaaatttccttatttttcccttggtggctgccctgtggaaacagtttagaatatttgttttgtgtgtaggaacctagttgtgttagtttacctgggtgttccacagctgatagtgattgccttgaataaattcaagggcaatttattcatttttactagggagatagacctttacagcaatcaagatatttttgtccatatccaggttagctggtaagaggatttttttggagaaaaaaatgatatttagaaagttaatttctaattccggaatggaataaaaacaatatgagtagtgtaatcttgtagaaaaagagttgtataatcttgtagaatttctcattctgtggtacaacccaggggtaaactattattccagtagtcagtacacttttctagataaatcttgagtgaaaaccagcaatttctttttccttgtggtctgattcctttttctaatccatgaaggccatcttgtagattacatttatcattaatgcaagaataaagacaattcctcctgtcagttgcgtgaattttttttaagaaacaacccagtgaagagttctaccatagcaaggcctaatgttagctttagctttagaaaataacagtttgtgaacttacttccctatatttgcagctgtatctcacactatgatttacaataaaattgtaaagattgacaatagacttaagaaataacattttaaaatctattttatacttaccatttattattctgttattttagtctccatatgttcattacatacataatcttatttaatcttcacaccaaaactgtattcttatgaatatacgctaaaagattaagtaaaatgcccaagggtataaacaaaagcaacatgaaagtggaagccgtatctgtcatttattttatttccagaagcctagcacagtgtccagcatatggtagatacttgtagtgtttgaataaatgaaaccagcattagagctttatatactttctcttaaggacttgaaaagattaggaatctacgcatacactgagagagaaaaaagtgagagga

SEQ ID NO: 10395 - DNA, 4713 bp, Homo sapiens
  source 1..4713: mol_type = unassigned DNA
gccgcgggggcggatcttgttgttacgggtaacggaagtgtggcggcgttgggttgagcgggctttttggaagtttgtggcggagttctgtgatatgagcaacaatggaccagaagattttatctctagcagcagaaaaaacagcagacaaactgcaagaatttcttcaaaccctgagagaaggtgatttgactaatctccttcagaatcaagcagtgaaaggaaaagttgctggagcactcctgagagccatcttcaaaggttccccctgctctgaggaagctggaacacttaggagacgtaagatatacacttgttgtatccagttggtggaatcgggggatttgcagaaagaaatagcgtctgagatcataggattactgatgctggaggctcaccattttccaggaccattattggttgaattagccaatgagtttattagtgctgtcagagaaggcagcctagtgaatggaaaatctttggagttactacctatcattctcactgccctggctacgaaaaaggaaaatctggcttatggaaaaggtgtactgagtggggaagaatgtaagaaacagttgattaacaccctgtgttctggcaggtgggatcagcaatatgtaatccaactcacctccatgttcaaggatgtccctctgactgcagaagaggtggaatttgtggtggaaaaagcattgagcatgttctccaagatgaatcttcaagaaataccacctttggtctatcagcttctggttctctcctccaagggaagcagaaagagtgttttggaaggaatcatagccttcttcagtgcactagataagcagcacaatgaggaacagagtggtgacgagctattggatgttgtcactgtgccatcaggtgaacttcgtcatgtggaaggcaccattattctacacattgtgtttgccatcaaattggactatgaactaggcagagaactcgtgaaacacttaaaggtaggacagcaaggagattccaataataacttaagtcccttcagcattgctcttcttctgtctgtaacaagaatacaaagatttcaggaccaggtgcttgatcttttaaagacttcggttgtaaagagctttaaggatcttcaactcctccaaggctcaaaatttcttcagaatctagttcctcatagatcttatgtttcaaccatgatcttggaagtagtgaagaatagcgttcatagctgggaccatgttactcagggcctcgtagaacttggtttcattttgatggattcatatgggccaaagaaggttcttgatggaaaaactattgaaaccagcccaagtctttctagaatgccaaaccagcatgcatgtaagctcggagctaatatcctgttggaaacttttaagatccatgagatgatcagacaagaaattttggagcaggtcctcaacagggttgttaccagagcatcttctcccatcagtcatttcttagacctgctttcaaatatcgtcatgtatgcacccttagttcttcaaagttgttcttctaaagtcacagaagcttttgactatttgtcctttctgccccttcagactgtacaaaggctgcttaaggcagtgcagccccttctcaaagtcagcatgtcaatgagagactgcttgatacttgtccttcggaaagctatgtttgccaaccagcttgatgcccgaaaatctgcagttgctgggtttttgctgctcctgaagaactttaaagttttaggcagcctgtcatcctctcagtgcagtcagtctctcagtgtcagtcaggttcatgtggatgttcacagccattacaattctgtcgccaatgaaactttttgccttgagatcatggatagtttgaggagatgcttaagccagcaagctgatgttcgactcatgctttatgaggggttttatgatgttcttcgaaggaactctcagctggctaattcagtcatgcaaactctgctctcacagttaaaacagttctatgagccaaaacctgatctgctgcctcctctgaaattagaagcttgtattctgacccaaggagataagatctctctacaagaaccactggattatctgctgtgttgtattcagcattgtttggcctggtataagaatacagtcatacccttacagcagggagaggaggaagaggaggaggaagaggcattctacgaagacctagatgatatattggagtccattactaatagaatgattaagagtgagctggaagactttgaactggataaatcagcagatttttctcagagcaccagtattggcataaaaaataatatctgtgcttttcttgtgatgggagtttgtgaggttttaatagaatacaatttctccataagtagtttcagtaagaataggtttgaggacattctgagcttatttatgtgttacaaaaaactctctgacattcttaatgaaaaagcgggtaaagccaaaactaaaatggccaacaagacaagtgatagtcttttgtccatgaaatttgtgtccagtcttctcactgctcttttcagagtcttgctatggagatacacttcaattcctacttcagtggaagagtcgggaaagaaagagaaaggaaagagcatctcactgctgtgcttggagggtttacagaaaatattcagtgctgtgcaacagttctatcagcccaagattcagcagtttctcagagctctggatgtcacagataaggaaggagaagagagagaagatgcagatgtcagtgtcactcagagaacagcattccagatccggcaatttcagaggtccttgttgaatttacttagcagtcaagaggaagattttaatagcaaagaagccctcctgctagtcacggttcttaccagtttgtccaagttactggagccctcctctcctcagtttgtgcagatgttatcctggacatcaaagatttgcaaggaaaacagccgggaggatgccttgttttgcaagagcttgatgaacttgctcttcagcctgcatgtttcgtataagagtcctgtcattctgctgcgtgacttgtcccaggatatccacgggcatctgggagatatagaccaggatgtagaggtggagaaaacaaaccactttgcaatagtgaatttgagaacggctgcccccactgtctgtttacttgttctgagtcaggccgagaaggttctagaagaagtggactggctaatcaccaagcttaagggacaagtgagccaagaaaccttatcagaagaggcctcttctcaggcaaccctaccaaatcagcctgttgagaaagctatcatcatgcaactgggaactctgcttacatttttccacgagctggtgcagacagctctgccatcaggcagctgtgtggacaccttgttaaaggacttgtgcaaaatgtacaccacacttacagcccttgtcagatattatctccaggtgtgtcagagctccggaggaattccaaaaaatatggaaaagctggtgaagctgtctggttctcatctgacccccctgtgttattctttcatttcttacgtacagaataagagtaagagcctgaactatacgggagagaaaaaggagaaacctgctgccgttgccacagccatggccagagttcttcgggaaaccaagccaatccctaacctcatctttgccatagaacagtatgaaaaatttctcatccacctttctaagaagtccaaggtgaacctgatgcagcacatgaagctcagcacctcacgagacttcaagatcaaaggaaacatcctagacatggttcttcgagaggatggtgaagatgaaaatgaagagggcactgcatcagagcatgggggacagaacaaagaaccagccaagaagaaaaggaaaaaataaatgaaatgcctgagttaatgtgaactttggggcttctgcttcatttttacccaacaagcaacaatgccccttgtcctgtagtccacaccgatgttggcatcttggttctgaacccactgaattcaactgcaccttcagttagaaggaatcttcttggcaggtcctgctactgaaaaatggctggccttaggcaagcccttttgcaaaaagcacagctgaaagcctgagtttgggagcctgcaccaccccgatgaagctccacgggagcaaatacagagcctccaggcagtgctatggtccaggctggcttcgtttttccaaggagcctttggtgagttcaattatctggtaaatatccagcgcttcacctgaaagatagtgcaaattggttaggatgccacctcaagaactgtaactgagagctcagaagtgagcaaaggagcttaatgctaaggtcaaaaggagagtgaaaggttgagaacaattgccacgaacggtaatgttacatgttaggagggtctgttttctttttatataagtgtgtcttagatatattttaaatagaaaataagctttctgatttacttgtttggtatttaaagcacagtttgtttttctgtcacctatagagtgcaagaatgcactctatagaataaattatctttaaacatttcttctgtggttgaagtaggggacaggtacaggtagaatatttgaagctctgctgccttcatttctgaaacatcatatcacattcactctggacacagggcaccttataaactgaaattagcctagaata

SEQ ID NO: 10396 - DNA, 4749 bp, Homo sapiens
  source 1..4749: mol_type = unassigned DNA
tcttgttgttacgggtaacggaagtgtggcggcgttgggttgagcgggctttttggaagtttgtggcggagttctgtgatatgagcaacaatggaccagaagattttatctctagcagcagaaaaaacagcagacaaactgcaagaatttcttcaaaccctgagagaaggtgatttgactaatctccttcagaatcaagcagtgaaaggaaaagttgctggagcactcctgagagccatcttcaaaggttccccctgctctgaggaagctggaacacttaggagacgtaagatatacacttgttgtatccagttggtggaatcgggggatttgcagaaagaaatagcgtctgagatcataggattactgatgctggaggctcaccattttccaggaccattattggttgaattagccaatgagtttattagtgctgtcagagaaggcagcctagtgaatggaaaatctttggagttactacctatcattctcactgccctggctacgaaaaaggaaaatctggcttatggaaaaggtgtactgagtggggaagaatgtaagaaacagttgattaacaccctgtgttctggcaggtgggatcagcaatatgtaatccaactcacctccatgttcaaggatgtccctctgactgcagaagaggtggaatttgtggtggaaaaagcattgagcatgttctccaagatgaatcttcaagaaataccacctttggtctatcagcttctggttctctcctccaagggaagcagaaagagtgttttggaaggaatcatagccttcttcagtgcactagataagcagcacaatgaggaacagagtggtgacgagctattggatgttgtcactgtgccatcaggtgaacttcgtcatgtggaaggcaccattattctacacattgtgtttgccatcaaattggactatgaactaggcagagaactcgtgaaacacttaaaggtaggacagcaaggagattccaataataacttaagtcccttcagcattgctcttcttctgtctgtaacaagaatacaaagatttcaggaccaggtgcttgatcttttaaagacttcggttgtaaagagctttaaggatcttcaactcctccaaggctcaaaatttcttcagaatctagttcctcatagatcttatgtttcaaccatgatcttggaagtagtgaagaatagcgttcatagctgggaccatgttactcagggcctcgtagaacttggtttcattttgatggattcatatgggccaaagaaggttcttgatggaaaaactattgaaaccagcccaagtctttctagaatgccaaaccagcatgcatgtaagctcggagctaatatcctgttggaaacttttaagatccatgagatgatcagacaagaaattttggagcaggtcctcaacagggttgttaccagagcatcttctcccatcagtcatttcttagacctgctttcaaatatcgtcatgtatgcacccttagttcttcaaagttgttcttctaaagtcacagaagcttttgactatttgtcctttctgccccttcagactgtacaaaggctgcttaaggcagtgcagccccttctcaaagtcagcatgtcaatgagagactgcttgatacttgtccttcggaaagctatgtttgccaaccagcttgatgcccgaaaatctgcagttgctgggtttttgctgctcctgaagaactttaaagttttaggcagcctgtcatcctctcagtgcagtcagtctctcagtgtcagtcaggttcatgtggatgttcacagccattacaattctgtcgccaatgaaactttttgccttgagatcatggatagtttgaggagatgcttaagccagcaagctgatgttcgactcatgctttatgaggggttttatgatgttcttcgaaggaactctcagctggctaattcagtcatgcaaactctgctctcacagttaaaacagttctatgagccaaaacctgatctgctgcctcctctgaaattagaagcttgtattctgacccaaggagataagatctctctacaagaaccactggattatctgctgtgttgtattcagcattgtttggcctggtataagaatacagtcatacccttacagcagggagaggaggaagaggaggaggaagaggcattctacgaagacctagatgatatattggagtccattactaatagaatgattaagagtgagctggaagactttgaactggataaatcagcagatttttctcagagcaccagtattggcataaaaaataatatctgtgcttttcttgtgatgggagtttgtgaggttttaatagaatacaatttctccataagtagtttcagtaagaataggtttgaggacattctgagcttatttatgtgttacaaaaaactctctgacattcttaatgaaaaagcgggtaaagccaaaactaaaatggccaacaagacaagtgatagtcttttgtccatgaaatttgtgtccagtcttctcactgctcttttcagggatagtatccaaagccaccaagaaagcctttctgttctcaggtccagcaatgagtttatgcgctatgcagtgaatgtagctctgcagaaggtacagcagctaaaggaaacagggcatgtgagtggccctgatggccaaaacccagaaaagatctttcagaacctctgtgacataactcgagtcttgctatggagatacacttcaattcctacttcagtggaagagtcgggaaagaaagagaaaggaaagagcatctcactgctgtgcttggagggtttacagaaaatattcagtgctgtgcaacagttctatcagcccaagattcagcagtttctcagagctctggatgtcacagataaggaaggagaagagagagaagatgcagatgtcagtgtcactcagagaacagcattccagatccggcaatttcagaggtccttgttgaatttacttagcagtcaagaggaagattttaatagcaaagaagccctcctgctagtcacggttcttaccagtttgtccaagttactggagccctcctctcctcagtttgtgcagatgttatcctggacatcaaagatttgcaaggaaaacagccgggaggatgccttgttttgcaagagcttgatgaacttgctcttcagcctgcatgtttcgtataagagtcctgtcattctgctgcgtgacttgtcccaggatatccacgggcatctgggagatatagaccaggatgtagaggtggagaaaacaaaccactttgcaatagtgaatttgagaacggctgcccccactgtctgtttacttgttctgagtcaggccgagaaggttctagaagaagtggactggctaatcaccaagcttaagggacaagtgagccaagaaaccttatcagaagaggcctcttctcaggcaaccctaccaaatcagcctgttgagaaagctatcatcatgcaactgggaactctgcttacatttttccacgagctggtgcagacagctctgccatcaggcagctgtgtggacaccttgttaaaggacttgtgcaaaatgtacaccacacttacagcccttgtcagatattatctccaggtgtgtcagagctccggaggaattccaaaaaatatggaaaagctggtgaagctgtctggttctcatctgacccccctgtgttattctttcatttcttacgtacagaataagagtaagagcctgaactatacgggagagaaaaaggagaaacctgctgccgttgccacagccatggccagagttcttcgggaaaccaagccaatccctaacctcatctttgccatagaacagtatgaaaaatttctcatccacctttctaagaagtccaaggtgaacctgatgcagcacatgaagctcagcacctcacgagacttcaagatcaaaggaaacatcctagacatggttcttcgagaggatggtgaagatgaaaatgaagagggcactgcatcagagcatgggggacagaacaaagaaccagccaagaagaaaaggaaaaaataaatgaaatgcctgagttaatgtgaactttggggcttctgcttcatttttacccaacaagcaacaatgccccttgtcctgtagtccacaccgatgttggcatcttggttctgaacccactgaattcaactgcaccttcagttagaaggaatcttcttggcaggtcctgctactgaaaaatggctggccttaggcaagcccttttgcaaaaagcacagctgaaagcctgagtttgggagcctgcaccaccccgatgaagctccacgggagcaaatacagagcctccaggcagtgctatggtccaggctggcttcgtttttccaaggagcctttggtgagttcaattatctggtaaatatccagcgcttcacctgaaagatagtgcaaattggttaggatgccacctcaagaactgtaactgagagctcagaagtgagcaaaggagcttaatgctaaggtcaaaaggagagtgaaaggttgagaacaattgccacgaacggtaatgttacatgttaggagggtctgttttctttttatataagtgtgtcttagatatattttaaatagaaaataagctttctgatttacttgtttggtatttaaagcacagtttgtttttctgtcacctatagagtgcaagaatgcactctatagaataaattatctttaaacatt

SEQ ID NO: 10397 - DNA, 3690 bp, Homo sapiens
  source 1..3690: mol_type = unassigned DNA
gagcgggctttttggaagtttgtggcggagttctgtgatatgagcaacaatggaccagaagattttatctctagcagcagaaaaaacagcagacaaactgcaagaatttcttcaaaccctgagagaaggtgatttgactaatctccttcagaatcaagcagtgaaaggaaaagttgctggagcactcctgagagccatcttcaaaggttccccctgctctgaggaagctggaacacttaggagacgtaagatatacacttgttgtatccagttggtggaatcgggggatttgcagaaagaaatagcgtctgagatcataggattactgatgctggaggctcaccattttccaggaccattattggttgaattagccaatgagtttattagtgctgtcagagaaggcagcctagtgaatggaaaatctttggagttactacctatcattctcactgccctggctacgaaaaaggaaaatctggcttatggaaaaggtgtactgagtggggaagaatgtaagaaacagttgattaacaccctgtgttctggcaggtgggatcagcaatatgtaatccaactcacctccatgttcaaggatgtccctctgactgcagaagaggtggaatttgtggtggaaaaagcattgagcatgttctccaagatgaatcttcaagaaataccacctttggtctatcagcttctggttctctcctccaagggaagcagaaagagtgttttggaaggaatcatagccttcttcagtgcactagataagcagcacaatgaggaacagagtggtgacgagctattggatgttgtcactgtgccatcaggtgaacttcgtcatgtggaaggcaccattattctacacattgtgtttgccatcaaattggactatgaactaggcagagaactcgtgaaacacttaaaggtaggacagcaaggagattccaataataacttaagtcccttcagcattgctcttcttctgtctgtaacaagaatacaaagatttcaggaccaggtgcttgatcttttaaagacttcggttgtaaagagctttaaggatcttcaactcctccaaggctcaaaatttcttcagaatctagttcctcatagatcttatgtttcaaccatgatcttggaagtagtgaagaatagcgttcatagctgggaccatgttactcagggcctcgtagaacttggtttcattttgatggattcatatgggccaaagaaggttcttgatggaaaaactattgaaaccagcccaagtctttctagaatgccaaaccagcatgcatgtaagctcggagctaatatcctgttggaaacttttaagatccatgagatgatcagacaagaaattttggagcaggtcctcaacagggttgttaccagagcatcttctcccatcagtcatttcttagacctgctttcaaatatcgtcatgtatgcacccttagttcttcaaagttgttcttctaaagtcacagaagcttttgactatttgtcctttctgccccttcagactgtacaaaggctgcttaaggcagtgcagccccttctcaaagtcagcatgtcaatgagagactgcttgatacttgtccttcggaaagctatgtttgccaaccagcttgatgcccgaaaatctgcagttgctgggtttttgctgctcctgaagaactttaaagttttaggcagcctgtcatcctctcagtgcagtcagtctctcagtgtcagtcaggttcatgtggatgttcacagccattacaattctgtcgccaatgaaactttttgccttgagatcatggatagtttgaggagatgcttaagccagcaagctgatgttcgactcatgctttatgaggggttttatgatgttcttcgaaggaactctcagctggctaattcagtcatgcaaactctgctctcacagttaaaacagttctatgagccaaaacctgatctgctgcctcctctgaaattagaagcttgtattctgacccaaggagataagatctctctacaagaaccactggattatctgctgtgttgtattcagcattgtttggcctggtataagaatacagtcatacccttacagcagggagaggaggaagaggaggaggaagaggcattctacgaagacctagatgatatattggagtccattactaatagaatgattaagagtgagctggaagactttgaactggataaatcagcagatttttctcagagcaccagtattggcataaaaaataatatctgtgcttttcttgtgatgggagtttgtgaggttttaatagaatacaatttctccataagtagtttcagtaagaataggtttgaggacattctgagcttatttatgtgttacaaaaaactctctgacattcttaatgaaaaagcgggtaaagccaaaactaaaatggccaacaagacaagtgatagtcttttgtccatgaaatttgtgtccagtcttctcactgctcttttcagagtcttgctatggagatacacttcaattcctacttcagtggaagagtcgggaaagaaagagaaaggaaagagcatctcactgctgtgcttggagggtttacagaaaatattcagtgctgtgcaacagttctatcagcccaagattcagcagtttctcagagctctggatgtcacagataaggaaggagaagagagagaagatgcagatgtcagtgtcactcagagaacagcattccagatccggcaatttcagaggtccttgttgaatttacttagcagtcaagaggaagattttaatagcaaagaagccctcctgctagtcacggttcttaccagtttgtccaagttactggagccctcctctcctcagtttgtgcagatgttatcctggacatcaaagatttgcaaggaaaacagccgggaggatgccttgttttgcaagagcttgatgaacttgctcttcagcctgcatgtttcgtataagagtcctgtcattctgctgcgtgacttgtcccaggatatccacgggcatctgggagatatagaccaggatgtagaggtggagaaaacaaaccactttgcaatagtgaatttgagaacggctgcccccactgtctgtttacttgttctgagtcaggccgagaaggttctagaagaagtggactggctaatcaccaagcttaagggacaagtgagccaagaaaccttatcagtatctccaggtgtgtcagagctccggaggaattccaaaaaatatggaaaagctggtgaagctgtctggttctcatctgacccccctgtgttattctttcatttcttacgtacagaataagagtaagagcctgaactatacgggagagaaaaaggagaaacctgctgccgttgccacagccatggccagagttcttcgggaaaccaagccaatccctaacctcatctttgccatagaacagtatgaaaaatttctcatccacctttctaagaagtccaaggtgaacctgatgcagcacatgaagctcagcacctcacgagacttcaagatcaaaggaaacatcctagacatggttcttcgagaggatggtgaagatgaaaatgaagagggcactgcatcagagcatgggggacagaacaaagaaccagccaagaagaaaaggaaaaaataaatgaaatgcctgagttaatgtg

SEQ ID NO: 10398 - DNA, 1061 bp, Homo sapiens
  source 1..1061: mol_type = unassigned DNA
ggaagtttgtggcggaggtgaggccgaggtgactgcagagcggctcgcgagagtctccctctgttgccaggctggagtgcagtggcgcgatctcggctcactgcaacctccgcctcctgagttcaagtgattctcctgcctcagcctcacaagtagctgggactacagggttttggactgataaagcaatggaagccactgaagagctttaagatgaggatggcatggagggaagataagtcacataatcagttctgtgatatgagcaacaatggaccagaagattttatctctagcagcagaaaaaacagcagacaaactgcaagaatttcttcaaaccctgagagaaggtgatttgactaatctccttcagaatcaagcagtgaaaggaaaagttgctggagcactcctgagagccatcttcaaaggttccccctgctctgaggaagctggaacacttaggagacgtaagatatacacttgttgtatccagttggtggaatcgggggatttgcagaaagaaatagcgtctgagatcataggattactgatgctggaggctcaccattttccaggaccattattggttgaattagccaatgagtttattagtgctgtcagagaaggcagcctagtgaatggaaaatctttggagttactacctatcattctcactgccctggctacgaaaaaggaaaatctggcttatggaaaaggtgtactgagtggggaagaatgtaagaaacagttgattaacaccctgtgttctggcaggtgggatcagcaatatgtaatccaactcacctccatgttcaaggatgtccctctgactgcagaagaggtggaatttgtggtggaaaaagcattgagcatgttctccaagatgaatcttcaagaaataccacctttggtctatcagcttctggttctctcctccaagggaagcagaaagagtgttttggaaggaatcatagccttcttcagtgcactagataagcagcacaatgaggaacagagtggtgacgagtgagtaatatagtgtagaaataaagatcattttt

SEQ ID NO: 10399 - DNA, 1683 bp, Homo sapiens
  source 1..1683: mol_type = unassigned DNA
gtctagagcttttctgtgtttctccggacttcgagccatggcggtgacggaagcgagcctgttgcgccagtgccccctgcttctgccccagaaccggtcgaaaaccgtgtatgagggattcatctcggctcagggaagagacttccaccttaggatagtgttgcctgaagatttacaactgaagaatgcaagattattatgtagttggcagctgagaacaatacttagtggataccatcgaatagtacaacagagaatgcagcactctcctgatctaatgagctttatgatggagttgaagatgcttttggaagttgccttaaagaatagacaagagctgtatgcactacctcctcctccccagttctactcaagccttattgaagagataggaactcttggttgggataaacttgtgtatgcggatacctgcttcagtaccatcaagttaaaagcagaagatgcttctggtagagagcatttaatcactctcaagttgaaggcaaagtatcctgcagaatcaccagattattttgtggattttcctgttccattttgtgcctcctggacacctcagagctccttaataagcatttatagtcagtttttggcagcaatagaatcactaaaggcattctgggatgttatggatgaaatcgatgagaagacctgggtacttgagccagaaaaacctccacggagtgcaacagcacgcagaattgcattaggtaataatgtttccataaatatagaggtagaccccaggcatcctactatgcttcctgagtgcttctttcttggagctgaccatgtggtaaaacccctgggaattaagctgagcaggaacatacatttgtgggatccagaaaatagtgtgttacaaaatttgaaagatgttttagaaattgattttccagctcgtgctatcctggaaaaatctgattttactatggattgtggaatttgttatgcttatcaacttgacggtaccattcctgatcaagtgtgtgataattctcagtgtggacaacctttccatcaaatatgcttatatgagtggctgagaggactactaactagtagacagagttttaacatcatatttggtgaatgtccatattgtagtaagccaattaccttaaaaatgtctggaaggaaacactgaaataagaatacaacatttcggtgaagagctggaaacttaaaaaattatcaaaaggaattttggtatcatcttcagagaaaaaataaagcaagaaatactaacatcaaaaggacaggtatgatgatgcgataataataaacatctgcgtttgtctcttcactaagagtaaactgggaaattgtaggccaaagtccagttgaactttctaagtctgtgatccccgtgctgactgtggaagtgtatttataccaagatggagatcttgacttcttgaatatatctggactggtaaaatcttgatgaggctcataaaatgagtttgggaattgtgtatagctgattttttgtgggaaactgtttacttcattcaaaggttcttgagactcttgatatttctgtcttctccttgtgctttcctatggaaaaaatacatatatagtttagtttgttagacgtgagttatccaagtatttattttgtgtagtgtgtaagaatgctaaataaaatgttatacaaga

SEQ ID NO: 10400 - DNA, 906 bp, Homo sapiens
  source 1..906: mol_type = unassigned DNA
agcaggtctagagcttttctgtgtttctccggacttcgagccatggcggtgacggaagcgagcctgttgcgccagtgccccctgcttctgccccagaaccggtcgaaaaccgtgtatgagggattcatctcggctcagggaagagacttccaccttaggatagtgttgcctgaagatttacaactgaagaatgcaagattattatgtagttggcagctgagaacaatacttagtggataccatcgaatagtacaacagagaatgcagcactctcctgatctaatgagctttatgatggagttgaagatgcttttggaagttgccttaaagaatagacaagagctgtatgcactacctcctcctccccagttctactcaagccttattgaagagataggaactcttggttgggataaagctccttaataagcatttatagtcagtttttggcagcaatagaatcactaaaggcattctgggatgttatggatgaaatcgatgagaagacctgggtacttgagccagaaaaacctccacggagtgcaacagcacgcagaattgcattaggtaataatgtttccataaatatagaggtagaccccaggcatcctactatgcttcctgagtgcttctttcttggagctgaccatggtatgacatctgagatttaaacgttttttaatagagtcataaaatccttgcctagcattgttaaattattagacaatattagtatattaatggtagtttttattttttgtctgagacggagttttgctcttgttgcccagtatgtagtgtaatggcgcgatctcggttcaccgcaataatgatagttattttaaatgacaatgtctcagcattctgaactgtataattttgttttttaacataatacatataatt

SEQ ID NO: 10401 - DNA, 7111 bp, Homo sapiens
  source 1..7111: mol_type = unassigned DNA
ggaaaccgatggggatcggaaccgtagcggttgagctgctgctgctacggatatctgacagaagccttcggtggttgtcggcctaatgagcggacggcaaagaacgctttttcagacgtggggctcaagtatctcccgatcatctgggactccgggttgcagctccggaactgagcgacctcagagccctggcagctccaaggcgcctttgccagcagcagcggaggctcagctggagtcggacgatgatgtgttgcttgtcgcggcgtacgaggctgagcggcagttgtgtctagagaatggcgggttctgcacctccgcgggcgccctgtggatttaccctaccaattgcccagtgcgggactaccagctgcacatttcccgggctgctctgttttgcaatacgctggtgtgtctgcctaccggactgggaaagacctttattgccgccgtggtcatgtacaatttctaccgctggttcccttcaggaaaggtggtcttcatggccccaacgaaacccttggtgacacagcagatcgaggcttgctaccaggtgatgggtatcccgcaatcccacatggccgaaatgacagggtctacacaagcttccaccaggaaggaaatatggtgcagtaagagagtgctttttcttacacctcaggtcatggtaaatgacctttctagaggagcttgtcccgctgctgaaataaagtgtttagttattgatgaagctcataaagctctcggaaactatgcttattgccaggttgtaagagaactagtcaaatatacaaatcactttagaatcttggctctaagtgccacaccaggtagtgatataaaggctgtgcaacaagttattactaacctgctaattgggcagatagagcttcgttctgaagattctccagatattttgacatattctcatgaaagaaaagttgaaaagcttattgttccgcttggtgaagaacttgcagccatccaaaagacctatatccagattttggaatcatttgctcgttctttgattcagaggaatgttttgatgagaagggatatcccaaatctaacaaaatatcagataattctggcaagagatcagtttaggaaaaacccatctccgaatattgtgggaatacaacaaggcataatcgagggagagtttgctatttgtattagtttatatcatggttatgaattattgcagcaaatgggaatgagatcattatatttcttcctttgtggaattatggatggaactaaagggatgacacggtcaaaaaatgaacttggccgaaatgaagacttcatgaaactctataatcatctagagtgtatgtttgcacgtacacgtagtacttcagcaaatggtatttctgctatccaacaaggagataaaaataaaaaatttgtttatagtcatccaaagttaaagaaattagaagaagttgtaattgaacacttcaagtcatggaatgctgaaaacactactgaaaagaaacgtgatgagacccgagttatgatcttctcttcatttcgagatagtgttcaagaaattgcagaaatgctttcacagcatcagccaattattagagtaatgacttttgtcggccatgcctcagggaaaagcacgaagggttttacccagaaggagcaactggaggtagtgaaacagtttcgtgacggtggttacaacacgctggtttctacctgtgtgggtgaagaaggtttggatataggagaagttgatcttataatatgttttgattcccagaagagcccaattcgtcttgtacaacgaatgggtagaactggccgtaaacgtcaaggcaggatagttattatcctttctgaaggacgagaggaacgtatttataatcagagtcagtccaacaaaagaagtatatataaagctatttcaagtaacaggcaggtccttcatttttaccaaagaagtccacgaatggttcctgatggaatcaacccaaaattacacaaaatgttcatcacacatggtgtctatgaaccagagaagccttctcggaacttgcagcgaaagtcatctatcttttcctatagggatggaatgaggcaaagtagcctaaagaaagattggttcttatcagaagaagaatttaaattatggaacagactttatagattaagggacagtgatgaaattaaagagataacattgcctcaagttcagttttcttctttacaaaatgaggaaaacaaaccagctcaagaatcaaccactggaattcatcaactctctctctctgaatggagactgtggcaagatcatcctttgcctacacatcaagttgatcactcagatcgatgccgccattttataggccttatgcaaatgatagagggaatgagacacgaagagggagaatgcagctatgaattggaagttgaatcttatttacaaatggaagatgttacctcaacatttattgctcccaggaatgaatctaataatcttgccagtgacacctttatcactcacaagaaatcgtcatttataaagaacataaatcaaggcagttcatcctcagtgatagaatctgatgaagaatgtgctgaaattgttaaacaaactcatatcaaacctactaaaattgtttctttaaagaaaaaagtgtctaaagaaataaaaaaagatcagcttaaaaaagaaaataatcacggtattatagattctgtagataatgacagaaattccactgttgaaaatatttttcaagaagacctaccaaatgataaaaggacatcagatacagatgaaattgctgccacatgtactattaatgaaaatgttattaaagaaccgtgtgtgttattaacagagtgtcagtttacaaataaatccactagttcacttgctggaaatgttttagattctggttataacagtttcaatgatgaaaaatctgtttcatctaacttatttcttccattcgaagaagagctttatattgttagaacagatgaccaattttataattgtcactcattgacaaaagaggtactagctaatgtagagagatttttatcttattctcctccgcctctcagtggactctcagacttggaatatgaaattgctaagggtactgcacttgagaatttgcttttcttaccctgtgcagagcatttacgaagtgataaatgcacctgtttgctgtcacattcagctgtgaattctcaacagaatttagaattgaattcacttaaatgtataaattatccatctgaaaaaagttgcctttatgatatacctaatgataatatttctgatgagccaagtctctgtgactgtgatgtacataaacataatcaaaatgaaaatttagtacctaacaatcgtgttcaaatacacagaagccctgcacagaatttagttggagagaacaatcatgatgttgataacagtgacctcccagtattgtccactgatcaagatgaaagtttgctgttatttgaagatgttaatacagagttcgacgatgtgagtctttcacccttgaacagtaaaagcgaatctttacctgtgtcagacaaaactgctattagtgaaacgcctctggtctctcagttcttaatttctgatgaacttttgttggacaataattctgaactccaagatcaaatcacccgtgatgctaatagttttaaatctcgtgatcagagaggtgtacaggaagaaaaagtgaagaatcatgaggatatttttgattgctctagggatttattttctgttacctttgatttaggattctgtagtccagattctgatgatgaaatattggaacatacatcagatagcaatagacctctagatgatctatatggaaggtatttggaaattaaggagataagtgatgcaaattatgtttcgaatcaagcactaataccaagagatcatagtaaaaattttactagtggaactgttattatcccatcaaatgaagatatgcagaatccaaattatgtacatttgccactgagtgcagcaaaaaatgaagaattgttatctcctggttattctcagttttctttaccagtgcaaaaaaaagttatgagtacaccactctctaaatcaaacacattgaactcattttctaagataagaaaggaaatacttaagacaccagattctagtaaggaaaaagtaaacctacaaagattcaaagaagcattgaattcaacttttgattattcagaattttctctagaaaagtctaaaagcagtggtccaatgtatctgcataaatcctgtcattctgttgaagatggacaattattaacaagtaacgaaagtgaagatgacgagattttccgaagaaaagttaaaagagcaaaaggaaatgttttaaactctcctgaggatcagaaaaatagtgaagttgattctccacttcatgctgtcaaaaagcgcagatttcctataaacagatcagaattatcatctagtgatgagagtgagaattttcccaaaccatgttcacaattagaagacttcaaggtttgtaacgggaatgccagaagaggcatcaaagtcccaaagagacagagtcacttaaagcatgtagctaggaagtttttagatgatgaagcagaactttctgaagaagatgcagaatatgtttcatcagatgaaaatgatgagtcagaaaatgaacaagattcctcattacttgactttttaaatgatgaaactcaactttcacaggctataaatgattctgaaatgagagctatttacatgaaatctttgcgtagtccaatgatgaacaataagtacaaaatgattcataagacacataaaaacataaacattttctcgcagattcctgaacaagatgaaacctatttagaggatagtttttgtgttgatgaagaggagtcttgcaaaggccaatcaagtgaagaagaagtttgtgttgattttaacttaataactgatgattgctttgcaaatagtaaaaagtataaaactcgacgtgcagtaatgctaaaagaaatgatggaacaaaattgtgcacattcaaaaaagaaattatccagaattattttaccagatgattcaagtgaggaggagaacaatgtaaatgataaaagagaatctaatattgcggttaacccaagcactgttaagaagaacaaacaacaggaccattgtttaaattcagtgccttctggatcttctgcgcagtccaaggtgcgttctactccaagagttaatccattagcaaagcagagcaaacagacatcgctgaatttaaaggatacaatttccgaagtctcagacttcaaacctcagaatcataatgaagtccagtctaccacaccacccttcactactgttgattcacagaaagactgtagaaaatttccagttccacagaaggatggtagtgctttggaggattctagcacttcaggggcatcctgttccaagtcaagaccacatttagctgggacacatacttctcttagacttccgcaggaaggaaaaggaacctgtattcttgtaggtggtcatgaaatcacttctggattagaagtaatttcttccctaagagcaattcatgggttgcaagtagaagtttgtcctcttaatggctgtgattacatcgtgagtaatcgcatggtggtggaaaggaggtctcaatctgagatgttaaatagtgtcaataagaacaagttcattgagcagatccagcacctgcagagtatgtttgaaagaatatgtgtgattgtggaaaaggacagagaaaaaacaggagacacatcaaggatgtttaggagaacaaagagctatgacagcctgctgactaccttaattggcgctggaatccgaattcttttcagttcctgccaagaagaaaccgcagatttgctaaaggaactgtctttagtggaacaaagaaagaatgttggtattcatgttccaacagtggtgaatagtaataaaagtgaggcactccagttttatttaagtattcccaatataagttatataactgcattaaatatgtgtcaccagttttcatctgtgaaaaggatggctaacagctcacttcaagaaatctccatgtatgcacaagtaactcatcagaaggctgaggagatctatagatatattcactatgtatttgacatacaaatgttaccaaatgatcttaaccaagatagactgaaatctgatatataatcaagctgctcaagatggggttttcaaagacctctcacaatattaaatgcacttcaataatcattgctgttttatgtttatttgtaaataagagaatattttatttaaatattttatattgtatacatttttatttatagattatagaaattattaaaaaagaaaaatctgatgttcagtgatcattttgactagattataaaactaatttttcttattaaataaaacaaggtttattaaaagtgttactaaggatagtttaagaaagtaaaagctaagctagagatatactttggaatgtttcccaaaattaaagttgtactgttgtgataaatagtaaagttgacatgtctatgactacagccaacttgtcgattttccctatgtgtagatagtatacttttaagtgtactgattctaaatacatgtacttggtaaggtgtgggtgatgggtgggttgtgagataaatgacccagtaactaggaaagtagaaaacttaactgaatgtttatctgaccaaaggtgtgtcccagttaagtactgtcaaatctattaatatgaactctgatatggtttggctgtgtccccaaccaaaatctcatcttgacttgtaatctgaattataatcccaatatattggggagggacctcctggaacgtgattagctcatgggggcggttcccccatgctgttctagtgatagttctcagaggatctgatggttttataagcttttcctctgttcactctgcagttctcttgcctactgccatgtggaaaaggaaacgtttgcttcccctccaccatgattgtaagttcccgaggcctccccagccatgcaggactgtgagtcaattaaacatcttttccttataaa

SEQ ID NO: 10402 - DNA, 2354 bp, Homo sapiens
  source 1..2354: mol_type = unassigned DNA
gtgcgaaggaaaccgatggggatcggaaccgtagcggttgagctgctgctgctacggatatctgacagaagccttcggtggttgtcggcctaatgagcggacggcaaagaacgctttttcagacgtggggctcaagtatctcccgatcatctgggactccgggttgcagctccggaactgagcgacctcagagccctggcagctccaaggcgcctttgccagcagcagcggaggctcagctggagtcggacgatgatgtgttgcttgtcgcggcgtacgaggctgagcggcagttgtgtctagagaatggcgggttctgcacctccgcgggcgccctgtggatttaccctaccaattgcccagtgcgggactaccagctgcacatttcccgggctgctctgttttgcaatacgctggtgtgtctgcctaccggactgggaaagacctttattgccgccgtggtcatgtacaatttctaccgctggttcccttcaggaaaggtggtcttcatggccccaacgaaacccttggtgacacagcagatcgaggcttgctaccaggtgatgggtatcccgcaatcccacatggccgaaatgacagggtctacacaagcttccaccaggaaggaaatatggtgcagtaagagagtgctttttcttacacctcaggtcatggtaaatgacctttctagaggagcttgtcccgctgctgaaataaagtgtttagttattgatgaagctcataaagctctcggaaactatgcttattgccaggttgtaagagaactagtcaaatatacaaatcactttagaatcttggctctaagtgccacaccaggtagtgatataaaggctgtgcaacaagttattactaacctgctaattgggcagatagagcttcgttctgaagattctccagatattttgacatattctcatgaaagaaaagttgaaaagcttattgttccgcttggtgaagaacttgcagccatccaaaagacctatatccagattttggaatcatttgctcgttctttgattcagaggaatgttttgatgagaagggatatcccaaatctaacaaaatatcagataattctggcaagagatcagtttaggaaaaacccatctccgaatattgtgggaatacaacaaggcataatcgagggagagtttgctatttgtattagtttatatcatggttatgaattattgcagcaaatgggaatgagatcattatatttcttcctttgtggaattatggatggaactaaagggatgacacggtcaaaaaatgaacttggccgaaatgaagacttcatgaaactctataatcatctagagtgtatgtttgcacgtacacgtagtacttcagcaaatggtatttctgctatccaacaaggagataaaaataaaaaatttgtttatagtcatccaaagttaaagaaattagaagaagttgtaattgaacacttcaagtcatggaatgctgaaaacactactgaaaagaaacgtgatgagacccgagttatgatcttctcttcatttcgagatagtgttcaagaaattgcagaaatgctttcacagcatcagccaattattagagtaatgacttttgtcggccatgcctcagggaaaagcacgaagggttttacccagaaggagcaactggaggtagtgaaacagtttcgtgacggtggttacaacacgctggtttctacctgtgtgggtgaagaaggtttggatataggagaagttgatcttataatatgttttgattcccagaagagcccaattcgtcttgtacaacgaatgggtagaactggccgtaaacgtcaaggcaggatagttattatcctttctgaaggacgagaggaacgtatttataatcagagtcagtccaacaaaagaagtatatataaagctatttcaagtaacaggcaggtccttcatttttaccaaagaagtccacgaatggttcctgatggaatcaacccaaaattacacaaaatgttcatcacacatggtgtctatgaaccagagaagccttctcggaacttgcagcgaaagtcatctatcttttcctatagggatggtaaataaattttgcatttgacacatgcatttttcccctgttcttacttagcaggtcgtatcttgatataatatttcttgtttgaaaaactgaatatatgttctaattaatatattataggcattctctttggaaaggctgtacgagattattcatgtggcaaatggagagacactggtagtatagagtgacagaaactcagtgttggggaaaattaaacataccctaccaacccagagaatgttctccataaagtttag

SEQ ID NO: 10403 - DNA, 2524 bp, Homo sapiens
  source 1..2524: mol_type = unassigned DNA
gcttcgacggccgccattttctttctttcttagctgttagctgagaggaagtctctgaacaggcggcagcggctcttatagtgcaaccatggcagactattcaacagtgcctcccccctcttctggctcagctggtggcggtggtggcggcggtggtggtggaggagttaacgacgctttcaaagatgcactgcagagagcccggcagattgcagcaaaaattggaggtgatgcagggacatcactgaattcaaatgactatggttatgggggacaaaaaagacctttagaagatggagatcaaccagatgctaagaaagttgctcctcaaaatgactcttttggaacacagttaccaccgatgcatcagcagcaaagcagatctgtaatgacagaagaatacaaagttccagatggaatggttggattcataattggcagaggaggtgaacagatctcacgcatacaacaggaatctggatgcaaaatacagatagctcctgacagtggtggccttccagaaaggtcctgtatgttaactggaacacctgaatctgtccagtcagcaaaacggttactggaccagattgttgaaaaaggaagaccagctcctggcttccatcatggcgatggaccgggaaatgcagttcaagaaatcatgattccagctagcaaggcaggattagtcattggaaaagggggagaaactattaaacagcttcaggaacgggctggagttaaaatggttatgattcaagacgggccgcagaacactggtgctgacaaacctcttaggattacaggagacccatataaagttcaacaagccaaggaaatggtgttagagttaattcgtgatcaaggcggtttcagagaagttcggaatgagtatgggtcaagaataggaggaaatgaagggatagatgtccccattccaagatttgctgttggcattgtaataggaagaaatggagagatgatcaaaaaaatacaaaatgatgctggtgttcgcattcagtttaagccagatgatgggacaacacccgaaaggatagcacaaataacaggacctccagaccgatgtcaacatgctgcagaaattattacagaccttcttcgaagtgttcaggctggtaatcctggtggacctggacctggtggtcgaggaagaggtagaggtcaaggcaactggaacatgggaccacctggtggactacaggaatttaattttattgtgccaactgggaaaactggattaataataggaaaaggaggtgaaaccataaaaagcataagccagcagtctggtgcaagaatagaacttcagagaaatcctccaccaaatgcagatcctaatatgaagttatttacaattcgtggcactccacaacagatagactatgctcggcaactcatagaagaaaagattggtggcccagtaaatcctttagggccacctgtaccccatgggccccatggtgtcccaggcccccatggacctcctgggcctccagggcctggaactccaatgggaccatacaaccctgcaccttataatcctggaccaccaggcccggctcctcatggtcctccagccccatatgctccccagggatggggaaatgcatatccacactggcagcagcaggctcctcctgatccagctaaggcaggaacggatccaaattcagcagcttgggctgcttattacgctcactattatcaacagcaagcacagccaccaccagcagcccctgcaggtgcaccaactacaactcaaactaatggacaaggagatcagcagaatccagccccagctggacaggttgattataccaaggcttgggaagagtactacaagaaaatgggtcaggcagttcctgctccgactggggctcctccaggtggtcagccagattatagtgcagcctgggctgagtattatagacaacaagcagcctattatgcccagacaagtccccagggaatgccacagcatcctccagcacctcagggatttgcaaatcatgcaagaagccaccaccatttatattaaccactttttctttcttaaaggattcactcctgaattagctccatttcaaggattttctttaactttttgtgtatttcttatgtatctcttctgcacagggccaataataagaagtggacaatacagtatttgcttcattgtgtgggggaaaaaaacctttgttaaatatatggatgcagacgacttgatgaagatcttaattttgtttttggtttaaaatagtgtttccttttttttttttttttttgaaaatgtacaaaatatctatcactactgataggaggttaatatttctgtgtagaaatgaaaattggtttgtttttagtatttagtgtagatgtacacattccagcaaatgtatttgcaattatgtggttgatgctttgtgatataaatgtactttttcaatgtatactttcacttttaaaatgcctgttttgtgctttacaataaatgatatgaaacctc

SEQ ID NO: 10404 - DNA, 2378 bp, Homo sapiens
  source 1..2378: mol_type = unassigned DNA
acggccgccattttctttctttcttagctgttagctgagaggaagtctctgaacaggcggcagcggctcttatagtgcaaccatggcagactattcaacagtgcctcccccctcttctggctcagctggtggcggtggtggcggcggtggtggtggaggagttaacgacgctttcaaagatgcactgcagagagcccggcagattgcagcaaaaattggaggtgatgcagggacatcactgaattcaaatgactatggttatgggggacaaaaaagacctttagaagatggagatcaaccagatgctaagaaagttgctcctcaaaatgactcttttggaacacagttaccaccgatgcatcagcagcaaagcagatctgtaatgacagaagaatacaaagttccagatggaatggttggattcataattggcagaggaggtgaacagatctcacgcatacaacaggaatctggatgcaaaatacagatagctcctgacagtggtggccttccagaaaggtcctgtatgttaactggaacacctgaatctgtccagtcagcaaaacggttactggaccagattgttgaaaaaggaagaccagctcctggcttccatcatggcgatggaccgggaaatgcagttcaagaaatcatgattccagctagcaaggcaggattagtcattggaaaagggggagaaactattaaacagcttcaggaacgggctggagttaaaatggttatgattcaagacgggccgcagaacactggtgctgacaaacctcttaggattacaggagacccatataaagttcaacaagccaaggaaatggtgttagagttaattcgtgatcaaggcggtttcagagaagttcggaatgagtatgggtcaagaataggaggaaatgaagggatagatgtccccattccaagatttgctgttggcattgtaataggaagaaatggagagatgatcaaaaaaatacaaaatgatgctggtgttcgcattcagtttaagccagatgatgggacaacacccgaaaggatagcacaaataacaggacctccagaccgatgtcaacatgctgcagaaattattacagaccttcttcgaagtgttcaggctggtaatcctggtggacctggacctggtggtcgaggaagaggtagaggtcaaggcaactggaacatgggaccacctggtggactacaggaatttaattttattgtgccaactgggaaaactggattaataataggaaaaggaggtgaaaccataaaaagcataagccagcagtctggtgcaagaatagaacttcagagaaatcctccaccaaatgcagatcctaatatgaagttatttacaattcgtggcactccacaacagatagactatgctcggcaactcatagaagaaaagattggtggcccagtaaatcctttagggccacctgtaccccatgggccccatggtgtcccaggcccccatggacctcctgggcctccagggcctggaactccaatgggaccatacaaccctgcaccttataatcctggaccaccaggcccggctcctcatggtcctccagccccatatgctccccagggatggggaaatgcatatccacactggcagcagcaggctcctcctgatccagctaaggcaggaacggatccaaattcagcagcttgggctgcttattacgctcactattatcaacagcaagcacagccaccaccagcagcccctgcaggtgcaccaactacaactcaaactaatggacaaggagatcagcagaatccagccccagctggacaggttgattataccaaggcttgggaagagtactacaagaaaatgggtcaggcagttcctgctccgactggggctcctccaggtggtcagccagattatagtgcagcctgggctgagtattatagacaacaagcagcctattatgcccagacaagtccccagggaatgccacagcatcctccagcacctcagggccaataataagaagtggacaatacagtatttgcttcattgtgtgggggaaaaaaacctttgttaaatatatggatgcagacgacttgatgaagatcttaattttgtttttggtttaaaatagtgtttccttttttttttttttttttgaaaatgtacaaaatatctatcactactgataggaggttaatatttctgtgtagaaatgaaaattggtttgtttttagtatttagtgtagatgtacacattccagcaaatgtatttgcaattatgtggttgatgctttgtgatataaatgtactttttcaatgtatactttcacttttaaaatgcctgttttgtgctttacaataaatgatatgaaacctc

SEQ ID NO: 10405 - DNA, 2033 bp, Homo sapiens
  source 1..2033: mol_type = unassigned DNA
ctttctttcttagctgttagctgagaggaagtctctgaacaggcggcagcggctcttatagtgcaaccatggcagactattcaacagtgcctcccccctcttctggctcagctggtggcggtggtggcggcggtggtggtggaggagttaacgacgctttcaaagatgcactgcagagagcccggcagattgcagcaaaaattggaggtgatgcagggacatcactgaattcaaatgactatggttatgggggacaaaaaagacctttagaagatggagatcaaccagatgctaagaaagttgctcctcaaaatgactcttttggaacacagttaccaccgatgcatcagcagcaaagatctgtaatgacagaagaatacaaagttccagatggaatggttggattcataattggcagaggaggtgaacagatctcacgcatacaacaggaatctggatgcaaaatacagatagctcctgacagtggtggccttccagaaaggtcctgtatgttaactggaacacctgaatctgtccagtcagcaaaacggttactggaccagattgttgaaaaaggaagaccagctcctggcttccatcatggcgatggaccgggaaatgcagttcaagaaatcatgattccagctagcaaggcaggattagtcattggaaaagggggagaaactattaaacagcttcaggaacgggctggagttaaaatggttatgattcaagacgggccgcagaacactggtgctgacaaacctcttaggattacaggagacccatataaagttcaacaagccaaggaaatggtgttagagttaattcgtgatcaaggcggtttcagagaagttcggaatgagtatgggtcaagaataggaggaaatgaagggatagatgtccccattccaagatttgctgttggcattgtaataggaagaaatggagagatgatcaaaaaaatacaaaatgatgctggtgttcgcattcagtttaagccagatgatgggacaacacccgaaaggatagcacaaataacaggacctccagaccgatgtcaacatgctgcagaaattattacagaccttcttcgaagtgttcaggctggtaatcctggtggacctggacctggtggtcgaggaagaggtagaggtcaaggcaactggaacatgggaccacctggtggactacaggaatttaattttattgtgccaactgggaaaactggattaataataggaaaaggaggtgaaaccataaaaagcataagccagcagtctggtgcaagaatagaacttcagagaaatcctccaccaaatgcagatcctaatatgaagttatttacaattcgtggcactccacaacagatagactatgctcggcaactcatagaagaaaagattggtggcccagtaaatcctttagggccacctgtaccccatgggccccatggtgtcccaggcccccatggacctcctgggcctccagggcctggaactccaatgggaccatacaaccctgcaccttataatcctggaccaccaggcccggctcctcatggtcctccagccccatatgctccccagggatggggaaatgcatatccacactggcagcagcaggctcctcctgatccagctaaggcaggaacggatccaaattcagcagcttgggctgcttattacgctcactattatcaacagcaagcacagccaccaccagcagcccctgcaggtgcaccaactacaactcaaactaatggacaagaaggagatcagcagaatccagccccagctggacaggttgattataccaaggcttgggaagagtactacaagaaaatgggtcaggcagttcctgctccgactggggctcctccaggtggtcagccagattatagtgcagcctgggctgagtattatagacaacaagcagcctattatgcccagacaagtccccagggaatgccacagcatcctccagcacctcagtgcaggtttgatccagccagtatagaactagctctgtag

SEQ ID NO: 10406 - DNA, 2312 bp, Homo sapiens
  source 1..2312: mol_type = unassigned DNA
ctttctttcttagctgttagctgagaggaagtctctgaacaggcggcagcggctcttatagtgcaaccatggcagactattcaacagtgcctcccccctcttctggctcagctggtggcggtggtggcggcggtggtggtggaggagttaacgacgctttcaaagatgcactgcagagagcccggcagattgcagcaaaaattggaggtgatgcagggacatcactgaattcaaatgactatggttatgggggacaaaaaagacctttagaagatggagatcaaccagatgctaagaaagttgctcctcaaaatgactcttttggaacacagttaccaccgatgcatcagcagcaaagatctgtaatgacagaagaatacaaagttccagatggaatggttggattcataattggcagaggaggtgaacagatctcacgcatacaacaggaatctggatgcaaaatacagatagctcctgacagtggtggccttccagaaaggtcctgtatgttaactggaacacctgaatctgtccagtcagcaaaacggttactggaccagattgttgaaaaaggaagaccagctcctggcttccatcatggcgatggaccgggaaatgcagttcaagaaatcatgattccagctagcaaggcaggattagtcattggaaaagggggagaaactattaaacagcttcaggaacgggctggagttaaaatggttatgattcaagacgggccgcagaacactggtgctgacaaacctcttaggattacaggagacccatataaagttcaacaagccaaggaaatggtgttagagttaattcgtgatcaaggcggtttcagagaagttcggaatgagtatgggtcaagaataggaggaaatgaagggatagatgtccccattccaagatttgctgttggcattgtaataggaagaaatggagagatgatcaaaaaaatacaaaatgatgctggtgttcgcattcagtttaagccagatgatgggacaacacccgaaaggatagcacaaataacaggacctccagaccgatgtcaacatgctgcagaaattattacagaccttcttcgaagtgttcaggctggtaatcctggtggacctggacctggtggtcgaggaagaggtagaggtcaaggcaactggaacatgggaccacctggtggactacaggaatttaattttattgtgccaactgggaaaactggattaataataggaaaaggaggtgaaaccataaaaagcataagccagcagtctggtgcaagaatagaacttcagagaaatcctccaccaaatgcagatcctaatatgaagttatttacaattcgtggcactccacaacagatagactatgctcggcaactcatagaagaaaagattggtggcccagtaaatcctttagggccacctgtaccccatgggccgcctggaactccaatgggaccatacaaccctgcaccttataatcctggaccaccaggcccggctcctcatggtcctccagccccatatgctccccagggatggggaaatgcatatccacactggcagcagcaggctcctcctgatccagctaaggcaggaacggatccaaattcagcagcttgggctgcttattacgctcactattatcaacagcaagcacagccaccaccagcagcccctgcaggtgcaccaactacaactcaaactaatggacaaggagatcagcagaatccagccccagctggacaggttgattataccaaggcttgggaagagtactacaagaaaatgggtcaggcagttcctgctccgactggggctcctccaggtggtcagccagattatagtgcagcctgggctgagtattatagacaacaagcagcctattatgcccagacaagtccccagggaatgccacagcatcctccagcacctcagggccaataataagaagtggacaatacagtatttgcttcattgtgtgggggaaaaaaacctttgttaaatatatggatgcagacgacttgatgaagatcttaattttgtttttggtttaaaatagtgtttccttttttttttttttttttgaaaatgtacaaaatatctatcactactgataggaggttaatatttctgtgtagaaatgaaaattggtttgtttttagtatttagtgtagatgtacacattccagcaaatgtatttgcaattatgtggttgatgctttgtgatataaatgtactttttcaatgtatactttcacttttaaaatgcctgttttgtgctttacaataaatgatatg

SEQ ID NO: 10407 - DNA, 802 bp, Homo sapiens
  source 1..802: mol_type = unassigned DNA
gcgcaagaatgtaatagagcttcgacggccgccattttctttctttcttagctgttagctgagaggaagtctctgaacaggcggcagcggctcttatagtgcaaccatggcagactattcaacagtgcctcccccctcttctggctcagctggtggcggtggtggcggcggtggtggtggaggagttaacgacgctttcaaagatgcactgcagagagcccggcagattgcagcaaaaattggaggtgatgcagggacatcactgaattcaaatgactatggttatgggggacaaaaaagacctttagaagatggagatggctcttggacaagtccgagcagtacaacacactgggagggaatgccctctccttttaaagatcaaccagatgctaagaaagttgctcctcaaaatgactcttttggaacacagttaccaccgatgcatcagcagcaaagatctgtaatgacagaagaatacaaagttccagatggaatggttggattcataattggcagaggaggtgaacagatctcacgcatacaacaggaatctggatgcaaaatacagatagctcctgacagtggtggccttccagaaaggtcctgtatgttaactggaacacctgaatctgtccagtcagcaaaacggttactggaccagattgttgaaaaaggaagaccagctcctggcttccatcatggcgatggaccgggaaatgcagttcaagaaatcatgattccagctagcaaggcaggattagtcattggaaaagggggagaaactattaaacagcttcag

SEQ ID NO: 10408 - DNA, 2138 bp, Homo sapiens
  source 1..2138: mol_type = unassigned DNA
agctgttagctgagaggaagtctctgaacaggcggcagcggctcttatagtgcaaccatggcagactattcaacagtgcctcccccctcttctggctcagctggtggcggtggtggcggcggtggtggtggaggagttaacgacgctttcaaagatgcactgcagagagcccggcagattgcagcaaaaattggaggtgatgcagggacatcactgaattcaaatgactatggttatgggggacaaaaaagacctttagaagatggagatggctcttggacaagtccgagcagtacaacacactgggagggaatgccctctccttttaaagatcaaccagatgctaagaaagttgctcctcaaaatgactcttttggaacacagttaccaccgatgcatcagcagcaaagcagatctgtaatgacagaagaatacaaagttccagatggaatggttggattcataattggcagaggaggtgaacagatctcacgcatacaacaggaatctggatgcaaaatacagatagctcctgacagtggtggccttccagaaaggtcctgtatgttaactggaacacctgaatctgtccagtcagcaaaacggttactggaccagattgttgaaaaaggaagaccagctcctggcttccatcatggcgatggaccgggaaatgcagttcaagaaatcatgattccagctagcaaggcaggattagtcattggaaaagggggagaaactattaaacagcttcaggaacgggctggagttaaaatggttatgattcaagacgggccgcagaacactggtgctgacaaacctcttaggattacaggagacccatataaagttcaacaagccaaggaaatggtgttagagttaattcgtgatcaaggcggtttcagagaagttcggaatgagtatgggtcaagaataggaggaaatgaagggatagatgtccccattccaagatttgctgttggcattgtaataggaagaaatggagagatgatcaaaaaaatacaaaatgatgctggtgttcgcattcagtttaagccagatgatgggacaacacccgaaaggatagcacaaataacaggacctccagaccgatgtcaacatgctgcagaaattattacagaccttcttcgaagtgttcaggctggtaatcctggtggacctggacctggtggtcgaggaagaggtagaggtcaaggcaactggaacatgggaccacctggtggactacaggaatttaattttattgtgccaactgggaaaactggattaataataggaaaaggaggtgaaaccataaaaagcataagccagcagtctggtgcaagaatagaacttcagagaaatcctccaccaaatgcagatcctaatatgaagttatttacaattcgtggcactccacaacagatagactatgctcggcaactcatagaagaaaagattggtggcccagtaaatcctttagggccacctgtaccccatgggccccatggtgtcccaggcccccatggacctcctgggcctccagggcctggaactccaatgggaccatacaaccctgcaccttataatcctggaccaccaggcccggctcctcatggtcctccagccccatatgctccccagggatggggaaatgcatatccacactggcagcagcaggctcctcctgatccagctaaggcaggaacggatccaaattcagcagcttgggctgcttattacgctcactattatcaacagcaagcacagccaccaccagcagcccctgcaggtgcaccaactacaactcaaactaatggacaaggagatcagcagaatccagccccagctggacaggttgattataccaaggcttgggaagagtactacaagaaaatgggtcaggcagttcctgctccgactggggctcctccaggtggtcagccagattatagtgcagcctgggctgagtattatagacaacaagcagcctattatgcccagacaagtccccagggaatgccacagcatcctccagcacctcagggccaataataagaagtggacaatacagtatttgcttcattgtgtgggggaaaaaaacctttgttaaatatatggatgcagacgacttgatg

SEQ ID NO: 10409 - DNA, 1478 bp, Homo sapiens
  source 1..1478: mol_type = unassigned DNA
gagtacccgccaacaagcgggaccgagcaggaatccgtatctgggaacaggtgagagaggatgtgtgctgggccttggaggaagggggccgagaccgggccttacttctgtaacgatactgtgaggcatcggaaggccagcctgttgtgtccgttttgaaggatgcccctgtcccgctggttgagatctgtgggggtcttcctgctgccagccccctactgggcaccccgggagaggtggctgggttccctacggcggccctccctggtgcacgggtacccagtcctggcctggcacagtgcccgctgctggtgccaagcgtggacagaggaacctcgagccctttgctcctccctcagaatgaacggagaccagaattcagatgtttatgcccaagaaaagcaggatttcgttcagcacttctcccagatcgttagggtgctgactgaggatgagatggggcacccagagataggagatgctattgcccggctcaaggaggtcctggagtacaatgccattggaggcaagtataaccggggtttgacggtggtagtagcattccgggagctggtggagccaaggaaacaggatgctgatagtctccagcgggcctggactgtgggctggtgtgtggaactgctgcaagctttcttcctggtggcagatgacatcatggattcatcccttacccgccggggacagatctgctggtatcagaagccgggcgtgggtttggatgccatcaatgatgctaacctcctggaagcatgtatctaccgcctgctgaagctctattgccgggagcagccctattacctgaacctgatcgagctcttcctgcagagttcctatcagactgagattgggcagaccctggacctcctcacagccccccagggcaatgtggatcttgtcagattcactgaaaagaggtacaaatctattgtcaagtacaagacagctttctactccttctaccttcctatagctgcagccatgtacatggcaggaattgatggcgagaaggagcacgccaatgccaagaagatcctgctggagatgggggagttctttcagattcaggatgattaccttgacctctttggggaccccagtgtgaccggcaaaattggcactgacatccaggacaacaaatgcagctggctggtggttcagtgtctgcaacgggccactccagaacagtaccagatcctgaaggaaaattacgggcagaaggaggctgagaaagtggcccgggtgaaggcgctatatgaggagctggatctgccagcagtgttcttgcaatatgaggaagacagttacagccacattatggctctcattgaacagtacgcagcacccctgcccccagccgtctttctggggcttgcgcgcaaaatctacaagcggagaaagtgacctagagattgcaagggcggggagaggaggctctcaataaataatcgtgtaacctt

SEQ ID NO: 10410 - DNA, 1431 bp, Homo sapiens
  source 1..1431: mol_type = unassigned DNA
agtgtggggagagcgggaactactcgacccacagagccgatcgcggagcggattctgcttttaggagtacccgccaacaagcgggaccgagcaggaatccgtatctgggaacaggatgcccctgtcccgctggttgagatctgtgggggtcttcctgctgccagccccctactgggcaccccgggagaggtggctgggttccctacggcggccctccctggtgcacgggtacccagtcctggcctggcacagtgcccgctgctggtgccaagcgtggacagaggaacctcgagccctttgctcctccctcagaatgaacggagaccagaattcagatgtttatgcccaagaaaagcaggatttcgttcagcacttctcccagatcgttagggtgctgactgaggatgagatggggcacccagagataggagatgctattgcccggctcaaggaggtcctggagtacaatgccattggaggcaagtataaccggggtttgacggtggtagtagcattccgggagctggtggagccaaggaaacaggatgctgatagtctccagcgggcctggactgtgggctggtgtgtggaactgctgcaagctttcttcctggtggcagatgacatcatggattcatcccttacccgccggggacagatctgctggtatcagaagccgggcgtgggtttggatgccatcaatgatgctaacctcctggaagcatgtatctaccgcctgctgaagctctattgccgggagcagccctattacctgaacctgatcgagctcttcctgcagagttcctatcagactgagattgggcagaccctggacctcctcacagccccccagggcaatgtggatcttgtcagattcactgaaaagaggtacaaatctattgtcaagtacaagacagctttctactccttctaccttcctatagctgcagccatgtacatggcaggaattgatggcgagaaggagcacgccaatgccaagaagatcctgctggagatgggggagttctttcagattcaggatgattaccttgacctctttggggaccccagtgtgaccggcaaaattggcactgacatccaggacaacaaatgcagctggctggtggttcagtgtctgcaacgggccactccagaacagtaccagatcctgaaggaaaattacgggcagaaggaggctgagaaagtggcccgggtgaaggcgctatatgaggagctggatctgccagcagtgttcttgcaatatgaggaagacagttacagccacattatggctctcattgaacagtacgcagcacccctgcccccagccgtctttctggggcttgcgcgcaaaatctacaagcggagaaagtgacctagagattgcaagggcggggagaggaggctctcaataaataatcgtgtaacctt

SEQ ID NO: 10411 - DNA, 1338 bp, Homo sapiens
  source 1..1338: mol_type = unassigned DNA
tcagcgcggctcatcttcgcccagccaggacacgcaggatcgcgttatctgtccctcccgcgggcacattgggagttgtagtctaattatatatttccgcccttagtgtggggagagcgggaactactcgacccacagagccgatcgcggagcggattctgcttttaggagtacccgccaacaagcgggaccgagcaggaatccgtatctgggaacagaatgaacggagaccagaattcagatgtttatgcccaagaaaagcaggatttcgttcagcacttctcccagatcgttagggtgctgactgaggatgagatggggcacccagagataggagatgctattgcccggctcaaggaggtcctggagtacaatgccattggaggcaagtataaccggggtttgacggtggtagtagcattccgggagctggtggagccaaggaaacaggatgctgatagtctccagcgggcctggactgtgggctggtgtgtggaactgctgcaagctttcttcctggtggcagatgacatcatggattcatcccttacccgccggggacagatctgctggtatcagaagccgggcgtgggtttggatgccatcaatgatgctaacctcctggaagcatgtatctaccgcctgctgaagctctattgccgggagcagccctattacctgaacctgatcgagctcttcctgcagagttcctatcagactgagattgggcagaccctggacctcctcacagccccccagggcaatgtggatcttgtcagattcactgaaaagaggtacaaatctattgtcaagtacaagacagctttctactccttctaccttcctatagctgcagccatgtacatggcaggaattgatggcgagaaggagcacgccaatgccaagaagatcctgctggagatgggggagttctttcagattcaggatgattaccttgacctctttggggaccccagtgtgaccggcaaaattggcactgacatccaggacaacaaatgcagctggctggtggttcagtgtctgcaacgggccactccagaacagtaccagatcctgaaggaaaattacgggcagaaggaggctgagaaagtggcccgggtgaaggcgctatatgaggagctggatctgccagcagtgttcttgcaatatgaggaagacagttacagccacattatggctctcattgaacagtacgcagcacccctgcccccagccgtctttctggggcttgcgcgcaaaatctacaagcggagaaagtgacctagagattgcaagggcggggagaggaggctctcaataaataatcgtgtaaccttc

SEQ ID NO: 10412 - DNA, 2176 bp, Homo sapiens
  source 1..2176: mol_type = unassigned DNA
aatcagcgcccgtcagcccaccccacgaggccgcagctagccccgctggcggccgaggccggttgaagtgggcggagcggcgggcggggcgtcgccgtactaggcctgccccctgtccggccagcccctcgaagcacctactccacaggtccagccggccggtgagcgcctggggaccgcagaggtgagagtcgcgcccgggagtccgccgcctgcgccaggatggagttcgtgaaatgccttggccaccccgaagagttctacaacctggtgcgcttccggatcgggggcaagcggaaggtgatgcccaagatggaccaggactcgctcagcagcagcctgaaaacttgctacaagtatctcaatcagaccagtcgcagtttcgcagctgttatccaggcgctggatggggaaatgcgcaacgcagtgtgcatattttatctggttctccgagctctggacacactggaagatgacatgaccatcagtgtggaaaagaaggtcccgctgttacacaactttcactctttcctttaccaaccagactggcggttcatggagagcaaggagaaggatcgccaggtgctggaggacttcccaacgatctcccttgagtttagaaatctggctgagaaataccaaacagtgattgccgacatttgccggagaatgggcattgggatggcagagtttttggataagcatgtgacctctgaacaggagtgggacaagtactgccactatgttgctgggctggtcggaattggcctttcccgtcttttctcagcctcagagtttgaagaccccttagttggtgaagatacagaacgtgccaactctatgggcctgtttttgcagaaaacaaacatcatccgtgactatctggaagaccagcaaggaggaagagagttctggcctcaagaggtttggagcaggtatgttaagaagttaggggattttgctaagccggagaatattgacttggccgtgcagtgcctgaatgaacttataaccaatgcactgcaccacatcccagatgtcatcacctacctttcgagactcagaaaccagagtgtgtttaacttctgtgctattccacaggtgatggccattgccactttggctgcctgttataataaccagcaggtgttcaaaggggcagtgaagattcggaaagggcaagcagtgaccctgatgatggatgccaccaatatgccagctgtcaaagccatcatatatcagtatatggaagagatttatcatagaatccccgactcagacccatcttctagcaaaacaaggcagatcatctccaccatccggacgcagaatcttcccaactgtcagctgatttcccgaagccactactcccccatctacctgtcgtttgtcatgcttttggctgccctgagctggcagtacctgaccactctctcccaggtaacagaagactatgttcagactggagaacactgatcccaaatttgtccatagctgaagtccaccataaagtggatttactttttttctttaaggatggatgttgtgttctctttatttttttcctactactttaatccctaaaagaacgctgtgtggctgggacctttaggaaagtgaaatgcaggtgagaagaacctaaacatgaaaggaaagggtgcctcatcccagcaacctgtccttgtgggtgatgatcactgtgctgcttgtggctcatggcagagcattcagtgccacggtttaggtgaagtcgctgcatatgtgactgtcatgagatcctacttagtatgatcctggctagaatgataattaaaagtatttaatttgaagcaccatttgaatgttcgtaatagtagaaaatgatgtgaattttctttctgttcggctcctatttttctcatcattttgttttctttaattgggttgaatggagtagatagaaatatttatggtttaggtaacagttagatgtttcctaagaatgcaaactgccttttccacacaaaggctgggaataaaattctgggtattctcgtattctcatttaaaggagtttagctttcagagagaaacagcaggattgcttttgaccttttagaagattggtctccagtaaaggtggacatttttgagatttttataataaagaatttaattgctctgcatttgtcaagta

SEQ ID NO: 10413 - DNA, 1393 bp, Homo sapiens
  source 1..1393: mol_type = unassigned DNA
tcgaagcacctactccacaggtccagccggccggtgagcgcctggggaccgcagaggtgagagtcgcgcccgggagtccgccgcctgcgccaggatggagttcgtgaaatgccttggccaccccgaagagttctacaacctggtgcgcttccggatcgggggcaagcggaaggtgatgcccaagatggaccaggactcgctcagcagcagcctgaaaacttgctacaagtatctcaatcagaccagtcgcagtttcgcagctgttatccaggcgctggatggggaaatgcgcaacgcagtgtgcatattttatctggttctccgagctctggacacactggaagatgacatgaccatcagtgtggaaaagaaggtcccgctgttacacaactttcactctttcctttaccaaccagactggcggttcatggagagcaaggagaaggatcgccaggtgctggaggacttcccaacgtactgccactatgttgctgggctggtcggaattggcctttcccgtcttttctcagcctcagagtttgaagaccccttagttggtgaagatacagaacgtgccaactctatgggcctgtttttgcagaaaacaaacatcatccgtgactatctggaagaccagcaaggaggaagagagttctggcctcaagaggtttggagcaggtatgttaagaagttaggggattttgctaagccggagaatattgacttggccgtgcagtgcctgaatgaacttataaccaatgcactgcaccacatcccagatgtcatcacctacctttcgagactcagaaaccagagtgtgtttaacttctgtgctattccacaggtgatggccattgccactttggctgcctgttataataaccagcaggtgttcaaaggggcagtgaagattcggaaagggcaagcagtgaccctgatgatggatgccaccaatatgccagctgtcaaagccatcatatatcagtatatggaagagatttatcatagaatccccgactcagacccatcttctagcaaaacaaggcagatcatctccaccatccggacgcagaatcttcccaactgtcagctgatttcccgaagccactactcccccatctacctgtcgtttgtcatgcttttggctgccctgagctggcagtacctgaccactctctcccaggtaacagaagactatgttcagactggagaacactgatcccaaatttgtccatagctgaagtccaccataaagtggatttactttttttctttaaggatggatgttgtgttctctttatttttttcctactactttaatccctaaaagaacgctgtgtggctgggacctttaggaaagtgaaatgcaggtgagaagaacctaaacatgaaa

SEQ ID NO: 10414 - DNA, 1472 bp, Homo sapiens
  source 1..1472: mol_type = unassigned DNA
gcacattacacccatgaacttagaccagttgcctttatgtatgatcgtatttatactgagaagttactgtgttttttgactttcttttctatttgctacatattagttcggtctaaacgtttggtcttctggtctccatagttctacattggttaaatgcaactcacttctgggagtagtggtgacattcaactagtaggctttttaataaactacagaagttcattactctcatgtaaggaaggaaaactaatgtaactttcgttaagtatgaaaagcgttggatatccttatagttctttagagttaagggtgagatgggtttagaaagtggccaggcacaagttattttaaaataaaaaatctttggctgtttgttccaatatattaatagttttcccttttttacagcaacgcagtgtgcatattttatctggttctccgagctctggacacactggaagatgacatgaccatcagtgtggaaaagaaggtcccgctgttacacaactttcactctttcctttaccaaccagactggcggttcatggagagcaaggagaaggatcgccaggtgctggaggacttcccaacgatctcccttgagtttagaaatctggctgagaaataccaaacagtgattgccgacatttgccggagaatgggcattgggatggcagagtttttggataagcatgtgacctctgaacaggagtgggacaagtactgccactatgttgctgggctggtcggaattggcctttcccgtcttttctcagcctcagagtttgaagaccccttagttggtgaagatacagaacgtgccaactctatgggcctgtttttgcagaaaacaaacatcatccgtgactatctggaagaccagcaaggaggaagagagttctggcctcaagaggtttggagcaggtatgttaagaagttaggggattttgctaagccggagaatattgacttggccgtgcagtgcctgaatgaacttataaccaatgcactgcaccacatcccagatgtcatcacctacctttcgagactcagaaaccagagtgtgtttaacttctgtgctattccacaggtgatggccattgccactttggctgcctgttataataaccagcaggtgttcaaaggggcagtgaagattcggaaagggcaagcagtgaccctgatgatggatgccaccaatatgccagctgtcaaagccatcatatatcagtatatggaagagatttatcatagaatccccgactcagacccatcttctagcaaaacaaggcagatcatctccaccatccggacgcagaatcttcccaactgtcagctgatttcccgaagccactactcccccatctacctgtcgtttgtcatgcttttggctgccctgagctggcagtacctgaccactctctcccaggtaacagaagactatgttcagactggagaacactgatccc

SEQ ID NO: 10415 - DNA, 1596 bp, Homo sapiens
  source 1..1596: mol_type = unassigned DNA
cggccggtgagcgcctggggaccgcagaggtgagagtcgcgcccgggagtccgccgcctgcgccaggatggagttcgtgaaatgccttggccaccccgaagagttctacaacctggtgcgcttccggatcgggggcaagcggaaggactcgctcagcagcagcctgaaaacttgctacaagtatctcaatcagaccagtcgcagtttcgcagctgttatccaggcgctggatggggaaatgcgcaacgcagtgtgcatattttatctggttctccgagctctggacacactggaagatgacatgaccatcagtgtggaaaagaaggtcccgctgttacacaactttcactctttcctttaccaaccagactggcggttcatggagagcaaggagaaggatcgccaggtgctggaggacttcccaacgatctcccttgagtttagaaatctggctgagaaataccaaacagtgattgccgacatttgccggagaatgggcattgggatggcagagtttttggataagcatgtgacctctgaacaggagtgggacaagtactgccactatgttgctgggctggtcggaattggcctttcccgtcttttctcagcctcagagtttgaagaccccttagttggtgaagatacagaacgtgccaactctatgggcctgtttttgcagaaaacaaacatcatccgtgactatctggaagaccagcaaggaggaagagagttctggcctcaagaggtttggagcaggtatgttaagaagttaggggattttgctaagccggagaatattgacttggccgtgcagtgcctgaatgaacttataaccaatgcactgcaccacatcccagatgtcatcacctacctttcgagactcagaaaccagagtgtgtttaacttctgtgctattccacaggtgatggccattgccactttggctgcctgttataataaccagcaggtgttcaaaggggcagtgaagattcggaaagggcaagcagtgaccctgatgatggatgccaccaatatgccagctgtcaaagccatcatatatcagtatatggaagagatttatcatagaatccccgactcagacccatcttctagcaaaacaaggcagatcatctccaccatccggacgcagaatcttcccaactgtcagctgatttcccgaagccactactcccccatctacctgtcgtttgtcatgcttttggctgccctgagctggcagtacctgaccactctctcccaggtaacagaagactatgttcagactggagaacactgatcccaaatttgtccatagctgaagtccaccataaagtggatttactttttttctttaaggatggatgttgtgttctctttatttttttcctactactttaatccctaaaagaacgctgtgtggctgggacctttaggaaagtgaaatgcaggtgagaagaacctaaacatgaaaggaaagggtgcctcatcccagcaacctgtccttgtgggtgatgatcactgtgctgcttgtggctcatggcagagcattcagtgccacggtttaggtgaagtcgctgcatatgtgactgtcat

SEQ ID NO: 10416 - DNA, 1909 bp, Homo sapiens
  source 1..1909: mol_type = unassigned DNA
cttggcagctgaacctgcctgtgagcaggtcgtgtatttctcggcttcccttatccaactttgcatttctatttctagcatattgggttgattcttttgaagctgcctctgtgcacattacacccatgaacttagaccagttgcctttatgtatgatcgtatttatactgagaagttactgtgttttttgactttcttttctatttgctacatattagttcggtctaaacgtttggtcttctggtctccatagttctacattggttaaatgcaactcacttctgggagtagtggtgacattcaactagtaggctttttaataaactacagaagttcattactctcatcaacgcagtgtgcatattttatctggttctccgagctctggacacactggaagatgacatgaccatcagtgtggaaaagaaggtcccgctgttacacaactttcactctttcctttaccaaccagactggcggttcatggagagcaaggagaaggatcgccaggtgctggaggacttcccaacgatctcccttgagtttagaaatctggctgagaaataccaaacagtgattgccgacatttgccggagaatgggcattgggatggcagagtttttggataagcatgtgacctctgaacaggagtgggacaagtactgccactatgttgctgggctggtcggaattggcctttcccgtcttttctcagcctcagagtttgaagaccccttagttggtgaagatacagaacgtgccaactctatgggcctgtttttgcagaaaacaaacatcatccgtgactatctggaagaccagcaaggaggaagagagttctggcctcaagaggtttggagcaggtatgttaagaagttaggggattttgctaagccggagaatattgacttggccgtgcagtgcctgaatgaacttataaccaatgcactgcaccacatcccagatgtcatcacctacctttcgagactcagaaaccagagtgtgtttaacttctgtgctattccacaggtgatggccattgccactttggctgcctgttataataaccagcaggtgttcaaaggggcagtgaagattcggaaagggcaagcagtgaccctgatgatggatgccaccaatatgccagctgtcaaagccatcatatatcagtatatggaagagatttatcatagaatccccgactcagacccatcttctagcaaaacaaggcagatcatctccaccatccggacgcagaatcttcccaactgtcagctgatttcccgaagccactactcccccatctacctgtcgtttgtcatgcttttggctgccctgagctggcagtacctgaccactctctcccaggtaacagaagactatgttcagactggagaacactgatcccaaatttgtccatagctgaagtccaccataaagtggatttactttttttctttaaggatggatgttgtgttctctttatttttttcctactactttaatccctaaaagaacgctgtgtggctgggacctttaggaaagtgaaatgcaggtgagaagaacctaaacatgaaaggaaagggtgcctcatcccagcaacctgtccttgtgggtgatgatcactgtgctgcttgtggctcatggcagagcattcagtgccacggtttaggtgaagtcgctgcatatgtgactgtcatgagatcctacttagtatgatcctggctagaatgataattaaaagtatttaatttgaagcaccatttgaatgttcgtaatagtagaaaatgatgtgaattttctttctgttcggctcctatttttctcatcattttgttttctttaattgggttgaatggagtagatagaaatatttatggtttaggtaacagttagatgtttcctaaga

SEQ ID NO: 10417 - DNA, 2013 bp, Homo sapiens
  source 1..2013: mol_type = unassigned DNA
atctggggcaaggggcgcggcgagcagggccgacgcctgggtgttcccgtccccctttcctcgagccttccccctgtagggcccgggtggacgcggccgtcctggctgacctgtccctgcccccgcaagccgccctgggcatgagcgacttttgcgtggttcccggtggttgcgctccccgtttcgtcccctccgtgagcatcggcgcttaccggtattttaacccgagggttacacatctgaggcaatgtgggtgggttacgcgggagaggacgagtgagttttttggtaagcggaatgaactatgcagataacatcacatgaaggccgtttctggaatgaagtctgactcctccagtttcaccacctcttccggagctctccccgccttgctgccttccatcgcttcatcctcggtgcttcctgagttttaaaatcgcctatctacgcttccaagttccaatgagttatctaacgtctatggattagctaggtggttggtggaaggactcgctcagcagcagcctgaaaacttgctacaagtatctcaatcagaccagtcgcagtttcgcagctgttatccaggcgctggatggggaaatgcgcaacgcagtgtgcatattttatctggttctccgagctctggacacactggaagatgacatgaccatcagtgtggaaaagaaggtcccgctgttacacaactttcactctttcctttaccaaccagactggcggttcatggagagcaaggagaaggatcgccaggtgctggaggacttcccaacgatctcccttgagtttagaaatctggctgagaaataccaaacagtgattgccgacatttgccggagaatgggcattgggatggcagagtttttggataagcatgtgacctctgaacaggagtgggacaagtactgccactatgttgctgggctggtcggaattggcctttcccgtcttttctcagcctcagagtttgaagaccccttagttggtgaagatacagaacgtgccaactctatgggcctgtttttgcagaaaacaaacatcatccgtgactatctggaagaccagcaaggaggaagagagttctggcctcaagaggtttggagcaggtatgttaagaagttaggggattttgctaagccggagaatattgacttggccgtgcagtgcctgaatgaacttataaccaatgcactgcaccacatcccagatgtcatcacctacctttcgagactcagaaaccagagtgtgtttaacttctgtgctattccacaggtgatggccattgccactttggctgcctgttataataaccagcaggtgttcaaaggggcagtgaagattcggaaagggcaagcagtgaccctgatgatggatgccaccaatatgccagctgtcaaagccatcatatatcagtatatggaagagatttatcatagaatccccgactcagacccatcttctagcaaaacaaggcagatcatctccaccatccggacgcagaatcttcccaactgtcagctgatttcccgaagccactactcccccatctacctgtcgtttgtcatgcttttggctgccctgagctggcagtacctgaccactctctcccaggtaacagaagactatgttcagactggagaacactgatcccaaatttgtccatagctgaagtccaccataaagtggatttactttttttctttaaggatggatgttgtgttctctttatttttttcctactactttaatccctaaaagaacgctgtgtggctgggacctttaggaaagtgaaatgcaggtgagaagaacctaaacatgaaaggaaagggtgcctcatcccagcaacctgtccttgtgggtgatgatcactgtgctgcttgtggctcatggcagagcattcagtgccacggtttaggtgaagtcgctgcatatgtgactgtcatgagatcctacttagtatgatcctggctagaatgataattaaaagtatttaatttg

SEQ ID NO: 10418 - DNA, 1761 bp, Homo sapiens
  source 1..1761: mol_type = unassigned DNA
aattgatggcgggggagccggatgtcagtggatggaaaattattacgaggaaacacaggggtgtgcattcttgctgaaggcaggccagagttatcagacatcacctgagggatggagggggatgtggaacctaatcggctgtctagggtgatcagatactgaagttgggggattctggtcaaatcaatttagcaggattcttggtaaaactgggcgatgcaaagacagatgcgttgagtacaaagtccaggccttattgggaagaggatttcagcggagcccgagtagagtttggtctagggagactctgtcactgggaggacgagcgagccgctcggaagtgcgctgggttcccttagcggccagtgggttctggactcgctcagcagcagcctgaaaacttgctacaagtatctcaatcagaccagtcgcagtttcgcagctgttatccaggcgctggatggggaaatgcgcaacgcagtgtgcatattttatctggttctccgagctctggacacactggaagatgacatgaccatcagtgtggaaaagaaggtcccgctgttacacaactttcactctttcctttaccaaccagactggcggttcatggagagcaaggagaaggatcgccaggtgctggaggacttcccaacgatctcccttgagtttagaaatctggctgagaaataccaaacagtgattgccgacatttgccggagaatgggcattgggatggcagagtttttggataagcatgtgacctctgaacaggagtgggacaagtactgccactatgttgctgggctggtcggaattggcctttcccgtcttttctcagcctcagagtttgaagaccccttagttggtgaagatacagaacgtgccaactctatgggcctgtttttgcagaaaacaaacatcatccgtgactatctggaagaccagcaaggaggaagagagttctggcctcaagaggtttggagcaggtatgttaagaagttaggggattttgctaagccggagaatattgacttggccgtgcagtgcctgaatgaacttataaccaatgcactgcaccacatcccagatgtcatcacctacctttcgagactcagaaaccagagtgtgtttaacttctgtgctattccacaggtgatggccattgccactttggctgcctgttataataaccagcaggtgttcaaaggggcagtgaagattcggaaagggcaagcagtgaccctgatgatggatgccaccaatatgccagctgtcaaagccatcatatatcagtatatggaagagatttatcatagaatccccgactcagacccatcttctagcaaaacaaggcagatcatctccaccatccggacgcagaatcttcccaactgtcagctgatttcccgaagccactactcccccatctacctgtcgtttgtcatgcttttggctgccctgagctggcagtacctgaccactctctcccaggtaacagaagactatgttcagactggagaacactgatcccaaatttgtccatagctgaagtccaccataaagtggatttactttttttctttaaggatggatgttgtgttctctttatttttttcctactactttaatccctaaaagaacgctgtgtggctgggacctttaggaaagtgaaatgcaggtgagaagaacctaaacatgaaaggaaagggtgcctcatcccagcaacctgtccttgtgggtgatgatcactgtgctgct

SEQ ID NO: 10419 - DNA, 1952 bp, Homo sapiens
  source 1..1952: mol_type = unassigned DNA
aaaaacggtggcaacacgctgggtttgctttacaacgcttgggaagctttgttgtttgcaataaattttaatacttgtctgtttcggtctgcactgcctttatgagctgtaacactcacagggtaggtttgcagcttcactcctgaagccagtaagacaacgaacccactgggagaaacaaacaactccagacgcgccgacttaagagctgtaatactcgctgtgacggtctgcagcttcactcctgagccagcgagaccacgaacccaccagaaggaagaaactccgaacacatctgaacatcagaaggaacagactccggacacgccgcctttaagaactgtaacactcaccgcgagggtgggcggtttcattcctgaagtcagtgagaccaagaaccaaccaattccggacacacttggactcgacagactctaaggactcgctcagcagcagcctgaaaacttgctacaagtatctcaatcagaccagtcgcagtttcgcagctgttatccaggcgctggatggggaaatgcgcaacgcagtgtgcatattttatctggttctccgagctctggacacactggaagatgacatgaccatcagtgtggaaaagaaggtcccgctgttacacaactttcactctttcctttaccaaccagactggcggttcatggagagcaaggagaaggatcgccaggtgctggaggacttcccaacgatctcccttgagtttagaaatctggctgagaaataccaaacagtgattgccgacatttgccggagaatgggcattgggatggcagagtttttggataagcatgtgacctctgaacaggagtgggacaagtactgccactatgttgctgggctggtcggaattggcctttcccgtcttttctcagcctcagagtttgaagaccccttagttggtgaagatacagaacgtgccaactctatgggcctgtttttgcagaaaacaaacatcatccgtgactatctggaagaccagcaaggaggaagagagttctggcctcaagaggtttggagcaggtatgttaagaagttaggggattttgctaagccggagaatattgacttggccgtgcagtgcctgaatgaacttataaccaatgcactgcaccacatcccagatgtcatcacctacctttcgagactcagaaaccagagtgtgtttaacttctgtgctattccacaggtgatggccattgccactttggctgcctgttataataaccagcaggtgttcaaaggggcagtgaagattcggaaagggcaagcagtgaccctgatgatggatgccaccaatatgccagctgtcaaagccatcatatatcagtatatggaagagatttatcatagaatccccgactcagacccatcttctagcaaaacaaggcagatcatctccaccatccggacgcagaatcttcccaactgtcagctgatttcccgaagccactactcccccatctacctgtcgtttgtcatgcttttggctgccctgagctggcagtacctgaccactctctcccaggtaacagaagactatgttcagactggagaacactgatcccaaatttgtccatagctgaagtccaccataaagtggatttactttttttctttaaggatggatgttgtgttctctttatttttttcctactactttaatccctaaaagaacgctgtgtggctgggacctttaggaaagtgaaatgcaggtgagaagaacctaaacatgaaaggaaagggtgcctcatcccagcaacctgtccttgtgggtgatgatcactgtgctgcttgtggctcatggcagagcattcagtgccacggtttaggtgaagtcgctgcatatgtgactgtcatgagatcctacttagtatgatcctggctagaatgataattaaaagtatttaatttgaagcacc

SEQ ID NO: 10420 - DNA, 1840 bp, Homo sapiens
  source 1..1840: mol_type = unassigned DNA
cgcgcaaactcgcggcggacgcagccagcacccgcagccagcacccgcacactcccacccataccccggcagcccgccaagactctctggcccgcacctctatggtaggaaacccagaaaacaggaagtggcctcgagagggggaagggaggggcggggcctccgccaccacctcagctgcggaccgaggcgagatggcggccaccgagggggtcggggaggctgcgcaagggggcgagcccgggcagccggcgcaacccccgccccagccgcacccaccgccgccccagcagcagcacaaggaagagatggcggccgaggctggggaagccgtggcgtcccccatggacgacgggtttgtgagcctggactcgccctcctatgtcctgtacagggacagagcagaatgggctgatatagatccggtgccgcagaatgatggccccaatcccgtggtccagatcatttatagtgacaaatttagagatgtttatgattacttccgagctgtcctgcagcgtgatgaaagaagtgaacgagcttttaagctaacccgggatgctattgagttaaatgcagccaattatacagtgtggcatttccggagagttcttttgaagtcacttcagaaggatctacatgaggaaatgaactacatcactgcaataattgaggagcagcccaaaaactatcaagtttggcatcataggcgagtattagtggaatggctaagagatccatctcaggagcttgaatttattgctgatattcttaatcaggatgcaaagaattatcatgcctggcagcatcgacaatgggttattcaggaatttaaactttgggataatgagctgcagtatgtggaccaacttctgaaagaggatgtgagaaataactctgtctggaaccaaagatacttcgttatttctaacaccactggctacaatgatcgtgctgtattggagagagaagtccaatacactctggaaatgattaaactagtaccacataatgaaagtgcatggaactatttgaaagggattttgcaggatcgtggtctttccaaatatcctaatctgttaaatcaattacttgatttacaaccaagtcatagttccccctacctaattgcctttcttgtggatatctatgaagacatgctagaaaatcagtgtgacaataaggaagacattcttaataaagcattagagttatgtgaaatcctagctaaagaaaaggacactataagaaaggaatattggagatacattggaagatcccttcaaagcaaacacagcacagaaaatgactcaccaacaaatgtacagcaataacaccatccagaagaacttgatggaatgcttttattttttattaagggaccctgcaggagtttcacacgagagtggtccttccctttgcctgtggtgtaaaagtgcatcacacaggtattgctttttaacaagaactgatgctccttgggtgctgctgctactcagactagctctaagtaatgtgattcttctaaagcaaagtcattggatgggaggaggaagaaaaagtcccataaaggaacttttgtagtcttatcaacatataatctaatcccttagcatcagctcctccctcagtggtacatgcgtcaagatttgtagcagtaataactgcaggtcacttgtatgtaatggatgtgaggtagccgaagtttggttcagtaagcagggaatacagtcgttccatcagagctggtctgcacactcacattatcttgctatcactgtaaccaactaatgccaaaagaacggttttgtaataaaattatagctgtatctaaaaacaa

SEQ ID NO: 10421 - DNA, 1445 bp, Homo sapiens
  source 1..1445: mol_type = unassigned DNA
gaggcgagatggcggccaccgagggggtcggggaggctgcgcaagggggcgagcccgggcagccggcgcaacccccgccccagccgcacccaccgccgccccagcagcagcacaaggaagagatggcggccgaggctggggaagccgtggcgtcccccatggacgacgggtttgtgagcctggactcgccctcctatgtcctgtacaggcatttccggagagttcttttgaagtcacttcagaaggatctacatgaggaaatgaactacatcactgcaataattgaggagcagcccaaaaactatcaagtttggcatcataggcgagtattagtggaatggctaagagatccatctcaggagcttgaatttattgctgatattcttaatcaggatgcaaagaattatcatgcctggcagcatcgacaatgggttattcaggaatttaaactttgggataatgagctgcagtatgtggaccaacttctgaaagaggatgtgagaaataactctgtctggaaccaaagatacttcgttatttctaacaccactggctacaatgatcgtgctgtattggagagagaagtccaatacactctggaaatgattaaactagtaccacataatgaaagtgcatggaactatttgaaagggattttgcaggatcgtggtctttccaaatatcctaatctgttaaatcaattacttgatttacaaccaagtcatagttccccctacctaattgcctttcttgtggatatctatgaagacatgctagaaaatcagtgtgacaataaggaagacattcttaataaagcattagagttatgtgaaatcctagctaaagaaaaggacactataagaaaggaatattggagatacattggaagatcccttcaaagcaaacacagcacagaaaatgactcaccaacaaatgtacagcaataacaccatccagaagaacttgatggaatgcttttattttttattaagggaccctgcaggagtttcacacgagagtggtccttccctttgcctgtggtgtaaaagtgcatcacacaggtattgctttttaacaagaactgatgctccttgggtgctgctgctactcagactagctctaagtaatgtgattcttctaaagcaaagtcattggatgggaggaggaagaaaaagtcccataaaggaacttttgtagtcttatcaacatataatctaatcccttagcatcagctcctccctcagtggtacatgcgtcaagatttgtagcagtaataactgcaggtcacttgtatgtaatggatgtgaggtagccgaagtttggttcagtaagcagggaatacagtcgttccatcagagctggtctgcacactcacattatcttgctatcactgtaaccaactaatgccaaaagaacggttttgtaataaaattatagctgtatct

SEQ ID NO: 10422 - DNA, 2834 bp, Homo sapiens
  source 1..2834: mol_type = unassigned DNA
gtagacacccttgcgcttcaggactctacgctcttgcagcagctcctctgcccaatggggggcggcagcatctcagtaactcactcgaaagacgggtaggcgggaggagacattcgcgttcaaaatctttttgcctctatccgctcgccgtagcgctttagcccgctcgagtttcaatgcgcgttgttgcttaacgaagcagagtcctacacactgtctgctgctctcctgatcatggcttctccgagttctttcacctactattgccctccatcttcctcccccgtctggtcagagccgctgtacagtctgaggcccgagcacgcgcgagagcggttgcaggacgactcggtggaaacagtcacgtccatagaacaggcaaaagtagaagaaaagatccaagaggtcttcagttcttacaagttcaaccaccttgtaccaaggcttgttttgcagagggagaagcacttccattatctgaaaagaggccttcgacaactgacagatgcctatgagtgtctggatgccagccgcccatggctctgctattggatcctgcacagcttggaactgctagatgaacccatcccccagatagtggctacagatgtgtgtcagttcctggagctgtgtcagagcccagaaggtggctttggaggaggacccggtcagtatccacaccttgcacccacatatgcagcagtcaatgcattgtgcatcattggcaccgaggaggcctatgacatcattaacagagagaagcttcttcagtatttgtactccctgaagcaacctgacggctcctttctcatgcatgtcggaggtgaggtggatgtgagaagcgcatactgtgctgcctccgtagcctcgctgaccaacatcatcactccagacctctttgagggcactgctgaatggatagcaaggtgtcagaactgggaaggtggcattggcggggtaccagggatggaagcccatggtggctataccttctgtggcctggccgcgctggtaatcctcaagagggaacgttccttgaacttgaagagcttattacaatgggtgacaagccggcagatgcgatttgaaggaggatttcagggccgctgcaacaagctggtggatggctgctactccttctggcaggcggggctcctgcccctgctccaccgcgcactgcacgcccaaggtgaccctgcccttagcatgagccactggatgttccatcagcaggccctgcaggagtacatcctgatgtgctgccagtgccctgcgggggggcttctggataaacctggcaagtcgcgtgatttctaccacacctgctactgcctgagcggcctgtccatagcccagcacttcggcagcggagccatgttgcatgatgtggtcctgggtgtgcccgaaaacgctctgcagcccactcacccagtgtacaacattggaccagacaaggtgatccaggccactacatactttctacagaagccagtcccaggttttgaggagcttaaggatgagacatcggcagagcctgcaaccgactagaggacctgggtcccggcagctctttgctcacccatctccccagtcagacaaggtttatacgtttcaatacatactgcattctgtgctacacaagccttagcctcagtggagctgtggttctcttggtactttcttgtcaaacaaaaccaatggctctgggtttggagaacacagtggctggttttaaaaattctttccacacctgtcaaaccaaaaatctatcagcccacgtggtgtggttggtgaacagtgcatgccaggaggaagcagtccctcctcaccagctctccagccaggacgatcacacagagatgaatggcatctgagtattacggcatccagagccactgctgactcccacttgcacgccaccattcagtcaccagactgggtgccctccgatgggtggaataagtctgcttcatgccaaggctgggctttgggtcccaccaagatgagttctctgtaagactgtggtggagttgcaccaggaggtgcctctgcctctcgacttgcaccctggtcatttgtaagggaaaagagctggaggtggggagagaaagatctccttcagttgggagtccttccacttcaacactggagaactgagccttgcatctctccagggtccaaggccacgcttggtgcacaggcaagacttgcttcagccccaggtgtggtgacttagacctaggaaaccaattatgagtggaaagtgaccctctagttcaactgtgccagaggaaacagccctccagtgcccacctgcctcactcctccctatcatgtaccgtgaaaaccccctctgatggcctcaaggcagtgcctgcaggccgaggcccttctgggggtttctatctttcttccaccagactccaagcccactctcctccaagactgtgttgtcttttctcaccaagagtattaacactactaagtctttcaccttaacttatgactcaggatttattcacgtcctgcccactctaggctcacaggaataaaatcaagtgctagacacactggctgctactaaggcactagcctctgtagctggtggtggcagcgtggggtgccgcccagcgtgctgggtcctggcagtgcctctgctgtgctgcacattgagccctttctcagtcagtggagtatcaagttgggccatctgtctactgacctggccttcatgtaagcagctgtgggctgcgggcagacaggagctcagagatgcagcatgaggcgcttagaaaaacctggccatttgctgcctctaattcccttttgctttg

SEQ ID NO: 10423 - DNA, 2419 bp, Homo sapiens
  source 1..2419: mol_type = unassigned DNA
aacgccgctgaaggtatccgggtgcgcgcttcgctcccggagccgcggaactcggcggccgccatggcgtccaacatggaccgggagatgatcctggcggattttcaggcatgtactggcattgaaaacattgacgaagctattacattgcttgaacaaaataattgggacttagtggcagctatcaatggtgtaataccacaggaaaatggcattctacaaagtgaatatggaggtgagaccataccaggacctgcatttaatccagcaagtcatccagcttcagctcctacttcctcttcttcttcagcgtttcgacctgtaatgccatccaggcagattgtagaaaggcaacctcggatgctggacttcagggttgaatacagagacagaaatgttgatgtggtacttgaagacacctgtactgttggagagattaaacagattctagaaaatgaacttcagatacctgtgtccaaaatgctgttaaaaggctggaagacgggagatgtggaagacagtacggtcctaaaatctctacacttgccaaaaaacaacagtctttatgtccttacaccagatttgccaccaccttcatcatctagtcatgctggtgccctgcaggagtcattaaatcaaaacttcatgctgatcatcacccaccgagaagtccagcgggagtacaacctgaacttctcaggaagcagtactattcaagaggtaaagagaaatgtgtatgaccttacaagtatccccgttcgccaccaattatgggagggctggccaacttctgctacagacgactcaatgtgtcttgctgaatcagggctctcttatccctgccatcgacttacagtgggaagaagatcttcacctgcacagacccgggaacagtcggaagaacaaatcaccgatgttcatatggttagtgatagcgatggagatgactttgaagatgctacagaatttggggtggatgatggagaagtatttggcatggcgtcatctgccttgagaaaatctccaatgatgccagaaaacgcagaaaatgaaggagatgccttattacaatttacagcagagttttcttcaagatatggtgattgccatcctgtattttttattggctcattagaagctgcttttcaagaggccttctatgtgaaagcccgagatagaaagcttcttgctatctacctccaccatgatgaaagtgtgttaaccaacgtgttctgctcacaaatgctttgtgctgaatccattgtttcttatctgagtcaaaattttataacctgggcttgggatctgacaaaggactccaacagagcaagatttctcactatgtgcaatagacactttggcagtgttgtggcacaaaccattcggactcaaaaaacggatcagtttccgcttttcctgattattatgggaaagcgatcatctaatgaagtgttgaatgtgatacaagggaacacaacagtagatgagttaatgatgagactcatggctgcaatggagatcttcacagcccaacaacaggaagatataaaggacgaggatgaacgtgaagccagagaaaatgtgaagagagagcaagatgaggcctatcgcctttcacttgaggctgacagagcaaagagggaagctcacgagagagagatggcagaacagtttcgtttggagcagattcgcaaagaacaagaagaggaacgtgaggccatccggctgtccttagagcaagccctgcctcctgagccaaaggaagaaaatgctgagcctgtgagcaaactgcggatccggacccccagtggcgagttcttggagcggcgtttcctggccagcaacaagctccagattgtctttgattttgtagcttccaaaggatttccatgggatgagtacaagttactgagcacctttcctaggagagacgtaactcaactggacccaaataaatcattattggaggtaaagttgttccctcaagaaacccttttccttgaagcaaaagagtaaacacggcccagcggtggaaccagccattccttgacaagccagcagcctgcgtcaggagaagggctcctcgccaacccacccacacgctcgtctcactcaattcaatgtcacacttctgcctcttgcaaaattgctggaaaaagtaataataaatatagctacttaagatttcccatccatgagtatatattcccaacccttattacagagaattacaactctgccaccctcccctaccccctgcacttcaccctccttcaatgacgaatgcattgttcaagtgtgagtgatcactaaatagaatttttacctctccagtgcccatcttttccccacagtgtctaggacagttctgtctgttctgtgacaccaggatgctgtatatttgatatatgtcttttta

SEQ ID NO: 10424 - DNA, 1645 bp, Homo sapiens
  source 1..1645: mol_type = unassigned DNA
cgggagatgatcctggcggattttcaggcatgtactggcattgaaaacattgacgaagctattacattgcttgaacaaaataattgggacttagtggcagctatcaatggtgtaataccacaggaaaatggcattctacaaagtgaatatggaggtgagaccataccaggacctgcatttaatccagcaagtcatccagcttcagctcctacttcctcttcttcttcagcgtttcgacctgtaatgccatccaggcagattgtagaaaggcaacctcggatgctggacttcagggttgaatacagagacagaaatgttgatgtggtacttgaagacacctgtactgttggagagattaaacagattctagaaaatgaacttcagatacctgtgtccaaaatgctgttaaaaggctggaagacgggagatgtggaagacagtacggtcctaaaatctctacacttgccaaaaaacaacagtctttatgtccttacaccagatttgccaccaccttcatcatctagtcatgctggtgccctgcaggagttttcttcaagatatggtgattgccatcctgtattttttattggctcattagaagctgcttttcaagaggccttctatgtgaaagcccgagatagaaagcttcttgctatctacctccaccatgatgaaagtgtgttaaccaacgtgttctgctcacaaatgctttgtgctgaatccattgtttcttatctgagtcaaaattttataacctgggcttgggatctgacaaaggactccaacagagcaagatttctcactatgtgcaatagacactttggcagtgttgtggcacaaaccattcggactcaaaaaacggatcagtttccgcttttcctgattattatgggaaagcgatcatctaatgaagtgttgaatgtgatacaagggaacacaacagtagatgagttaatgatgagactcatggctgcaatggagatcttcacagcccaacaacaggaagatataaaggacgaggatgaacgtgaagccagagaaaatgtgaagagagagcaagatgaggcctatcgcctttcacttgaggctgacagagcaaagagggaagctcacgagagagagatggcagaacagtttcgtttggagcagattcgcaaagaacaagaagaggaacgtgaggccatccggctgtccttagagcaagccctgcctcctgagccaaaggaagaaaatgctgagcctgtgagcaaactgcggatccggacccccagtggcgagttcttggagcggcgtttcctggccagcaacaagctccagattgtctttgattttgtagcttccaaaggatttccatgggatgagtacaagttactgagcacctttcctaggagagacgtaactcaactggacccaaataaatcattattggaggtaaagttgttccctcaagaaacccttttccttgaagcaaaagagtaaacacggcccagcggtggaaccagccattccttgacaagccagcagcctgcgtcaggagaagggctcctcgccaacccacccacacgctcgtctcactcaattcaatgtcacacttctgcctcttgcaaaattgctggaaaaagtaataataaatatagctacttaa

SEQ ID NO: 10425 - DNA, 4367 bp, Homo sapiens
  source 1..4367: mol_type = unassigned DNA
aggggcggaggcggcggccagggaggaagcggaggaggcggaggcggccgcggcgttcgcccgcccgctcgctcgctcggtttccccgcccccgccgggcttaacgccgctgaaggtatccgggtgcgcgctgtcgcaacctgccctcatcctggcccgcgactgtaagaccggacccacatccagaccaatcttcctgtccgggctgctgcgacgcgggctccgcaggttgcaggcgggcggccggggcgcctgaaggttaccgagtgcatgagcgcctagcgcttcccgcgctgccccgcccgctggcccgccgacccgcccgccggctcgcccgccagcccctcggcgcccggcggcggcggcggcggtggcggcgacggtcgcaggaggtgccgtctgcctcccaggtgcgcgcttcgctcccggagccgcggaactcggcggccgccatggcgtccaacatggaccgggagatgatcctggcggattttcaggcatgtactggcattgaaaacattgacgaagctattacattgcttgaacaaaataattgggacttagtggcagctatcaatggtgtaataccacaggaaaatggcattctacaaagtgaatatggaggtgagaccataccaggacctgcatttaatccagcaagtcatccagcttcagctcctacttcctcttcttcttcagcgtttcgacctgtaatgccatccaggcagattgtagaaaggcaacctcggatgctggacttcagggttgaatacagagacagaaatgttgatgtggtacttgaagacacctgtactgttggagagattaaacagattctagaaaatgaacttcagatacctgtgtccaaaatgctgttaaaaggctggaagacgggagatgtggaagacagtacggtcctaaaatctctacacttgccaaaaaacaacagtctttatgtccttacaccagatttgccaccaccttcatcatctagtcatgctggtgccctgcaggagtcattaaatcaaaacttcatgctgatcatcacccaccgagaagtccagcgggagtacaacctgaacttctcaggaagcagtactattcaagaggtaaagagaaatgtgtatgaccttacaagtatccccgttcgccaccaattatgggagggctggccaacttctgctacagacgactcaatgtgtcttgctgaatcagggctctcttatccctgccatcgacttacagtgggaagaagatcttcacctgcacagacccgggaacagtcggaagaacaaatcaccgatgttcatatggttagtgatagcgatggagatgactttgaagatgctacagaatttggggtggatgatggagaagtatttggcatggcgtcatctgccttgagaaaatctccaatgatgccagaaaacgcagaaaatgaaggagatgccttattacaatttacagcagagttttcttcaagatatggtgattgccatcctgtattttttattggctcattagaagctgcttttcaagaggccttctatgtgaaagcccgagatagaaagcttcttgctatctacctccaccatgatgaaagtgtgttaaccaacgtgttctgctcacaaatgctttgtgctgaatccattgtttcttatctgagtcaaaattttataacctgggcttgggatctgacaaaggactccaacagagcaagatttctcactatgtgcaatagacactttggcagtgttgtggcacaaaccattcggactcaaaaaacggatcagtttccgcttttcctgattattatgggaaagcgatcatctaatgaagtgttgaatgtgatacaagggaacacaacagtagatgagttaatgatgagactcatggctgcaatggagatcttcacagcccaacaacaggaagatataaaggacgaggatgaacgtgaagccagagaaaatgtgaagagagagcaagatgaggcctatcgcctttcacttgaggctgacagagcaaagagggaagctcacgagagagagatggcagaacagtttcgtttggagcagattcgcaaagaacaagaagaggaacgtgaggccatccggctgtccttagagcaagccctgcctcctgagccaaaggaagaaaatgctgagcctgtgagcaaactgcggatccggacccccagtggcgagttcttggagcggcgtttcctggccagcaacaagctccagattgtctttgattttgtagcttccaaaggatttccatgggatgagtacaagttactgagcacctttcctaggagagacgtaactcaactggacccaaataaatcattattggaggtaaagttgttccctcaagaaacccttttccttgaagcaaaagagtaaacacggcccagcggtggaaccagccattccttgacaagccagcagcctgcgtcaggagaagggctcctcgccaacccacccacacgctcgtctcactcaattcaatgtcacacttctgcctcttgcaaaattgctggaaaaagtaataataaatatagctacttaagatttcccatccatgagtatatattcccaacccttattacagagaattacaactctgccaccctcccctaccccctgcacttcaccctccttcaatgacgaatgcattgttcaagtgtgagtgatcactaaatagaatttttacctctccagtgcccatcttttccccacagtgtctaggacagttctgtctgttctgtgacaccaggatgctgtatatttgatatatgtctttttattttcatgactgaatttctacttcatcacctaattttaaggggcagagggaaaaaaagtcaaatgagacattgtcggcatggagattaaacattgtaggaaaaaagtataccatttttgttagaactttctgatggctttactaagatgtcaggttttgtttgaggactgaatttgacatatatgcaagatatttatttactgctgctgccttgggtctccaggttctacctaggaggtatttgctgttccattgcagcatagggaaactgttcaagcacacaatgtgaatgttgagatcatgtgcagagaggccagtaccaaaacttcagtatctggcccaatggcaagaggctactgttaggtttgcatttgggcagttagaacctcacagataccagctcccaagttgctagtccatcagtgtaaactgaacacaattctctcttgctttctctctctctactccctcacacatttggaccttgtcacttggtgtttaagcaccttgcctatcaacaaaatctgatgagcagccccatggactctcctgtaataaggaacttgctctactattttattcttttaatgttttagtatttgatattggactcaaatgaaagggatctcattctgtggctgaaaaatcagacttcatatgttgaagagagcaaacttggggactcaactcagaagacatgtgttgcctgaaacctgcatataataatttttgatttgatttagtaagtgtggatttttcttaatctacagatttggggtttggggtttagatcatgagaacaccgtttataccttcacagccaatgatttatttttagtcttgaaatatttctccatatctgtttttgtgtcacctgtgggttttatcctaggggttgggatcctgattttaacattttgtacttgtccaaaaaagagttcaaatgctgggtttgttcccccagcctcggccaaggggttctcagaagattctaaccaaagctggagataggtctgctcattttccttctgcccagaagtggatgttggccaggaaaattacaccttgtgtcttctctgatgctccaaccagggacctctccagattactatctagcacagactagtgctacatctgcctaggtatgggctttctctggcagcaggggtctctctagggaggctgagagacccatgggtctcccttcaggggaagtgttcaggggagttcaaactgaacacttctctccagctctattcctatcttcctaatctaatggctctacaagatagtcatttccagtgctacagatgcaccagggcaccacctctttttttttctaggtagaccttgttctgtagctgctgtgaagaagctgcagccctgaactcaggtcatactcaggaacagcagcaggggtgtgggtggggtttgagggaaggtactctgaattcaccttcatgtttaacctgttccatctgacttgggtttcttcattatattgttccctcccactcaccttcacttctgtattacaacaatatagactttactctaaa

SEQ ID NO: 10426 - DNA, 1978 bp, Homo sapiens
  source 1..1978: mol_type = unassigned DNA
gcaacctgccctcatcctggcccgcgactgtaagaccggacccacatccagaccaatcttcctgtccgggctgctgcgacgcgggctccgcaggttgcaggcgggcggccggggcgcctgaaggttaccgagtgcatgagcgcctagcgcttcccgcgctgccccgcccgctggcccgccgacccgcccgccggctcgcccgccagcccctcggcgcccggcggcggcggcggcggtggcggcgacggtcgcaggaggtgccgtctgcctcccaggtgcgcgcttcgctcccggagccgcggaactcggcggccgccatggcgtccaacatggaccgggagatgatcctggcggattttcaggcatgtactggcattgaaaacattgacgaagctattacattgcttgaacaaaataattgggacttagtggcagctatcaatggtgtaataccacaggaaaatggcattctacaaagtgaatatggaggtgagaccataccaggacctgcatttaatccagcaagtcatccagcttcagctcctacttcctcttcttcttcagcgtttcgacctgtaatgccatccaggcagattgtagaaaggcaacctcggatgctggacttcagggttgaatacagagacagaaatgttgatgtggtacttgaagacacctgtactgttggagagattaaacagattctagaaaatgaacttcagatacctgtgtccaaaatgctgttaaaaggctggaagacgggagatgtggaagacagtacggtcctaaaatctctacacttgccaaaaaacaacagtctttatgtccttacaccagatttgccaccaccttcatcatctagtcatgctggaactttgcaacagttttcctatagatatggtgattgccatcctgtattttttattggctcattagaagctgcttttcaagaggccttctatgtgaaagcccgagatagaaagcttcttgctatctacctccaccatgatgaaagtgtgttaaccaacgtgttctgctcacaaatgctttgtgctgaatccattgtttcttatctgagtcaaaattttataacctgggcttgggatctgacaaaggactccaacagagcaagatttctcactatgtgcaatagacactttggcagtgttgtggcacaaaccattcggactcaaaaaacggatcagtttccgcttttcctgattattatgggaaagcgatcatctaatgaagtgttgaatgtgatacaagggaacacaacagtagatgagttaatgatgagactcatggctgcaatggagatcttcacagcccaacaacaggaagatataaaggacgaggatgaacgtgaagccagagaaaatgtgaagagagagcaagatgaggcctatcgcctttcacttgaggctgacagagcaaagagggaagctcacgagagagagatggcagaacagtttcgtttggagcagattcgcaaagaacaagaagaggaacgtgaggccatccggctgtccttagagcaagccctgcctcctgagccaaaggaagaaaatgctgagcctgtgagcaaactgcggatccggacccccagtggcgagttcttggagcggcgtttcctggccagcaacaagctccagattgtctttgattttgtagcttccaaaggatttccatgggatgagtacaagttactgagcacctttcctaggagagacgtaactcaactggacccaaataaatcattattggaggtaaagttgttccctcaagaaacccttttccttgaagcaaaagagtaaacacggcccagcggtggaaccagccattccttgacaagccagcagcctgcgtcaggagaagggctcctcgccaacccacccacacgctcgtctcactcaattcaatgtcacacttctgcctcttgcaaaattgctggaaaaagtaataataaatatagctactt

SEQ ID NO: 10427 - DNA, 1544 bp, Homo sapiens
  source 1..1544: mol_type = unassigned DNA
atacaaagcaggcttgagatgtatccttgcatatttgaaggttctgtggttatgatgagctgaaatgaccactgattaatacagtagctctctaaaataatgaggtttctccactaacggaacctctttatttatcaaacttataataaaatgaggaatctgcttgagatgtgtcttgctgaatcagggctctcttatccctgccatcgacttacagtgggaagaagatcttcacctgcacagacccgggaacagtcggaagaacaaatcaccgatgttcatatggttagtgatagcgatggagatgactttgaagatgctacagaatttggggtggatgatggagaagtatttggcatggcgtcatctgccttgagaaaatctccaatgatgccagaaaacgcagaaaatgaaggagatgccttattacaatttacagcagagttttcttcaagatatggtgattgccatcctgtattttttattggctcattagaagctgcttttcaagaggccttctatgtgaaagcccgagatagaaagcttcttgctatctacctccaccatgatgaaagtgtgttaaccaacgtgttctgctcacaaatgctttgtgctgaatccattgtttcttatctgagtcaaaattttataacctgggcttgggatctgacaaaggactccaacagagcaagatttctcactatgtgcaatagacactttggcagtgttgtggcacaaaccattcggactcaaaaaacggatcagtttccgcttttcctgattattatgggaaagcgatcatctaatgaagtgttgaatgtgatacaagggaacacaacagtagatgagttaatgatgagactcatggctgcaatggagatcttcacagcccaacaacaggaagatataaaggacgaggatgaacgtgaagccagagaaaatgtgaagagagagcaagatgaggcctatcgcctttcacttgaggctgacagagcaaagagggaagctcacgagagagagatggcagaacagtttcgtttggagcagattcgcaaagaacaagaagaggaacgtgaggccatccggctgtccttagagcaagccctgcctcctgagccaaaggaagaaaatgctgagcctgtgagcaaactgcggatccggacccccagtggcgagttcttggagcggcgtttcctggccagcaacaagctccagattgtctttgattttgtagcttccaaaggatttccatgggatgagtacaagttactgagcacctttcctaggagagacgtaactcaactggacccaaataaatcattattggaggtaaagttgttccctcaagaaacccttttccttgaagcaaaagagtaaacacggcccagcggtggaaccagccattccttgacaagccagcagcctgcgtcaggagaagggctcctcgccaacccacccacacgctcgtctcactcaattcaatgtcacacttctgcctcttgcaaaattgctggaaaaagtaataataaatatagctacttaag

SEQ ID NO: 10428 - DNA, 4654 bp, Homo sapiens
  source 1..4654: mol_type = unassigned DNA
agaacccacgcggaggaaggaagagacgcaggcaggctgcggttacccaagcggccacccgggcctcagggaccccttccccgagagacggcaccatgacccagggaaagctctccgtggctaacaaggcccctgggaccgaggggcagcagcaggtgcatggcgagaagaaggaggctccagcagtgccctcagccccaccctcctatgaggaagccacctctggggaggggatgaaggcaggggccttccccccagcccccacagcggtgcctctccaccctagctgggcctatgtggaccccagcagcagctccagctatgacaacggtttccccaccggagaccatgagctcttcaccactttcagctgggatgaccagaaagttcgtcgagtctttgtcagaaaggtctacaccatcctgctgattcagctgctggtgaccttggctgtcgtggctctctttactttctgtgaccctgtcaaggactatgtccaggccaacccaggctggtactgggcatcctatgctgtgttctttgcaacctacctgaccctggcttgctgttctggacccaggaggcatttcccctggaacctgattctcctgaccgtctttaccctgtccatggcctacctcactgggatgctgtccagctactacaacaccacctccgtgctgctgtgcctgggcatcacggcccttgtctgcctctcagtcaccgtcttcagcttccagaccaagttcgacttcacctcctgccagggcgtgctcttcgtgcttctcatgactcttttcttcagcggactcatcctggccatcctcctacccttccaatatgtgccctggctccatgcagtttatgcagcactgggagcgggtgtatttacattgttcctggcacttgacacccagttgctgatgggtaaccgacgccactcgctgagccctgaggagtatatttttggagccctcaacatttacctagacatcatctatatcttcaccttcttcctgcagctttttggcactaaccgagaatgaggagccctccctgccccaccgtcctccagagaatgcgcccctcctggttccctgtccctcccctgcgctcctgcgagaccagatataaaactagctgccaacccagcctgtggccaggtcactgtctaccccagcccagcccagccctctgccgcttgtacatacgccatggggaccctgaggaactgaggccacgtcaatccctgtgccgccccattcgcccgttacatcttccaaactgggacggtcaaggctgaaggctcctctgggtttgagggtccaagggacaaggaggagaagcctagcaggatttcagatgcaggagagagacccaggaagcccggcagagccctgagccccactgcaattcctcctagggctgcacaatcatgtggccttagggcacactgtcctgcatccagtctgtgtcctcctgtctttctcatccaggtcaggcattgacactttgtaagaaagggggtaggggacacagctgggcaggtggagtgggtgggcaggatggctgtcccagtctgcccatcttctcttggctctgggaccagcggcttgttctagggatttggacctggaggccaagggcaataggagagggtctgaagcctgtgctgtctgctgcttgctgtgaatggccctcccgggtcatgacagagctcttttggggcaggaggtgagggcagggggccccgctccttggtaagggcctgccctggggctcccagggaagtgggagctggggagccaatccacccagacccgcgtccacctgggaggcatttggggttgcaggaccgagacccacatcctctcactcacttctccacccgccaggcagctgccacaggcctaaggctgagtgaggtgtgattgggccctccggctggatgttctgggggaggaggcaatcgctgtagctgccaggccagccccatctggaaggagtccctgctctgcctcagccctaacccgaggctgtgtgggagtcccttctgcacctcttatttcctaaacccttcctgtcagctgctgtttgctggctcgtccccagccaggcctcctgaggtcttcatagttggcacagtccacatctcttctagcttcactggccactcactcagcccagagtccctaagtgctcccccacttatctctgcatctctccaatttggaagccatccagctgatgctaacagccagggccagtccctccagctggtcccatgtaatgaggccagggctccttatcagcttccaggcggctgggatctcaggcagggtgtgcgtcagccctccaacccccagaggggcgcctgtggggagggaaccaggaggccacactgggggagcgtgcagccagcatgtgcagtggccaactccaggccagtggaaagttactgtgtggatacaggaaggctctgagtggctagcaggaccctcccttggcttcgccctcctcctcttctctctcccctgtgctgggagctccgtctgccttgggaagggagacgaggtgtgctgttccttcccagccccatccctccccacccttcctactcccagctttcaagaaacattgcagaagcatttgaagttttgttccatcttggatatttgaagagaaaaggagccaagaactggcgggtggtgtgtgtgcagcaaaggcattgggggcacgggtgagatgcccactgtgtgctggtctaaattaatccatcgcagtgatcctccagagacagcgctctgctcatgtccgtagcagagggaaaagccgaggtgctcagaaaggctcggtaatgagtcccaggtcatacggctagcgagtggcgggcctggggttcagacccacagctgcctcaagcaaacagggtatcacgcttgcccctgggcctgggtgggggccggaatgagaccacatgagagcgcagagaggtgggtggtcaggccctgatgtcctggggatttcttgtcctcagtgccacccggcctcccgtctttcctgaaacccctcgccagattttgcactctgaggtttctatcttccagacaagagctgggaggcaagatttctggtttctggttcctagcctcactgccagcgggctcctgctattaggtgagggtttcttgctgtctggaattcagtttttccatctgccacatggaagttcatagccaggatagggcgggagaggcaccagaacatttctctccactgactttctcacccggttcccaccctcctccacctcctctcctccgggcccctcagtttcctctcctcatctctggcctcagttccagagggttagccccagcaccccactctcctgccactgtcagatagccttggtcatgcttcctagaatctacttgtccaagttctcctctccctgggataagttactgcagaaactggggatttagaagcttattcagggctgagtgccaaaagcttgggggaggagggacaggtcctcggcaataaacagtgtcacacacgcatcacagccatttgagaaatggcttctttgcagagctggggaagccgggcagaagatgccgcagcctcctactctgggtcctgagggggggtggcaggtaccacagtgtaggcagcagggtcagggccaaagtctatgcgttccatctccaatccaggcagtgaggaatcctgaaacaccaggagaggcgtcagaagtaggaagggcaggggaacaggaatgcaagattaaggaaaccgcagctgagcaggtgtcacaagctgtaaaggaggaagggagtctgcaggcccttcacatttttggcctgggtggggctgggcccaggaaggggtgggctggattttgtaaagctggaggcagccaggaatctgactgtccggaatgtgagttgaggggtctcccactgaagtcctcttctggaagctgcagatgggggcccgggaggcacacacgagtctgggactcattcccgggcacacctatggctccttcggtatcacctggggaagccccggaatcttagttcttccattccctactcttccttccgagggagtcaggatgggacagacacccattttccaaaaggctccttgcctccttccctggcccacctgaagccaagtcccaggtgtcctggctgctctcctgggcggggtgggatttttgcataagcactttgctgccctccagtggctgcttgaggaaacgcagggcctggtttgggagagtcaccgagggcccatgtggctggaggttgggggcaggatctggcccgagctctcctcagacctccccagacctgtcttctcatcagccaccgctgttttcttttgccgaacgatggttgcatctctcggacacagtgtaccccctcccaagccctccctgagccgttctcctgagtccctgagggcagacacagctccagggacccaggccagctgccacacccccgacactcctgctgtccactggccttagctcctgcaagttccccagtgtccgcacctgttcccttccctgacctcaccttcctggggtctgtgactgactggagataaaaataaaagcaattgtgacacctga

SEQ ID NO: 10429 - DNA, 1256 bp, Homo sapiens
  source 1..1256: mol_type = unassigned DNA
ggccctgatgcccggctctggtttcacgcgggcagcgtcagctgcgtcctccgcagcatcttcccaggcccggccctctcctccccccgcgccgatggtacgcgccggctcgcctggcccggctgcagtggatgttgctagaacccacgcggaggaaggaagagacgcaggcaggctgcggttacccaagcggccacccgggcctcagggaccccttccccgagagacggcaccatgacccagggaaagctctccgtggctaacaaggcccctgggaccgaggggcagcagcaggtgcatggcgagaagaaggaggctccagcagtgccctcagccccaccctcctatgaggaagccacctctggggaggggatgaaggcaggggccttccccccagcccccacagcggtgcctctccaccctagctgggcctatgtggaccccagcagcagctccagctatgacaacggtttccccaccggagaccatgagctcttcaccactttcagctgggatgaccagaaagttcgtcgagtctttgtcagaaaggtctacaccatcctgctgattcagctgctggtgaccttggctgtcgtggctctctttactttctgtgaccctgtcaaggactatgtccaggccaacccaggctggtactgggcatcctatgctgtgttctttgcaacctacctgaccctggcttgctgttctggacccaggaggcatttcccctggaacctgattctcctgaccgtctttaccctgtccatggcctacctcactgggatgctgtccagctactacaacaccacctccgtgctgctgtgcctgggcatcacggcccttgtctgcctctcagtcaccgtcttcagcttccagaccaagttcgacttcacctcctgccagggcgtgctcttcgtgcttctcatgactcttttcttcagcggactcatcctggccatcctcctacccttccaatatgtgccctggctccatgcagtttatgcagcactgggagcgggtgtatttacattgttcctggcacttgacacccagttgctgatgggtaaccgacgccactcgctgagccctgaggagtatatttttggagccctcaacatttacctagacatcatctatatcttcaccttcttcctgcagctttttggcactaaccgagaatgaggagccctccctgccccaccgtcctccagagaatgcgcccctcctggttccctgtccctcccctgcgctcc

SEQ ID NO: 10430 - DNA, 2094 bp, Homo sapiens
  source 1..2094: mol_type = unassigned DNA
ctcagtggccctttaggtctaacacagtcttctgggaaccagacctaaatcccattttctgagagccgggctttttgttgctgtttcaatttcacaccaccccctccaccccagtctttccttctctggctgcctcattcaggccttcccagctcaaatcctctcaccaaagctaaacatgtccacgggtggggggcaggggacacatctgagtgtaaatggactcgcatttccaacctgccatggggacgtttccctttgagcctcagtttcctcatctgttcagtgacggaagagactcaactggatgtcttctgaggccccttccactgggtcactctgtgagtctgttctggtttaggggagaggctgagattcctacaggatgaggccagaacagacccttagcctggatcctcttgcccttcctccaccctgaaggcccttcttcttttctgttttctccctctcctcttccctttctgttgcccttctctctcccatctccattctccttgcatcacttccagcgcaacagaaggatcaatcccagtggatgatgcctaggccctgcctctcagtgggccacatgcagctctgtgaccttggatgaatcgctcttcctctgtgatcctcattctcctcattttaaagcaggggtcaaaatgcagctagcaagtctcaggaagattaaatgacataaccttttatttgtaacaatctactatgtgccaggctcttttctggaaccatagagaccctgcccctaccccagggacaatgacagtgacaaccaatggtggacactcctaagaattttctctttcctctgttcctatcccagctccaccatgtgccccagctagctctgacccctctggagcttagttctcttgtctataaaatagagacattcttgtctgcattcctggcttccaagtgcaggtaaggaaggaaccatgaaagttccaggaattgaagagttggtgaggaggaggagttggaaggctccctttccctggtgactatctctctctctgactctactccatagctctccgtggctaacaaggcccctgggaccgaggggcagcagcaggtgcatggcgagaagaaggaggctccagcagtgccctcagccccaccctcctatgaggaagccacctctggggaggggatgaaggcaggggccttccccccagcccccacagcggtgcctctccaccctagctgggcctatgtggaccccagcagcagctccagctatgacaacggtttccccaccggagaccatgagctcttcaccactttcagctgggatgaccagaaagttcgtcgagtctttgtcagaaaggtctacaccatcctgctgattcagctgctggtgaccttggctgtcgtggctctctttactttctgtgaccctgtcaaggactatgtccaggccaacccaggctggtactgggcatcctatgctgtgttctttgcaacctacctgaccctggcttgctgttctggacccaggaggcatttcccctggaacctgattctcctgaccgtctttaccctgtccatggcctacctcactgggatgctgtccagctactacaacaccacctccgtgctgctgtgcctgggcatcacggcccttgtctgcctctcagtcaccgtcttcagcttccagaccaagttcgacttcacctcctgccagggcgtgctcttcgtgcttctcatgactcttttcttcagcggactcatcctggccatcctcctacccttccaatatgtgccctggctccatgcagtttatgcagcactgggagcgggtgtatttacattgttcctggcacttgacacccagttgctgatgggtaaccgacgccactcgctgagccctgaggagtatatttttggagccctcaacatttacctagacatcatctatatcttcaccttcttcctgcagctttttggcactaaccgagaatgaggagccctccctgccccaccgtcctccagagaatgcgcccctcctggttccctgtccctcccctgcgctcctgcgagaccagatataaaactagctgccaaccc

SEQ ID NO: 10431 - DNA, 1950 bp, Homo sapiens
  source 1..1950: mol_type = unassigned DNA
atttcctcatcgtcaagctttgttcctcgtgggggctagaaatctctttccagttccagattgtgaagggttcctgagtaagcagcgtgtctccatccccctctctaggggctcttggatggaccttgcactctagaagggacaatggacttctggctttggccactttacttcctgccagtatcgggggccctgaggatcctcccagaagtaaaggtagagggggagctgggcggatcagttaccatcaagtgcccacttcctgaaatgcatgtgaggatatatctgtgccgggagatggctggatctggaacatgtggtaccgtggtatccaccaccaacttcatcaaggcagaatacaagggccgagttactctgaagcaatacccacgcaagaatctgttcctagtggaggtaacacagctgacagaaagtgacagcggagtctatgcctgcggagcgggcatgaacacagaccggggaaagacccagaaagtcaccctgaatgtccacagtgaatacgagccatcatgggaagagcagccaatgcctgagactccaaaatggtttcatctgccctatttgttccagatgcctgcatatgccagttcttccaaattcgtaaccagagttaccacaccagctcaaaggggcaaggtccctccagttcaccactcctcccccaccacccaaatcacccaccgccctcgagtgtccagagcatcttcagtagcaggtgacaagccccgaaccttcctgccatccactacagcctcaaaaatctcagctctggaggggctgctcaagccccagacgcccagctacaaccaccacaccaggctgcacaggcagagagcactggactatggctcacagtctgggagggaaggccaaggatttcacatcctgatcccgaccatcctgggccttttcctgctggcacttctggggctggtggtgaaaagggccgttgaaaggaggaaagccctctccaggcgggcccgccgactggccgtgaggatgcgcgccctggagagctcccagaggccccgcgggtcgccgcgaccgcgctcccaaaacaacatctacagcgcctgcccgcggcgcgctcgtggagcggacgctgcaggcacaggggaggcccccgttcccggccccggagcgccgttgccccccgccccgctgcaggtgtctgaatctccctggctccatgccccatctctgaagaccagctgtgaatacgtgagcctctaccaccagcctgccgccatgatggaggacagtgattcagatgactacatcaatgttcctgcctgacaactccccagctatcccccaaccccaggctcggactgtggtgccaaggagtctcatctatctgctgatgtccaatacctgcttcatgtgttctcagagccctcatcacttcccatgccccatctcgactcccatccccatctatctgtgccctgagcatggctctgcccccaggtcgtcttgcacaccttggcagccccctgtagttgacaggtaagctgtaggcatgtagagcaattgtcccaatgccacttgcttcctttccaagccgtcgaacagactgtgggatttgcagagtgtttcttccatgtctttgaccacagggttgttgctgcccaggctctagatcacatggcatcaggctggggcagaggcatagctattgtctcgggcatccttcccagggttgggtcttacacaaatagaaggctcttgctctgagttatgtgacatgcctcagccccatggactaagcaggggtctggtataaaaacactcctggaaacgcctttgccctgatccaaatgttagcacttgctagtgaacgtctacttatctcaagttctatgctaaaggcaatttatcttgatgtgatgataaaccaaacttattagcaagatatgcatatatatc

SEQ ID NO: 10432 - DNA, 1055 bp, Homo sapiens
  source 1..1055: mol_type = unassigned DNA
tctagaagggacaatggacttctggctttggccactttacttcctgccagtatcgggggccctgaggatcctcccagaagtaaaggtagagggggagctgggcggatcagttaccatcaagtgcccacttcctgaaatgcatgtgaggatatatctgtgccgggagatggctggatctggaacatgtggtaccgtggtatccaccaccaacttcatcaaggcagaatacaagggccgagttactctgaagcaatacccacgcaagaatctgttcctagtggaggtaacacagctgacagaaagtgacagcggagtctatgcctgcggagcgggcatgaacacagaccggggaaagacccagaaagtcaccctgaatgtccacagtgaatacgagccatcatgggaagagcagccaatgcctgagactccaaaatggtttcatctgccctatttgttccagatgcctgcatatgccagttcttccaaattcgtaaccagagttaccacaccagctcaaaggggcaaggtccctccagttcaccactcctcccccaccacccaaatcacccaccgccctcgagtgtccagagcatcttcagtagcaggtgacaagccccgaaccttcctgccatccactacagcctcaaaaatctcagctctggaggggctgctcaagccccagacgcccagctacaaccaccacaccaggctgcacaggcagagccctctccaggcgggcccgccgactggccgtgaggatgcgcgccctggagagctcccagaggccccgcgggtcgccgcgaccgcgctcccaaaacaacatctacagcgcctgcccgcggcgcgctcgtggagcggacgctgcaggcacaggggaggcccccgttcccggccccggagcgccgttgccccccgccccgctgcaggtgtctgaatctccctggctccatgccccatctctgaagaccagctgtgaatacgtgagcctctaccaccagcctgccgccatgatggaggacagtgattcagatgactacatcaatgttcctgcctga

SEQ ID NO: 10433 - DNA, 1441 bp, Homo sapiens
  source 1..1441: mol_type = unassigned DNA
atttcctcatcgtcaagctttgttcctcgtgggggctagaaatctctttccagttccagattgtgaagggttcctgagtaagcagcgtgtctccatccccctctctaggggctcttggatggaccttgcactctagaagggacaatggacttctggctttggccactttacttcctgccagaatacgagccatcatgggaagagcagccaatgcctgagactccaaaatggtttcatctgccctatttgttccagatgcctgcatatgccagttcttccaaattcgtaaccagagttaccacaccagctcaaaggggcaaggtccctccagttcaccactcctcccccaccacccaaatcacccaccgccctcgagtgtccagagcatcttcagtagcaggtgacaagccccgaaccttcctgccatccactacagcctcaaaaatctcagctctggaggggctgctcaagccccagacgcccagctacaaccaccacaccaggctgcacaggcagagagcactggactatggctcacagtctgggagggaaggccaaggatttcacatcctgatcccgaccatcctgggccttttcctgctggcacttctggggctggtggtgaaaagggccgttgaaaggaggaaagccctctccaggcgggcccgccgactggccgtgaggatgcgcgccctggagagctcccagaggccccgcgggtcgccgcgaccgcgctcccaaaacaacatctacagcgcctgcccgcggcgcgctcgtggagcggacgctgcaggcacaggggaggcccccgttcccggccccggagcgccgttgccccccgccccgctgcaggtgtctgaatctccctggctccatgccccatctctgaagaccagctgtgaatacgtgagcctctaccaccagcctgccgccatgatggaggacagtgattcagatgactacatcaatgttcctgcctgacaactccccagctatcccccaaccccaggctcggactgtggtgccaaggagtctcatctatctgctgatgtccaatacctgcttcatgtgttctcagagccctcatcacttcccatgccccatctcgactcccatccccatctatctgtgccctgagcatggctctgcccccaggtcgtcttgcacaccttggcagccccctgtagttgacaggtaagctgtaggcatgtagagcaattgtcccaatgccacttgcttcctttccaagccgtcgaacagactgtgggatttgcagagtgtttcttccatgtctttgaccacagggttgttgctgcccaggctctagatcacatggcatcaggctggggcagaggcatagctattgtctcgggcatccttcccagggttgggtcttacacaaatagaaggctcttgctctgagttatgtgacatgcctcag

SEQ ID NO: 10434 - DNA, 594 bp, Homo sapiens
  source 1..594: mol_type = unassigned DNA
acaaccactgtggagcccgggtctgtcaggcacatccccccagaaacagtttccagattgtgaagggttcctgagtaagcagcgtgtctccatccccctctctaggggctcttggatggaccttgcactctagaagggacaatggacttctggctttggccactttacttcctgccagtatcgggggccctgaggatcctcccagaagtaaaggtagagggggagctgggcggatcagttaccatcaagtgcccacttcctgaaatgcatgtgaggatatatctgtgccgggagatggctggatctggaacatgtggtaccgtggtatccaccaccaacttcatcaaggcagaatacaagggccgagttactctgaagcaatacccacgcaagaatctgttcctagtggaggtaacacagctgacagaaagtgacagcggagtctatgcctgcggagcgggcatgaacacagaccggggaaagacccagaaagtcaccctgaatgtccacagtgaatacgagccatcatgggaagagcagccaatgcctgagactccaaaatggtttcatctgccctatttgttccagatgcct

SEQ ID NO: 10435 - DNA, 580 bp, Homo sapiens
  source 1..580: mol_type = unassigned DNA
agagaacatgtgacaaatctgctgtgtgggggcgagcagggagtggctgacacaaccactgtggagcccgggtctgtcaggcacatccccccagaaacagtgggctcttggatggaccttgcactctagaagggacaatggacttctggctttggccactttacttcctgccagtatcgggggccctgaggatcctcccagaagtaaaggtagagggggagctgggcggatcagttaccatcaagtgcccacttcctgaaatgcatgtgaggatatatctgtgccgggagatggctggatctggaacatgtggtaccgtggtatccaccaccaacttcatcaaggcagaatacaagggccgagttactctgaagcaatacccacgcaagaatctgttcctagtggaggtaacacagctgacagaaagtgacagcggagtctatgcctgcggagcgggcatgaacacagaccggggaaagacccagaaagtcaccctgaatgtccacagtgaatacgagccatcatgggaagagcagccaatgcctgagactccaaaatggtttcatctgccctatttgtt

SEQ ID NO: 10436 - DNA, 567 bp, Homo sapiens
  source 1..567: mol_type = unassigned DNA
tttcctcatcgtcaagctttgttcctcgtgggggctagaaatctctttccagttccagattgtgaagggttcctgagtaagcagcgtgtctccatccccctctctaggggctcttggatggaccttgcactctagaagggacaatggacttctggctttggccactttacttcctgccagagatggagtcttgctgtgttgcccaggatggtcttgaacttgtggccttaagtgatcctcctggctcagcttcacaaagcgctgggattacagtatcgggggccctgaggatcctcccagaagtaaaggtagagggggagctgggcggatcagttaccatcaagtgcccacttcctgaaatgcatgtgaggatatatctgtgccgggagatggctggatctggaacatgtggtaccgtggtatccaccaccaacttcatcaaggcagaatacaagggccgagttactctgaagcaatacccacgcaagaatctgttcctagtggaggtaacacagctgacagaaagtgacagcggagtctatgcctgcggagcgggcatgaacacag

SEQ ID NO: 10437 - DNA, 1609 bp, Homo sapiens
  source 1..1609: mol_type = unassigned DNA
gggaagatggcggactcggtggctagccgatgaggaggccgcggggggaacccggcccccgggccccgagaccgactgagggagcgacctgcgcagggcccggggagtcatggtctccatcacccaactccatgcttcgagtcctgctctctgctcagacctcccctgctcggctgtctggcctgctgctgatccctccagtacagccctgctgtttggggcccagcaaatggggggaccggcctgttggaggaggccccagtgcaggtcctgtgcaaggactgcagcggcttctggaacaggcgaagagccctggggagctgctgcgctggctgggccagaaccccagcaaggtgcgcgcccaccactactcggtggcgcttcgtcgtctgggccagctcttggggtctcggccacggccccctcctgtggagcaggtcacactgcaggacttgagtcagctcatcatccgaaactgcccctcctttgacattcacaccatccacgtgtgtctgcaccttgcagtcttacttggctttccatctgatggtcccctggtgtgtgccctggaacaggagcgaaggctccgcctccctccgaagccacctccccctttgcagccccttctccgaggtgggcaagggttggaagctgctctaagctgcccccgttttctgcggtatccacggcagcatctgatcagcagcctggcagaggcaaggccagaggaactgactccccacgtgatggtgctcctggcccagcacctggcccggcaccggttgcgggagccccagcttctggaagccattgcccacttcctggtggttcaggaaacgcaactcagcagcaaggtggtacagaagttggtcctgccctttgggcgactgaactacctgcccctggaacagcagtttatgccctgccttgagaggatcctggctcgggaagcaggggtggcacccctggctacagtcaacatcttgatgtcactgtgccaactgcggtgcctgcccttcagagccctgcactttgttttttcccctggcttcatcaactacatcagtggcacccctcatgctctgattgtgcgtcgctacctctccctgctggacacggccgtggagctggagctcccaggataccggggtccccgccttccccgaaggcagcaagtgcccatctttccccagcctctcatcaccgaccgtgcccgctgcaagtacagtcacaaggacatagtagctgaggggttgcgccagctgctgggggaggagaaataccgccaggacctgactgtgcctccaggctactgcacagacttcctgctgtgcgccagcagctctggtgctgtgcttcccgtgaggacccaggaccccttcctgccatacccaccaagggcctgccccagctcaagagctacctgaggcagaagctccaggccctgggcctgcgctgggggcctgaagggggctgaggggttgatgtggggttcaggatggcccccccatggggggtggatgatttgcactttggttccctgtgttttgatttctcattaaagttcctttccttccccgttgtgaatctcagttttgggacggggagc

SEQ ID NO: 10438 - DNA, 1827 bp, Homo sapiens
  source 1..1827: mol_type = unassigned DNA
ccgatagctgcttcgggattggcgtccgggcggctatctaggggctgctgggaagatggcggactcggtggctagccgatgaggaggccgcggggggaacccggcccccgggccccgagaccgactgagggagcgacctgcgcagggcccggggagtcatggtctccatcacccaactccatgcttcgagtcctgctctctgctcagacctcccctgctcggctgtctggcctgctgctgatccctccagtacagccctgctgtttggggcccagcaaatggggggaccggcctgttggaggaggccccagtgcaggtcctgtgcaaggactgcagcggcttctggaacaggcgaagagccctggggagctgctgcgctggctgggccagaaccccagcaaggtgcgcgcccaccactactcggtggcgcttcgtcgtctgggccagctcttggggtctcggccacggccccctcctgtggagcaggtcacactgcaggacttgagtcagctcatcatccgaaactgcccctcctttgacattcacaccatccacgtgtgtctgcaccttgcagtcttacttggctttccatctgatggtcccctggtgtgtgccctggaacaggagcgaaggctccgcctccctccgaagccacctccccctttgcagccccttctccgaggtgggcaagggttggaagctgctctaagctgcccccgttttctgcggtatccacggcagcatctgatcagcagcctggcagaggcaaggccagaggaactgactccccacgtgatggtgctcctggcccagcacctggcccggcaccggttgcgggagccccagcttctggaagccattgcccacttcctggtggttcaggaaacgcaactcagcagcaaggtggtacagaagttggtcctgccctttgggcgactgaactacctgcccctggaacagcagtttatgccctgccttgagaggatcctggctcgggaagcaggggtggcacccctggctacagtcaacatcttgatgtcactgtgccaactgcggtgcctgcccttcagagccctgcactttgttttttcccctggcttcatcaactacatcagtggcacccctcatgctctgattgtgcgtcgctacctctccctgctggacacggccgtggagctggagctcccaggataccggggtccccgccttccccgaaggcagcaagtgcccatctttccccagcctctcatcaccgaccgtgcccgctgcaagtacagtcacaaggacatagtagctgaggggttgcgccagctgctgggggaggagaaataccgccaggacctgactgtgcctccaggctactgcacagacttcctgctgtgcgccagcagctctggtgctgtgcttcccgtgaggacccaggaccccttcctgccatacccaccaaggtcctgcccacagggccaggctgcctctagcgccactactcgagaccctgcccagagggtggtgctggtgttgcgggaacgctggcatttctgccgggacggccgggtgctgctgggctcgagggccctgagggagcggcacctaggcctgatgggctaccagctcctgccgctacccttcgaggaactggagtcccagagaggcctgccccagctcaagagctacctgaggcagaagctccaggccctgggcctgcgctgggggcctgaagggggctgaggggttgatgtggggttcaggatggcccccccatggggggtggatgatttgcactttggttccctgtgttttgatttctcattaaagttcctttccttc

SEQ ID NO: 10439 - DNA, 1402 bp, Homo sapiens
  source 1..1402: mol_type = unassigned DNA
gatagctgcttcgggattggcgtccgggcggctatctaggggctgctgggaagatggcggactcggtggctagccgatgaggaggccgcggggggaacccggcccccgggccccgagaccgactgagggagcgacctgcgcagggcccggggagtcatgctttccatctgatggtcccctggtgtgtgccctggaacaggagcgaaggctccgcctccctccgaagccacctccccctttgcagccccttctccgaggtgggcaagggttggaagctgctctaagctgcccccgttttctgcggtatccacggcagcatctgatcagcagcctggcagaggcaaggccagaggaactgactccccacgtgatggtgctcctggcccagcacctggcccggcaccggttgcgggagccccagcttctggaagccattgcccacttcctggtggttcaggaaacgcaactcagcagcaaggtggtacagaagttggtcctgccctttgggcgactgaactacctgcccctggaacagcagtttatgccctgccttgagaggatcctggctcgggaagcaggggtggcacccctggctacagtcaacatcttgatgtcactgtgccaactgcggtgcctgcccttcagagccctgcactttgttttttcccctggcttcatcaactacatcagtggcacccctcatgctctgattgtgcgtcgctacctctccctgctggacacggccgtggagctggagctcccaggataccggggtccccgccttccccgaaggcagcaagtgcccatctttccccagcctctcatcaccgaccgtgcccgctgcaagtacagtcacaaggacatagtagctgaggggttgcgccagctgctgggggaggagaaataccgccaggacctgactgtgcctccaggctactgcacagacttcctgctgtgcgccagcagctctggtgctgtgcttcccgtgaggacccaggaccccttcctgccatacccaccaaggtcctgcccacagggccaggctgcctctagcgccactactcgagaccctgcccagagggtggtgctggtgttgcgggaacgctggcatttctgccgggacggccgggtgctgctgggctcgagggccctgagggagcggcacctaggcctgatgggctaccagctcctgccgctacccttcgaggaactggagtcccagagaggcctgccccagctcaagagctacctgaggcagaagctccaggccctgggcctgcgctgggggcctgaagggggctgaggggttgatgtggggttcaggatggcccccccatggggggtggatgatttgcactttggttccctgtgttttgatttctcattaaagttcctttccttc

SEQ ID NO: 10440 - DNA, 2475 bp, Homo sapiens
  source 1..2475: mol_type = unassigned DNA
gaagatggcggactcggtggctagccgatgaggaggccgcggggggaacccggcccccgggccccgagaccgactgagggagcgacctgcgcagggcccggggagtcatgtaggggtggcgcctgcggggagggctgcgggagggcagcgggagctggtgttagcggcagcggccacggtctcctggcgtccctgggccggggtgggtgttggggcccccgacttcgccgactccgcgccatcgcaaagcggtgcactcgggctccacgcgcgccctgcgaggtgggcgctgcgttttcatttcacgggtgaggagacttagagagacgaagccacttgtccaaggtcacgccgctggtgagtgggagcgcccagcatggaacccagcaccgtccagccgcggagcccgcgttccaccctctgtgccgccgccgcctcctgtgggagagggaggtggtcgggagagtgcacgccggtgccgcctgggctccagactgggcgcgaccactaacccggttaatgacctcgggcttaacttaaccccttcgctgctctgggcctgcgtttctccaccggtgaaatgagggtctccatcacccaactccatgcttcgagtcctgctctctgctcagacctcccctgctcggctgtctggcctgctgctgatccctccagtacagccctgctgtttggggcccagcaaatggggggaccggcctgttggaggaggccccagtgcaggtcctgtgcaaggactgcagcggcttctggaacaggcgaagagccctggggagctgctgcgctggctgggccagaaccccagcaaggtgcgcgcccaccactactcggtggcgcttcgtcgtctgggccagctcttggggtctcggccacggccccctcctgtggagcaggtcacactgcaggacttgagtcagctcatcatccgaaactgcccctcctttgacattcacaccatccacgtgtgtctgcaccttgcagtcttacttggtggtacagaagttggtcctgccctttgggcgactgaactacctgcccctggaacagcagtttatgccctgccttgagaggatcctggctcgggaagcaggggtggcacccctggctacagtcaacatcttgatgtcactgtgccaactgcggtgcctgcccttcagagccctgcactttgttttttcccctggcttcatcaactacatcagtggtacgcagccaggatggctggctgggcccctgagggctggagaggcaggggagcagggtggcctgcagcccagagccccagtccccgcctccccacaggcacccctcatgctctgattgtgcgtcgctacctctccctgctggacacggccgtggagctggagctcccaggataccggggtccccgccttccccgaaggcagcaagtgcccatctttccccagcctctcatcaccgaccgtgcccgctgcaagtacaggtggatggggcagcctggggcaaggggaggggccagcctgggaccagcagagtggaaaagccagagggaccatgaagcgccaaagctaaggagctctcggccaccataaaactgggccctgaagcagcagagggctttgcccagggtggtggcactagactgggacagattaggatgaggtgccgggcccttcctgctactggtgtcctttctcctcagtcacaaggacatagtagctgaggggttgcgccagctgctgggggaggagaaataccgccaggacctgactgtgcctccaggctactgcacaggtgagcaaggggcaggcggcaggcccggggagacggagccctggctaaggccgccggccctgctcccctccagacttcctgctgtgcgccagcagctctggtgctgtgcttcccgtgaggacccaggaccccttcctgccatacccaccaaggtcctgcccacagggccaggctgcctctagcgccactactcgagaccctgcccagaggtaaaggaggcagggtgggggagccctggccaccttgcccgccatgccctgagccacgtccctccccctgcagggtggtgctggtgttgcgggaacgctggcatttctgccgggacggccgggtgctgctgggctcgagggccctgagggagcggcacctaggcctgatgggctaccagctcctgccggtgagtggccctggcctggcccgtggcgcatcctcactcccagcctgcgggtaacctgccgccctctcctctccccacagctacccttcgaggaactggagtcccagagaggcctgccccagctcaagagctacctgaggcagaagctccaggccctgggcctgcgctgggggcctgaagggggctgaggggttgatgtggggttcaggatggcccccccatggggggtggatgatttgcactttggttccctgtgttttgatttctcattaaagttcctttccttc

SEQ ID NO: 10441 - DNA, 1764 bp, Homo sapiens
  source 1..1764: mol_type = unassigned DNA
gagccacgtctccgaagaccgatagctgcttcgggattggcgtccgggcggctatctaggggctgctgggaagatggcggactcggtggctagccgatgaggaggccgcggggggaacccggcccccgggccccgagaccgactgagggagcgacctgcgcagggcccggggagtcatggtctccatcacccaactccatgcttcgagtcctgctctctgctcagacctcccctgctcggctgtctggcctgctgctgatccctccagtacagccctgctgtttggggcccagcaaatggggggaccggcctgttggaggaggccccagtgcaggtcctgtgcaaggactgcagcggcttctggaacaggcgaagagccctggggagctgctgcgctggctgggccagaaccccagcaaggtgcgcgcccaccactactcggtggcgcttcgtcgtctgggccagctcttggggtctcggccacggccccctcctgtggagcaggtcacactgcaggacttgagtcagctcatcatccgaaactgcccctcctttgacattcacaccatccacgtgtgtctgcaccttgcagtcttacttggctttccatctgatggtcccctggtgtgtgccctggaacaggagcgaaggctccgcctccctccgaagccacctccccctttgcagccccttctccgagaggcaaggccagaggaactgactccccacgtgatggtgctcctggcccagcacctggcccggcaccggttgcgggagccccagcttctggaagccattgcccacttcctggtggttcaggaaacgcaactcagcagcaaggtggtacagaagttggtcctgccctttgggcgactgaactacctgcccctggaacagcagtttatgccctgccttgagaggatcctggctcgggaagcaggggtggcacccctggctacagtcaacatcttgatgtcactgtgccaactgcggtgcctgcccttcagagccctgcactttgttttttcccctggcttcatcaactacatcagtggcacccctcatgctctgattgtgcgtcgctacctctccctgctggacacggccgtggagctggagctcccaggataccggggtccccgccttccccgaaggcagcaagtgcccatctttccccagcctctcatcaccgaccgtgcccgctgcaagtacagtcacaaggacatagtagctgaggggttgcgccagctgctgggggaggagaaataccgccaggacctgactgtgcctccaggctactgcacagacttcctgctgtgcgccagcagctctggtgctgtgcttcccgtgaggacccaggaccccttcctgccatacccaccaaggtcctgcccacagggccaggctgcctctagcgccactactcgagaccctgcccagagggtggtgctggtgttgcgggaacgctggcatttctgccgggacggccgggtgctgctgggctcgagggccctgagggagcggcacctaggcctgatgggctaccagctcctgccgctacccttcgaggaactggagtcccagagaggcctgccccagctcaagagctacctgaggcagaagctccaggccctgggcctgcgctgggggcctgaagggggctgaggggttgatgtggggttcaggatggcccccccatggggggtggatgatttgcactttggttccctgtgttttgatttctcattaaagttcctttccttc

SEQ ID NO: 10442 - DNA, 1748 bp, Homo sapiens
  source 1..1748: mol_type = unassigned DNA
cggggaaggggtggggtggaggcgggagcggagccgggcgccgccggagctgcgcggggagcgctcgctggctggctggctggctggctctccgctgcgctgcgctgcgctccggccgctcccgcggcccgtggatgggggtgtccggctgagccccgggatccgcctccctccgccaggacccgcacagataaactcatcctgaaagtcgctgttgttctcctgctgagcaagaatggaggccccactggtgagtctggatgaagagtttgaggaccttcgaccctcctgctcggaggacccggaggagaagccccagtgtttctatggttcatctccccaccatctcgaggacccctccctctccgagcttgagaatttttcttccgaaataatcagcttcaagtccatggaggacctcgtaaatgaatttgatgagaagctcaatgtctgctttcggaactacaacgccaagaccgagaacctagctcccgtgaagaaccagttacagatccaagaggaggaggagacccttcaggacgaggaggtttgggatgctctgacagacaattacatcccttcactctcagaagactggagggatccaaacatcgaggctctgaatggcaactgctctgacactgagatccatgagaaagaagaggaagagttcaatgagaagagtgaaaatgattccggtatcaacgaggagcctctgctcacagcagatcaggtaattgaggagattgaggaaatgatgcagaactccccagaccctgaggaagaagaggaggttctggaagaagaggatggaggagaaacttcctcccaggcagactcggtcctcctgcaggagatgcaggcattgacacagaccttcaacaacaactggtcctatgaagggctgaggcacatgtctgggtctgagctgaccgagctgctggaccaggtggagggtgccatccgtgacttctcggaggagctggtgcagcagctggcccgccgggacgagctggagtttgagaaggaagtgaagaactcctttatcacggtgcttattgaggttcagaacaagcagaaggagcagcgagaactgatgaaaaagaggcggaaagagaaagggctgagcctgcagagcagccggatagagaagggaaaccagatgcctctcaagcgcttcagcatggaaggcatctccaacattctgcagagtggcatccgccagacctttggctcctcaggaactgacaaacagtatctgaacacagtcattccttacgagaagaaagcctctcctccctcagtggaagacctgcagatgctgacaaacattctctttgccatgaaggaggataatgagaaggtgcctactttgctaacggactacattttaaaagtgctctgccctacctaaccttgccctttggagcagcctcgctgcaggaggtcactgagcaagagtcattccatcacagggactgcatgagaccatgtaacctccgacatgtatttaaacgtgtatagcttaacctggattaaacacgagcaagcgcgcggggtcctttgccgttggcttctagtgctagtaatcattggatgcatgatggggcagggccggtgatggtgcctcccccttgctggtgtcaggagaggggaaggcagccgctttcaccgctcattatgtagtctggctacagccctcaaaaacagcttatactcttaagactaattttgaaataaaaccttca

SEQ ID NO: 10443 - DNA, 750 bp, Homo sapiens
  source 1..750: mol_type = unassigned DNA
gtccagtcaccgtaaacgccccaagatcatctttgtccctaaaaacttacccccgaccccgctcgtgcccctccccagagtgcggagccttccccagaccgcgcattcctgcagtgtcagaaccgctggcagcggccgcagacgccgggagagcgattgttttactacagacgggcgggagaagggaccggggcggctgcgcggtggcggggcgcgctgccgtcgggtgggccccgggctctggaatgcggggagcagtgtttgacggcgtcgaggagataaactcatcctgaaagtcgctgttgttctcctgctgagcaagaatggaggccccactggtgagtctggatgaagagtttgaggaccttcgaccctcctgctcggaggacccggaggagaagccccagtgtttctatggttcatctccccaccatctcgaggacccctccctctccgagcttgagaatttttcttccgaaataatcagcttcaagtccatggaggacctcgtaaatgaatttgatgagaagctcaatgtctgctttcggaactacaacgccaagaccgagaacctagctcccgtgaagaaccagttacagatccaagaggaggaggagacccttcaggacgaggagtaagaagtcttaattgccctctcctgcttcagtcgagagccctgtagtccttgtctccttgacatagtgctggtttctgtctataggtttatgggctattactttcattttcgtg

SEQ ID NO: 10444 - DNA, 1053 bp, Homo sapiens
  source 1..1053: mol_type = unassigned DNA
ccgggcgccgccggagctgcgcggggagcgctcgctggctggctggctggctggctctccgctgcgctgcgctgcgctccggccgctcccgcggcccgtggatgggggtgtccggctgagccccgggatccgcctccctccgccaggacccgcacagataaactcatcctgaaagtcgctgttgttctcctgctgagcaagaatggaggccccactggtgagtctggatgaagagtttgaggaccttcgaccctcctgctcggaggacccggaggagaagccccagtgtttctatggttcatctccccaccatctcgaggacccctccctctccgagcttgagaatttttcttccgaaataatcagcttcaagtccatggaggacctcgtaaatgaatttgatgagaagctcaatgtctgctttcggaactacaacgccaagaccgagaacctagctcccgtgaagaaccagttacagatccaagaggaggaggagacccttcaggacgaggagtaagaagtcttaattgccctctcctgcttcagtcgagagccctgtagtccttgtctccttgacatagtgctggtttctgtctataggtttatgggctattactttcattttcgtgttgccagcggagcagtgccctggtacttgctgtcatagctctatatatgtccctttacagtcccctgaggagaactttcttaaattgaaaccttagaggaatgaaggttttcctagatacaaaatggaatttcaggagcacagtaaatttcagggtctgtctatcttaagctttctttatatcagtggaaatccagcgagatattagaaataaaggccagaaaaaattaattaaccatgatggatgaatctatgttattggactaatttgcttcaagaaacaccagaattttgaaaatcccgaatttttgacagcccctcaggcctggagagttatctacagatgttaggatatgtccacataagaaagcatctaaactgaactgagagcacagcgggctaccctggacaaagtaaaggtggaa

SEQ ID NO: 10445 - DNA, 2722 bp, Homo sapiens
  source 1..2722: mol_type = unassigned DNA
tgggctttgtggagcgctgcggagggtgcgtgcgggccgcggcagccgaacaaaggagcaggggcgccgccgcagggacccgccacccacctcccggggccgcgcagcggcctctcgtctactgccaccatgaccgccaacggcacagccgaggcggtgcagatccagttcggcctcatcaactgcggcaacaagtacctgacggccgaggcgttcgggttcaaggtgaacgcgtccgccagcagcctgaagaagaaccacctgggccgctacctggcggcggacaaggacggcaacgtgacctgcgagcgcgaggtgcccggtcccgactgccgtttcctcatcgtggcgcacgacgacggtcgctggtcgctgcagtccgaggcgcaccggcgctacttcggcggcaccgaggaccgcctgtcctgcttcgcgcagacggtgtcccccgccgagaagtggagcgtgcacatcgccatgcaccctcaggtcaacatctacagcgtcacccgtaagcgctacgcgcacctgagcgcgcggccggccgacgagatcgccgtggaccgcgacgtgccctggggcgtcgactcgctcatcaccctcgccttccaggaccagcgctacagcgtgcagaccgccgaccaccgcttcctgcgccacgacgggcgcctggtggcgcgccccgagccggccactggctacacgctggagttccgctccggcaaggtggccttccgcgactgcgagggccgttacctggcgccgtcggggcccagcggcacgctcaaggcgggcaaggccaccaaggtgggcaaggacgagctctttgctctggagcagagctgcgcccaggtcgtgctgcaggcggccaacgagaggaacgtgtccacgcgccagggtatggacctgtctgccaatcaggacgaggagaccgaccaggagaccttccagctggagatcgaccgcgacaccaaaaagtgtgccttccgtacccacacgggcaagtactggacgctgacggccaccgggggcgtgcagtccaccgcctccagcaagaatgccagctgctactttgacatcgagtggcgtgaccggcgcatcacactgagggcgtccaatggcaagtttgtgacctccaagaagaatgggcagctggccgcctcggtggagacagcaggggactcagagctcttcctcatgaagctcatcaaccgccccatcatcgtgttccgcggggagcatggcttcatcggctgccgcaaggtcacgggcaccctggacgccaaccgctccagctatgacgtcttccagctggagttcaacgatggcgcctacaacatcaaagactccacaggcaaatactggacggtgggcagtgactccgcggtcaccagcagcggcgacactcctgtggacttcttcttcgagttctgcgactataacaaggtggccatcaaggtgggcgggcgctacctgaagggcgaccacgcaggcgtcctgaaggcctcggcggaaaccgtggaccccgcctcgctctgggagtactagggccggcccgtccttccccgcccctgcccacatggcggctcctgccaaccctccctgctaaccccttctccgccaggtgggctccagggcgggaggcaagcccccttgcctttcaaactggaaaccccagagaaaacggtgcccccacctgtcgcccctatggactccccactctcccctccgcccgggttccctactcccctcgggtcagcggctgcggcctggccctgggagggatttcagatgcccctgccctcttgtctgccacggggcgagtctggcacctctttcttctgacctcagacggctctgagccttatttctctggaagcggctaagggacggttgggggctgggagccctgggcgtgtagtgtaactggaatcttttgcctctcccagccacctcctcccagccccccaggagagctgggcacatgtcccaagcctgtcagtggccctccctggtgcactgtccccgaaacccctgcttgggaagggaagctgtcgggtgggctaggactgacccttgtggtgtttttttgggtggtggctggaaacagcccctctcccacgtggcagaggctcagcctggctcccttccctggagcggcagggcgtgacggccacagggtctgcccgctgcacgttctgccaaggtggtggtggcgggcgggtaggggtgtgggggccgtcttcctcctgtctctttcctttcaccctagcctgactggaagcagaaaatgaccaaatcagtattttttttaatgaaatattattgctggaggcgtcccaggcaagcctggctgtagtagcgagtgatctggcggggggcgtctcagcaccctccccagggggtgcatctcagccccctctttccgtccttcccgtccagccccagccctgggcctgggctgccgacacctgggccagagcccctgctgtgattggtgctccctgggcctcccgggtggatgaagccaggcgtcgccccctccgggagccctggggtgagccgccggggcccccctgctgccagcctcccccgtccccaacatgcatctcactctgggtgtcttggtcttttattttttgtaagtgtcatttgtataactctaaacgcccatgatagtagcttcaaactggaaatagcgaaataaaataactcagtctgc

SEQ ID NO: 10446 - DNA, 2777 bp, Homo sapiens
  source 1..2777: mol_type = unassigned DNA
gctgcggagggtgcgtgcgggccgcggcagccgaacaaaggagcaggggcgccgccgcagggacccgccacccacctcccggggccgcgcagcggcctctcgtctactgccaccatgaccgccaacggcacagccgaggcggtgcagatccagttcggcctcatcaactgcggcaacaagtacctgacggccgaggcgttcgggttcaaggtgaacgcgtccgccagcagcctgaagaagaagcagatctggacgctggagcagccccctgacgaggcgggcagcgcggccgtgtgcctgcgcagccacctgggccgctacctggcggcggacaaggacggcaacgtgacctgcgagcgcgaggtgcccggtcccgactgccgtttcctcatcgtggcgcacgacgacggtcgctggtcgctgcagtccgaggcgcaccggcgctacttcggcggcaccgaggaccgcctgtcctgcttcgcgcagacggtgtcccccgccgagaagtggagcgtgcacatcgccatgcaccctcaggtcaacatctacagcgtcacccgtaagcgctacgcgcacctgagcgcgcggccggccgacgagatcgccgtggaccgcgacgtgccctggggcgtcgactcgctcatcaccctcgccttccaggaccagcgctacagcgtgcagaccgccgaccaccgcttcctgcgccacgacgggcgcctggtggcgcgccccgagccggccactggctacacgctggagttccgctccggcaaggtggccttccgcgactgcgagggccgttacctggcgccgtcggggcccagcggcacgctcaaggcgggcaaggccaccaaggtgggcaaggacgagctctttgctctggagcagagctgcgcccaggtcgtgctgcaggcggccaacgagaggaacgtgtccacgcgccagggtatggacctgtctgccaatcaggacgaggagaccgaccaggagaccttccagctggagatcgaccgcgacaccaaaaagtgtgccttccgtacccacacgggcaagtactggacgctgacggccaccgggggcgtgcagtccaccgcctccagcaagaatgccagctgctactttgacatcgagtggcgtgaccggcgcatcacactgagggcgtccaatggcaagtttgtgacctccaagaagaatgggcagctggccgcctcggtggagacagcaggggactcagagctcttcctcatgaagctcatcaaccgccccatcatcgtgttccgcggggagcatggcttcatcggctgccgcaaggtcacgggcaccctggacgccaaccgctccagctatgacgtcttccagctggagttcaacgatggcgcctacaacatcaaagactccacaggcaaatactggacggtgggcagtgactccgcggtcaccagcagcggcgacactcctgtggacttcttcttcgagttctgcgactataacaaggtggccatcaaggtgggcgggcgctacctgaagggcgaccacgcaggcgtcctgaaggcctcggcggaaaccgtggaccccgcctcgctctgggagtactagggccggcccgtccttccccgcccctgcccacatggcggctcctgccaaccctccctgctaaccccttctccgccaggtgggctccagggcgggaggcaagcccccttgcctttcaaactggaaaccccagagaaaacggtgcccccacctgtcgcccctatggactccccactctcccctccgcccgggttccctactcccctcgggtcagcggctgcggcctggccctgggagggatttcagatgcccctgccctcttgtctgccacggggcgagtctggcacctctttcttctgacctcagacggctctgagccttatttctctggaagcggctaagggacggttgggggctgggagccctgggcgtgtagtgtaactggaatcttttgcctctcccagccacctcctcccagccccccaggagagctgggcacatgtcccaagcctgtcagtggccctccctggtgcactgtccccgaaacccctgcttgggaagggaagctgtcgggtgggctaggactgacccttgtggtgtttttttgggtggtggctggaaacagcccctctcccacgtggcagaggctcagcctggctcccttccctggagcggcagggcgtgacggccacagggtctgcccgctgcacgttctgccaaggtggtggtggcgggcgggtaggggtgtgggggccgtcttcctcctgtctctttcctttcaccctagcctgactggaagcagaaaatgaccaaatcagtattttttttaatgaaatattattgctggaggcgtcccaggcaagcctggctgtagtagcgagtgatctggcggggggcgtctcagcaccctccccagggggtgcatctcagccccctctttccgtccttcccgtccagccccagccctgggcctgggctgccgacacctgggccagagcccctgctgtgattggtgctccctgggcctcccgggtggatgaagccaggcgtcgccccctccgggagccctggggtgagccgccggggcccccctgctgccagcctcccccgtccccaacatgcatctcactctgggtgtcttggtcttttattttttgtaagtgtcatttgtataactctaaacgcccatgatagtagcttcaaactggaaatagcgaaataaaataactcagtctgcagcccca

SEQ ID NO: 10447 - DNA, 2182 bp, Homo sapiens
  source 1..2182: mol_type = unassigned DNA
gtaatttgtagagacgggggtggggtgggggtcttgctatgttgcccaggctggtctcaaactcctagactcaaacaatcctcctgccttggcctcccaaagtgttgcgatcacaggcatgagcccctgtccctggcccctattatttctctaactggggaaagtcatgtgggaacagatgtagcttgccttggcctctgaccggccctgcctgcgttcctgggtgctctctgctgcttctcatgtgtgccactgtggggactcggccgcccaccccaccccgtggtgttaccttgcgtgtgtagttctgtgagctcagggctatggtctgccagaactagggggcgtggggccccagtaccagcccaaggcctcctctctgcaggtatggacctgtctgccaatcaggacgaggagaccgaccaggagaccttccagctggagatcgaccgcgacaccaaaaagtgtgccttccgtacccacacgggcaagtactggacgctgacggccaccgggggcgtgcagtccaccgcctccagcaagaatgccagctgctactttgacatcgagtggcgtgaccggcgcatcacactgagggcgtccaatggcaagtttgtgacctccaagaagaatgggcagctggccgcctcggtggagacagcaggggactcagagctcttcctcatgaagctcatcaaccgccccatcatcgtgttccgcggggagcatggcttcatcggctgccgcaaggtcacgggcaccctggacgccaaccgctccagctatgacgtcttccagctggagttcaacgatggcgcctacaacatcaaagactccacaggcaaatactggacggtgggcagtgactccgcggtcaccagcagcggcgacactcctgtggacttcttcttcgagttctgcgactataacaaggtggccatcaaggtgggcgggcgctacctgaagggcgaccacgcaggcgtcctgaaggcctcggcggaaaccgtggaccccgcctcgctctgggagtactagggccggcccgtccttccccgcccctgcccacatggcggctcctgccaaccctccctgctaaccccttctccgccaggtgggctccagggcgggaggcaagcccccttgcctttcaaactggaaaccccagagaaaacggtgcccccacctgtcgcccctatggactccccactctcccctccgcccgggttccctactcccctcgggtcagcggctgcggcctggccctgggagggatttcagatgcccctgccctcttgtctgccacggggcgagtctggcacctctttcttctgacctcagacggctctgagccttatttctctggaagcggctaagggacggttgggggctgggagccctgggcgtgtagtgtaactggaatcttttgcctctcccagccacctcctcccagccccccaggagagctgggcacatgtcccaagcctgtcagtggccctccctggtgcactgtccccgaaacccctgcttgggaagggaagctgtcgggtgggctaggactgacccttgtggtgtttttttgggtggtggctggaaacagcccctctcccacgtggcagaggctcagcctggctcccttccctggagcggcagggcgtgacggccacagggtctgcccgctgcacgttctgccaaggtggtggtggcgggcgggtaggggtgtgggggccgtcttcctcctgtctctttcctttcaccctagcctgactggaagcagaaaatgaccaaatcagtattttttttaatgaaatattattgctggaggcgtcccaggcaagcctggctgtagtagcgagtgatctggcggggggcgtctcagcaccctccccagggggtgcatctcagccccctctttccgtccttcccgtccagccccagccctgggcctgggctgccgacacctgggccagagcccctgctgtgattggtgctccctgggcctcccgggtggatgaagccaggcgtcgccccctccgctgccagcctcccccgtccccaacatgcatctcactctgggtgtcttggtcttttattttttgtaagtgtcatttgtataactctaaacgcccatgatagtagcttcaaactggaaatagcgaaataaaataactcagtctgcagcccc

SEQ ID NO: 10448 - DNA, 1551 bp, Homo sapiens
  source 1..1551: mol_type = unassigned DNA
atgccgacgaacggcctgcaccaggtgctgaagatccagtttggcctcgtcaacgacactgaccgctacctgacagctgagagcttcggcttcaaggtcaatgcctcggcacccagcctcaagaggaagcagacctgggtgctggaacccgacccaggacaaggcacggctgtgctgctccgcagcagccacctgggccgctacctgtcggcagaagaggacgggcgcgtggcctgtgaggcagagcagccgggccgtgactgccgcttcctggtcctgccgcagccagatgggcgctgggtgctgcggtccgagccgcacggccgcttcttcggaggcaccgaggaccagctgtcctgcttcgccacagccgtttccccggccgagctgtggaccgtgcacctggccatccacccgcaggcccacctgctgagcgtgagccggcggcgctacgtgcacctgtgcccgcgggaggacgagatggccgcagacggagacaagccctggggcgtggacgccctcctcaccctcatcttccggagccgacggtactgcctcaagtcctgtgacagccgctacctgcgcagcgacggccgtctggtctgggagcctgagccccgtgcctgctacacgctggagttcaaggcgggcaagctggccttcaaggactgcgacggccactacctggcacccgtggggcccgcaggcaccctcaaggccggccgaaacacgcgacctggcaaggatgagctctttgatctggaggagagtcacccacaggtggtgctggtggctgccaaccaccgctacgtctctgtgcggcaaggggtcaacgtctcagccaatcaggatgatgaactagaccacgagaccttcctgatgcaaattgaccaggagacaaagaagtgcaccttctattccagcactgggggctactggaccctggtcacccatgggggcattcacgccacagccacacaagtttctgccaacaccatgtttgagatggagtggcgtggccggcgggtagcactcaaagccagcaacgggcgctacgtgtgcatgaagaagaatgggcagctggcggctatcagcgattttgtcgggcccccaccccgcccggcctggacagggaaggtggcgggaggggcagcgcagcagacgctctccccgccaggcaaggacgaagagttcaccctcaagctcatcaaccggcccatcctggtgctgcgcggcctggacggcttcgtctgccaccaccgcggctccaaccagctggacaccaaccgctccgtctacgacgtcttccacctgagcttcagcgacggcgcctaccggatccgaggccgcgacggagggttctggtacacgggcagccacggcagcgtgtgcagcgacggcgaacgcgccgaggacttcgtcttcgagttccgtgagcgcggccgcctggccatccgcgcccggagcggcaagtacctgcgcggcggcgcctcgggcctgctgcgggccgatgccgacgccccggccgggaccgcgctttgggagtactga

SEQ ID NO: 10449 - DNA, 1665 bp, Homo sapiens
  source 1..1665: mol_type = unassigned DNA
cagggggttcgtgacgccggctgggtctgggggctgtgggccagccgagccgacccgggcttctgggggaccgcgggggccgtgagcactcagagggcgcatcccaggcccctccggggacccggccagcctgaagatgccgacgaacggcctgcaccaggtgctgaagatccagtttggcctcgtcaacgacactgaccgctacctgacagctgagagcttcggcttcaaggtcaatgcctcggcacccagcctcaagaggaagcagacctgggtgctggaacccgacccaggacaaggcacggctgtgctgctccgcagcagccacctgggccgctacctgtcggcagaagaggacgggcgcgtggcctgtgaggcagagcagccgggccgtgactgccgcttcctggtcctgccgcagccagatgggcgctgggtgctgcggtccgagccgcacggccgcttcttcggaggcaccgaggaccagctgtcctgcttcgccacagccgtttccccggccgagctgtggaccgtgcacctggccatccacccgcaggcccacctgctgagcgtgagccggcggcgctacgtgcacctgtgcccgcgggaggacgagatggccgcagacggagacaagccctggggcgtggacgccctcctcaccctcatcttccggagccgacggtactgcctcaagtcctgtgacagccgctacctgcgcagcgacggccgtctggtctgggagcctgagccccgtgcctgctacacgctggagttcaaggcgggcaagctggccttcaaggactgcgacggccactacctggcacccgtggggcccgcaggcaccctcaaggccggccgaaacacgcgacctggcaaggatgagctctttgatctggaggagagtcacccacaggtggtgctggtggctgccaaccaccgctacgtctctgtgcggcaaggggtcaacgtctcagccaatcaggatgatgaactagaccacgagaccttcctgatgcaaattgaccaggagacaaagaagtgcaccttctattccagcactgggggctactggaccctggtcacccatgggggcattcacgccacagccacacaagtttctgccaacaccatgtttgagatggagtggcgtggccggcgggtagcactcaaagccagcaacgggcgctacgtgtgcatgaagaagaatgggcagctggcggctatcagcgattttgtcggcaaggacgaagagttcaccctcaagctcatcaaccggcccatcctggtgctgcgcggcctggacggcttcgtctgccaccaccgcggctccaaccagctggacaccaaccgctccgtctacgacgtcttccacctgagcttcagcgacggcgcctaccggatccgaggccgcgacggagggttctggtacacgggcagccacggcagcgtgtgcagcgacggcgaacgcgccgaggacttcgtcttcgagttccgtgagcgcggccgcctggccatccgcgcccggagcggcaagtacctgcgcggcggcgcctcgggcctgctgcgggccgatgccgacgccccggccgggaccgcgctttgggagtactgaggccgcgcccagaccagcctgtcgcgcattaaaaccgtgtctctcccgca

SEQ ID NO: 10450 - DNA, 3188 bp, Homo sapiens
  source 1..3188: mol_type = unassigned DNA
aaagtctggcgcccagcagaggttaggtgtttaaagttaggacctgaatgggttacgttgcgatacacgatcaaacatcgcccttataagctctgtggtatccccgagccccactcctgtatgcagggaaattagtcattctccttggtaaactttcttcaagtaagtccttcagctacagccgcgaacatatgctttttgacctttgagggaatccgtaagatctcgtgagaagcgcagcttctcggggaagctgtcatggctgctcctgtacgtagtcacggtcttgtgctctaaggaaaacgacagcacgtgttctttttcactagtagaagtgacgttggtttcatgttgacaactttgaagccatttggaagtgtttcagtggagagcaaaatgaataacaaagcgggctcctttttctggaaccttagacaattcagtacattagtttcaacaagcagaactatgaggctatgttgtttgggactttgcaaaccaaaaatagttcattcaaactggaacattttaaataactttcataacagaatgcaatcaactgatatcattagatatctctttcaggatgcattcatttttaaatcagatgttggctttcaaacaaagggcataagcactctaacagcccttagaattgaaagactactttatgctaaaagactgttttttgactcaaagcagtctcttgtccctgttgataaatctgatgatgaattgaagaaagtaaaccttaatcatgaagtctccaatgaagatgttcttaccaaggaaacaaaaccaaaccgtatcagcagtagaaaactgtctgaggaatgtaattccctgagtgatgtgttagatgcattttcaaaagcgcccacatttcctagtagcaactatttcacagcaatgtggacaattgccaaaagactgtctgatgaccagaagcgctttgaaaaacgactgatgtttagccaccctgcatttaatcagctctgtgaacatatgatgagagaagccaagatcatgcagtataagtacctactgttcagtcttcacgccatagtgaagcttggaatccctcagaacactattttggtgcagactttgctgagggtgacccaggaacgtatcaatgagtgtgatgagatatgcctttcagttttgtcaactgttttagaggcaatggaaccatgcaagaatgttcatgttctacgaacgggattcagaatactagttgatcagcaagtttggaaaatagaagatgtcttcacattacaagttgtgatgaagtgtattggaaaagatgcaccgattgctcttaagaggaaactggagatgaaagccttgagggaattagacagattttctgttttgaatagccaacacatgtttgaagtactagctgccatgaatcaccgatctcttatactcctggatgaatgcagtaaggtggtcctagataatatccatgggtgtcctttaagaataatgatcaacatattgcagtcctgcaaagacctccagtaccataatttggatctcttcaagggacttgcagattatgtggctgcaactttcgacatctggaagttcagaaaagttctttttatcctcattttatttgaaaaccttggctttcgacctgttggtttaatggacctgtttatgaagagaatagtagaggatcctgaatccctaaacatgaaaaacattctatctattcttcatacttactcttctctcaatcatgtctacaaatgccagaacaaagaacagttcgtggaagttatggctagtgctctgactggttatcttcacactatttcttctgaaaacttattggatgcagtatattcattttgcttgatgaattactttcccctggctccttttaatcagcttctgcaaaaagacatcatcagtgagctgctgacatcagatgacatgaagaatgcttacaagctgcatactttggatacttgtctaaaacttgatgatactgtctatctgagggacatagccttgtcactcccacagctgccgcgggagctgccatcgtcacatacaaatgcaaaggtggcagaggtgctgagcagccttctgggaggtgaaggacacttctcaaaggatgtgcacttgccacacaattatcatattgattttgaaatcagaatggacactaacaggaatcaagtgctaccactttctgatgtggatacaacttctgctacagatattcaaagagtagctgtgctatgtgtttccagatctgcttattgtttgggttcaagccaccccagaggattccttgctatgaaaatgcggcatttgaatgcaatgggttttcatgtgatcttggtcaataactgggagatggacaaactagagatggaagatgcagtcacatttttgaagactaaaatctattcagtagaagctcttcctgttgctgctgtaaatgtgcaaagcacacaataaagtgaaaatcaaccttttcatattaggagacatgcatttgtaaaaattaataaagatgacaagtcagttgtcaatggaattgagctatctgctaagacaaaaaatgttacctcagttcactattaaaattaattttaggagtggaagaaatgttgttactgccatttaaaaatatgctgagaaaattccagaagggttatttttccaaccacacctattccctctagtgcccagatatttgatttgtgagctgtacgtttcaccttttcatctttgatctactaaaaactggtttcttagttgtgaggtgtcacaggcaggttgatgtgggtagtagtccttgtctttggaatctgaatatttatactcctgctctaagctgttctaagacttggggttatgcctttaaatcattttcaagcattggccaaataataattggacaaagttctaaagttgtcaagtgtgtaagaattagtgaggtagctgttgaaaatgagtgaggatggtatttgtatttgtaataagcactgcaggtagagatatttcatgggttataataagagaaacacagatgagatgtagatggtaaggagtcttactgttgttggggtccttcctttctctttcttttttcccccttacccctcccacaatttcatgaagtcttttaaattaaatatatagctgaattgtgttgtgaatca

SEQ ID NO: 10451 - DNA, 2586 bp, Homo sapiens
  source 1..2586: mol_type = unassigned DNA
catcgcccttataagctctgtggtatccccgagccccactcctgtatgcagggaaattagtcattctccttggtaaactttcttcaagtaagtccttcagctacagccgcgaacatatgctttttgacctttgagggaatccgtaagatctcgtgagaagcgcagcttctcggggaagctgtcatggctgctcctgtacgtagtcacggtcttgtgctctaaggtgagtggaggacgagcttgggcttagcggcagcccgtatcacatcctagactttttacttcgaggagaagagtctcacgagttgtcctggaagaaaacgacagcacgtgttctttttcactagtagaagtgacgttggtttcatgttgacaactttgaagccatttggaagtgtttcagtggagagcaaaatgaataacaaagcgggctcctttttctggaaccttagacaattcagtacattagtttcaacaagcagaactatgaggctatgttgtttgggactttgcaaaccaaaaatagttcattcaaactggaacattttaaataactttcataacagaatgcaatcaactgatatcattagatatctctttcaggatgcattcatttttaaatcagatgttggctttcaaacaaagggcataagcactctaacagcccttagaattgaaagactactttatgctaaaagactgttttttgactcaaagcagtctcttgtccctgttgataaatctgatgatgaattgaagaaagtaaaccttaatcatgaagtctccaatgaagatgttcttaccaaggaaacaaaaccaaaccgtatcagcagtagaaaactgtctgaggaatgtaattccctgagtgatgtgttagatgcattttcaaaagcgcccacatttcctagtagcaactatttcacagcaatgtggacaattgccaaaagactgtctgatgaccagaagcgctttgaaaaacgactgatgtttagccaccctgcatttaatcagctctgtgaacatatgatgagagaagccaagatcatgcagtataagtacctactgttcagtcttcacgccatagtgaagcttggaatccctcagaacactattttggtgcagactttgctgagggtgacccaggaacgtatcaatgagtgtgatgagatatgcctttcagttttgtcaactgttttagaggcaatggaaccatgcaagaatgttcatgttctacgaacgggattcagaatactagttgatcagcaagtttggaaaatagaagatgtcttcacattacaagttgtgatgaagtgtattggaaaagatgcaccgattgctcttaagaggaaactggagatgaaagccttgagggaattagacagattttctgttttgaatagccaacacatgtttgaagtactagctgccatgaatcaccgatctcttatactcctggatgaatgcagtaaggtggtcctagataatatccatgggtgtcctttaagaataatgatcaacatattgcagtcctgcaaagacctccagtaccataatttggatctcttcaagggacttgcagattatgtggctgcaactttcgacatctggaagttcagaaaagttctttttatcctcattttatttgaaaaccttggctttcgacctgttggtttaatggacctgtttatgaagagaatagtagaggatcctgaatccctaaacatgaaaaacattctatctattcttcatacttactcttctctcaatcatgtctacaaatgccagaacaaagaacagttcgtggaagttatggctagtgctctgactggttatcttcacactatttcttctgaaaacttattggatgcagtatattcattttgcttgatgaattactttcccctggctccttttaatcagcttctgcaaaaagacatcatcagtgagctgctgacatcagatgacatgaagaatgcttacaagctgcatactttggatacttgtctaaaacttgatgatactgtctatctgagggacatagccttgtcactcccacagctgccgcgggagctgccatcgtcacatacaaatgcaaaggtggcagaggtgctgagcagccttctgggaggtgaaggacacttctcaaaggatgtgcacttgccacacaattatcatattgattttgaaatcagaatggacactaacaggaatcaagtgctaccactttctgatgtggatacaacttctgctacagatattcaaagagtagctgtgctatgtgtttccagatctgcttattgtttgggttcaagccaccccagaggattccttgctatgaaaatgcggcatttgaatgcaatgggttttcatgtgatcttggtcaataactgggagatggacaaactagagatggaagatgcagtcacatttttgaagactaaaatctattcagtagaagctcttcctgttgctgctgtaaatgtgcaaagcacacaataaagtgaaaatcaaccttttcatattaggagacatgcatttgtaaaaattaataaagatgacaagtcagttgtcaatggaattgagcta

SEQ ID NO: 10452 - DNA, 2344 bp, Homo sapiens
  source 1..2344: mol_type = unassigned DNA
gaagctgtcatggctgctcctgtacgtagtcacggtcttgtgctctaaggtgagtggaggacgagcttgggcttagcggcagcccgtatcacatcctagactttttacttcgaggagaagagtctcacgagttgtcctggaagtaagtttaaaggaggaaaacgacagcacgtgttctttttcactagtagaagtgacgttggtttcatgttgacaactttgaagccatttggaagtgtttcagtggagagcaaaatgaataacaaagcgggctcctttttctggaaccttagacaattcagtacattagtttcaacaagcagaactatgaggctatgttgtttgggactttgcaaaccaaaaatagttcattcaaactggaacattttaaataactttcataacagaatgcaatcaactgatatcattagatatctctttcaggatgcattcatttttaaatcagatgttggctttcaaacaaagggcataagcactctaacagcccttagaattgaaagactactttatgctaaaagactgttttttgactcaaagcagtctcttgtccctgttgataaatctgatgatgaattgaagaaagtaaaccttaatcatgaagtctccaatgaagatgttcttaccaaggaaacaaaaccaaaccgtatcagcagtagaaaactgtctgaggaatgtaattccctgagtgatgtgttagatgcattttcaaaagcgcccacatttcctagtagcaactatttcacagcaatgtggacaattgccaaaagactgtctgatgaccagaagcgctttgaaaaacgactgatgtttagccaccctgcatttaatcagctctgtgaacatatgatgagagaagccaagatcatgcagtataagtacctactgttcagtcttcacgccatagtgaagcttggaatccctcagaacactattttggtgcagactttgctgagggtgacccaggaacgtatcaatgagtgtgatgagatatgcctttcagttttgtcaactgttttagaggcaatggaaccatgcaagaatgttcatgttctacgaacgggattcagaatactagttgatcagcaagtttggaaaatagaagatgtcttcacattacaagttgtgatgaagtgtattggaaaagatgcaccgattgctcttaagaggaaactggagatgaaagccttgagggaattagacagattttctgttttgaatagccaacacatgtttgaagtactagctgccatgaatcaccgatctcttatactcctggatgaatgcagtaaggtggtcctagataatatccatgggtgtcctttaagaataatgatcaacatattgcagtcctgcaaagacctccagtaccataatttggatctcttcaagggacttgcagattatgtggctgcaactttcgacatctggaagttcagaaaagttctttttatcctcattttatttgaaaaccttggctttcgacctgttggtttaatggacctgtttatgaagagaatagtagaggatcctgaatccctaaacatgaaaaacattctatctattcttcatacttactcttctctcaatcatgtctacaaatgccagaacaaagaacagttcgtggaagttatggctagtgctctgactggttatcttcacactatttcttctgaaaacttattggatgcagtatattcattttgcttgatgaattactttcccctggctccttttaatcagcttctgcaaaaagacatcatcagtgagctgctgacatcagatgacatgaagaatgcttacaagctgcatactttggatacttgtctaaaacttgatgatactgtctatctgagggacatagccttgtcactcccacagctgccgcgggagctgccatcgtcacatacaaatgcaaaggtggcagaggtgctgagcagccttctgggaggtgaaggacacttctcaaaggatgtgcacttgccacacaattatcatattgattttgaaatcagaatggacactaacaggaatcaagtgctaccactttctgatgtggatacaacttctgctacagatattcaaagagtagctgtgctatgtgtttccagatctgcttattgtttgggttcaagccaccccagaggattccttgctatgaaaatgcggcatttgaatgcaatgggttttcatgtgatcttggtcaataactgggagatggacaaactagagatggaagatgcagtcacatttttgaagactaaaatctattcagtagaagctcttcctgttgctgctgtaaatgtgcaaagcacacaataaagtg

SEQ ID NO: 10453 - DNA, 576 bp, Homo sapiens
  source 1..576: mol_type = unassigned DNA
gcgcccagcagaggttaggtgtttaaagttaggacctgaatgggttacgttgcgatacacgatcaaacatcgcccttataagctctgtggtatccccgagccccactcctgtatgcagggaaattagtcattctccttggtaaactttcttcaagaaaacgacagcacgtgttctttttcactagtagaagtgacgttggtttcatgttgacaactttgaagccatttggaagtgtttcagtggagagcaaaatgaataacaaagcgggctcctttttctggaaccttagacaattcagtacattagtttcaacaagcagaactatgaggctatgttgtttgggactttgcaaaccaaaaatagttcattcaaactggaacattttaaataactttcataacagaatgcaatcaactgatatcattagatatctctttcaggatgcattcatttttaaatcagatgttggctttcaaacaaagggcataagcactctaacagcccttagaattgaaagactactttatgctaaaagactgttttttgactcaaagcagtctcttgtccctgttgat

SEQ ID NO: 10454 - DNA, 2874 bp, Homo sapiens
  source 1..2874: mol_type = unassigned DNA
gcggaagtagcgggcagttggccggaagtggggctgtgaggctcggagtcgccggaggagccagtatctgtgtcgccgccgcccgcggcgtccccggtttggtgttgcggcgcccaccttcgggaggatcagtatctggcaccaattctgacccagtcatttgtgatccctggctcttgtgatatgctgaagatttccaggcagtttttgtggaacacctccccgtccagctctaatcaagcaccatataaacaagaaattgcctggtcaaatctgtgaggactgtattctgactgccaaagagatcaatactgacaccagaatggcagctactctcaagtcattaaaacttgtaagataccgagcattttgcagtccttctgcctttggtgcagtccgaagtgtgtcatactggaatgtgagcagcacacagcatgggggacaggaccctccagaacacattagcctctgccattctgccaaaaaagttaagaacatatgtagcaccttctcttctcggagaatcctgacaaccagcagtgcccacccaggtttggaattcagcaagacttcttcctctaaggccagtacattgcagctgggctcacccagggccacaggagttgatgaagaggacgtagaagtgtttgattcctttgaaaacatgcgagttttcctacagctaagaccagaataccgtgttcacagctataatgcatctgagacttctcagctcctgtctgtttcagaaggtgaactaattttgcacaaagtcagagttaatcaaaataatctccaggctcaagtcattgttgattatttgtgtaagctgagctctttgcctgcagagcagcatcctgtcttgctgggcagtaccagctttgctctgctctgccagctgagtgtgaagaagatacagctctttgatacccaagatctgatcaatgttttgaaagcttttgtcattttaggaatccctcactcccattcaatgctagatgtgtatgagaccaagtgttgccatcaggtatgggagatgaatatggatcagctccttttggtggctgatctctggaggtacttaggccgcaaagtacctaggtttttaaacattttttctagttatcttaatttgcactggaaggatctatccttgtctcagctagttcacttaatttatgttataggtgaaaatcgtcaggtatcccaggacctaatgcaaaaattggaatcattgatccttaaatatatagatttgatcaatttggaggaggttggtaccatctgtttggggttctttaaatcaagtactaatctctctgaatttgtcatgcggaaaattggagacttggcttgtgctaacattcagcatctgagtagtcgctccttagtgaatattgttaaaatgttccgtttcactcacgtggatcacatcaatttcatgaagcagattggagagatagctcctcagcgaattccttccctgggagttcaaggtgtcatgcacctgactctttactgctcggccttacgcttcctgaatgaaggagtaatgaatgcagtggctgcgtctttgcctcctagagtggcacactgtcgaagtaaagatgttgccaagattctgtggtcatttggaactctgaattataagccacccaatgcagaagaattttactccagcctgataagtgagattcacagaaagatgcctgaattcaaccagtacccagaacacctgcccacctgcctgctgggcctggcatttttggagtactttccagtagagttaattgatttcgctctcagtccagggtttgtcaggttagctcaggagagaactaagtttgacctccttaaggaactatataccctcgatggtacagttggcattgagtgtccagattacagaggcaatcgtcttagtactcaccttcagcaagaggggtctgaattgctgtggtatttagcagagaaggatatgaattcaaagcctgaattcttagaaactgtctttttactggagaccatgctgggggggccccagtacgtcaagcaccatatgattttgcctcatacccgatcttctgacttagaggtccagcttgatgttaacctgaagccattaccatttaatagagaagccacgccggctgaaaatgtagccaaattaaggcttgagcatgtgggagtcagccttacagatgatttgatgaataagttactaaaagggaaagcaagaggacatttccagggcaaaactgagtcagagcctgggcagcagcccatggagttggagaataaggcagctgtacctctggggggcttcctttgcaatgtagcagataaatcaggggccatggagatggctggcctgtgccccgcagcctgcatgcagaccccaagaatgaagctggctgttcagttcacaaacaggaaccagtattgctatggctccagggatctccttggactgcacaatatgaagaggcggcagctggctcggcttggctaccgtgtggtagagttatcctactgggaatggctcccactactgaaacgaactcgcttagaaaagttggcgtttcttcatgagaaagtattcacctctgctctctgaagggcatttaggggcatttctatggcaaagctataggtgtatactgtaccaggtgttgcaaaatgattataaaagccagaatgtaagtttggcgataaaatagtgtgttgaggagacttaattgtatccaaggcaggttagagctagtgtatgttactgtgaattgtaatgtagttggattgtacaaattactgcaaatgtatacatgttactcttagtaaataataaacatcttaatatgtcctacggtcaagtaa

SEQ ID NO: 10455 - DNA, 2799 bp, Homo sapiens
  source 1..2799: mol_type = unassigned DNA
gaacaaaggaatgaaatcttgactgccatccttgcctcgctcactgcacgccagaacctgaggagagaatggcatgccagggcagagaggagtgttggtgccagtcacgaattgcccgaacattacctgctgatcagaagccagaatgtcggccatactgggaaaaggatgatgcttcgatgcctctgccgtttgacctcacagacatcgtttcagaactcagaggtcagcttctggaagcaaaaccctagaaggagcacaagtctcaggcggaggagaaaaagagatcggcttttctcctccaacgttgtcatgggcttaagcaagagcagtggagacttctcttggcccctagattgtagcacccgggtcccaatccaaaacagctaggaaatggtgcccatgaagttttaaatgttttaaaatgaccctgtgttatagtctgatttggtgttaaacaggaccttcttcccccaaaattgttcagattataaaatgtgagccattcagcccccaaggtccagggcaggcgacaggaacgagcccagcgtgtgacaaagcctaacctactttcctctttcccaagctttttcagagactctggagtggacccagccctctggggaaagacagaacttagagacatcccagttactcaccacacccatagtgctgtccaatatggtagccactagctagctgtggctacttcaatttaaattcagttttaattttaattaaaaatgcagctcttcagtcgccctggccacatttcaagtgcttaacagcctcatgtggctagtgactgctgtattggacggtacagatatggaacattttcatcatcgaagaaagtcctattggacaacacttctataaaaagtttgagagcaggaattctcatttccattcgtctgtagcttctatccccaaaggcaaagaaactaaaagagaaatgactcattgaagattggcctctttcctttctctaagacaaacctaagtaaaagcctgagctttgagtcctatgctcagcacacgggaaggagatgttaataattaaaataaagttgatatcctgtctttagggagttcccttgatctcttgaaagagacacagccccatttacattatttcgtggatttcaccagcatagtatagtttttttctgtaagtccctcattcttatgtaataacaggtggaactgaggtttgaagaacctcagtggcccatcctgatgacattggagactcaaagagacaagagagagtagggtttaaaacctgagctttaagactcccactagcttcgtgtcctttggcatgttaacgtgcctcagtttcctcatctgtataatggggatatatgaaaggcaccagtcctaaggtgaacattaagtgagatgattctagttacagacttagaacaatttccagcacatagttaaatatccaggaaattctggtactgttatgtgtgggtgagctgacctggatgtagatgttttcctctctcttgctgacccctccgccagttttgtcttgtgatgccattaacacatctctccctttctgacctggctcctgcccattggtgtcccaagaaatcgtgagaatagttagccccccgtctccccagcctgttgctttctcgtgtagttgttcacagtagttgagaagttgaagagcttttgcctattgaaggtgcactgagaataaactctttcctgccaccagaattgcagtggttcacggcctgcactcattcccatgaatgcagttaatagccacagaaatgtcacattaagcaaagcagccagggtctcatcgtgttgagactcgagtctctcagaccttggattcattccctggtgtctttgagcctcagtttcctcattggtaaaagagaagtgaagcagtgtctcacagggtcattacagagattaaatgaaataaatgaaataacatagaccaggagggcgtggtgtttaaaagtcacagatggggcaccctcgggccatccagcccagtgttttctttagcccctatgatgttcattttttgttatatcccattaggtgcccatatttaaaaattgggagatttcacataaaattaaaaggtctgcattttcttttttcttttctttttttttttttttgagacacagtctcactctgtcaccaggctagagtgcagtggcacgatctcagctcactgcaacctctgcctcccaggttcaagtaattctcctgcctcagcctcccaagtagctgggactacaggcacgtgccaccacgcccagctaatttttgtatttttagcagagatggggtttcaccacattggccaggatggtctcgatctcaacctcgtgatccacccacctcggtctcccaaagcgctgggattacaggcgtgagccaccgcgccaagccaaggtctgcatttttctttagaactcagaacacccaatagtcctaggcccccatcctcgcatggcagcaagctaaataagcatcttcccactgcgagttggggcatgacccagcctatggtttgccatactccctctttttctccgttttttcattaattgtgaacctgacctgcatcaccctttcatgtcagtgctctccaaacctgcttgcttgcacccctctagtcgaaatattttgtgcttaccccaatatatgtgtgtgactattgaactctattcgtagactgcttgtactaatgtcatttgcatcataaaatattcatatccaataaacatattaaaaggatgagataagaaa

SEQ ID NO: 10456 - DNA, 1065 bp, Homo sapiens
  source 1..1065: mol_type = unassigned DNA
agcatgaagcgcaccccgactgccgaggaacgagagcgcgaagctaagaaactgaggcttcttgaagagcttgaagacacttggctcccttatctgacccccaaagatgatgaattctatcagcaggccctgaagaggaaagtgaggatgactctcatctcgaaggcagggatcctgatatttggcatgttggttttaagatctcatgggacatagagacacctggtttggcgataccccttcaccaaggagactgctatttcatgcttgatgatctcaatgccacccaccaacactgtgttttggccggttcacaacctcggtttagttccacccaccgagtggcagagtgctcaacaggaaccttggattatattttacaacgctgtcagttggctctgcagaatgtctgtgacgatgtggacaatgatgatgtctctttgaaatcctttgagcctgcagttttgaaacaaggagaagaaattcataatgaggtcgagtttgagtggctgaggcagttttggtttcaaggcaatcgatacagaaagtgcactgactggtggtgtcaacccatggctcaactggaagcactgtggaagaagatggagggtgtgacaaatgctgtgcttcatgaagttaaaagagaggggctccccgtggaacaaaggaatgaaatcttgactgccatccttgcctcgctcactgcacgccagaacctgaggagagaatggcatgccaggtgccagtcacgaattgcccgaacattacctgctgatcagaagccagaatgtcggccatactgggaaaaggatgatgcttcgatgcctctgccgtttgacctcacagacatcgtttcagaactcagaggtcagcttctggaagcaaaaccctagaaggagcacaagtctcaggcggaggagaaaaagagatcggcttttctcctccaacgttgtcatgggcttaagcaagagcagtggagacttctcttggcccctagattgtagcacccgggtcccaatccaaaacagctaggaaatggtgcccatgaagttttaaatgttttaa

SEQ ID NO: 10457 - DNA, 707 bp, Homo sapiens
  source 1..707: mol_type = unassigned DNA
aagctgtggtggctccacgtttctttagcgggcagtgttttatatatataggttaagattatcaccagctcctcctggcccatgggtcgagtttgagtggctgaggcagttttggtttcaaggcaatcgatacagaaagtgcactgactggtggtgtcaacccatggctcaactggaagcactgtggaagaagatggagggtgtgacaaatgctgtgcttcatgaagttaaaagagaggggctccccgtggaacaaaggaatgaaatcttgactgccatccttgcctcgctcactgcacgccagaacctgaggagagaatggcatgccaggtgccagtcacgaattgcccgaacattacctgctgatcagaagccagaatgtcggccatactgggaaaaggatgatgcttcgatgcctctgccgtttgacctcacagacatcgtttcagaactcagaggtcagcttctggaagcaaaaccctagaaggagcacaagtctcaggcggaggagaaaaagagatcggcttttctcctccaacgttgtcatgggcttaagcaagagcagtggagacttctcttggcccctagattgtagcacccgggtcccaatccaaaacagctaggaaatggtgcccatgaagttttaaatgttttaaaatgaccctgtgttatagtctgatttggtgttaaacaggaccttcttcccc

SEQ ID NO: 10458 - DNA, 1517 bp, Homo sapiens
  source 1..1517: mol_type = unassigned DNA
tccacgtttctttagcgggcagtggtaaaaagagtatttaagatcggtcgagtttgagtggctgaggcagttttggtttcaaggcaatcgatacagaaagtgcactgactggtggtgtcaacccatggctcaactggaagcactgtggaagaagatggagggtgtgacaaatgctgtgcttcatgaagttaaaagagaggggctccccgtggaacaaaggaatgaaatcttgactgccatccttgcctcgctcactgcacgccagaacctgaggagagaatggcatgccaggtgccagtcacgaattgcccgaacattacctgctgatcagaagccagaatgtcggccatactgggaaaaggatgatgcttcgatgcctctgccgtttgacctcacagacatcgtttcagaactcagaggtcagcttctggaagcaaaaccctagaaggagcacaagtctcaggcggaggagaaaaagagatcggcttttctcctccaacgttgtcatgggcttaagcaagagcagtggagacttctcttggcccctagattgtagcacccgggtcccaatccaaaacagctaggaaatggtgcccatgaagttttaaatgttttaaaatgaccctgtgttatagtctgatttggtgttaaacaggaccttcttcccccaaaattgttcagattataaaatgtgagccattcagcccccaaggtccagggcaggcgacaggaacgagcccagcgtgtgacaaagcctaacctactttcctctttcccaagctttttcagagactctggagtggacccagccctctggggaaagacagaacttagagacatcccagttactcaccacacccatagtgctgtccaatatggtagccactagctagctgtggctacttcaatttaaattcagttttaattttaattaaaaatgcagctcttcagtcgccctggccacatttcaagtgcttaacagcctcatgtggctagtgactgctgtattggacggtacagatatggaacattttcatcatcgaagaaagtcctattggacaacacttctataaaaagtttgagagcaggaattctcatttccattcgtctgtagcttctatccccaaaggcaaagaaactaaaagagaaatgactcattgaagattggcctctttcctttctctaagacaaacctaagtaaaagcctgagctttgagtcctatgctcagcacacgggaaggagatgttaataattaaaataaagttgatatcctgtctttagggagttcccttgatctcttgaaagagacacagccccatttacattatttcgtggatttcaccagcatagtatagtttttttctgtaagtccctcattcttatgtaataacaggtggaactgaggtttgaagaacctcagtggcccatcctgatgacattggagactcaaagagacaagagagagtagggtttaaaacctgagctttaagactcccactagcttcgtgtcctttgg

SEQ ID NO: 10459 - DNA, 3056 bp, Homo sapiens
  source 1..3056: mol_type = unassigned DNA
gtttcaagagtaaaggagaacaaagtagggtgacctagtctgaaggacaggcgcagaacagtcagtggaacagccagagatagcagcgagagaggtgagaagaggaccaggagtaggtggtagaatggagtggaggaaagtcagcgaatgtaatagtgtcgaaccctgcagggaagttaagaagtggccataccgttgcattcatcatgggaagaatttcagtagaatgacaaatgctgtgcttcatgaagttaaaagagaggggctccccgtggaacaaaggaatgaaatcttgactgccatccttgcctcgctcactgcacgccagaacctgaggagagaatggcatgccaggtgccagtcacgaattgcccgaacattacctgctgatcagaagccagaatgtcggccatactgggaaaaggatgatgcttcgatgcctctgccgtttgacctcacagacatcgtttcagaactcagaggtcagcttctggaagcaaaaccctagaaggagcacaagtctcaggcggaggagaaaaagagatcggcttttctcctccaacgttgtcatgggcttaagcaagagcagtggagacttctcttggcccctagattgtagcacccgggtcccaatccaaaacagctaggaaatggtgcccatgaagttttaaatgttttaaaatgaccctgtgttatagtctgatttggtgttaaacaggaccttcttcccccaaaattgttcagattataaaatgtgagccattcagcccccaaggtccagggcaggcgacaggaacgagcccagcgtgtgacaaagcctaacctactttcctctttcccaagctttttcagagactctggagtggacccagccctctggggaaagacagaacttagagacatcccagttactcaccacacccatagtgctgtccaatatggtagccactagctagctgtggctacttcaatttaaattcagttttaattttaattaaaaatgcagctcttcagtcgccctggccacatttcaagtgcttaacagcctcatgtggctagtgactgctgtattggacggtacagatatggaacattttcatcatcgaagaaagtcctattggacaacacttctataaaaagtttgagagcaggaattctcatttccattcgtctgtagcttctatccccaaaggcaaagaaactaaaagagaaatgactcattgaagattggcctctttcctttctctaagacaaacctaagtaaaagcctgagctttgagtcctatgctcagcacacgggaaggagatgttaataattaaaataaagttgatatcctgtctttagggagttcccttgatctcttgaaagagacacagccccatttacattatttcgtggatttcaccagcatagtatagtttttttctgtaagtccctcattcttatgtaataacaggtggaactgaggtttgaagaacctcagtggcccatcctgatgacattggagactcaaagagacaagagagagtagggtttaaaacctgagctttaagactcccactagcttcgtgtcctttggcatgttaacgtgcctcagtttcctcatctgtataatggggatatatgaaaggcaccagtcctaaggtgaacattaagtgagatgattctagttacagacttagaacaatttccagcacatagttaaatatccaggaaattctggtactgttatgtgtgggtgagctgacctggatgtagatgttttcctctctcttgctgacccctccgccagttttgtcttgtgatgccattaacacatctctccctttctgacctggctcctgcccattggtgtcccaagaaatcgtgagaatagttagccccccgtctccccagcctgttgctttctcgtgtagttgttcacagtagttgagaagttgaagagcttttgcctattgaaggtgcactgagaataaactctttcctgccaccagaattgcagtggttcacggcctgcactcattcccatgaatgcagttaatagccacagaaatgtcacattaagcaaagcagccagggtctcatcgtgttgagactcgagtctctcagaccttggattcattccctggtgtctttgagcctcagtttcctcattggtaaaagagaagtgaagcagtgtctcacagggtcattacagagattaaatgaaataaatgaaataacatagaccaggagggcgtggtgtttaaaagtcacagatggggcaccctcgggccatccagcccagtgttttctttagcccctatgatgttcattttttgttatatcccattaggtgcccatatttaaaaattgggagatttcacataaaattaaaaggtctgcattttcttttttcttttctttttttttttttttgagacacagtctcactctgtcaccaggctagagtgcagtggcacgatctcagctcactgcaacctctgcctcccaggttcaagtaattctcctgcctcagcctcccaagtagctgggactacaggcacgtgccaccacgcccagctaatttttgtatttttagcagagatggggtttcaccacattggccaggatggtctcgatctcaacctcgtgatccacccacctcggtctcccaaagcgctgggattacaggcgtgagccaccgcgccaagccaaggtctgcatttttctttagaactcagaacacccaatagtcctaggcccccatcctcgcatggcagcaagctaaataagcatcttcccactgcgagttggggcatgacccagcctatggtttgccatactccctctttttctccgttttttcattaattgtgaacctgacctgcatcaccctttcatgtcagtgctctccaaacctgcttgcttgcacccctctagtcgaaatattttgtgcttaccccaatatatgtgtgtgactattgaactctattcgtagactgcttgtactaatgtcatttgcatcataaaatattcatatccaataaacatattaaaaggatgagataagaaa

SEQ ID NO: 10460 - DNA, 11766 bp, Homo sapiens
  source 1..11766: mol_type = unassigned DNA
ctacgctcttccagctgtcggacctgggaaattctcctgtgctaaatcccgtggcgctcgcgggtgtcgccgcggtgcatcctgggagttgtagttttttctactcagagggagaatagctccagacgggagcaggacgctgagagaactacatgcaggaggcggggtccagggcgagggatctacgcagcttgcggtggcgaaggcggctttagtggcagcatgaagcgcaccccgactgccgaggaacgagagcgcgaagctaagaaactgaggcttcttgaagagcttgaagacacttggctcccttatctgacccccaaagatgatgaattctatcagcagtggcagctgaaatatcctaaactaattctccgagaagccagcagtgtatctgaggagctccataaagaggttcaagaagcctttctcacactgcacaagcatggctgcttatttcgggacctggttaggatccaaggcaaagatctgctcactccggtatctcgcatcctcattggtaatccaggctgcacctacaagtacctgaacaccaggctctttacggtcccctggccagtgaaagggtctaatataaaacacaccgaggctgaaatagccgctgcttgtgagaccttcctcaagctcaatgactacctgcagatagaaaccatccaggctttggaagaacttgctgccaaagagaaggctaatgaggatgctgtgccattgtgtatgtctgcagatttccccagggttgggatgggttcatcctacaacggacaagatgaagtggacattaagagcagagcagcatacaacgtaactttgctgaatttcatggatcctcagaaaatgccatacctgaaagaggaaccttattttggcatggggaaaatggcagtgagctggcatcatgatgaaaatctggtggacaggtcagcggtggcagtgtacagttatagctgtgaaggccctgaagaggaaagtgaggatgactctcatctcgaaggcagggatcctgatatttggcatgttggttttaagatctcatgggacatagagacacctggtttggcgataccccttcaccaaggagactgctatttcatgcttgatgatctcaatgccacccaccaacactgtgttttggccggttcacaacctcggtttagttccacccaccgagtggcagagtgctcaacaggaaccttggattatattttacaacgctgtcagttggctctgcagaatgtctgtgacgatgtggacaatgatgatgtctctttgaaatcctttgagcctgcagttttgaaacaaggagaagaaattcataatgaggtcgagtttgagtggctgaggcagttttggtttcaaggcaatcgatacagaaagtgcactgactggtggtgtcaacccatggctcaactggaagcactgtggaagaagatggagggtgtgacaaatgctgtgcttcatgaagttaaaagagaggggctccccgtggaacaaaggaatgaaatcttgactgccatccttgcctcgctcactgcacgccagaacctgaggagagaatggcatgccaggtgccagtcacgaattgcccgaacattacctgctgatcagaagccagaatgtcggccatactgggaaaaggatgatgcttcgatgcctctgccgtttgacctcacagacatcgtttcagaactcagaggtcagcttctggaagcaaaaccctagaaggagcacaagtctcaggcggaggagaaaaagagatcggcttttctcctccaacgttgtcatgggcttaagcaagagcagtggagacttctcttggcccctagattgtagcacccgggtcccaatccaaaacagctaggaaatggtgcccatgaagttttaaatgttttaaaatgaccctgtgttatagtctgatttggtgttaaacaggaccttcttcccccaaaattgttcagattataaaatgtgagccattcagcccccaaggtccagggcaggcgacaggaacgagcccagcgtgtgacaaagcctaacctactttcctctttcccaagctttttcagagactctggagtggacccagccctctggggaaagacagaacttagagacatcccagttactcaccacacccatagtgctgtccaatatggtagccactagctagctgtggctacttcaatttaaattcagttttaattttaattaaaaatgcagctcttcagtcgccctggccacatttcaagtgcttaacagcctcatgtggctagtgactgctgtattggacggtacagatatggaacattttcatcatcgaagaaagtcctattggacaacacttctataaaaagtttgagagcaggaattctcatttccattcgtctgtagcttctatccccaaaggcaaagaaactaaaagagaaatgactcattgaagattggcctctttcctttctctaagacaaacctaagtaaaagcctgagctttgagtcctatgctcagcacacgggaaggagatgttaataattaaaataaagttgatatcctgtctttagggagttcccttgatctcttgaaagagacacagccccatttacattatttcgtggatttcaccagcatagtatagtttttttctgtaagtccctcattcttatgtaataacaggtggaactgaggtttgaagaacctcagtggcccatcctgatgacattggagactcaaagagacaagagagagtagggtttaaaacctgagctttaagactcccactagcttcgtgtcctttggcatgttaacgtgcctcagtttcctcatctgtataatggggatatatgaaaggcaccagtcctaaggtgaacattaagtgagatgattctagttacagacttagaacaatttccagcacatagttaaatatccaggaaattctggtactgttatgtgtgggtgagctgacctggatgtagatgttttcctctctcttgctgacccctccgccagttttgtcttgtgatgccattaacacatctctccctttctgacctggctcctgcccattggtgtcccaagaaatcgtgagaatagttagccccccgtctccccagcctgttgctttctcgtgtagttgttcacagtagttgagaagttgaagagcttttgcctattgaaggtgcactgagaataaactctttcctgccaccagaattgcagtggttcacggcctgcactcattcccatgaatgcagttaatagccacagaaatgtcacattaagcaaagcagccagggtctcatcgtgttgagactcgagtctctcagaccttggattcattccctggtgtctttgagcctcagtttcctcattggtaaaagagaagtgaagcagtgtctcacagggtcattacagagattaaatgaaataaatgaaataacatagaccaggagggcgtggtgtttaaaagtcacagatggggcaccctcgggccatccagcccagtgttttctttagcccctatgatgttcattttttgttatatcccattaggtgcccatatttaaaaattgggagatttcacataaaattaaaaggtctgcattttcttttttcttttctttttttttttttttgagacacagtctcactctgtcaccaggctagagtgcagtggcacgatctcagctcactgcaacctctgcctcccaggttcaagtaattctcctgcctcagcctcccaagtagctgggactacaggcacgtgccaccacgcccagctaatttttgtatttttagcagagatggggtttcaccacattggccaggatggtctcgatctcaacctcgtgatccacccacctcggtctcccaaagcgctgggattacaggcgtgagccaccgcgccaagccaaggtctgcatttttctttagaactcagaacacccaatagtcctaggcccccatcctcgcatggcagcaagctaaataagcatcttcccactgcgagttggggcatgacccagcctatggtttgccatactccctctttttctccgttttttcattaattgtgaacctgacctgcatcaccctttcatgtcagtgctctccaaacctgcttgcttgcacccctctagtcgaaatattttgtgcttaccccaatatatgtgtgtgactattgaactctattcgtagactgcttgtactaatgtcatttgcatcataaaatattcatatccaataaacatattaaaaggatgagataagaaaccgagagattttgctgtttttttccttttgcatggatgagccagcttcactgtcctgggtggggcccaggtggaattagttctcaaagtcctccaggtggagtcagggaatgtgcaacagggttggagaaatcactactttaagtgaatccgaaaggtgagatcacatttgctctaaagaaatggtgatcccagcactttgggaggctgaggcagcagatcactggaggtcaggagttcgagaccagcctggccaacacggtgaaaccccgtctctactgaaaacacaaaaattagctgggtgtggtggtgtgtgcctgtaatcccagctactcgggaggctgaggcaggcaaatcgcttggcccgggaggcggaggttgcagtgagccgagatcatgccactgcactccagcctgggccacggagcgagagaagaaagaaatggtgactttcattgatcatgtgtttgaggatttcatgtgctctccagggaggtttcaggtgggtagaaggaggtgggcaagacccaataaaaaagcagctggtgcgggcaatgacaatgaactcgtatcctgcagggtcaaaggaaggcttgcttctgctgtgaattggagaaggactttcctggaagcacaggcccagaaatcgcacccttctccccatgtgtgcggataagggaccacttccatcagcagcagccccctcctgctttcctgccagtcctccctgtggtcccaggtctcttgagaaaagtgatctaagagatccctttgcaatgaggtgctactgactgccctacctccctcccttcctcccatgaatgtttcttggtgctgaccacagcctcagcaatgaggcaagcctggggacccaagacagatctctgcctcccaggctagtggatgccctgggatatgtagtcaccaaaataggaacttaccccatagtggggaaatagacagtaagcagcaaatcaataacaagagtgttccagatggttgtaagtgccaggaagggaaccaactgggagagggacaagaggagatggtgactgaccaaggggaccttgatcaggctgtggggaagggaggtggttgggaagagcttcccaggaaaggggacggcgggcccaggcaggagagccttgggagggggtgcccaaggaaggaaaagggccctgagcctgaagccgagaagaccaggaggggagaaggggagatgtagggcagagcagacgggagccgctcgggttttattccacacaccccaggaagcatgagagggtttcaagcagcaagggcatggaagtaacttggtgagatatttttatgcattagatcatcgctctatctggattccagagggtctctgagagagcaaacagcttaatccaaaggagcggctttccaactgggaatgtccccctggctgggtgagatctcaagatggcctgcggcccctctagattgcctgcctacagagttcactctaaacagcccctcccctccacaccccagcagatccattcctgacgccctcactggcaggctccagccccacagagctttctagacataaaagagcagggtcatggcatcattggtgacacaattttagtaataagcttcaaaacccatcactccactgaatccagggatgccagaattgagagtccataggacccgtttaacggatcccacattcagtagacggttttttgtatgcttcgagggaaggaaggtattttcaaatgcaacttcttttttttttttcttgctctagttagggctgattttaccactgggcaaattgcatacatttggatccatgccacgctaaaaactgtttattttggagatctgtcagaggcaagcacatggaagacaaggggattctggtttgaaaaggcaattctcatccagacagattcagatggagaggagcggtgtggattaaaatgcgccgaagtggtaatgccgtttatcccgtttgcctttgttactctgtgattaaatggtatttttaattaagtttcattgggagccataggtatcgcggtggtgaaatcaatttgacaaccataaaggggagagacggcacaggcgtgttgtgatgattgcggctgtagggaaagccgggcagcttgcagaggatgggtgggaggaggggaagccggctaagaatgacttcctgcaagacagcaagggcacccctgggccactgctgtgtttgggaggcaggttttgggggttgtcagaaggcattcacctggttctctcgctcacctgagacacccgatagattcctggaaactccaggaaagtatctgaagatctggttctccattctctcttattaacaaggagaaccacaagtgccccccagatcccggctagaaggaccagacagctttccaccccggttcccaggcagccctgctcccatagtcctgtgtcccatcggccccatgctcccaggacagtcctaattcccacctctcagaaccttgtcagccaagttcttcctgctctctggcccaaatcctcctcctacattggaaactgagcctctctgcatcctctgctctttctatcccgctgtcattcatcagattttccaaatctttggattcctgagtggcagaagaggttttctgagtttaagttctgattctgtgtgtgattctcactctaccacctcttcaaacctttgttgtcttatctacaaaatagaatagtagtaatccatcacctaaggttgttgtgaaggttcaataagttaatgcgtatttaaaatgcctcccacagtacctgacatatactgggcttcagtgaggtactagctattattattaaccaagtttcctgtggtaacagttgtagctttgtgactgggccaaatcacttaacccctctgcgctccagtctttgtttctataatggggatgatgataatgcctagctcattggattgttctgtcccctacgatcagccatgttaagtgattcatatcatgtctggtacttaaaaatcacgccacgcatgtacattattatgatgaaaaatatgatccgtgatatcctgaccaaaatattaaagggactaaagatagctgtggcttgttcaagaagaatattgtgtcactatcccatatattatcccatttgctcttcacagcttccatttttcgctaggcggatggcatggaactttttataaatgagatattatgaaaaatgatgttttaggactctcatttctacagtgggagtaggtcacccattgcaattttggatttgcttaaaaaaattcttgccatcaccttctaatggatgatctgtgtacaacaattgtttattgactctgaatgtctaagtaccagggtcagtctatttcaaggggagggaagcattaattaacctccagcattagattcagtgattcttttccaatgatgcagttcatgactttgctcgcatttacttttcatcaatcctgaaagaattgaggtaaaatagttcctctgcacatgtgtgtcaagctaaatggataacagcagatacagatctgtttgcctgtctgcacttgcctttagacaaaattcatcaattttacaaaagccactgactaaacatggcaccaatacaaatgaagcacttctagcaggcggagattccctttgtttctgatctggtaaatgcggtagtttcctgctgagagatgggaagtgctggcctaggacagcaaggtgccctacaggtggggccaaaagggtcaagaccgttctacaggaagtttaggagaagttcaatggttccagatcctgtgtgcttcgggtaattctgaccctcttcattagtgataatggcatgaagctctttcacacagtcttttttttttttctttttttttttcagacagggtctcaccctgtcacgtaggctggagtgcagtggtgagatcacggctcactgcagcctcgacttcatgggctcaagcgattctcctgcctcagcctcctaagtagtcgggatcataggcacttgccaccacatccggctaatttttttgtagagacaggatttcaccacattacacaggctggtttcaaactccgaggctcaagtgatctgcctgcatcggcctcccaaagcgctgagattacaagcgtgagccactacgccttgccctccacacagccttgcttggtgttaaagattaaacaaagaccacaggtgatcactgtcttcgtggtgccagtttcaagggcacccttcttcccttcccagcctccgagagaaggagagagggtccacaagccagatccatccccatccacacaggtaaaaccacgactgtgcagctagcaggtggagataacatttggaaaaaggctttgtaaatgctaaagtcctactcaagtccaagggagagaaattattattattcgttttgtgaaaccaatttagtttggctgggtaatggaagaatttctacatacattcattacttctgatcaggcaagaccagtctgacacaggaacagtctatggctcactcttaaagccacagcaggctgccagggcttggagaaatagaaacctctcttgcacaagaatagtctcaatgaatcatgttaaggcctctttaggtttttcagactccatgcaccctgtggaaactgcctttcttgagtagaggtacgttcagcacttcataaaataatcttggagcctccagacacacggatggaggagcatgatttcatttgtttctttgcaaaactgctgtccccaactgaaaaacctgattatcctttcaaatagggaattcggctttccacgttggaaccagaacagttaaccttcaaacccccaaggcttgcaagagatgaatcagtttctcagacagccaaagccgtggcttataactcatccaacccagaaaactggaccgctggtcaccttccttccccctgcccccaactctgcagacagaggtttcccgttgattatgccttgattagagtcaggagagaagcaaaccaggtatataggattccattatccttccctcctctgctcccaaccagggtcacgctgagagggatctcggtgaacatgtgaacaatcaagccatgtttaccatggacgtttagttttcttttctcaaaatcaaaacagagtttagtaggcagcgtatttcatacatgccccttgatcaatggaatgatctgtcagaagccattaaagcccccattagcttgaatgcattcaaagctaaactattggatcatttaagggctgcagtgattgtttttaatataccgtacattgatttctccctgtgagcagcaacataagtttgaaactaactgtgtatgactaaggctccatttgctgtctccaaccctctgtgagaagcatggtttcacttcgaccagaaatgtctgtgtatagttttcaaagagatgcagaccctgttcgatttcccaagatttagactgggtcgggttgttatttcttttttccctgagctttctcccatttctttgtgcccattaagtgagctgtgcgtgcagaatgggagaggcatccctgccaaggacttcaagtgaaaggcggtgggagaaattgttctgaaagcatgaagcccagctgaggccaaaatcaaagtgaatttgacagccttgggccagcaaaactctgtacccagcagaaaacaatagatgtgtggctgtgtcaggggcatcctcactgggacatagcttggggagctgaaggtaccttggaagggccagatgaggaagctagccaaggccacaggccttcctttgactgccatattgccagctcttcatagtattgactcttcagtcttagccaacacacacttgttgattccttccggaatgtcagactctgctagcaacacaaggtccctgtcctcaaaatcctattcttaatcagcatttctaatttctgccctttgctcattttaatacagagcctgaggataggagagcagcgtggtgaaagaagcaatagttaccacatttgcaaaggcacataccccaaagagaagtttttaatatgtcacacccatattttatagatggggcaatggaagtccagatgggagaagttatttcaggtgaattatagaaactggatttcaagtttctgataagtattgaatttgggaaggctgtgaacattcttgagcccccctcccaagttcaccttcaacatcctaaagcaggttgaagaggaagatggttccaggtcacttacaagaacaggaacagcccctccctccaaatttgagcccagaaaggagaacctttgttactctagaaaacagtgtgtgtgctattgttttctccataggtcacaaacatccacaagatattggtgattttacatattattagagccactgaaatttatgatgcaggatattaacgtcaaagaggccaagatgcatcattcagaacactggcaggtcaagcagaaaccaccgtagtaaaattgaaagctggagtcagcaaagtatagcccacagccaaatctggcccatcccctgttcttataaagttttattggaacgcagccatgctcatcggtttatgtattatctatggctgtttccaactacagtggcagagctgaatagttgcaaaggaccatagggctatcaaagccccaaatagtcattgtctgacccttcatagaaaaattttgctgaactgtagtctagctccaaggattgttgtatcacctgtgatcgtgcctattaagcaattaacgtcatgtctagtacttagtaatgactcagcatgtatcaattacgatgataaatattatcatggcatccaaaccaaaatactcatgccaacatctctctgtacagaaacatggaaaaagagcgatgctattaaggaggaaaatggagccaggagcaaaacctaaggctatttctgaactaaagaggcctgaataaggtagtgaaaggaccagggaaagccttcccacggggatggagagccacctcctccccggctttctggttcagatgtcttgtctcaacagacggcagattcgcagggaagcaggccgagcctgatcttttctccgctagaactgctcaacaggtgaagaatctttttccagcactcctgagcccttcgggtcgcggaacagtgcgaagattattccaatgcctcattcggagaggtgataatctggtctgtggtttctttttcggtggggcatggggtgggggtgagtgtcatgctttctaaggcacagggctgactaaagggtgtcctatttataagtcagtaaaacacagcggcttcatactctgtgcttattacccagaagccccggctcttagagtttctattaagatgtacctcataaatatatacgcctcctatgtacccacaaaaattaaaaataaaaaaattgaaatca

SEQ ID NO: 10461 - DNA, 1499 bp, Homo sapiens
  source 1..1499: mol_type = unassigned DNA
tccacgtttctttagcgggcagtggtcgagtttgagtggctgaggcagttttggtttcaaggcaatcgatacagaaagtgcactgactggtggtgtcaacccatggctcaactggaagcactgtggaagaagatggagggtgtgacaaatgctgtgcttcatgaagttaaaagagaggggctccccgtggaacaaaggaatgaaatcttgactgccatccttgcctcgctcactgcacgccagaacctgaggagagaatggcatgccaggtgccagtcacgaattgcccgaacattacctgctgatcagaagccagaatgtcggccatactgggaaaaggatgatgcttcgatgcctctgccgtttgacctcacagacatcgtttcagaactcagaggtcagcttctggaagcaaaaccctagaaggagcacaagtctcaggcggaggagaaaaagagatcggcttttctcctccaacgttgtcatgggcttaagcaagagcagtggagacttctcttggcccctagattgtagcacccgggtcccaatccaaaacagctaggaaatggtgcccatgaagttttaaatgttttaaaatgaccctgtgttatagtctgatttggtgttaaacaggaccttcttcccccaaaattgttcagattataaaatgtgagccattcagcccccaaggtccagggcaggcgacaggaacgagcccagcgtgtgacaaagcctaacctactttcctctttcccaagctttttcagagactctggagtggacccagccctctggggaaagacagaacttagagacatcccagttactcaccacacccatagtgctgtccaatatggtagccactagctagctgtggctacttcaatttaaattcagttttaattttaattaaaaatgcagctcttcagtcgccctggccacatttcaagtgcttaacagcctcatgtggctagtgactgctgtattggacggtacagatatggaacattttcatcatcgaagaaagtcctattggacaacacttctataaaaagtttgagagcaggaattctcatttccattcgtctgtagcttctatccccaaaggcaaagaaactaaaagagaaatgactcattgaagattggcctctttcctttctctaagacaaacctaagtaaaagcctgagctttgagtcctatgctcagcacacgggaaggagatgttaataattaaaataaagttgatatcctgtctttagggagttcccttgatctcttgaaagagacacagccccatttacattatttcgtggatttcaccagcatagtatagtttttttctgtaagtccctcattcttatgtaataacaggtggaactgaggtttgaagaacctcagtggcccatcctgatgacattggagactcaaagagacaagagagagtagggtttaaaacctgagctttaagactcccactagcttcgtgtcctttggcatg

SEQ ID NO: 10462 - DNA, 14534 bp, Homo sapiens
  source 1..14534: mol_type = unassigned DNA
ggagttttccaccatgactattgccctgctgggttttgccatattcttgctccattgtgcgacctgtgagaagcctctagaagggattctctcctcctctgcttggcacttcacacactcccattacaatgccaccatctatgaaaattcttctcccaagacctatgtggagagcttcgagaaaatgggcatctacctcgcggagccacagtgggcagtgaggtaccggatcatctctggggatgtggccaatgtatttaaaactgaggagtatgtggtgggcaacttctgcttcctaagaataaggacaaagagcagcaacacagctcttctgaacagagaggtgcgagacagctacaccctcatcatccaagccacagagaagaccttggagttggaagctttgacccgtgtggtggtccacatcctggaccagaatgacctgaagcctctcttctctccaccttcgtacagagtcaccatctctgaggacatgcccctgaagagccccatctgcaaggtgactgccacagatgctgatctaggccagaatgctgagttctattatgcctttaacacaaggtcagagatgtttgccatccatcccaccagcggtgtggtcactgtggctgggaagcttaacgtcacctggcgaggaaagcatgagctccaggtgctagctgtggaccgcatgcggaaaatctctgagggcaatgggtttggcagcctggctgcacttgtggttcatgtggagcctgccctcaggaagcccccagccattgcttcggtggtggtgactccaccagacagcaatgatggtaccacctatgccactgtactggtcgatgcaaatagctcaggagctgaagtggagtcagtggaagttgttggtggtgaccctggaaagcacttcaaagccatcaagtcttatgcccggagcaatgagttcagtttggtgtctgtcaaagacatcaactggatggagtaccttcatgggttcaacctcagcctccaggccaggagtgggagcggcccttatttttattcccagatcaggggctttcacctaccaccttccaaactgtcttccctcaaattcgagaaggctgtttacagagtgcagcttagtgagttttcccctcctggcagccgcgtggtgatggtgagagtcaccccagccttccccaacctgcagtatgttctaaagccatcttcagagaatgtaggatttaaacttaatgctcgaactgggttgatcaccaccacaaagctcatggacttccacgacagagcccactatcagctacacatcagaacctcaccgggccaggcctccaccgtggtggtcattgacattgtggactgcaacaaccatgcccccctcttcaacaggtcttcctatgatggtaccttggatgagaacatccctccaggcaccagtgttttggctgtgactgccactgaccgggatcatggggaaaatggatatgtcacctattccattgctggaccaaaagctttgccattttctattgacccctacctggggatcatctccacctccaaacccatggactatgaactcatgaaaagaatttataccttccgggtaagagcatcagactggggatccccttttcgccgggagaaggaagtgtccatttttcttcagctcaggaacttgaatgacaaccagcctatgtttgaagaagtcaactgtacagggtctatccgccaagactggccagtagggaaatcgataatgactatgtcagccatagatgtggatgagcttcagaacctaaaatacgagattgtatcaggcaatgaactagagtattttgatctaaatcatttctccggagtgatatccctcaaacgcccttttatcaatcttactgctggtcaacccaccagttattccctgaagattacagcctcagatggcaaaaactatgcctcacccacaactttgaatattactgtggtgaaggaccctcattttgaagttcctgtaacatgtgataaaacaggggtattgacacaattcacaaagactatcctccactttattgggcttcagaaccaggagtccagtgatgaggaattcacttctttaagcacatatcagattaatcattacaccccacagtttgaggaccacttcccccaatccattgatgtccttgagagtgtccctatcaacacccccttggcccgcctagcagccactgaccctgatgctggttttaatggcaaactggtctatgtgattgcagatggcaatgaggagggctgctttgacatagagctggagacagggctgctcactgtagctgctcccttggactatgaagccaccaatttctacatcctcaatgtaacagtatatgacctgggcacaccccagaagtcctcctggaagctgctgacagtgaatgtgaaagactggaatgacaacgcacccagatttcctcccggtgggtaccagttaaccatctcggaggacacagaagttggaaccacaattgcagagctgacaaccaaagatgctgactcggaagacaatggcagggttcgctacaccctgctaagtcccacagagaagttctccctccaccctctcactggggaactggttgttacaggacacctggaccgcgaatcagagcctcggtacatactcaaggtggaggccagggatcagcccagcaaaggccaccagctcttctctgtcactgacctgataatcacattggaggatgtcaacgacaactctccccagtgcatcacagaacacaacaggctgaaggttccagaggacctgccccccgggactgtcttgacatttctggatgcctctgatcctgacctgggccccgcaggtgaagtgcgatatgttctgatggatggcgcccatgggaccttccgggtggacctgatgacaggggcgctcattctggagagagagctggactttgagaggcgagctgggtacaatctgagcctgtgggccagtgatggtgggaggcccctagcccgcaggactctctgccatgtggaggtgatcgtcctggatgtgaatgagaatctccaccctccccactttgcctccttcgtgcaccagggccaggtgcaggagaacagcccctcgggaactcaggtgattgtagtggctgcccaggacgatgacagtggcttggatggggagctccagtacttcctgcgtgctggcactggactcgcagccttcagcatcaaccaagatacaggaatgattcagactctggcacccctggaccgagaatttgcatcttactactggttgacggtattagcagtggacaggggttctgtgcccctctcttctgtaactgaagtctacatcgaggttacggatgccaatgacaacccaccccagatgtcccaagctgtgttctacccctccatccaggaggatgctcccgtgggcacctctgtgcttcaactggatgcctgggacccagactccagctccaaagggaagctgaccttcaacatcaccagtgggaactacatgggattctttatgattcaccctgttacaggtctcctatctacagcccagcagctggacagagagaacaaggatgaacacatcctggaggtgactgtgctggacaatggggaaccctcactgaagtccacctccagggtggtggtaggcatcttggacgtcaatgacaatccacctatattctcccacaagctcttcaatgtccgccttccagagaggctgagccctgtgtcccctgggcctgtgtacaggctggtggcttcagacctggatgagggtcttaatggcagagtcacctacagtatcgaggacagcgatgaggaggccttcagtatcgacctggtcacaggtgtggtttcatccagcagcacttttacagctggagagtacaacatcctaacgatcaaggcaacagacagtgggcagccaccactctcagccagtgtccggctacacattgagtggatcccttggccccggccgtcctccatccctctggcctttgatgagacctactacagctttacggtcatggagacggaccctgtgaaccacatggtgggggtcatcagcgtagagggcagacccggactcttctggttcaacatctcaggtggggataaggacatggactttgacattgagaagaccacaggcagcatcgtcattgccaggcctcttgataccaggagaaggtcgaactataacttgactgttgaggtgacagatgggtcccgcaccattgccacacaggtccacatcttcatgattgccaacattaaccaccatcggccccagtttctggaaactcgttatgaagtcagagttccccaggacaccgtgccaggggtagagctcctgcgagtccaggccatagatcaagacaagggcaaaagcctcatctataccatacatggcagccaagacccaggaagtgccagcctcttccagctggacccaagcagtggtgtcctggtaacggtgggaaaattggacctcggctcggggccctcccagcacacactgacagtcatggtccgagaccaggaaatacctatcaagaggaacttcgtgtgggtgaccattcatgtggaggatggaaacctccacccaccccgcttcactcagctccattatgaggcaagtgttcctgacaccatagcccccggcacagagctgctgcaggtccgagccatggatgctgaccggggagtcaatgctgaggtccactactccctcctgaaagggaacagcgaaggtttcttcaacatcaatgccctgctaggcatcattactctagctcaaaagcttgatcaggcaaatcatgccccacatactctgacagtgaaggcagaagatcaaggctccccacaatggcatgacctggctacagtgatcattcatgtctatccctcagataggagtgcccccatcttttcaaaatctgagtactttgtagagatccctgaatcaatccctgttggttccccaatcctccttgtctctgctatgagcccctctgaagttacctatgagttaagagagggaaataaggatggagtcttctctatgaactcatattctggccttatttccacccagaagaaattggaccatgagaaaatctcgtcttaccagctgaaaatccgaggcagcaatatggcaggtgcatttactgatgtcatggtggtggttgacataattgatgaaaatgacaatgctcctatgttcttaaagtcaacttttgtgggccaaattagtgaagcagctccactgtatagcatgatcatggataaaaacaacaacccctttgtgattcatgcctctgacagtgacaaagaagctaattccttgttggtctataaaattttggagccggaggccttgaagtttttcaaaattgatcccagcatgggaaccctaaccattgtatcagagatggattatgagagcatgccctctttccaattctgtgtctatgtccatgaccaaggaagccctgtattatttgcacccagacctgcccaagtcatcattcatgtcagagatgtgaatgattcccctcccagattctcagaacagatatatgaggtagcaatagtcgggcctatccatccaggcatggagcttctcatggtgcgggccagcgatgaagactcagaagtcaattatagcatcaaaactggcaatgctgatgaagctgttaccatccatcctgtcactggtagcatatctgtgctgaatcctgctttcctgggactctctcggaagctcaccatcagggcttctgatggcttgtatcaagacactgcgctggtaaaaatttctttgacccaagtgcttgacaaaagcttgcagtttgatcaggatgtctactgggcagctgtgaaggagaacttgcaggacagaaaggcactggtgattcttggtgcccagggcaatcatttgaatgacaccctttcctactttctcttgaatggcacagatatgtttcatatggtccagtcagcaggtgtgttgcagacaagaggtgtggcgtttgaccgggagcagcaggacactcatgagttggcagtggaagtgagggacaatcggacacctcagcgggtggctcagggtttggtcagagtctctattgaggatgtcaatgacaatccccccaaatttaagcatctgccctattacacaatcatccaagatggcacagagccaggggatgtcctctttcaggtatctgccactgatgaggacttggggacaaatggggctgttacatatgaatttgcagaagattacacatatttccgaattgacccctatcttggggacatatcactcaagaaaccctttgattatcaagctttaaataaatatcacctcaaagtcattgctcgggatggaggaacgccatccctccagagtgaggaagaggtacttgtcactgtgagaaataaatccaacccactgtttcagagtccttattacaaagtcagagtacctgaaaatatcaccctctataccccaattctccacacccaggcccggagtccagagggactccggctcatctacaacattgtggaggaagaacccttgatgctgttcaccactgacttcaagactggtgtcctaacagtaacagggcctttggactatgagtccaagaccaaacatgtgttcacagtcagagccacggatacagctctggggtcattttctgaagccacagtggaagtcctagtggaggatgtcaatgataaccctcccactttttcccaattggtctataccacttccatctcagaaggcttgcctgctcagacccctgtgatccaactgttggcttctgaccaggactcagggcggaaccgtgacgtctcttatcagattgtggaggatggctcagatgtttccaagttcttccagatcaatgggagcacaggggagatgtccacagttcaagaactggattatgaagcccaacaacactttcatgtgaaagtcagggccatggataaaggagatcccccactcactggtgaaacccttgtggttgtcaatgtgtctgatatcaatgacaaccccccagagttcagacaacctcaatatgaagccaatgtcagtgaactggcaacctgtggacacctggttcttaaagtccaggctattgaccctgacagcagagacacctcccgcctggagtacctgattctttctggcaatcaggacaggcacttcttcattaacagctcatcgggaataatttctatgttcaacctttgcaaaaagcacctggactcttcttacaatttgagggtaggtgcttctgatggagtcttccgagcaactgtgcctgtgtacatcaacactacaaatgccaacaagtacagcccagagttccagcagcacctttatgaggcagaattagcagagaatgcaatggttggaaccaaggtgattgatttgctagccatagacaaagatagtggtccctatggcactatagattatactatcatcaataaactagcaagtgagaagttctccataaaccccaatggccagattgccactctgcagaaactggatcgggaaaattcaacagagagagtcattgctattaaggtcatggctcgggatggaggaggaagagtagccttctgcacggtgaagatcatcctcacagatgaaaatgacaaccccccacagttcaaagcatctgagtacacagtatccattcaatccaatgtcagtaaagactctccggttatccaggtgttggcctatgatgcagatgaaggtcagaacgcagatgtcacctactcagtgaacccagaggacctagttaaagatgtcattgaaattaacccagtcactggtgtggtcaaggtgaaagacagcctggtgggattggaaaatcagacccttgacttcttcatcaaagcccaagatggaggccctcctcactggaactctctggtgccagtacgacttcaggtggttcctaaaaaagtatccttaccgaaattttctgaacctttgtatactttctctgcacctgaagaccttccagaggggtctgaaattgggattgttaaagcagtggcagctcaagatccagtcatctacagtctagtgcggggcactacacctgagagcaacaaggatggtgtcttctccctagacccagacacaggggtcataaaggtgaggaagcccatggaccacgaatccaccaaattgtaccagattgatgtgatggcacattgccttcagaacactgatgtggtgtccttggtctctgtcaacatccaagtgggagacgtcaatgacaataggcctgtatttgaggctgatccatataaggctgtcctcactgagaatatgccagtggggacctcagtcattcaagtgactgccattgacaaggacactgggagagatggccaggtgagctacaggctgtctgcagaccctggtagcaatgtccatgagctctttgccattgacagtgagagtggttggatcaccacactccaggaacttgactgtgagacctgccagacttatcattttcatgtggtggcctatgaccacggacagaccatccagctatcctctcaggccctggttcaggtctccattacagatgagaatgacaatgctccccgatttgcttctgaagagtacagaggatctgtggttgagaacagtgagcctggcgaactggtggcgactctaaagaccctggatgctgacatttctgagcagaacaggcaggtcacctgctacatcacagagggagaccccctgggccagtttggcatcagccaagttggagatgagtggaggatttcctcaaggaagaccctggaccgcgagcatacagccaagtacttgctcagagtcacagcatctgatggcaagttccaggcttcggtcactgtggagatctttgtcctggacgtcaatgataacagcccacagtgttcacagcttctctatactggcaaggttcatgaagatgtatttccaggacacttcattttgaaggtttctgccacagacttggacactgataccaatgctcagatcacatattctctgcatggccctggggcgcatgaattcaagctggatcctcatacaggggagctgaccacactcactgccctagaccgagaaaggaaggatgtgttcaaccttgttgccaaggcgacggatggaggtggccgatcgtgccaggcagacatcaccctccatgtggaggatgtgaatgacaatgccccgcggttcttccccagccactgtgctgtggctgtcttcgacaacaccacagtgaagacccctgtggctgtagtatttgcccgggatcccgaccaaggcgccaatgcccaggtggtttactctctgccggattcagccgaaggccacttttccatcgacgccaccacgggggtgatccgcctggaaaagccgctgcaggtcaggccccaggcaccactggagctcacggtccgtgcctctgacctgggcaccccaataccgctgtccacgctgggcaccgtcacagtctcggtggtgggcctagaagactacctgcccgtgttcctgaacaccgagcacagcgtgcaggtgcccgaggacgccccacctggcacggaggtgctgcagctggccaccctcactcgcccgggcgcagagaagaccggctaccgcgtggtcagcgggaacgagcaaggcaggttccgcctggatgctcgcacagggatcctgtatgtcaacgcaagcctggactttgagacaagccccaagtacttcctgtccattgagtgcagccggaagagctcctcttccctcagtgacgtgaccacagtcatggtcaacatcactgatgtcaatgaacaccggccccaattcccccaagatccatatagcacaagggtcttagagaatgcccttgtgggtgacgtcatcctcacggtatcagcgactgatgaagatggacccctaaatagtgacattacctatagcctcataggagggaaccagcttgggcacttcaccattcaccccaaaaagggggagctacaggtggccaaggccctggaccgggaacaggcctctagttattccctgaagctccgagccacagacagtgggcagcctccactgcatgaggacacagacatcgctatccaagtggctgatgtcaatgataacccaccgagattcttccagctcaactacagcaccactgtccaggagaactcccccattggcagcaaagtcctgcagctgatcctgagtgacccagattctccagagaatggccccccctactcgtttcgaatcaccaaggggaacaacggctctgccttccgagtgaccccggatggatggctggtgactgctgagggcctaagcaggagggctcaggaatggtatcagcttcagatccaggcgtcagacagtggcatccctcccctctcgtctttgacgtctgtccgtgtccatgtcacagagcagagccactatgcaccttctgctctcccactggagatcttcatcactgttggagaggatgagttccagggtggcatggtgggtaagatccatgccacagaccgagacccccaggacacgctgacctatagcctggcagaagaggagaccctgggcaggcacttctcagtgggtgcgcctgatggcaagattatcgccgcccagggcctgcctcgtggccactactcgttcaacgtcacggtcagcgatgggaccttcaccacgactgctggggtccatgtgtacgtgtggcatgtggggcaggaggctctgcagcaggccatgtggatgggcttctaccagctcacccccgaggagctggtgagtgaccactggcggaacctgcagaggttcctcagccataagctggacatcaaacgggctaacattcacttggccagcctccagcctgcagaggccgtggctggtgtggatgtgctcctggtctttgaggggcattctggaaccttctacgagtttcaggagctagcatccatcatcactcactcagccaaggagatggagcattcagtgggggttcagatgcggtcagctatgcccatggtgccctgccaggggccaacctgccagggtcaaatctgccataacacagtgcatctggaccccaaggttgggcccacgtacagcaccgccaggctcagcatcctaaccccgcggcaccacctgcagaggagctgctcctgcaatggtactgctacaaggttcagtggtcagagctatgtgcggtacagggccccagcggctcggaactggcacatccatttctatctgaaaacactccagccacaggccattcttctattcaccaatgaaacagcgtccgtctccctgaagctggccagtggagtgccccagctggaataccactgtctgggtggtttctatggaaacctttcctcccagcgccatgtgaatgaccacgagtggcactccatcctggtggaggagatggacgcttccattcgcctgatggttgacagcatgggcaacacctcccttgtggtcccagagaactgccgtggtctgaggcccgaaaggcacctcttgctgggcggcctcattctgttgcattcttcctcgaatgtctcccagggctttgaaggctgcctggatgctgtcgtggtcaacgaagaggctctagatctgctggcccctggcaagacggtggcaggcttgctggagacacaagccctcacccagtgctgcctccacagtgactactgcagccagaacacatgcctcaatggtgggaagtgctcatggacccatggggcaggctatgtctgcaaatgtcccccacagttctctgggaagcactgtgaacaaggaagggagaactgtacttttgcaccctgcctggaaggtggaacttgcatcctctcccccaaaggagcttcctgtaactgccctcatccttacacaggagacaggtgtgaaatggaggcgaggggttgttcagaaggacactgcctagtcactcccgagatccaaaggggggactgggggcagcaggagttactgatcatcacagtggccgtggcgttcattatcataagcactgtcgggcttctcttctactgccgccgttgcaagtctcacaagcctgtggccatggaggacccagacctcctggccaggagtgttggtgttgacacccaagccatgcctgccatcgagctcaacccattgagtgccagctcctgcaacaacctcaaccaaccggaacccagcaaggcctctgttccaaatgaactcgtcacatttggacccaattctaagcaacggccagtggtctgcagtgtgccccccagactcccgccagctgcggtcccttcccactctgacaatgagcctgtcattaagagaacctggtccagcgaggagatggtgtaccctggcggagccatggtctggccccctacttactccaggaacgaacgctgggaatacccccactccgaagtgactcagggccctctgccgccctcggctcaccgccactcaaccccagtcgtgatgccagagcctaatggcctctatgggggcttccccttccccctggagatggaaaacaagcgggcacctctcccaccccgttacagcaaccagaacctggaagatctgatgccctctcggccccctagtccccgggagcgcctggttgccccctgtctcaatgagtacacggccatcagctactaccactcgcagttccggcagggagggggagggccctgcctggcagacgggggctacaagggggtgggtatgcgcctcagccgagctgggccctcttatgctgtctgtgaggtggagggggcacctcttgcaggccagggccagccccgggtgccccccaactatgagggctctgacatggtggagagtgattatggcagctgtgaggaggtcatgttctagcttcccattcccagagcaaggcaggcgggaggccaaggactggacttggcttatttcttcctgtctcgtagggggtgagttgagtgtggctgggagagtgggagggaagccctcagcccaggctgttgtcccttgaaatgtgctcttccaatcccccacctagtccctgagggtggagggaagctgaggatagagctccagaaacagcactagggtcccaggagaggggcatttctagagcagtgaccctggaaaaccaggaacaattgactcccggggtgggcgagagacaggagggctccctgatctgccggctctcagtccccggggcagagcctgattgactgtgctggctcaacttcaccaagatgcattctcatacctgcccacagctccattttggaggcaggcaggttggtgcctgacagacaaccactacgcgggccgtacagaggagctctagagggctgcgtggcatcctcctaggggctgagaggtgagcagcaggggagcgggcacagtcccctctgcccctgcctcagtcgagcactcactgtgtctttgtcaagtgtctgctccacgtcaggcactgtgctttgcaccggggagaaaatggtgatggagggcaacaaggactccgaggagcaccaccaggcctcgggccccagaggtcccactcctcagcctacacgcagaggaacgggcccacctcagagtcacaccactggctgccagtcagggcctgccaggagtctacacagctctgaaccttctttgttaaagaattcagacctcatggaactctgggttcttcatcccaagtttcccaggcacttttggccaaaggaaggaaggaactaattcttcattttaaaaattcttaggcactttttgaccttgctgtctggatgagtttcctcaatgggatttttcttccctagacacaaggaagtctgaactcctatttagggccggttggaagcagggagctggaccgcagtgtccaggctggacacctgccattgcctcctctccattgcagacgcctgcccatcaagtattacctgcggcgactcaaccctatgcatggagggtcaatgtgggcacatgtctacacatgtgggtgcccatggatagtacgtgtgtacacatgtgtagagtgtatgtagccaggagtggtggggaccagaagcctctgtggcctttggtgacctcaccactccctcccacccagtccctccctctggtccactgccttttcatatgtgttgtttctggagacagaagtcaaaaggaagagcagtggagccttgcccacagggctgctgcttcatgcgagagggagatgtgtgggcgagagccaatttgtgtgagtggtttgtggctgtgtgtgtgactgtgagtgtgagtgacagatacatagtttcattggtcattttttttttaacaataaagtatctttttttactgt

SEQ ID NO: 10463 - DNA, 19126 bp, Homo sapiens
  source 1..19126: mol_type = unassigned DNA
gatggaagtatgatgtgatggatataattatgggacactgtgtgggcacacggcctcctgcttgttgcctcatcctcctgcttttcaagcttttggccactgtctcccaggggctgccagggactggacccctgggcttccacttcacacattccatttataatgctaccgtgtatgagaactcagcagcaaggacctacgtcaacagccagagtagaatgggcatcaccttaatagatctatcctgggatatcaaatacagaatagtgtccggagacgaggaaggctttttcaaagcagaggaagtcatcattgcagatttctgttttctcagaataagaactaaaggtggcaattctgccatattaaatagggaaatccaggataattatttattgatagtaaaaggttctgtcagaggagaggatttggaagcatggaccaaagtgaatatacaggttttagatatgaatgatctgagacctttgttttcacccacaacatactctgttaccatagcagaaagcacacctctaaggactagtgttgcccaggtgactgcaacagacgcagatattggttccaatggagaattctactactactttaaaaataaagttgatctcttttcagttcaccccacgagtggtgtcatctccttaagtggtcgattaaattatgatgaaaagaataggtatgatctggaaattttggctgtggaccggggaatgaaactgtatgggaacaatggagtgagcagtactgcaaagctttatgttcacattgagcgcataaatgaacatgccccaacaatccatgtagtcactcatgttcctttctcgttggaaaaagagccaacatatgcagtggtgacagttgatgacttagatgatggagcgaatggagagatcgaatctgtttccattgtggctggggatcctttagatcagttcttcctggctaaggaaggaaagtggttgaatgagtacaagattaaggagaggaagcagattgactgggagagctttccctatggctacaatctcactcttcaagcaaaagacaagggatctcctcaaaaatgttcagcattaaaggcagtctacattggcaaccccacaagagacactgtccccattagatttgaaaaagaagtgtacgatgtgagcataagtgaattttcccctcctggtgtcgtggttgctatagtaaaattaagtcctgaaccgatagatgtggaatacaaattatctcctggtgaggatgcagtgtactttaaaattaatcctcggtcgggtctgattgttacagcacggccactgaatactgttaagaaggaggtttataaactggaggtgacaaacaaggaaggagatttaaaagcacaggtcaccatcagcatagaagatgcaaatgaccacaccccagaatttcagcaaccactgtatgatgcttatgtgaatgaaagtgtcccagtgggaaccagcgttctaacagtttcagcttctgataaggataaaggagaaaatgggtacatcacctatagtatcgctagcctgaatttgttaccatttgtcattaatcagtttacaggtgttattagcacaactgaagaactggattttgaatcctccccagaaatttacagattcattgttagagcctctgactggggttcaccataccgccatgaaagtgaggtcaatgtgactattcgaataggaaatgtcaacgacaacagccctctctttgaaaaagtggcttgccagggagttatttcatatgactttccagttggtggtcacatcacagcagtctcagcgatcgatatcgatgaacttgaacttgtaaagtacaaaatcatttctggaaatgaacttggcttcttttatttaaacccagattctggtgttttacagcttaaaaaatcactgacaaattctggcattaaaaatggcaattttgccctcagaattacagcaactgatggagagaatcttgcagaccccatgtctattaacatttcagtcctacatgggaaagtgtcttcaaagagcttcagttgcagagaaactcgtgtggctcaaaagctggcagagaaactactcattaaggcaaaagcaaatgggaaactgaatctggaagatggatttcttgacttttattcaattaatagacagggaccatattttgacaagtcttttccttctgatgtggctgtaaaggaggatctgccagttggtgctaacattctgaagattaaagcctatgatgccgactctggcttcaatggaaaagtgctatttacaatatcagatggaaatacggatagttgctttaatattgatatggagactgggcagcttaaagtccttatgcccatggatcgagaacacacagacctctatctccttaatatcaccatctatgacttaggtaatccacagaaatcgtcatggagactgctgaccatcaatgtggaggatgctaatgacaatagcccagtttttattcaagacagttactcagttaacattcttgaaagttcaggcattggtactgaaatcattcaagtggaagccagagacaaagacttaggttctaatggtgaagtgacttactcagtcttgacagatacacagcagtttgccatcaatagctcaactggaatcgtttatgtagccgaccagttggaccgggaatccaaagccaattattctttgaaaatagaagccagggacaaggcagagagtggtcagcagctgttttcagttgtcactcttaaagtttttttagatgatgtcaatgactgctccccagctttcattcccagtagctatagtgtgaaggttcttgaagatctccctgttggcactgtcattgcttggcttgagacccatgatccagatcttggactggggggtcaagtgcgctattctttggtcaatgactataatgggagatttgaaatagataaagcaagtggtgccatccgcttgagcaaagagcttgattatgagaaacagcagttctataaccttactgtgcgggccaaagacaaagggcggcctgtctctctgtcatctgtttcctttgttgaggtggaagtggtggatgtcaatgaaaacctccacactccctatttcccagactttgctgttgttggatctgtaaaggaaaactcacgcattggaacaagcgtgctgcaggtgactgctcgagatgaagactccggaagggatggagagatccagtactccatcagggatggcagtggtcttggaaggttcagtatagacgacgagagtggggtcatcactgccgcagacattcttgatcgggagacaatggggtcatactggctaacagtgtatgccacagacaggggcgttgttccactctactccaccattgaggtctacattgaagttgaagatgtgaatgacaatgccccgctgacctcagaacctatatattatcctgttgtcatggaaaactctccaaaggacgtatctgtcattcagatccaggctgaagatcctgactccagttccaatgaaaaactgacatacaggattacaagtggaaatcctcagaatttttttgccatcaatatcaaaacaggtctgattacaacaacttcaaggaaattggatcgagaacagcaggcagaacattttctggaggtgactgtgacagatggtggtccctctccaaaacagtcaaccatttgggtggtggttcaggttctagatgaaaatgacaacaagccccagttcccagagaaggtctaccagatcaagctgccagaacgtgaccgaaagaagagaggagaaccgatttacagggcttttgcatttgatagagatgagggccccaacgcagaaatctcctacagtattgtggatgggaatgatgacggaaagttctttattgaccctaaaactgggatggtttcttctagaaagcagtttacagcaggcagttatgacatcctaacgataaaggcagtggacaatgggcgcccacagaaatcctccacggcccgcctccacattgaatggattaagaaaccacccccttcacctataccattgaccttcgatgagccgttttataacttcacagtcatggaaagtgatagagtgactgaaattgtaggggtggtgtctgtgcagccagctaacacccctctgtggtttgacatagttggggggaattttgacagcgcttttgatgcagagaagggtgttgggacaattgtcatcgcaaaacctttggatgcagagcagaggtccatctataatatgagtgtggaagtcaccgatgggacaaatgttgctgttactcaggtatttatcaaagtgctggataataatgataatggcccagaattctctcagccgaattacgatgtgacaatttccgaggatgtgcttccagacacggagatcctgcagattgaagccacagatagagatgagaagcacaagctgagctacactgttcatagcagcatcgactccatcagcatgagaaaattccggattgaccctagcactggcgtgctctatactgccgagaggctggaccatgaggcccaggacaagcacattctcaacataatggtcagagatcaggagtttccttatcgaagaaacttggcccgagtcattgtgaatgtggaggatgctaatgatcacagtccttattttaccaacccactgtatgaagcgtctgtgtttgaatctgctgctctgggatcagctgttctgcaagtgacggctctggacaaagacaaaggagaaaatgcagaactcatatataccatagaagcagggaacactgggaacatgtttaagatcgaaccggtcctaggcatcatcaccatttgcaaagaaccagacatgacgacgatgggtcagtttgtcctatccatcaaagtcacagatcagggatccccgccaatgtctgctactgcaattgtgcgcatttccgtcaccatgtctgacaattctcaccccaagttcattcacaaagactaccaagcagaagtaaatgaaaatgttgacattggaacatcagtcattctaatctctgccatcagtcaatctaccctcatttatgaagtcaaagatggagacattaatgggatctttaccataaatccatattctggagtcatcaccactcagaaggccctggattatgagcgcacatcctcttatcaactcatcattcaggccaccaatatggcaggaatggcttccaatgctacagtcaatattcagattgttgatgaaaatgataatgccccagtttttctcttttctcaatactcaggcagcctaagtgaggctgccccaattaatagcattgtcaggagcttggataacagcccactggtgattcgagccacagatgctgacagcaaccggaatgctctgcttgtgtatcagattgtggagtcaacagcaaaaaagtttttcacggtggactccagtacaggtgcaatcagaacaattgccaacctggaccatgaaaccattgcccatttccattttcatgtgcatgtgagagacagtggtagcccccaactgactgcagagagtcccgttgaagtcaacattgaggtgacagatgtgaatgataacccacctgtttttactcaggctgtgtttgagactatcttacttctacctacctatgttggagtggaggttctgaaagttagtgccacagatcctgactctgaggtaccccctgaactgacatacagcctaatggaaggcagtttggatcattttttaattgactcaaacagtggagtacttaccataaaaaacaacaacctctccaaggatcactacatgctgatagttaaggtgtctgatggaaagttctacagtacctccatggtcaccatcatggttaaagaagccatggacagcggcctccactttacacaaagcttctattccacctcaatctcagagaacaacactaacataaccaaagttgctattgtcaatgcagttggaaatcgccttaatgagcccttaaaatacagcatcttaaacccaggaaataagttcaagataaaatctacctcaggggtcattcagacgactggagtcccctttgaccgtgaagaacaagagttatatgagctggtggtagaagccagccgtgagctggaccatctgcgtgtggccagagtggtggtcagggttaacattgaagacataaatgacaattctccagtctttgtgggcctcccatactatgctgctgttcaagtggatgcggaacccgggactctgatttatcaggtgacagccattgacaaagataaaggtccaaatggagaagtgacctatgtcctgcaggatgactatggccactttgaaattaaccctaattcagggaatgttattttaaaggaagcattcaactctgacttgtccaacattgagtatggagtcaccatcctagccaaggatggcggaaaaccttctttgtctacatctgtggagcttcccatcactattgtcaacaaagcaatgcctgtgtttgataagcccttttatacagcatctgtcaatgaagacatcagaatgaacacacccatcctaagcatcaatgccaccagtccagaaggccaaggcatcatatatatcattatcgatggggacccttttaaacagtttaacattgactttgacactggggtcctgaaagttgttagccctttggattatgaagttacatctgcttacaagctgacaataagagccagcgacgcccttactggtgctagggctgaagtcactgttgacttgctagttaatgatgtaaatgacaacccccctattttcgatcagcctacatacaatacaacactatcagaagcatctcttattgggacacctgttttacaagttgtctctattgatgcagactcagaaaacaataaaatggtacattatcagattgtccaggatacctacaatagcacagattattttcacatagatagctcaagtggcttaatcctgacagcacgaatgctggaccatgagttagtacaacactgcactttgaaagtcagatcaatagatagtggcttcccatcactgagcagtgaggttctcgttcatatctacatctctgatgtaaatgacaaccctccagtttttaatcagctcatttatgagtcatatgtgagtgaattagccccccggggccattttgtaacctgtgtacaagcctctgatgcagacagctctgattttgaccggttggaatatagcattttatctgggaatgaccggacgagctttctgatggacagcaagagtggagttatcacattgtccaaccatcggaagcagcggatggagcctctgtacagtctcaatgtgtctgtctctgatgggttgttcaccagcactgcacaggtgcatattagggtacttggggctaacttgtacagccctgccttttcacaaagcacatacgtagctgaggtgagagagaacgtggctgcaggaacaaaggtaattcatgttcgagccacagatggtgatccagggacttatgggcagatcagctatgccatcatcaatgactttgccaaggatcgattcctcatagacagcaatgggcaggtcatcaccacagaaaggctagaccgggaaaaccctctagaaggggatgttagtatttttgtgagggcccttgatggtggagggagaacaactttctgcactgtgagagtgattgttgtggatgaaaatgacaatgctccccagttcatgacagtggaatatagagccagtgtcagggcagatgttggaaggggccacttggtcactcaagttcaagccatagatcccgatgatggagcaaattcaaggattacttattccctctatagcgaggcctctgtttcagtggccgacctcctggaaatcgatcctgacaatggctggatggtcacaaagggtaattttaaccagctgaaaaatacagtgctttcgttctttgtcaaagcagtagatgggggcatcccagtaaagcactccctcattcctgtctatatccacgtcttgccccctgaaacgttcttgccatcattcacccagtctcagtattcctttaccattgcagaagatacagccattgggagtacagtggacaccctgaggattttgcccagtcagaatgtctggttcagcacagttaatggggaacggccagaaaataacaaagggggcatattcgtcatagaacaggaaacaggcactattaagcttgacaaacgccttgaccgtgaaaccagcccagctttccactttaaagtagcagccactatacccctggacaaagtagacattgtgtttactgtggatgtagatatcaaggtattggatttgaatgacaacaagccagtctttgaaacttcaagctatgacaccattataatggaagggatgcctgttggcaccaaactcacacaagtgagagctattgatatggactggggagccaatggacaagtcacttactccctccactcggattcccagcccgaaaaggtaatggaagcattcaatattgacagcaacacgggctggatcagtaccttgaaggacctagatcacgagacagaccccacattcaccttctctgtggtggcctctgaccttggagaggcattctctctttcctccacggccttggtctctgtcagagtgacagatataaatgacaatgcaccagtcttcgcgcaggaagtgtaccgagggaatgtgaaggagagcgacccaccgggcgaggtggtagccgtcctcagcacctgggacagagacacatccgacgttaatcgccaagtgagctaccatattacaggaggaaaccctcgaggaaggtttgctctgggcctggtgcaaagtgagtggaaggtctatgtgaagaggcctctagacagagaagaacaggacatttactttctcaatatcactgccactgatgggctttttgtcacacaggccatggtggaagtgagcgtcagtgatgtgaatgacaatagcccagtgtgtgatcaggttgcatatacagcattacttcctgaagacattccatcaaataaaatcatcctgaaagtcagtgcaaaggatgctgatattggatccaatggatatatacgatactcactctatggatctggaaacagtgaattttttctagatccagaaagtggcgagttaaaaaccttggctctgttggaccgggagaggatccccgtgtacagcctgatggccaaggccactgacgggggtggcaggttctgccagtccaacatccacctaatcctggaggatgtgaatgataacccccctgtgttttcttctgaccactacaacacctgtgtctatgagaacacagccaccaaggctctgttgaccagagttcaagccgtggaccccgacattggcatcaataggaaggtcgtgtactccctggcagactcagctggtggggtcttctccattgacagctcatctggcatcatcatcctggagcagccactggaccgtgagcagcagtcttcgtacaacatcagcgtgcgggccactgaccagagtcctggacagtccctgtcctctctcactactgtcaccatcaccgttctggacattaatgacaacccccctgtgtttgagaggagggactacctggtgacggtgcctgaggacacctcccctggcacccaagtccttgctgtttttgccaccagcaaagatattggcacaaatgctgagatcacttatctcatccggtctgggaacgaacaagggaaatttaagatcaaccccaagacagggggtatttctgtctctgaagtcctggactatgaattatgcaaaaggttttacctggtagtggaagccaaagatgggggcaccccagctctcagcgctgtggccactgtcaacatcaacctcacagatgttaatgacaaccctcccaagttcagccaagacgtctacagtgcggttatcagtgaagacgccttggtgggagactctgtcattttgctaatagcagaagatgtagacagccagcccaacggacagattcatttttccattgtgaatggagatcgggacaatgaatttactgtagatcctgtcttgggacttgtgaaagttaagaagaaattggaccgggaacgggtgtctggatactctctgcttgtccaggccgtagacagtggcattcctgcaatgtcatcaactgcaactgtcaacattgatatttctgatgtgaatgacaacagcccggtgtttacacctgccaactatactgctgtgattcaggaaaataagccagtgggcaccagcatcttgcagctggtggtgacagacagagactcctttcacaatgggcctcccttttcattctctattttgtcgggaaatgaagaggaggagtttgtgttggaccctcatgggatcttgcggtcggctgtggtcttccagcacacagagtctctggaatacgtgttgtgtgtccaggcaaaggattcaggcaaaccccagcaagtttctcacacttacatccgcgtgcgagtcattgaggaaagcacccacaagcccacagccattcccctggaaattttcattgtcaccatggaggatgactttcctggtggggtcattgggaagattcatgccacagatcaagacatgtatgatgtgctcacatttgccctgaaatcggagcagaaaagcttatttaaagtgaacagtcacgatgggaaaatcatcgccctgggaggcctggacagcggcaagtatgtcctgaatgtgtctgtgagtgatggtcgcttccaggtacccattgatgtggtcgtgcatgtggagcagttggtgcatgagatgctgcagaacactgtcaccatccgctttgaaaatgtgtcccctgaggacttcgtggggctgcacatgcatgggttccggcgcaccctgcggaatgcagtcctcacccagaagcaggacagcctgcgcatcatcagcatccagcccgtggcaggcaccaaccaactggacatgctgtttgcggtggagatgcacagcagcgagttctacaagccagcctacctgatccagaagctgtccaatgctagaagacacctggagaatatcatgcgcatctcagccatcttggagaagaactgctcagggctggactgtcaggaacagcattgtgagcaaggcttgtcactcgattcccacgcgctcatgacctacagcacggctcgcatcagctttgtgtgtccgcgtttctacaggaacgtgcgttgcacctgcaatggaggactgtgtccggggtccaacgatccttgtgtggagaagccgtgtccaggggacatgcagtgtgtcagttatgaagccagcaggagaccgttcctctgccagtgtccaccagggaagctcggagagtgctcagggcacacttctctcagctttgctggaaacagttacatcaaatatcggctttctgaaaatagcaaagaagaggatttcaaactagctctgcgtcttcgaacactgcaaagcaatgggattataatgtacaccagagcaaatccctgcataattctgaagattgtggatggcaagctgtggttccagctggactgcggcagcggccctggaatcttgggcatctcgggccgtgctgtcaacgacgggagctggcactcggtcttcctggagctcaaccgcaatttcacgagcctgtccctggatgacagctacgtggagcggcgccgggcgcccctctacttccagacgctgagcactgagagtagcatctacttcggcgccctggtgcaagcggataacatccgcagcctgactgacacgcgggtcacgcaggtgctcagcggcttccagggctgcctggactcggtgatactgaataacaatgagctgccgctgcagaacaagcgcagcagcttcgcggaggtggtgggcctgacggagctgaagctgggctgcgtgctctatcccgacgcctgcaagcgcagcccgtgccagcacgggggcagctgcactggcctgccatcggggggctatcagtgtacctgtctctcacagtttacggggagaaactgtgaatctgagattacagcctgcttcccaaacccctgccggaatggaggatcctgcgatccaataggaaacactttcatctgcaattgtaaagctgggctcactggagtcacgtgtgaggaggacatcaatgagtgcgaacgagaggagtgtgagaacggaggctcctgcgtgaacgtgttcggctccttcctctgcaactgcacgccgggctacgtgggccagtactgcgggctgcgccccgtggtggtacccaatatccaggctggccactcctacgtggggaaggaggagctcatcggcatcgccgtggtcctcttcgtcatcttcatcctggtggttctcttcatagtcttccgcaagaaggtcttccgcaagaactactcccgcaacaacatcacgctagtgcaggacccggccaccgccgccctgcttaacaagagcaatggcatcccgttccggaacctgcgcggcagtggggacggccgcaacgtctaccaggaggtggggcccccgcaggtccccgtgcgccccatggcctacacaccctgcttccagagtgactccaggagcaacctggataagatcgtggacgggctgggaggcgagcaccaggaaatgaccacgtttcaccctgagtcgccccgcatcctgacagcccggcggggcgtggtcgtgtgcagtgtggcccccaacctccccgccgtgtcaccctgccgctccgactgcgactccatccggaagaatggctgggacgcgggaactgagaacaaaggggttgatgacccgggagaagtgacctgctttgcaggtagtaataaaggcagcaactctgaagttcagtccctcagctccttccagtcagattctggtgacgacaatgcctccatagtgactgtcattcagcttgtcaacaatgtagttgacactatagagaatgaagtgtctgtcatggaccaaggacagaactacaaccgagcctatcactgggacacctctgattggatgccaggggcccgcctgtcggacatagaggaagtgcccaactatgagaaccaggatggagggtctgcacaccaggggagcacacgggagctggagagcgattactacctgggtggttatgacattgacagtgaatacccaccccctcatgaagaggagttcttgagtcaggaccagctgcctcctcctctcccggaggacttcccagaccaatatgaggccctgccaccctcccagcctgtctccctggccagcacactgagcccagactgcaggagaaggccccagtttcatcctagccagtatctccctcctcacccattccccaacgaaacggatttggtgggcccgcctgccagctgtgaatttagtacttttgctgtgagcatgaaccagggcacagagcccacaggcccagcagacagcgtgtctctgtccttgcacaattccagaggcacctcatcctcggatgtgtctgccaactgcggctttgacgattccgaagtagccatgagtgactacgagagcgtgggagagctcagcctcgccagccttcacattccctttgtggagactcagcatcagactcaagtgtagacatcacatcttgggtacttcaccctgtttgttacagaaaagtggaagcagattggctgggcttctgtcccagtggagcattgtctgtggaatgagaagggaatactgtatttttccactagaaacttcttcacaagtcatactgtcccaacaagcaagcttgattccagttgggtgaaaatgaaaggctcagaaattgtttttgagaggtgactggtaatccttgatgtaggtacctatgttcacagctaaaaatgcaaagagggaaaaattatttcacccactaagttatacagccagtcttgtatggctttgtgcagtattgtgccctggaaagtgttacagcatcagtccttgcagtattaaaaactggcaacaatcaaagaggcattgttgcatgtaattttgagccaatgaaatgaaaatagtagtaatgattgttggaaaagttagtctcttaggcgaaagagaagagaaacaaatattattaaacaaaccagaaaatgggctgaagccttttaaatcaactctatttttttgataagctgcccaattttcagctataaaattaggcttgaataacatgtttagtatgctcagttatttctgtttgtttgtgttaagcatccaatctaatatagttgggttttatgatcttcaagaaaggtatcaatgaagagcaacatgaggctttttgggttccatttggtgggtgggggaggaagttaaagttgtttgaacattagaaagaatgtgattatctggttggttttgtgttttctggtaaatattccagttggtaaatctaacattgctacagaagttggctttgttcatatagcttctctacaattagatatttttagaagtttaagcaaaactcacaaattcaggggggaaaaaagaaaaaacgataccttcaaagtttgcggcctagataatcacaattcttcataatgcagaggaaaggtgtctgttattctaaatcggtagcatcaccattataaatacaattatgttaagaaaagaggaaagtagactagttattgtgtataaattataatagtgtgtgtgtgtctgggcctatgtacaaatatgtgcttgcactcagtaaggctgctcttgaggaaagctaatgtgaaggttttgggaaatggaccatgttgaaaattctgccggcgagcatggcatacctttcaatttctctgatctctatggtgttagagaaacatcaaatgccatattttactctggttcagttaactttattttggtactgccaataaagcaaaattgtgcttttttttttttttctcaagacagagtcttgctctgtcacccaggctagagtgcaatggcatgatctcagctcactgcaatctccacctcctgggttcaagcgattctcctgcctcagcctcccaggttgctggggttacaggtgtgtgccaccacgcctggctaattttttgtatttttagtagagatggggtttcaccatgttggccaggctggtctcaaactcctgacctcgtaatccacctgccgtggcctcccaaagtgctgggattacaggcatgagccaccgtgcccagcccaaaactgtgctttttaaaaacagtattttgttataattttccagaacttacctctgttttaaaagtgtgtaatgtttgattacaccctgggattcccttctcatctgtgggctttggccatgatttccaaaattaacaggagaatcattccactggaaatataacaatccagtcctcaaaactgaaagttgacaggttgagggactttccttttttgcttcaatcagattacggccgcctgtgcagtggccatggtaaatatatgcatatttgcactatctgcttaatgagcaaatctgtgtccacagtttctgatgacatatggcattggtgtgtaaattgtactgtccctagtctgtgcattattcactcagacatatttttagttatttcaattgcgtttaatccacttcttttttatgagtcagtgtttctgaatgtttatgcaaaaaaaaaaatcctttttcattcccaaactttctaagtaagtggatacactacacttcacaagttttccagcctttctcttcctgtctcttggtcagacctactcatggaggtattatccacactgtgatcttgaaataaatgaatttcactaaggctgctttcgagaacaaagtctttggtatttttcttatgtaagaagcacatttgcaagaatcatggaaaaaaatgacaaactaatggcctagaatagagtgactgctacactttaagtaatgcaatgacataaaaaccatcaaagtaaaaccaacatgtcatttcctgcccccaggaaatattagaatgagattaatgctgatgagtccctactgcttacacagcatctctttgagggagaatgcctgactgacacagtaatgaaagaataaatagatcctaatgcagtcatgaagccactgaagaaaattgtgcccaccctttgctgtgacctatataaaatatctctttctttgggatatcatcccctgattttctgcagaatagctctgcagctaaatatataccaggcaagcatgtattgtgttttgatttattatctttaaacacatgatatctcttcactttttggaaagttagatttctctgtagattatgaaatgctttgcagtcaggccaagatgctactaggtggggatgatcactaattcaaaaaagctggaagaatcctatttgctagtccaaactccttattttatcaaagaggaaacatacccagagtgggaaagagacttgcccaagcccacagaggaagttaattcgcttaacaaggagtagaacccatccatctagccaatattctttttacatcatattgttcacccctacactgccttgagcatgggagtcacctggttctgatggaccctctgacttccaccattccttctttggaatatgctataaaagaaaattcatggagaatatttttctgaaagcctcatgatcttatgtttccttgcagtccccctagggagaggggttatagaattcatacatttctgtagacattcatcgaaatgctgcttttgccaaatgaatgtttgtataatagggatgaaatgataattacagagttcagctcagaccagtcatcagttgtagtgaaactttgattatactgttacctactggttgcatttttggttttggttttgcatttttttcttcccacaaacactggctactctttgtcctaccccctccaccatgatgaaccatgtggaaactatttaaatcaattaatgtctttctcatttttcgaacatgtatgtgccacctcctggaagccatttcccataatctgttgtaggcactttactagtattgcacacattctggttaggttgagaatagctagactcttggtgctcgtcatatagtaagcaagaacttgggagtaataaaaggtgaataaaatgcatgcttcatttattccctttcctctatgaatattttgctgctgcattctagtctatgccagctttccatgtacccttggcctgcctattcatgaaatgccatataaaagacttaggaacatgagtaggtggtccatgctttgaggttcatccaattagggaataaatgtgaaaggctggaaagggaactagtttctgggatttgcctggaacttcccttggacattactagcacattctggaaaaaaagcaagttgaacatatctaccatcagtcctctcctacttacttcccaccccaccctatccactacccccactgatgctatgtttgcatcatcaaagtcaggggaattgagaaaagagattatcaaaataaattattaaaatccagaaaacagttttatgtgaagtaattcaggaagatctagtgttcattttgcatggattgtccagataattggctcttcactccgctgccttcccagtgcacaggtattgctaaagtggttaggctttaatgttttatgtttttagtttcaaactatgggaaatggagatttgaagaggcatttattccttgtcatcattttgtgtgctctgtgagaaggtggttatatgtttttgctggtttgtgtcccacagtgttcaactgcacattattctgatgaaaatccacaatgtctttgagcttctggttgtgtaatgctggggtttaaagtcaccatttgtgggtttggcatcaattaatatttagccagctggctaagagataggaaaagaatatgatatttctttccttatgtaataatgaaaagcaataattacaagtaggtaataatacacaaaggccataattagtctcttctagtgtttagaatgcacttgagaatcgtagagtcatttggagcgtgtttggaccaattagtatgtactgtagtacccttctggcaaacaaataactgaattgctactatttaacaatcttatgagcccacactactgcattttgggagtggcaaatgtgtttggaaatggaagcagttctttttaagcactgtatcagagagattgtcttgtacgtttgcctgttgcaaacaggctggtttgtaaaagatgtatgttttggtgtttgaaatgtttataaaattgtatataaatggtttcaattttccaggcttttgtagatactatatttgatgcctatcaggatgctttaatttggggggtcgaatataattgtaagtcatccacgctgttggtctgcaaacttttgaggtaactacacacacacacacacacacaaggattttagatttgaaaatgatgttttttactcatttcaaaatgtactgtaacctttctttggttcttactgttttcatttaactttctctgttttcaagaaaaattgtctttattgacatttgtaaaaaagaatgtgttttgcccagttattaagtattttatttttatgcaatttcagaatcacaatgaggtatgccatttcttcatatacatgcacattcacctcaacttgcacacacatcacacaccaaaccttatgcaaaggggaaagctaacacttagagtggattttgtcccttaaggaaatggattgttcctgcatatattgctggtggcagtattcagtcttgtgttctttttctaaaaaaaaagaaaagaaaagaaaaaaaaaacaaaagcaaacaaaaaaaaagacagccaaaaaaaagaaacaacaacaacaaaaaaaaacacaacagtgtacaggtttgtaactgccaaaatttgatggttaaaacaagttttcaagt

SEQ ID NO: 10464 - DNA, 19030 bp, Homo sapiens
  source 1..19030: mol_type = unassigned DNA
gatggaagtatgatgtgatggatataattatgggacactgtgtgggcacacggcctcctgcttgttgcctcatcctcctgcttttcaagcttttggccactgtctcccaggggctgccagggactggacccctgggcttccacttcacacattccatttataatgctaccgtgtatgagaactcagcagcaaggacctacgtcaacagccagagtagaatgggcatcaccttaatagatctatcctgggatatcaaatacagaatagtgtccggagacgaggaaggctttttcaaagcagaggaagtcatcattgcagatttctgttttctcagaataagaactaaaggtggcaattctgccatattaaatagggaaatccaggataattatttattgatagtaaaaggttctgtcagaggagaggatttggaagcatggaccaaagtgaatatacaggttttagatatgaatgatctgagacctttgttttcacccacaacatactctgttaccatagcagaaagcacacctctaaggactagtgttgcccaggtgactgcaacagacgcagatattggttccaatggagaattctactactactttaaaaataaagttgatctcttttcagttcaccccacgagtggtgtcatctccttaagtggtcgattaaattatgatgaaaagaataggtatgatctggaaattttggctgtggaccggggaatgaaactgtatgggaacaatggagtgagcagtactgcaaagctttatgttcacattgagcgcataaatgaacatgccccaacaatccatgtagtcactcatgttcctttctcgttggaaaaagagccaacatatgcagtggtgacagttgatgacttagatgatggagcgaatggagagatcgaatctgtttccattgtggctggggatcctttagatcagttcttcctggctaaggaaggaaagtggttgaatgagtacaagattaaggagaggaagcagattgactgggagagctttccctatggctacaatctcactcttcaagcaaaagacaagggatctcctcaaaaatgttcagcattaaaggcagtctacattggcaaccccacaagagacactgtccccattagatttgaaaaagaagtgtacgatgtgagcataagtgaattttcccctcctggtgtcgtggttgctatagtaaaattaagtcctgaaccgatagatgtggaatacaaattatctcctggtgaggatgcagtgtactttaaaattaatcctcggtcgggtctgattgttacagcacggccactgaatactgttaagaaggaggtttataaactggaggtgacaaacaaggaaggagatttaaaagcacaggtcaccatcagcatagaagatgcaaatgaccacaccccagaatttcagcaaccactgtatgatgcttatgtgaatgaaagtgtcccagtgggaaccagcgttctaacagtttcagcttctgataaggataaaggagaaaatgggtacatcacctatagtatcgctagcctgaatttgttaccatttgtcattaatcagtttacaggtgttattagcacaactgaagaactggattttgaatcctccccagaaatttacagattcattgttagagcctctgactggggttcaccataccgccatgaaagtgaggtcaatgtgactattcgaataggaaatgtcaacgacaacagccctctctttgaaaaagtggcttgccagggagttatttcatatgactttccagttggtggtcacatcacagcagtctcagcgatcgatatcgatgaacttgaacttgtaaagtacaaaatcatttctggaaatgaacttggcttcttttatttaaacccagattctggtgttttacagcttaaaaaatcactgacaaattctggcattaaaaatggcaattttgccctcagaattacagcaactgatggagagaatcttgcagaccccatgtctattaacatttcagtcctacatgggaaagtgtcttcaaagagcttcagttgcagagaaactcgtgtggctcaaaagctggcagagaaactactcattaaggcaaaagcaaatgggaaactgaatctggaagatggatttcttgacttttattcaattaatagacagggaccatattttgacaagtcttttccttctgatgtggctgtaaaggaggatctgccagttggtgctaacattctgaagattaaagcctatgatgccgactctggcttcaatggaaaagtgctatttacaatatcagatggaaatacggatagttgctttaatattgatatggagactgggcagcttaaagtccttatgcccatggatcgagaacacacagacctctatctccttaatatcaccatctatgacttaggtaatccacagaaatcgtcatggagactgctgaccatcaatgtggaggatgctaatgacaatagcccagtttttattcaagacagttactcagttaacattcttgaaagttcaggcattggtactgaaatcattcaagtggaagccagagacaaagacttaggttctaatggtgaagtgacttactcagtcttgacagatacacagcagtttgccatcaatagctcaactggaatcgtttatgtagccgaccagttggaccgggaatccaaagccaattattctttgaaaatagaagccagggacaaggcagagagtggtcagcagctgttttcagttgtcactcttaaagtttttttagatgatgtcaatgactgctccccagctttcattcccagtagctatagtgtgaaggttcttgaagatctccctgttggcactgtcattgcttggcttgagacccatgatccagatcttggactggggggtcaagtgcgctattctttggtcaatgactataatgggagatttgaaatagataaagcaagtggtgccatccgcttgagcaaagagcttgattatgagaaacagcagttctataaccttactgtgcgggccaaagacaaagggcggcctgtctctctgtcatctgtttcctttgttgaggtggaagtggtggatgtcaatgaaaacctccacactccctatttcccagactttgctgttgttggatctgtaaaggaaaactcacgcattggaacaagcgtgctgcaggtgactgctcgagatgaagactccggaagggatggagagatccagtactccatcagggatggcagtggtcttggaaggttcagtatagacgacgagagtggggtcatcactgccgcagacattcttgatcgggagacaatggggtcatactggctaacagtgtatgccacagacaggggcgttgttccactctactccaccattgaggtctacattgaagttgaagatgtgaatgacaatgccccgctgacctcagaacctatatattatcctgttgtcatggaaaactctccaaaggacgtatctgtcattcagatccaggctgaagatcctgactccagttccaatgaaaaactgacatacaggattacaagtggaaatcctcagaatttttttgccatcaatatcaaaacaggtctgattacaacaacttcaaggaaattggatcgagaacagcaggcagaacattttctggaggtgactgtgacagatggtggtccctctccaaaacagtcaaccatttgggtggtggttcaggttctagatgaaaatgacaacaagccccagttcccagagaaggtctaccagatcaagctgccagaacgtgaccgaaagaagagaggagaaccgatttacagggcttttgcatttgatagagatgagggccccaacgcagaaatctcctacagtattgtggatgggaatgatgacggaaagttctttattgaccctaaaactgggatggtttcttctagaaagcagtttacagcaggcagttatgacatcctaacgataaaggcagtggacaatgggcgcccacagaaatcctccacggcccgcctccacattgaatggattaagaaaccacccccttcacctataccattgaccttcgatgagccgttttataacttcacagtcatggaaagtgatagagtgactgaaattgtaggggtggtgtctgtgcagccagctaacacccctctgtggtttgacatagttggggggaattttgacagcgcttttgatgcagagaagggtgttgggacaattgtcatcgcaaaacctttggatgcagagcagaggtccatctataatatgagtgtggaagtcaccgatgggacaaatgttgctgttactcaggtatttatcaaagtgctggataataatgataatggcccagaattctctcagccgaattacgatgtgacaatttccgaggatgtgcttccagacacggagatcctgcagattgaagccacagatagagatgagaagcacaagctgagctacactgttcatagcagcatcgactccatcagcatgagaaaattccggattgaccctagcactggcgtgctctatactgccgagaggctggaccatgaggcccaggacaagcacattctcaacataatggtcagagatcaggagtttccttatcgaagaaacttggcccgagtcattgtgaatgtggaggatgctaatgatcacagtccttattttaccaacccactgtatgaagcgtctgtgtttgaatctgctgctctgggatcagctgttctgcaagtgacggctctggacaaagacaaaggagaaaatgcagaactcatatataccatagaagcagggaacactgggaacatgtttaagatcgaaccggtcctaggcatcatcaccatttgcaaagaaccagacatgacgacgatgggtcagtttgtcctatccatcaaagtcacagatcagggatccccgccaatgtctgctactgcaattgtgcgcatttccgtcaccatgtctgacaattctcaccccaagttcattcacaaagactaccaagcagaagtaaatgaaaatgttgacattggaacatcagtcattctaatctctgccatcagtcaatctaccctcatttatgaagtcaaagatggagacattaatgggatctttaccataaatccatattctggagtcatcaccactcagaaggccctggattatgagcgcacatcctcttatcaactcatcattcaggccaccaatatggcaggaatggcttccaatgctacagtcaatattcagattgttgatgaaaatgataatgccccagtttttctcttttctcaatactcaggcagcctaagtgaggctgccccaattaatagcattgtcaggagcttggataacagcccactggtgattcgagccacagatgctgacagcaaccggaatgctctgcttgtgtatcagattgtggagtcaacagcaaaaaagtttttcacggtggactccagtacaggtgcaatcagaacaattgccaacctggaccatgaaaccattgcccatttccattttcatgtgcatgtgagagacagtggtagcccccaactgactgcagagagtcccgttgaagtcaacattgaggtgacagatgtgaatgataacccacctgtttttactcaggctgtgtttgagactatcttacttctacctacctatgttggagtggaggttctgaaagttagtgccacagatcctgactctgaggtaccccctgaactgacatacagcctaatggaaggcagtttggatcattttttaattgactcaaacagtggagtacttaccataaaaaacaacaacctctccaaggatcactacatgctgatagttaaggtgtctgatggaaagttctacagtacctccatggtcaccatcatggttaaagaagccatggacagcggcctccactttacacaaagcttctattccacctcaatctcagagaacaacactaacataaccaaagttgctattgtcaatgcagttggaaatcgccttaatgagcccttaaaatacagcatcttaaacccaggaaataagttcaagataaaatctacctcaggggtcattcagacgactggagtcccctttgaccgtgaagaacaagagttatatgagctggtggtagaagccagccgtgagctggaccatctgcgtgtggccagagtggtggtcagggttaacattgaagacataaatgacaattctccagtctttgtgggcctcccatactatgctgctgttcaagtggatgcggaacccgggactctgatttatcaggtgacagccattgacaaagataaaggtccaaatggagaagtgacctatgtcctgcaggatgactatggccactttgaaattaaccctaattcagggaatgttattttaaaggaagcattcaactctgacttgtccaacattgagtatggagtcaccatcctagccaaggatggcggaaaaccttctttgtctacatctgtggagcttcccatcactattgtcaacaaagcaatgcctgtgtttgataagcccttttatacagcatctgtcaatgaagacatcagaatgaacacacccatcctaagcatcaatgccaccagtccagaaggccaaggcatcatatatatcattatcgatggggacccttttaaacagtttaacattgactttgacactggggtcctgaaagttgttagccctttggattatgaagttacatctgcttacaagctgacaataagagccagcgacgcccttactggtgctagggctgaagtcactgttgacttgctagttaatgatgtaaatgacaacccccctattttcgatcagcctacatacaatacaacactatcagaagcatctcttattgggacacctgttttacaagttgtctctattgatgcagactcagaaaacaataaaatggtacattatcagattgtccaggatacctacaatagcacagattattttcacatagatagctcaagtggcttaatcctgacagcacgaatgctggaccatgagttagtacaacactgcactttgaaagtcagatcaatagatagtggcttcccatcactgagcagtgaggttctcgttcatatctacatctctgatgtaaatgacaaccctccagtttttaatcagctcatttatgagtcatatgtgagtgaattagccccccggggccattttgtaacctgtgtacaagcctctgatgcagacagctctgattttgaccggttggaatatagcattttatctgggaatgaccggacgagctttctgatggacagcaagagtggagttatcacattgtccaaccatcggaagcagcggatggagcctctgtacagtctcaatgtgtctgtctctgatgggttgttcaccagcactgcacaggtgcatattagggtacttggggctaacttgtacagccctgccttttcacaaagcacatacgtagctgaggtgagagagaacgtggctgcaggaacaaaggtaattcatgttcgagccacagatggtgatccagggacttatgggcagatcagctatgccatcatcaatgactttgccaaggatcgattcctcatagacagcaatgggcaggtcatcaccacagaaaggctagaccgggaaaaccctctagaaggggatgttagtatttttgtgagggcccttgatggtggagggagaacaactttctgcactgtgagagtgattgttgtggatgaaaatgacaatgctccccagttcatgacagtggaatatagagccagtgtcagggcagatgttggaaggggccacttggtcactcaagttcaagccatagatcccgatgatggagcaaattcaaggattacttattccctctatagcgaggcctctgtttcagtggccgacctcctggaaatcgatcctgacaatggctggatggtcacaaagggtaattttaaccagctgaaaaatacagtgctttcgttctttgtcaaagcagtagatgggggcatcccagtaaagcactccctcattcctgtctatatccacgtcttgccccctgaaacgttcttgccatcattcacccagtctcagtattcctttaccattgcagaagatacagccattgggagtacagtggacaccctgaggattttgcccagtcagaatgtctggttcagcacagttaatggggaacggccagaaaataacaaagggggcatattcgtcatagaacaggaaacaggcactattaagcttgacaaacgccttgaccgtgaaaccagcccagctttccactttaaagtagcagccactatacccctggacaaagtagacattgtgtttactgtggatgtagatatcaaggtattggatttgaatgacaacaagccagtctttgaaacttcaagctatgacaccattataatggaagggatgcctgttggcaccaaactcacacaagtgagagctattgatatggactggggagccaatggacaagtcacttactccctccactcggattcccagcccgaaaaggtaatggaagcattcaatattgacagcaacacgggctggatcagtaccttgaaggacctagatcacgagacagaccccacattcaccttctctgtggtggcctctgaccttggagaggcattctctctttcctccacggccttggtctctgtcagagtgacagatataaatgacaatgcaccagtcttcgcgcaggaagtgtaccgagggaatgtgaaggagagcgacccaccgggcgaggtggtagccgtcctcagcacctgggacagagacacatccgacgttaatcgccaagtgagctaccatattacaggaggaaaccctcgaggaaggtttgctctgggcctggtgcaaagtgagtggaaggtctatgtgaagaggcctctagacagagaagaacaggacatttactttctcaatatcactgccactgatgggctttttgtcacacaggccatggtggaagtgagcgtcagtgatgtgaatgacaatagcccagtgtgtgatcaggttgcatatacagcattacttcctgaagacattccatcaaataaaatcatcctgaaagtcagtgcaaaggatgctgatattggatccaatggatatatacgatactcactctatggatctggaaacagtgaattttttctagatccagaaagtggcgagttaaaaaccttggctctgttggaccgggagaggatccccgtgtacagcctgatggccaaggccactgacgggggtggcaggttctgccagtccaacatccacctaatcctggaggatgtgaatgataacccccctgtgttttcttctgaccactacaacacctgtgtctatgagaacacagccaccaaggctctgttgaccagagttcaagccgtggaccccgacattggcatcaataggaaggtcgtgtactccctggcagactcagctggtggggtcttctccattgacagctcatctggcatcatcatcctggagcagccactggaccgtgagcagcagtcttcgtacaacatcagcgtgcgggccactgaccagagtcctggacagtccctgtcctctctcactactgtcaccatcaccgttctggacattaatgacaacccccctgtgtttgagaggagggactacctggtgacggtgcctgaggacacctcccctggcacccaagtccttgctgtttttgccaccagcaaagatattggcacaaatgctgagatcacttatctcatccggtctgggaacgaacaagggaaatttaagatcaaccccaagacagggggtatttctgtctctgaagtcctggactatgaattatgcaaaaggttttacctggtagtggaagccaaagatgggggcaccccagctctcagcgctgtggccactgtcaacatcaacctcacagatgttaatgacaaccctcccaagttcagccaagacgtctacagtgcggttatcagtgaagacgccttggtgggagactctgtcattttgctaatagcagaagatgtagacagccagcccaacggacagattcatttttccattgtgaatggagatcgggacaatgaatttactgtagatcctgtcttgggacttgtgaaagttaagaagaaattggaccgggaacgggtgtctggatactctctgcttgtccaggccgtagacagtggcattcctgcaatgtcatcaactgcaactgtcaacattgatatttctgatgtgaatgacaacagcccggtgtttacacctgccaactatactgctgtgattcaggaaaataagccagtgggcaccagcatcttgcagctggtggtgacagacagagactcctttcacaatgggcctcccttttcattctctattttgtcgggaaatgaagaggaggagtttgtgttggaccctcatgggatcttgcggtcggctgtggtcttccagcacacagagtctctggaatacgtgttgtgtgtccaggcaaaggattcaggcaaaccccagcaagtttctcacacttacatccgcgtgcgagtcattgaggaaagcacccacaagcccacagccattcccctggaaattttcattgtcaccatggaggatgactttcctggtggggtcattgggaagattcatgccacagatcaagacatgtatgatgtgctcacatttgccctgaaatcggagcagaaaagcttatttaaagtgaacagtcacgatgggaaaatcatcgccctgggaggcctggacagcggcaagtatgtcctgaatgtgtctgtgagtgatggtcgcttccaggtacccattgatgtggtcgtgcatgtggagcagttggtgcatgagatgctgcagaacactgtcaccatccgctttgaaaatgtgtcccctgaggacttcgtggggctgcacatgcatgggttccggcgcaccctgcggaatgcagtcctcacccagaagcaggacagcctgcgcatcatcagcatccagcccgtggcaggcaccaaccaactggacatgctgtttgcggtggagatgcacagcagcgagttctacaagccagcctacctgatccagaagctgtccaatgctagaagacacctggagaatatcatgcgcatctcagccatcttggagaagaactgctcagggctggactgtcaggaacagcattgtgagcaaggcttgtcactcgattcccacgcgctcatgacctacagcacggctcgcatcagctttgtgtgtccgcgtttctacaggaacgtgcgttgcacctgcaatggaggactgtgtccggggtccaacgatccttgtgtggagaagccgtgtccaggggacatgcagtgtgtcagttatgaagccagcaggagaccgttcctctgccagtgtccaccagggaagctcggagagtgctcagggcacacttctctcagctttgctggaaacagttacatcaaatatcggctttctgaaaatagcaaagaagaggatttcaaactagctctgcgtcttcgaacactgcaaagcaatgggattataatgtacaccagagcaaatccctgcataattctgaagattgtggatggcaagctgtggttccagctggactgcggcagcggccctggaatcttgggcatctcgggccgtgctgtcaacgacgggagctggcactcggtcttcctggagctcaaccgcaatttcacgagcctgtccctggatgacagctacgtggagcggcgccgggcgcccctctacttccagacgctgagcactgagagtagcatctacttcggcgccctggtgcaagcggataacatccgcagcctgactgacacgcgggtcacgcaggtgctcagcggcttccagggctgcctggactcggtgatactgaataacaatgagctgccgctgcagaacaagcgcagcagcttcgcggaggtggtgggcctgacggagctgaagctgggctgcgtgctctatcccgacgcctgcaagcgcagcccgtgccagcacgggggcagctgcactggcctgccatcggggggctatcagtgtacctgtctctcacagtttacggggagaaactgtgaatctgagattacagcctgcttcccaaacccctgccggaatggaggatcctgcgatccaataggaaacactttcatctgcaattgtaaagctgggctcactggagtcacgtgtgaggaggacatcaatgagtgcgaacgagaggagtgtgagaacggaggctcctgcgtgaacgtgttcggctccttcctctgcaactgcacgccgggctacgtgggccagtactgcgggctgcgccccgtggtggtacccaatatccaggctggccactcctacgtggggaaggaggagctcatcggcatcgccgtggtcctcttcgtcatcttcatcctggtggttctcttcatagtcttccgcaagaaggtcttccgcaagaactactcccgcaacaacatcacgctagtgcaggacccggccaccgccgccctgcttaacaagagcaatggcatcccgttccggaacctgcgcggcagtggggacggccgcaacgtctaccaggaggtggggcccccgcaggtccccgtgcgccccatggcctacacaccctgcttccagagtgactccaggagcaacctggataagatcgtggacgggctgggaggcgagcaccaggaaatgaccacgtttcaccctgagtcgccccgcatcctgacagcccggcggggcgtggtcgtgtgcagtgtggcccccaacctccccgccgtgtcaccctgccgctccgactgcgactccatccggaagaatggctgggacgcgggaactgagaacaaaggggttgatgacccgggagaagtgacctgctttgcaggtagtaataaaggcagcaactctgaagttcagtccctcagctccttccagtcagattctggtgacgacaatgcctatcactgggacacctctgattggatgccaggggcccgcctgtcggacatagaggaagtgcccaactatgagaaccaggatggagggtctgcacaccaggggagcacacgggagctggagagcgattactacctgggtggttatgacattgacagtgaatacccaccccctcatgaagaggagttcttgagtcaggaccagctgcctcctcctctcccggaggacttcccagaccaatatgaggccctgccaccctcccagcctgtctccctggccagcacactgagcccagactgcaggagaaggccccagtttcatcctagccagtatctccctcctcacccattccccaacgaaacggatttggtgggcccgcctgccagctgtgaatttagtacttttgctgtgagcatgaaccagggcacagagcccacaggcccagcagacagcgtgtctctgtccttgcacaattccagaggcacctcatcctcggatgtgtctgccaactgcggctttgacgattccgaagtagccatgagtgactacgagagcgtgggagagctcagcctcgccagccttcacattccctttgtggagactcagcatcagactcaagtgtagacatcacatcttgggtacttcaccctgtttgttacagaaaagtggaagcagattggctgggcttctgtcccagtggagcattgtctgtggaatgagaagggaatactgtatttttccactagaaacttcttcacaagtcatactgtcccaacaagcaagcttgattccagttgggtgaaaatgaaaggctcagaaattgtttttgagaggtgactggtaatccttgatgtaggtacctatgttcacagctaaaaatgcaaagagggaaaaattatttcacccactaagttatacagccagtcttgtatggctttgtgcagtattgtgccctggaaagtgttacagcatcagtccttgcagtattaaaaactggcaacaatcaaagaggcattgttgcatgtaattttgagccaatgaaatgaaaatagtagtaatgattgttggaaaagttagtctcttaggcgaaagagaagagaaacaaatattattaaacaaaccagaaaatgggctgaagccttttaaatcaactctatttttttgataagctgcccaattttcagctataaaattaggcttgaataacatgtttagtatgctcagttatttctgtttgtttgtgttaagcatccaatctaatatagttgggttttatgatcttcaagaaaggtatcaatgaagagcaacatgaggctttttgggttccatttggtgggtgggggaggaagttaaagttgtttgaacattagaaagaatgtgattatctggttggttttgtgttttctggtaaatattccagttggtaaatctaacattgctacagaagttggctttgttcatatagcttctctacaattagatatttttagaagtttaagcaaaactcacaaattcaggggggaaaaaagaaaaaacgataccttcaaagtttgcggcctagataatcacaattcttcataatgcagaggaaaggtgtctgttattctaaatcggtagcatcaccattataaatacaattatgttaagaaaagaggaaagtagactagttattgtgtataaattataatagtgtgtgtgtgtctgggcctatgtacaaatatgtgcttgcactcagtaaggctgctcttgaggaaagctaatgtgaaggttttgggaaatggaccatgttgaaaattctgccggcgagcatggcatacctttcaatttctctgatctctatggtgttagagaaacatcaaatgccatattttactctggttcagttaactttattttggtactgccaataaagcaaaattgtgcttttttttttttttctcaagacagagtcttgctctgtcacccaggctagagtgcaatggcatgatctcagctcactgcaatctccacctcctgggttcaagcgattctcctgcctcagcctcccaggttgctggggttacaggtgtgtgccaccacgcctggctaattttttgtatttttagtagagatggggtttcaccatgttggccaggctggtctcaaactcctgacctcgtaatccacctgccgtggcctcccaaagtgctgggattacaggcatgagccaccgtgcccagcccaaaactgtgctttttaaaaacagtattttgttataattttccagaacttacctctgttttaaaagtgtgtaatgtttgattacaccctgggattcccttctcatctgtgggctttggccatgatttccaaaattaacaggagaatcattccactggaaatataacaatccagtcctcaaaactgaaagttgacaggttgagggactttccttttttgcttcaatcagattacggccgcctgtgcagtggccatggtaaatatatgcatatttgcactatctgcttaatgagcaaatctgtgtccacagtttctgatgacatatggcattggtgtgtaaattgtactgtccctagtctgtgcattattcactcagacatatttttagttatttcaattgcgtttaatccacttcttttttatgagtcagtgtttctgaatgtttatgcaaaaaaaaaaatcctttttcattcccaaactttctaagtaagtggatacactacacttcacaagttttccagcctttctcttcctgtctcttggtcagacctactcatggaggtattatccacactgtgatcttgaaataaatgaatttcactaaggctgctttcgagaacaaagtctttggtatttttcttatgtaagaagcacatttgcaagaatcatggaaaaaaatgacaaactaatggcctagaatagagtgactgctacactttaagtaatgcaatgacataaaaaccatcaaagtaaaaccaacatgtcatttcctgcccccaggaaatattagaatgagattaatgctgatgagtccctactgcttacacagcatctctttgagggagaatgcctgactgacacagtaatgaaagaataaatagatcctaatgcagtcatgaagccactgaagaaaattgtgcccaccctttgctgtgacctatataaaatatctctttctttgggatatcatcccctgattttctgcagaatagctctgcagctaaatatataccaggcaagcatgtattgtgttttgatttattatctttaaacacatgatatctcttcactttttggaaagttagatttctctgtagattatgaaatgctttgcagtcaggccaagatgctactaggtggggatgatcactaattcaaaaaagctggaagaatcctatttgctagtccaaactccttattttatcaaagaggaaacatacccagagtgggaaagagacttgcccaagcccacagaggaagttaattcgcttaacaaggagtagaacccatccatctagccaatattctttttacatcatattgttcacccctacactgccttgagcatgggagtcacctggttctgatggaccctctgacttccaccattccttctttggaatatgctataaaagaaaattcatggagaatatttttctgaaagcctcatgatcttatgtttccttgcagtccccctagggagaggggttatagaattcatacatttctgtagacattcatcgaaatgctgcttttgccaaatgaatgtttgtataatagggatgaaatgataattacagagttcagctcagaccagtcatcagttgtagtgaaactttgattatactgttacctactggttgcatttttggttttggttttgcatttttttcttcccacaaacactggctactctttgtcctaccccctccaccatgatgaaccatgtggaaactatttaaatcaattaatgtctttctcatttttcgaacatgtatgtgccacctcctggaagccatttcccataatctgttgtaggcactttactagtattgcacacattctggttaggttgagaatagctagactcttggtgctcgtcatatagtaagcaagaacttgggagtaataaaaggtgaataaaatgcatgcttcatttattccctttcctctatgaatattttgctgctgcattctagtctatgccagctttccatgtacccttggcctgcctattcatgaaatgccatataaaagacttaggaacatgagtaggtggtccatgctttgaggttcatccaattagggaataaatgtgaaaggctggaaagggaactagtttctgggatttgcctggaacttcccttggacattactagcacattctggaaaaaaagcaagttgaacatatctaccatcagtcctctcctacttacttcccaccccaccctatccactacccccactgatgctatgtttgcatcatcaaagtcaggggaattgagaaaagagattatcaaaataaattattaaaatccagaaaacagttttatgtgaagtaattcaggaagatctagtgttcattttgcatggattgtccagataattggctcttcactccgctgccttcccagtgcacaggtattgctaaagtggttaggctttaatgttttatgtttttagtttcaaactatgggaaatggagatttgaagaggcatttattccttgtcatcattttgtgtgctctgtgagaaggtggttatatgtttttgctggtttgtgtcccacagtgttcaactgcacattattctgatgaaaatccacaatgtctttgagcttctggttgtgtaatgctggggtttaaagtcaccatttgtgggtttggcatcaattaatatttagccagctggctaagagataggaaaagaatatgatatttctttccttatgtaataatgaaaagcaataattacaagtaggtaataatacacaaaggccataattagtctcttctagtgtttagaatgcacttgagaatcgtagagtcatttggagcgtgtttggaccaattagtatgtactgtagtacccttctggcaaacaaataactgaattgctactatttaacaatcttatgagcccacactactgcattttgggagtggcaaatgtgtttggaaatggaagcagttctttttaagcactgtatcagagagattgtcttgtacgtttgcctgttgcaaacaggctggtttgtaaaagatgtatgttttggtgtttgaaatgtttataaaattgtatataaatggtttcaattttccaggcttttgtagatactatatttgatgcctatcaggatgctttaatttggggggtcgaatataattgtaagtcatccacgctgttggtctgcaaacttttgaggtaactacacacacacacacacacacaaggattttagatttgaaaatgatgttttttactcatttcaaaatgtactgtaacctttctttggttcttactgttttcatttaactttctctgttttcaagaaaaattgtctttattgacatttgtaaaaaagaatgtgttttgcccagttattaagtattttatttttatgcaatttcagaatcacaatgaggtatgccatttcttcatatacatgcacattcacctcaacttgcacacacatcacacaccaaaccttatgcaaaggggaaagctaacacttagagtggattttgtcccttaaggaaatggattgttcctgcatatattgctggtggcagtattcagtcttgtgttctttttctaaaaaaaaagaaaagaaaagaaaaaaaaaacaaaagcaaacaaaaaaaaagacagccaaaaaaaagaaacaacaacaacaaaaaaaaacacaacagtgtacaggtttgtaactgccaaaatttgatggttaaaacaagttttcaagt

SEQ ID NO: 10465 - DNA, 3782 bp, Homo sapiens
  source 1..3782: mol_type = unassigned DNA
gatggaagtatgatgtgatggatataattatgggacactgtgtgggcacacggcctcctgcttgttgcctcatcctcctgcttttcaagcttttggccactgtctcccaggggctgccagggactggacccctgggcttccacttcacacattccatttataatgctaccgtgtatgagaactcagcagcaaggacctacgtcaacagccagagtagaatgggcatcaccttaatagatctatcctgggatatcaaatacagaatagtgtccggagacgaggaaggctttttcaaagcagaggaagtcatcattgcagatttctgttttctcagaataagaactaaaggtggcaattctgccatattaaatagggaaatccaggataattatttattgatagtaaaaggttctgtcagaggagaggatttggaagcatggaccaaagtgaatatacaggttttagatatgaatgatctgagacctttgttttcacccacaacatactctgttaccatagcagaaagcacacctctaaggactagtgttgcccaggtgactgcaacagacgcagatattggttccaatggagaattctactactactttaaaaataaagttgatctcttttcagttcaccccacgagtggtgtcatctccttaagtggtcgattaaattatgatgaaaagaataggtatgatctggaaattttggctgtggaccggggaatgaaactgtatgggaacaatggagtgagcagtactgcaaagctttatgttcacattgagcgcataaatgaacatgccccaacaatccatgtagtcactcatgttcctttctcgttggaaaaagagccaacatatgcagtggtgacagttgatgacttagatgatggagcgaatggagagatcgaatctgtttccattgtggctggggatcctttagatcagttcttcctggctaaggaaggaaagtggttgaatgagtacaagattaaggagaggaagcagattgactgggagagctttccctatggctacaatctcactcttcaagcaaaagacaagggatctcctcaaaaatgttcagcattaaaggcagtctacattggcaaccccacaagagacactgtccccattagatttgaaaaagaagtgtacgatgtgagcataagtgaattttcccctcctggtgtcgtggttgctatagtaaaattaagtcctgaaccgatagatgtggaatacaaattatctcctggtgaggatgcagtgtactttaaaattaatcctcggtcgggtctgattgttacagcacggccactgaatactgttaagaaggaggtttataaactggaggtgacaaacaaggaaggagatttaaaagcacaggtcaccatcagcatagaagatgcaaatgaccacaccccagaatttcagcaaccactgtatgatgcttatgtgaatgaaagtgtcccagtgggaaccagcgttctaacagtttcagcttctgataaggataaaggagaaaatgggtacatcacctatagtatcgctagcctgaatttgttaccatttgtcattaatcagtttacaggtgttattagcacaactgaagaactggattttgaatcctccccagaaatttacagattcattgttagagcctctgactggggttcaccataccgccatgaaagtgaggtcaatgtgactattcgaataggaaatgtcaacgacaacagccctctctttgaaaaagtggcttgccagggagttatttcatatgactttccagttggtggtcacatcacagcagtctcagcgatcgatatcgatgaacttgaacttgtaaagtacaaaatcatttctggaaatgaacttggcttcttttatttaaacccagattctggtgttttacagcttaaaaaatcactgacaaattctggcattaaaaatggcaattttgccctcagaattacagcaactgatggagagaatcttgcagaccccatgtctattaacatttcagtcctacatgggaaagtgtcttcaaagagcttcagttgcagagaaactcgtgtggctcaaaagctggcagagaaactactcattaaggcaaaagcaaatgggaaactgaatctggaagatggatttcttgacttttattcaattaatagacagggaccatattttgacaagtcttttccttctgatgtggctgtaaaggaggatctgccagttggtgctaacattctgaagattaaagcctatgatgccgactctggcttcaatggaaaagtgctatttacaatatcagatggaaatacggatagttgctttaatattgatatggagactgggcagcttaaagtccttatgcccatggatcgagaacacacagacctctatctccttaatatcaccatctatgacttaggtaatccacagaaatcgtcatggagactgctgaccatcaatgtggaggatgctaatgacaatagcccagtttttattcaagacagttactcagttaacattcttgaaagttcaggcattggtactgaaatcattcaagtggaagccagagacaaagacttaggttctaatggtgaagtgacttactcagtcttgacagatacacagcagtttgccatcaatagctcaactggaatcgtttatgtagccgaccagttggaccgggaatccaaagccaattattctttgaaaatagaagccagggacaaggcagagagtggtcagcagctgttttcagttgtcactcttaaagtttttttagatgatgtcaatgactgctccccagctttcattcccagtagctatagtgtgaaggttcttgaagatctccctgttggcactgtcattgcttggcttgagacccatgatccagatcttggactggggggtcaagtgcgctattctttggtcaatgactataatgggagatttgaaatagataaagcaagtggtgccatccgcttgagcaaagagcttgattatgagaaacagcagttctataaccttactgtgcgggccaaagacaaagggcggcctgtctctctgtcatctgtttcctttgttgaggtggaagtggtggatgtcaatgaaaacctccacactccctatttcccagactttgctgttgttggatctgtaaaggaaaactcacgcattggaacaagcgtgctgcaggtgactgctcgagatgaagactccggaagggatggagagatccagtactccatcagggatggcagtggtcttggaaggttcagtatagacgacgagagtggggtcatcactgccgcagacattcttgatcgggagacaatggggtcatactggctaacagtgtatgccacagacaggggcgttgttccactctactccaccattgaggtctacattgaagttgaagatgtgaatgacaatgccccgctgacctcagaacctatatattatcctgttgtcatggaaaactctccaaaggacgtatctgtcattcagatccaggctgaagatcctgactccagttccaatgaaaaactgacatacaggattacaagtggaaatcctcagaatttttttgccatcaatatcaaaacagggtcttgctctgttgcccaggctggaatgcagtggcatgatcatagctcactgcaatctcgaactcctggattcaagggatacccctgcctcagcctcttgagtagctgggactataggcatgcaccgccatgcccagctacttttttaaatagttga

SEQ ID NO: 10466 - DNA, 9669 bp, Homo sapiens
  source 1..9669: mol_type = unassigned DNA
atggtaacaacggtagtggcagtgggtgataccttagctcaaccattagctgcagctgaagtgtttattgtagaaataacacttcaggatatcaatgacaatccaccagtatttccaacggacatgctggatctcacggtagaggagaacattggagatggctctaagattatgcagctgacagccatggatgctgatgagggtgcaaatgctctcgtcacatacactatcattagtggagctgatgatagttttcgcatcgacccagaatccggagatctgatagcaaccaggcggttggacagggaacgccgctccaaatattcactgctagttcgtgctgatgatggtcttcagtcctcggatatgagaattaatatcactgtcagtgatgtgaatgaccatacacccaaattttccagacccgtgtactcttttgacattcctgaggacacaatccctggttctttggtagcagccattttagccacggatgatgactctggtgtgaatggagaaattacatatattgtgaatgaagatgatgaagatggcatctttttcctgaatcctattactggggtctttaatttgactcgattattagattatgaagtacagcaatattatatcctcactgttcgagcagaagatggtgggggacaatttactaccatcagagtttatttcaatattctagatgtaaatgataatccacctattttcagcttgaattcatacagcacatctttaatggagaatctacctgtgggatctactgttcttgtgtttaatgttactgatgcagatgatggcatcaactctcaattgacttatagcattgcttcaggtgatagccttgggcagtttactgttgacaagaatggtgtactcaaagtcctaaaagctttggatcgggaaagtcagtccttctacaacttggttgttcaagtgcatgacctgccacagattccagcctccagattcacaagcactgctcaagtctccattattttgttggatgtaaatgataacccaccgacatttctttcccctaaattgacatacattccagaaaatacacctattgatactgttgttttcaaagctcaagcaactgacccagatagtggcccaaacagctatattgagtacactctgctgaaccctttgggaaacaagttcagtattgggaccattgatggtgaagtgaggctcactggagaactggacagagaagaagtttctaattatactctaacagtggtggctacagacaaaggtcaaccatctctctcttcatctacagaggttgtagttatggtacttgacatcaatgataacaaccccatctttgcacaagctttgtataaagtggagattaatgaaaacacacttactggaacagatataatacaagtgttcgcagcagatggagatgaaggcacaaatggacaggttcgctatggcattgttaatggtaataccaatcaggaatttcggatagactctgtcacaggtgccatcactgtcgctaaacctttggatagagaaaagacccctacctaccatttaactgttcaggcaacagatcgaggcagcacacccagaactgatacctccacggtcagcattgttctactggatattaatgactttgttcctgtatttgagctatctccatattctgtaaatgtccctgagaatttagggacactacccagaacaattcttcaggtggtggcaagagatgatgatcgaggatctaacagcaaactctcatatgttctgtttggtggtaatgaagacaatgcttttactctctcagccagtggagaacttggagtaacacagagtctggatcgggaaacaaaagagcgctttgtcttaatgattacagctacagattcaggatcccctgccttgactggaactggaacaatcaacgtcatagtagatgatgtcaatgacaatgtccccacatttgccagtaaagcgtatttcacaacaattcctgaggatgcaccaactggaacagatgttttattggtaaatgcctcagatgctgatgcttcaaagaatgcagttataaggatcatcggtggaaactctcagttcacgatcaacccatcgacaggacaaatcatcaccagcgcattgttagatagggaaacaaaagataattatactttggtagtggtctgcagtgatgcgggatccccagagcctctttccagttccaccagtgtgcttgtcactgtgactgatgtcaatgacaatccaccaagatttcagcatcacccatatgtcactcacatcccatctcctactcttccaggttcctttgtctttgcggttacagtcacagatgctgatattggaccaaattctgaactgcattattctctttcgggtagaaattctgaaaaatttcacattgacccactgaggggagccattatggccgccggaccactaaacggagcttcagaagtgacattttctgtgcatgtaaaagatggtggctcatttccaaagacagattctacaacagtgactgttagattcgtgaataaggccgatttccctaaagtgagagccaaagaacaaacgttcatgtttcctgaaaaccaaccagtcagctctcttgtcaccaccatcacaggatcctctttaagaggagaacctatgtcatattatatcgcaagtgggaatcttggcaatactttccagattgatcagttaacagggcaggtgtctattagtcaacctctggattttgaaaagatacaaaaatatgttgtatggatagaggccagagacggtggtttccctcctttctcctcttacgagaaacttgatataacagtattagatgtcaatgataatgccccaatttttaaggaagacccatttatatctgaaatattggaaaacctttcccctcgaaaaatacttactgtttcggcaatggacaaggacagtggacccaatggacagttagattatgaaattgttaatggcaacatggaaaatagtttcagtatcaatcatgctactggtgaaattagaagcgttagacctttggacagggaaaaagtatctcattatgtcctaaccataaaatcatcagacaaagggtccccgtctcagagtacttcagtaaaagtcatgattaacattttagatgaaaatgataatgcccctaggttttctcagatatttagtgcccatgttcctgaaaattcccccttaggatacacagttacccgtgtcacaacttctgatgaagacattgggatcaatgcaattagtagatattctataatggatgcaagtcttccatttacaattaatcccagcacaggggatattgtcataagcagacctttaaatagggaagatacagaccgttacagaattcgagtttccgcacatgattctgggtggactgtaagtacagatgtcacaatatttgtgacagacatcaatgacaatgctccaagatttagcagaacttcctattatttagattgccctgaacttactgagattggctccaaagtaactcaggtatttgcaacagatcctgatgagggatcaaatggacaagtgttttatttcataaaatcccaatcagaatatttcaggattaatgccaccactggagagattttcaataaacagatcttaaaataccaaaatgtcactggcttcagtaatgtgaatatcaacaggcatagttttatagtgacatcttcagatcgaggtaaaccttccttaattagtgagacaacagttaccatcaatatagtggacagtaatgacaatgcacctcaatttcttaaaagtaaatatttcactccagtcaccaaaaatgttaaggttggtacgaagttaatcagagttacagcaatagatgacaaagattttggactgaattcagaagtggagtatttcatttctaatgataaccatttaggaaaatttaagttggacaatgatacggggtggatttcagtagcatcctccctgatttctgacttgaaccaaaacttttttatcacagtcactgcaaaggataagggaaaccctccactttcttcccaagcaactgttcacataactgtcactgaggaaaactaccatacacctgaattctctcaaagccacatgagtgcaaccatccctgagagccatagcattgggtccattgtcagaactgtttctgcaagagatagagatgcagcgatgaatggcttgattaagtacagcatttcttcaggaaatgaagaaggcatttttgcaatcaattcttctacaggtatattaacactagccaaagctcttgattatgagctatgccagaaacacgaaatgacgattagtgctatagatggaggatgggttgcaagaactggttactgcagtgtgaccgtaaatgtgattgatgtgaatgataattctccagtattcctctctgatgactatttccctactgttttggaaaatgccccaagtggaacaacagttatccacctaaatgcaacagatgctgactctggaacaaatgctgtgattgcgtatactgtacagtcatctgacagtgacctctttgtcattgaccctaacacaggagtcataaccactcaaggcttcttggattttgaaaccaagcagagctaccatcttactgtgaaagccttcaatgtccccgatgaggaaaggtgtagctttgccactgttaatatacaattaaaagggacaaatgaatatgtgccccgttttgtttccaaactttactattttgaaatctcagaagcagctcctaaaggtactattgttggagaagtgtttgctagcgaccgtgatttgggcactgatggggaggtacactatttgatttttggtaatagtcgaaagaagggtttccagatcaataagaagactggacagatttatgtttctggaattcttgatcgagaaaaagaagaaagggtgtctttgaaggtattggccaagaactttggcagcattagaggtgcagatatagatgaggtcactgtaaatgtcaccgtgcttgatgcaaatgacccacccatttttactctaaacatctacagtgtgcagatcagtgaaggggtcccaataggaactcatgtgacctttgtcagtgcctttgactcagactccatccccagctggagcaggttttcttacttcatcggatcagggaatgaaaatggtgccttttctattaatccgcagacaggacagatcaccgttactgcagaattagatcgagaaacccttcccatctataatctctcagttttggctgttgattcagggaccccctcagctacaggtagtgcctctttattagtcaccctggaagatataaatgataacgggcccatgctgactgtcagtgaaggagaagtcatggaaaacaaacggccaggcactttggtgatgacccttcagtccactgaccctgatctccctccaaatcaaggtccctttacttattacttgctgagcacaggtcctgccaccagttatttcagtctgagcactgctggagttctgagcacaaccagagagattgacagagagcagattgcagacttctatctgtctgtggttaccaaggattctggtgttcctcaaatgtcttccacaggaactgtgcatatcacagttatagaccaaaatgacaatccttcacagtctcggacggtggagatatttgttaattattatggtaacttgtttcccggtgggattttaggctctgtgaagccacaggatccagatgtgttagacagcttccactgctcccttacttcaggagttaccagcctcttcagtattccagggggtacttgtgatctgaattcccagccaaggtccacagatggcacgtttgatctgactgtccttagcaatgatggagttcacagcacagtcacgagcaacatccgagttttctttgctggattttccaatgccacagtggataacagcatcttacttcgtctcggcgtaccaacagtaaaggacttcttgaccaaccactatcttcattttttacgcattgccagctcacagctgacaggcttagggactgctgtgcaactgtacagtgcatatgaagagaacaatagaacgtttcttttggcagctgtgaagcgaaatcataatcagtatgtgaatcccagtggcgtagccaccttctttgaaagcatcaaagagatccttctccggcagagtggagtaaaggtggaatctgtggatcatgactcctgtgtgcatggcccatgtcagaatggagggagctgtctacgaagattggctgtgagctccgtattaaaaagccgtgagagtcttccagtcatcatcgtggcaaatgaacctctgcagcctttcttatgcaagtgtctgccaggatatgcgggtagctggtgtgaaatagatatagatgaatgtcttccatcaccttgccacagtggtggaacctgtcacaatttagtgggaggattttcatgcagctgcccagatggcttcactggtagggcgtgtgagagagatatcaatgagtgcctgcagagtccttgcaagaatggtgccatctgccagaattttccaggaagcttcaactgtgtttgcaaaactggatacacaggtgtctttggaaaacactgcgagttgaacagttatggatttgaggagttatcatacatggaatttccaagcttggaccccaataacaactatatttatgtcaaatttgccacgattaaaagtcatgccttattgctttacaactatgacaaccagacaggcgaccgggctgagtttttggcccttgaaattgccgaagaaagactaagattctcttataatttaggcagtggtacatataagctcaccaccatgaagaaggtgtcagatggacattttcacactgtgattgccaggagagcaggaatggcagcctccttaactgtggactcctgttctgagaaccaagagccaggatattgtactgtcagtaatgtggcagtttcagatgactggactcttgatgttcagccaaatagagttacagttggaggtatcagatctctagaaccaatccttcagagaagaggacacgtggaaagccatgattttgttgggtgtataatggagtttgcagtcaatggaaggcctctggaacccagccaagctttggcagcacaaggcatcctagatcagtatggcgattttatttcttactgttttaaagaaaaaaaatgcaaaaaagtatgcttcactgttactcctgacactgccttatcattagaaggcaaagggcgcttggactaccacatgagtcagaatgagaagcgggaatatttgttaaggcaaagcttacgaggtgccatgttggagccttttggtgtgaacagtctggaagtaaaatttaggaccagaagcgagaatggcgttttaatccatatccaagaaagcagcaattacactactgtgaagattaagaatggcaaagtatattttacatccgatgcaggaattgctgggaaagtggagagaaatattcctgaagtatatgttgcagacggccactggcacacttttctaattgggaaaaatggaacagcaacagtattgtctgttgacagaatatataacagagatattatccaccctactcaggacttcggtggccttgatgtgcttactatatcacttggaggaattccacccaatcaagcacatcgagatgcccaaacagcaggttttgatggctgcattgcttctatgtggtatggtggagaaagtcttcctttcagcgggaagcatagcttggcctccatctcaaaaacagatccctcagtgaagattggctgccgtggcccgaacatttgtgccagcaacccctgctggggtgatttgctgtgcattaatcagtggtatgcctacaggtgtgtccctcctggggactgtgcctcccacccgtgccagaatggtggcagctgtgagccaggcctgcactccggcttcacctgtagctgcccagactcgcacacgggaaggacctgtgagatggtggtggcctgtcttggcgtcctctgtcctcaggggaaggtgtgcaaagctggaagtcctgcggggcatgtctgtgttctgagtcagggccctgaagagatctctctgcctttgtgggctgtgcctgccatcgtgggcagctgcgcaaccgtcttggccctcctggtccttagcctgatcctgtgtaaccagtgcagggggaagaaggccaaaaatcccaaagaggagaagaaaccgaaggagaagaagaaaaagggaagtgagaacgttgcttttgatgaccctgacaatatccctccctatggggatgacatgactgtgaggaagcagcctgaagggaacccaaaaccagatatcattgaaagggaaaacccctaccttatctatgatgaaactgatattcctcacaactcagaaaccatccccagcgcccctttggcatctccagagcaggagatagagcactatgacattgacaacgccagcagcatcgccccttcggatgcagacatcattcaacactacaagcagttccgcagccacacaccaaaattttcaatccagaggcacagtcccctaggctttgcaaggcaatcccccatgcccttaggagcaagcagtttgacttaccagccttcatatggtcaaggtttgagaaccagctccctaagccactcagcatgcccaactcccaaccctctgtctcgacacagtccagcccctttctccaaatcttctacgttctatagaaacagcccagcaagggaattgcatcttcctataagggatggtaatactttggaaatgcatggtgacacctgccaacctggcattttcaactatgccacaaggctgggaaggagaagcaagagtcctcaggccatggcatcacatggttctagaccagggagtcgcctaaagcagccgattgggcagattccactggaatcttctcctccagtcggactttctattgaagaagtggagaggctcaacacacctcgccctagaaacccaagtatctgcagtgcagaccatgggaggtcttcttcagaggaggactgcagaaggccactgtctagaacaaggaatccagcggatggcattccagctccagaatcctcttctgatagtgactcccatgaatctttcacttgctcagaaatggaatatgacagggagaagccaatggtatatacttccagaatgcccaaattatctcaagtcaatgaatctgatgcagatgatgaagataattatggagccagactgaagcctcgaaggtaccacggtcgcagggccgagggaggacctgtgggcacccaggcagcagcaccaggcactgctgacaacacactgcccatgaagctagggcagcaagcagggactttcaactgggacaaccttttgaactggggccctggctttggccattatgtagatgtttttaaagatttggcatctcttccagaaaaagcagcagcaaatgaagaaggcaaagctgggacaactaaaccagtccccaaagatggggaagcagaacagtatgtgtga

SEQ ID NO: 10467 - DNA, 16123 bp, Homo sapiens
  source 1..16123: mol_type = unassigned DNA
gggagccaggaccatggacttagcaccagacagggctactggccgcccgtggctcccgttgcacactctatcagtatctcagctccttcgagtgttttggctactgtcattgcttccggggcaggcctgggtccacggggccgagccgcgccaggtgttccaagtgctggaagagcaacctccaggcactctggtaggcaccatccagacgcgccccggcttcacctacaggctcagcgaaagccacgccctgtttgccataaacagtagcaccggagccctgtacaccacctccaccatcgaccgcgagagcctgcccagcgacgtgatcaacctggtggtcctttccagcgcgcccacctaccccaccgaagtgcgagtgctggtgcgggacctcaatgacaacgcccccgttttcccggacccctctatcgtggtcactttcaaggaagacagtagcagcggacgccaagtcatcttagacaccgccaccgactcggacatcggctcaaacggtgtggaccaccgctcctaccgcatcatccgcggcaatgaggcggggcgcttccgtctggacatcaccctgaacccgagcggcgagggagcgttcctgcatctggtgtccaagggcggactggaccgtgaggtcactccgcagtaccagctcctggttgaggtggaggacaagggtgagcctaagcggcggggctaccttcaggtaaacgtgactgtgcaagacattaatgacaaccccccggtttttggcagttctcactaccaggcgggggtgcctgaggacgcggttgtgggttccagcgtcctccaggtggcggcggcggacgcggacgagggcaccaacgcggacatccgctatcgcctgcaggacgaggggacccccttccaaatggaccctgagacgggacttatcacggtgcgggagcccctggacttcgaagctcggcgccaatactcgcttacggtgcaggcgatggacagaggcgtgccttccctcactgggcgcgccgaggcgctgattcagctgctggacgtgaatgacaatgacccggtagtgaagttccgctacttcccggccacctcgcgctacgcctcggtagatgagaatgctcaagtgggcaccgtggtggctctgctcaccgtgacggacgcagattctcccgcggccaacgggaacatctccgtgcaaattctcgggggcaatgagcagcgccactttgaagtgcaaagcagcaaagtgccgaacctgagcctaatcaaggtggccagcgccttggaccgcgagcgcatcccttcctacaacctcacagtttccgtctctgataactacggggcgccccctggcgcagcagtccaggcgcgctcttctgtggcaagcctggtgatttttgttaatgacatcaatgaccatcctcctgtcttttcacagcaagtgtacagagtgaacctgagcgaggaggcgcctccgggaagctatgtgagtgggatatctgccactgatggcgactctggtctcaatgctaatctgcgttacagcattgtctctggcaatggactgggatggttccatatcagtgaacatagcggcctcgtgaccactgggtcctctgggggcctggaccgtgaacttgcttcccagattgttctgaatataagtgcccgggaccagggagttcaccccaaggtgtcctatgcccagcttgtagtaactctcctagatgtgaatgatgaaaagccagtatttagccagccagaagggtatgatgtgtctgtggttgagaatgccccaacagggacagaactgttgatgctcagggcaactgacggggacctgggtgacaacggaacagtgcgcttctccttacaagaggcagagactgaccggaggtccttccgtctggatcctgtgtctgggaggttgagtactatttcctccttggacagagaagagcaagccttctactccctgttggttctggccacagatctgggctcccctccccagtcatcaatggctcgcataaatgtgagtcttctggatataaatgataacagccctgtcttctacccggtccaatactttgctcacattaaggagaatgagcctggaggtagctacatcaccactgtgtctgccactgacccagacttgggtaccaatggtactgtcaaatatagcatatctgctggggacaggtctcggtttcaggtcaatgctcagagtggggttatttctacaagaatggccctagacagagaagaaaaaacagcttatcagttgcaaatagtagctactgatggtggcaatttacaatctcccaaccaggcaatagtaaccatcactgtattggacactcaagacaacccacctgtattcagtcaggttgcctacagctttgtggtttttgagaacgtggcgctgggatatcatgtgggtagtgtgtctgcatccaccatggatctcaattccaacatcagttatctcattactactggggatcagaaaggtatgtttgctatcaaccaggtcactgggcagcttaccacagcaaatgtgattgatagagaagagcaatccttttatcagctgaaggtagtggccagtgggggcacagtgactggagacactatggttaacataacagttaaggatttgaatgacaactctccccatttccttcaggcaatagagagtgtaaatgtggtggagaattggcaggcaggtcacagcattttccaggccaaagctgtggaccctgatgaaggtgtcaatggcatggtactctatagtctgaagcaaaaccccaagaacctgtttgctatcaatgaaaagaatggcactattagtctgcttgggcccctggatgttcatgctggctcctaccaaatagagatcttggcatctgacatgggtgtcccacagctctcctctagtgtcatcttaacagtttatgtccatgatgtaaatgacaattcaccagtgtttgaccaactctcttatgaagtcaccctttctgagtcagaacctgtgaattctcgattctttaaagtacaagcttctgataaggattcaggagcaaatggtgaaattgcatacaccattgctgaaggaaatacaggggatgcttttggcatattcccagatggtcaattgtatataaaaagtgaactggaccgtgaacttcaagacagatatgttttaatggttgttgcttctgacagagcagtggaaccccttagtgctactgtgaatgttactgtaattttagaagatgtaaatgataacagacctctttttaacagtaccaattacacattttacttcgaagaagagcagagggctgggtcgtttgtgggcaaagtaagtgctgtagataaagactttgggccaaatggagaagtaaggtattcttttgaaatggtgcagccagattttgagttgcatgccatcagtggggaaattacaaatactcatcagtttgacagggagtctcttatgaggcggagagggactgctgtgtttagctttacagtcatagcaacagatcaggggatccctcagcctctcaaggatcaggccactgtacatgtttacatgaaggatataaatgataatgctcccaaatttttaaaagacttttaccaagctacaatatcagaatcagcagccaatctgacacaagtgttaagagtatctgcctcagatgttgatgaaggtaataatggacttattcactattctataataaaaggaaatgaagaaagacagtttgctatagacagtacctctggtcaggtaacactaattggcaaattagactatgaagcaacacctgcctattcccttgtaattcaagcagtggattcagggacaatccccctcaattcaacgtgtactttaaatattgatattttagatgaaaatgacaataccccttctttccctaaatcaacactctttgttgatgttttggaaaacatgagaattggtgaactcgtgtcctctgttactgcaactgattccgattcaggtgacaatgctgatttatattacagtattactgggactaacaaccacggaacttttagcattagcccaaacactgggagtatttttcttgccaaaaaactggactttgaaacacagtctttgtataaattaaatataacagcaaaagaccaaggaagacctcctcgttcatctacaatgtcagtggttattcacgtgagggactttaatgacaatcctcctagctttcctcctggagatattttcaagtctattgttgagaacattcccatcggtacatctgtcatttcagtgactgcacatgaccctgatgcagacattaatggtcaactatcctacacaatcattcaacagatgccaagaggcaaccactttaccatagatgaagtcaaagggactatatatactaatgctgaaatagatcgggaatttgctaatctctttgagttgactgtaaaagccaatgatcaagctgtgccaatagaaactagacggtatgctttgaagaacgtgaccattttggttacagacctcaatgacaatgtcccaatgtttatatcacaaaacgcccttgctgcagacccatcagctgtgattggttccgttctgacaacaattatggctgctgacccagatgaaggtgctaatggagaaatagagtatgagatcatcaatggggacacagacaccttcattgttgatcgttatagtggagacctgagagtggcttcagcgttggtgccttcacagttgatctacaatctcatagtttcagcaacagaccttgggcctgaaaggaggaaatcgaccactgaattgaccatcattcttcagggccttgatggacctgtttttactcaacccaaatatataactattttgaaggaaggagaacccattggcacaaacgtgatatcaatagaagcagctagccccagaggatctgaggccccagtggagtattatattgtttcagttcgttgtgaagaaaaaactgttggacgcctctttactattggacgacatactggtataattcagaccgcagccattctggaccgggagcaaggagcatgtctttacctggtggatgtttatgccatagaaaaatcaactgcttttcccagaacacagagagcagaggtagaaataacacttcaggatatcaatgacaatccaccagtatttccaacggacatgctggatctcacggtagaggagaacattggagatggctctaagattatgcagctgacagccatggatgctgatgagggtgcaaatgctctcgtcacatacactatcattagtggagctgatgatagttttcgcatcgacccagaatccggagatctgatagcaaccaggcggttggacagggaacgccgctccaaatattcactgctagttcgtgctgatgatggtcttcagtcctcggatatgagaattaatatcactgtcagtgatgtgaatgaccatacacccaaattttccagacccgtgtactcttttgacattcctgaggacacaatccctggttctttggtagcagccattttagccacggatgatgactctggtgtgaatggagaaattacatatattgtgaatgaagatgatgaagatggcatctttttcctgaatcctattactggggtctttaatttgactcgattattagattatgaagtacagcaatattatatcctcactgttcgagcagaagatggtgggggacaatttactaccatcagagtttatttcaatattctagatgtaaatgataatccacctattttcagcttgaattcatacagcacatctttaatggagaatctacctgtgggatctactgttcttgtgtttaatgttactgatgcagatgatggcatcaactctcaattgacttatagcattgcttcaggtgatagccttgggcagtttactgttgacaagaatggtgtactcaaagtcctaaaagctttggatcgggaaagtcagtccttctacaacttggttgttcaagtgcatgacctgccacagattccagcctccagattcacaagcactgctcaagtctccattattttgttggatgtaaatgataacccaccgacatttctttcccctaaattgacatacattccagaaaatacacctattgatactgttgttttcaaagctcaagcaactgacccagatagtggcccaaacagctatattgagtacactctgctgaaccctttgggaaacaagttcagtattgggaccattgatggtgaagtgaggctcactggagaactggacagagaagaagtttctaattatactctaacagtggtggctacagacaaaggtcaaccatctctctcttcatctacagaggttgtagttatggtacttgacatcaatgataacaaccccatctttgcacaagctttgtataaagtggagattaatgaaaacacacttactggaacagatataatacaagtgttcgcagcagatggagatgaaggcacaaatggacaggttcgctatggcattgttaatggtaataccaatcaggaatttcggatagactctgtcacaggtgccatcactgtcgctaaacctttggatagagaaaagacccctacctaccatttaactgttcaggcaacagatcgaggcagcacacccagaactgatacctccacggtcagcattgttctactggatattaatgactttgttcctgtatttgagctatctccatattctgtaaatgtccctgagaatttagggacactacccagaacaattcttcaggtggtggcaagagatgatgatcgaggatctaacagcaaactctcatatgttctgtttggtggtaatgaagacaatgcttttactctctcagccagtggagaacttggagtaacacagagtctggatcgggaaacaaaagagcgctttgtcttaatgattacagctacagattcaggatcccctgccttgactggaactggaacaatcaacgtcatagtagatgatgtcaatgacaatgtccccacatttgccagtaaagcgtatttcacaacaattcctgaggatgcaccaactggaacagatgttttattggtaaatgcctcagatgctgatgcttcaaagaatgcagttataaggatcatcggtggaaactctcagttcacgatcaacccatcgacaggacaaatcatcaccagcgcattgttagatagggaaacaaaagataattatactttggtagtggtctgcagtgatgcgggatccccagagcctctttccagttccaccagtgtgcttgtcactgtgactgatgtcaatgacaatccaccaagatttcagcatcacccatatgtcactcacatcccatctcctactcttccaggttcctttgtctttgcggttacagtcacagatgctgatattggaccaaattctgaactgcattattctctttcgggtagaaattctgaaaaatttcacattgacccactgaggggagccattatggccgccggaccactaaacggagcttcagaagtgacattttctgtgcatgtaaaagatggtggctcatttccaaagacagattctacaacagtgactgttagattcgtgaataaggccgatttccctaaagtgagagccaaagaacaaacgttcatgtttcctgaaaaccaaccagtcagctctcttgtcaccaccatcacaggatcctctttaagaggagaacctatgtcatattatatcgcaagtgggaatcttggcaatactttccagattgatcagttaacagggcaggtgtctattagtcaacctctggattttgaaaagatacaaaaatatgttgtatggatagaggccagagacggtggtttccctcctttctcctcttacgagaaacttgatataacagtattagatgtcaatgataatgccccaatttttaaggaagacccatttatatctgaaatattggaaaacctttcccctcgaaaaatacttactgtttcggcaatggacaaggacagtggacccaatggacagttagattatgaaattgttaatggcaacatggaaaatagtttcagtatcaatcatgctactggtgaaattagaagcgttagacctttggacagggaaaaagtatctcattatgtcctaaccataaaatcatcagacaaagggtccccgtctcagagtacttcagtaaaagtcatgattaacattttagatgaaaatgataatgcccctaggttttctcagatatttagtgcccatgttcctgaaaattcccccttaggatacacagttacccgtgtcacaacttctgatgaagacattgggatcaatgcaattagtagatattctataatggatgcaagtcttccatttacaattaatcccagcacaggggatattgtcataagcagacctttaaatagggaagatacagaccgttacagaattcgagtttccgcacatgattctgggtggactgtaagtacagatgtcacaatatttgtgacagacatcaatgacaatgctccaagatttagcagaacttcctattatttagattgccctgaacttactgagattggctccaaagtaactcaggtatttgcaacagatcctgatgagggatcaaatggacaagtgttttatttcataaaatcccaatcagaatatttcaggattaatgccaccactggagagattttcaataaacagatcttaaaataccaaaatgtcactggcttcagtaatgtgaatatcaacaggcatagttttatagtgacatcttcagatcgaggtaaaccttccttaattagtgagacaacagttaccatcaatatagtggacagtaatgacaatgcacctcaatttcttaaaagtaaatatttcactccagtcaccaaaaatgttaaggttggtacgaagttaatcagagttacagcaatagatgacaaagattttggactgaattcagaagtggagtatttcatttctaatgataaccatttaggaaaatttaagttggacaatgatacggggtggatttcagtagcatcctccctgatttctgacttgaaccaaaacttttttatcacagtcactgcaaaggataagggaaaccctccactttcttcccaagcaactgttcacataactgtcactgaggaaaactaccatacacctgaattctctcaaagccacatgagtgcaaccatccctgagagccatagcattgggtccattgtcagaactgtttctgcaagagatagagatgcagcgatgaatggcttgattaagtacagcatttcttcaggaaatgaagaaggcatttttgcaatcaattcttctacaggtatattaacactagccaaagctcttgattatgagctatgccagaaacacgaaatgacgattagtgctatagatggaggatgggttgcaagaactggttactgcagtgtgaccgtaaatgtgattgatgtgaatgataattctccagtattcctctctgatgactatttccctactgttttggaaaatgccccaagtggaacaacagttatccacctaaatgcaacagatgctgactctggaacaaatgctgtgattgcgtatactgtacagtcatctgacagtgacctctttgtcattgaccctaacacaggagtcataaccactcaaggcttcttggattttgaaaccaagcagagctaccatcttactgtgaaagccttcaatgtccccgatgaggaaaggtgtagctttgccactgttaatatacaattaaaagggacaaatgaatatgtgccccgttttgtttccaaactttactattttgaaatctcagaagcagctcctaaaggtactattgttggagaagtgtttgctagcgaccgtgatttgggcactgatggggaggtacactatttgatttttggtaatagtcgaaagaagggtttccagatcaataagaagactggacagatttatgtttctggaattcttgatcgagaaaaagaagaaagggtgtctttgaaggtattggccaagaactttggcagcattagaggtgcagatatagatgaggtcactgtaaatgtcaccgtgcttgatgcaaatgacccacccatttttactctaaacatctacagtgtgcagatcagtgaaggggtcccaataggaactcatgtgacctttgtcagtgcctttgactcagactccatccccagctggagcaggttttcttacttcatcggatcagggaatgaaaatggtgccttttctattaatccgcagacaggacagatcaccgttactgcagaattagatcgagaaacccttcccatctataatctctcagttttggctgttgattcagggaccccctcagctacaggtagtgcctctttattagtcaccctggaagatataaatgataacgggcccatgctgactgtcagtgaaggagaagtcatggaaaacaaacggccaggcactttggtgatgacccttcagtccactgaccctgatctccctccaaatcaaggtccctttacttattacttgctgagcacaggtcctgccaccagttatttcagtctgagcactgctggagttctgagcacaaccagagagattgacagagagcagattgcagacttctatctgtctgtggttaccaaggattctggtgttcctcaaatgtcttccacaggaactgtgcatatcacagttatagaccaaaatgacaatccttcacagtctcggacggtggagatatttgttaattattatggtaacttgtttcccggtgggattttaggctctgtgaagccacaggatccagatgtgttagacagcttccactgctcccttacttcaggagttaccagcctcttcagtattccagggggtacttgtgatctgaattcccagccaaggtccacagatggcacgtttgatctgactgtccttagcaatgatggagttcacagcacagtcacgagcaacatccgagttttctttgctggattttccaatgccacagtggataacagcatcttacttcgtctcggcgtaccaacagtaaaggacttcttgaccaaccactatcttcattttttacgcattgccagctcacagctgacaggcttagggactgctgtgcaactgtacagtgcatatgaagagaacaatagaacgtttcttttggcagctgtgaagcgaaatcataatcagtatgtgaatcccagtggcgtagccaccttctttgaaagcatcaaagagatccttctccggcagagtggagtaaaggtggaatctgtggatcatgactcctgtgtgcatggcccatgtcagaatggagggagctgtctacgaagattggctgtgagctccgtattaaaaagccgtgagagtcttccagtcatcatcgtggcaaatgaacctctgcagcctttcttatgcaagtgtctgccaggatatgcgggtagctggtgtgaaatagatatagatgaatgtcttccatcaccttgccacagtggtggaacctgtcacaatttagtgggaggattttcatgcagctgcccagatggcttcactggtagggcgtgtgagagagatatcaatgagtgcctgcagagtccttgcaagaatggtgccatctgccagaattttccaggaagcttcaactgtgtttgcaaaactggatacacagggaaaatgtgtgaatcttcagtcaattactgtgaatgcaacccctgctttaatggtggttcctgccaaagtggtgtggattcttattattgtcattgtccatttggtgtctttggaaaacactgcgagttgaacagttatggatttgaggagttatcatacatggaatttccaagcttggaccccaataacaactatatttatgtcaaatttgccacgattaaaagtcatgccttattgctttacaactatgacaaccagacaggcgaccgggctgagtttttggcccttgaaattgccgaagaaagactaagattctcttataatttaggcagtggtacatataagctcaccaccatgaagaaggtgtcagatggacattttcacactgtgattgccaggagagcaggaatggcagcctccttaactgtggactcctgttctgagaaccaagagccaggatattgtactgtcagtaatgtggcagtttcagatgactggactcttgatgttcagccaaatagagttacagttggaggtatcagatctctagaaccaatccttcagagaagaggacacgtggaaagccatgattttgttgggtgtataatggagtttgcagtcaatggaaggcctctggaacccagccaagctttggcagcacaaggcatcctagatcaatgccctaggctggaaggcgcttgtactcgcagcccatgccaacatggtggcacatgtatggattactggtcatggcagcagtgtcattgcaaagagggactcactgggaaatactgtgaaaaatctgttactcctgacactgccttatcattagaaggcaaagggcgcttggactaccacatgagtcagaatgagaagcgggaatatttgttaaggcaaagcttacgaggtgccatgttggagccttttggtgtgaacagtctggaagtaaaatttaggaccagaagcgagaatggcgttttaatccatatccaagaaagcagcaattacactactgtgaagattaagaatggcaaagtatattttacatccgatgcaggaattgctgggaaagtggagagaaatattcctgaagtatatgttgcagacggccactggcacacttttctaattgggaaaaatggaacagcaacagtattgtctgttgacagaatatataacagagatattatccaccctactcaggacttcggtggccttgatgtgcttactatatcacttggaggaattccacccaatcaagcacatcgagatgcccaaacagcaggttttgatggctgcattgcttctatgtggtatggtggagaaagtcttcctttcagcgggaagcatagcttggcctccatctcaaaaacagatccctcagtgaagattggctgccgtggcccgaacatttgtgccagcaacccctgctggggtgatttgctgtgcattaatcagtggtatgcctacaggtgtgtccctcctggggactgtgcctcccacccgtgccagaatggtggcagctgtgagccaggcctgcactccggcttcacctgtagctgcccagactcgcacacgggaaggacctgtgagatggtggtggcctgtcttggcgtcctctgtcctcaggggaaggtgtgcaaagctggaagtcctgcggggcatgtctgtgttctgagtcagggccctgaagagatctctctgcctttgtgggctgtgcctgccatcgtgggcagctgcgcaaccgtcttggccctcctggtccttagcctgatcctgtgtaaccagtgcagggggaagaaggccaaaaatcccaaagaggagaagaaaccgaaggagaagaagaaaaagggaagtgagaacgttgcttttgatgaccctgacaatatccctccctatggggatgacatgactgtgaggaagcagcctgaagggaacccaaaaccagatatcattgaaagggaaaacccctaccttatctatgatgaaactgatattcctcacaactcagaaaccatccccagcgcccctttggcatctccagagcaggagatagagcactatgacattgacaacgccagcagcatcgccccttcggatgcagacatcattcaacactacaagcagttccgcagccacacaccaaaattttcaatccagaggcacagtcccctaggctttgcaaggcaatcccccatgcccttaggagcaagcagtttgacttaccagccttcatatggtcaaggtttgagaaccagctccctaagccactcagcatgcccaactcccaaccctctgtctcgacacagtccagcccctttctccaaatcttctacgttctatagaaacagcccagcaagggaattgcatcttcctataagggatggtaatactttggaaatgcatggtgacacctgccaacctggcattttcaactatgccacaaggctgggaaggagaagcaagagtcctcaggccatggcatcacatggttctagaccagggagtcgcctaaagcagccgattgggcagattccactggaatcttctcctccagtcggactttctattgaagaagtggagaggctcaacacacctcgccctagaaacccaagtatctgcagtgcagaccatgggaggtcttcttcagaggaggactgcagaaggccactgtctagaacaaggaatccagcggatggcattccagctccagaatcctcttctgatagtgactcccatgaatctttcacttgctcagaaatggaatatgacagggagaagccaatggtatatacttccagaatgcccaaattatctcaagtcaatgaatctgatgcagatgatgaagataattatggagccagactgaagcctcgaaggtaccacggtcgcagggccgagggaggacctgtgggcacccaggcagcagcaccaggcactgctgacaacacactgcccatgaagctagggcagcaagcagggactttcaactgggacaaccttttgaactggggccctggctttggccattatgtagatgtttttaaagatttggcatctcttccagaaaaagcagcagcaaatgaagaaggcaaagctgggacaactaaaccagtccccaaagatggggaagcagaacagtatgtgtgaagtttatgtactggcactataaaatataaaaacaagaaataatactcaaaccattgtaaagttgctgactaggttgggtcacatttgaaaaacaggccagtatggactagtggtggagggaaaactttaaaaataataaccacaatgctgctgaaacagactcacaacaactcttaatttaaacatgtgtggttgaatttatttccctgcatgcattgtgttttgtaactagttatgtggcatgcagcatttggaaaatttttcttatttaccagtgtttgatttgtgatttttaaaaattgatacctttaccattgcagaaaagaacttgtgctttcccagtggcgtatgtgtattgtttcaactgtattattataattatattttgcattgcaagattcttgatgttaaaccaatccttgtaaagtgtaaaaaggaaccctcctatcgtggaatgaaagattaagtatattaacacttttcagaatgatagtttctgtatttgatgttgctcagaaatgtctcagtatttgagtaagttttacatgacagtgggtactgaaattaagtcattttgttcagcactttaacgctttcttatagaattgtcttaaaacttctggatccttgagcaaatgattatagtctcctgactttcatgaggcttccattaggaacagaatgattgcatgttgtccccagaacactgccaccttgctatgcgaatgatgttctcagcagcacttctaagaaacactcttaaaagttatttattgaaaatttttcgtatgcttttaatattttaaagaattgacctaaggaaagcttatgattggacttattttccaaccagataacatttactctaagtacccagtttttataatttatatgaaatcagatttcaacacttactttgtcattttgtagatcatttttttaaaatactgtgtaaaaactttttttacacctaagctgtgtttttgatactgatattttcctatgctgaatagttttcttactttcagggaaggtaagaaaatactttttttatatttgttacttatgtaacattcatatttttctcattttgatatttgtaacatactgtatgctttctacttgtaaatgtcaacaatagaattaaaatatttatttaaaata

SEQ ID NO: 10468 - DNA, 2431 bp, Homo sapiens
  source 1..2431: mol_type = unassigned DNA
tcccgggatgttagaggcgctcagggtggcagcagagcagacgccgggctgcgcgctgggagctgcggtctccggccatggcccccgctccgccccccgccgcctccttctcgccctccgaggtccagcggcgcctggcggccggcgcgtgctgggtccgccgcggggcccgcctctacgacctctccagcttcgtgcggcaccacccggggggcgagcagctgctgcgggccagggcgggccaggacatcagcgccgacctggacgggccgccgcacaggcactcggccaacgcgcgccgctggctggagcagtactacgtgggagagctccgcggggagcagcagggctccatggagaacgagcctgtagcccttgaggaaactcagaagacagatcctgctatggaaccacggttcaaagtggtggattgggacaaggacctggtggactggcgaaagcctctcctgtggcaggtgggccacttgggagagaagtacgatgagtgggttcaccagccggtgaccaggcccatccgcctcttccactcagacctcattgagggcctctctaagactgtctggtacagtgtccccatcatctgggtgcccctggtgctgtatctcagctggtcctactaccgaacctttgcccagggcaacgtccgactcttcacgtcatttacaacagagtacacggtggcagtgcccaagtccatgttccccgggctcttcatgctggggacattcctctggagcctcatcgagtacctcatccaccgcttcctgttccacatgaagccccccagcgacagctattacctcatcatgctgcacttcgtcatgcacggccagcaccacaaggcacccttcgacggctcccgcctggtcttcccccctgtgccagcctccctggtgatcggcgtcttctacttgtgcatgcagctcatcctgcccgaggcagtagggggcactgtgtttgcggggggcctcctgggctacgtcctctatgacatgacccattactacctgcactttggctcgccgcacaagggctcctacctgtacagcctgaaggcccaccacgtcaagcaccactttgcacatcagaagtcaggatttggtatcagcactaaattgtgggattactgtttccacaccctcactccagagaaaccccacctgaagacgcagtgacaactcccaccccctccgtcctgccctcagcccggccctggccccttcccgacccccacccgccattcagaccccattaagaaggttggcttggccaggcaggatgggctgtgtccggccctgcagcctagtggaaggtgctgagggggccctgaggcaggaccgccctcctgacccctggtaggagggtcacatccacttggtggccaggtggcccttggtgacccacttcttcctggagcgtccctgcctagagctcagcccacaggactgcttcaggccgtggccacaggtagcagccgcaaggggaaatgaagaaaactgagccctcgtggccacctgtgtcacccttgtgccttagcctcatgggctgcctaggagctgcctgcacggcacagctcgctttcacagtcagaagtgggtctgtgggatctgtggtccctgtcctccctgctgtcccttctggggaggctttggtggctctgaggtggacaaagagctctcgcaagaagagacagcgtgatgcctcccacagtccaccccagaccctggggcagcccctctggccctgccagctgcctgcgtcgttgggcccagggtggctggcaggagtcccagctgcttgctttaggacctggcagcttttcttgccgtccctcccctgcctccagaatcacagcccttctccccaagggaggctgaggaggcttctccaccagtggcagccccaccccgtccctggccattcttggcctccaccccgctcaggcccctactcgggcgctcccagaaggagccacctctcagtgcctcacctccccctgcctcccagcctccgcagatgaggttcctgccccttcctcctcgtaaccaaaaccctcactgctcccaggacggtcttatttataaaccagatacatgttcttagtctggtcccagaccaaggagctggtcagacggccctttctaatcctacatgttgagcttatgtaaaaaatgttgtttcctcctgtttttggttcctttcttacccacaaaccattactacttgaaacttaaaaaactcgccaagtgtaaaggctaaagagaagcagtttgacggaccttgtgatttgtactgtttgctgcggagctatttaaagattttggaataaatatacaaaactacggttgtgaaataaaaacttaaattgtatattttgaaaaataaaacactgaaaagaaaccaacaaaaa

SEQ ID NO: 10469 - DNA, 1537 bp, Homo sapiens
  source 1..1537: mol_type = unassigned DNA
cccgggatgttagaggcgctcagggtggcagcagagcagacgccgggctgcgcgctgggagctgcggtctccggccatggcccccgctccgccccccgccgcctccttctcgccctccgaggtccagcggcgcctggcggccggcgcgtgctgggtccgccgcggggcccgcctctacgacctctccagcttcgtgcggcaccacccggggggcgagcagctgctgcgggccagggcgggccaggacatcagcgccgacctggacgggccgccgcacaggcactcggccaacgcgcgccgctggctggagcagtactacgtgggagagctccgcggggagcagcagggctccatggagaacgagcctgtagcccttgaggaaactcagaagacagatcctgctatggaaccacggttcaaagtggtggattgggacaagagtacacggtggcagtgcccaagtccatgttccccgggctcttcatgctggggacattcctctggagcctcatcgagtacctcatccaccgcttcctgttccacatgaagccccccagcgacagctattacctcatcatgctgcacttcgtcatgcacggccagcaccacaaggcacccttcgacggctcccgcctggtcttcccccctgtgccagcctccctggtgatcggcgtcttctacttgtgcatgcagctcatcctgcccgaggcagtagggggcactgtgtttgcggggggcctcctgggctacgtcctctatgacatgacccattactacctgcactttggctcgccgcacaagggctcctacctgtacagcctgaaggcccaccacgtcaagcaccactttgcacatcagaagtcaggatttggtatcagcactaaattgtgggattactgtttccacaccctcactccagagaaaccccacctgaagacgcagtgacaactcccaccccctccgtcctgccctcagcccggccctggccccttcccgacccccacccgccattcagaccccattaagaaggttggcttggccaggcaggatgggctgtgtccggccctgcagcctagtggaaggtgctgagggggccctgaggcaggaccgccctcctgacccctggtaggagggtcacatccacttggtggccaggtggcccttggtgacccacttcttcctggagcgtccctgcctagagctcagcccacaggactgcttcaggccgtggccacaggtagcagccgcaaggggaaatgaagaaaactgagccctcgtggccacctgtgtcacccttgtgccttagcctcatgggctgcctaggagctgcctgcacggcacagctcgctttcacagtcagaagtgggtctgtgggatctgtggtccctgtcctccctgctgtcccttctggggaggctttggtggctctgaggtggacaaagagctctcgcaagaagagacagcgtgatgcctcccacagtccaccccagaccctggggcagcccctctggccctgccagctgcctgcgtcgttggg

SEQ ID NO: 10470 - DNA, 2094 bp, Homo sapiens
  source 1..2094: mol_type = unassigned DNA
agtccgggttttgcggcggagcgggcgggctgcgcgtgcggcggcttcaactgtcgcggtaggcagcagcaggctgaagggatcatggtgcagtacgagctgtgggccgcgctgcctggcgcctccggggtcgccctggcctgctgcttcgtggcggcggccgtggccctgcgctggtccgggcgccggacggcgcggggcgcggtggtccgggcgcgacagaggcagcgagcgggcctggagaacatggacagggcggcgcagcgcttccggctccagaacccagacctggactcagaggcgctgctagccctgcccctgcctcagctggtgcagaagttacacagtagagagctggcccctgaggccgtgctcttcacctatgtgggaaaggcctgggaagtgaacaaagggaccaactgtgtgacctcctatctggctgactgtgagactcagctgtctcaggccccaaggcagggcctgctctatggcgtccctgtgagcctcaaggagtgcttcacctacaagggccaggactccacgctgggcttgagcctgaatgaaggggtgccggcggagtgcgacagcgtagtggtgcatgtgctgaagctgcagggtgccgtgcccttcgtgcacaccaatgttccacagtccatgttcagctatgactgcagtaaccccctctttggccagaccgtgaacccatggaagtcctccaaaagcccagggggctcctcagggggtgaaggggccctcatcgggtctggaggctcccccctgggcttaggcactgatatcggaggcagcatccgcttcccctcctccttctgcggcatctgcggcctcaagcccacagggaaccgcctcagcaagagtggcctgaagggctgtgtctatggacaggaggcagtgcgtctctccgtgggccccatggcccgggacgtggagagcctggcactgtgcctgcgagccctgctgtgtgaggacatgttccgcttggaccccactgtgcctcccttgcccttcagagaagaggtctacaccagctctcagcccctgcgtgtggggtactatgagactgacaactataccatgccctccccggccatgaggcgggccgtgctggagaccaaacagagccttgaggctgcggggcacacgctggttcccttcttgccaagcaacataccccatgctctggagaccctgtcaacaggtgggctcttcagtgatggtggccacaccttcctacagaacttcaaaggtgatttcgtggacccctgcctgggggacctggtctcaattctgaagcttccccaatggcttaaaggactgctggccttcctggtgaagcctctgctgccaaggctgtcagctttcctcagcaacatgaagtctcgttcggctggaaaactctgggaactgcagcacgagatcgaggtgtaccgcaaaaccgtgattgcccagtggagggcgctggacctggatgtggtgctgacccccatgctggcccctgctctggacttgaatgccccaggcagggccacaggggccgtcagctacactatgctgtacaactgcctggacttccctgcaggggtggtgcctgtcaccacggtgactgctgaggacgaggcccagatggaacattacaggggctactttggggatatctgggacaagatgctgcagaagggcatgaagaagagtgtggggctgccggtggccgtgcagtgtgtggctctgccctggcaagaagagttgtgtctgcggttcatgcgggaggtggagcgactgatgacccctgaaaagcagtcatcctgatggctctggctccagaggacctgagactcacactctctgcagcccagcctagtcagggcacagctgccctgctgccacagcaaggaaatgtcctgcatggggcagaggcttccgtgtcctctcccccaaccccctgcaagaagcgccgactccctgagtctggacctccatccctgctctggtcccctctcttcgtcctgatccctccacccccatgtggcagcccatgggtatgacataggccaaggcccaactaacagtcaagaaaca

SEQ ID NO: 10471 - DNA, 1195 bp, Homo sapiens
  source 1..1195: mol_type = unassigned DNA
gcggtaggcagcagcaggctgaagggatcatggtgcagtacgagctgtgggccgcgctgcctggcgcctccggggtcgccctggcctgctgcttcgtggcggcggccgtggccctgcgctggtccgggcgccggacggcgcggggcgcggtggtccgggcgcgacagaggcagcgagcgggcctggagaacatggacagggcggcgcagcgcttccggctccagaacccagacctggactcagaggcgctgctagccctgcccctgcctcagctggtgcagaagttacacagtagagagctggcccctgaggccgtgctcttcacctatgtgggaaaggcctgggaagtgaacaaagggaccaactgtgtgacctcctatctggctgactgtgagactcagctgtctcaggccccaaggcagggcctgctctatggcgtccctgtgagcctcaaggagtgcttcacctacaagggccaggactccacgctgggcttgagcctgaatgaaggggtgccggcggagtgcgacagcgtagtggtgcatgtgctgaagctgcagggtgccgtgcccttcgtgcacaccaatgttccacagtccatgttcagctatgactgcagtaaccccctctttggccagaccgtgaacccatggaagtcctccaaaagcccagggggctcctcagggggtgaaggggccctcatcgggtctggaggctcccccctgggcttaggcactgatatcggaggcagcatccgcttcccctcctccttctgcggcatctgcggcctcaagcccacagggaaccgcctcaggtctacaccagctctcagcccctgcgtgtggggtactatgagactgacaactataccatgccctccccggccatgaggcgggccgtgctggagaccaaacagagccttgaggctgcggggcacacgctggttcccttcttgccaagcaacataccccatgctctggagaccctgtcaacaggtgggctcttcagtgatggtggccacaccttcctacagaacttcaaaggtgatttcgtggacccctgcctgggggacctggtctcaattctgaagcttccccaatggcttaaaggactgctggccttcctggtgaagcctctgctgccaaggctgtcagctttcctcagcaacatgaagtctcgctgccggcccctgcct

SEQ ID NO: 10472 - DNA, 1983 bp, Homo sapiens
  source 1..1983: mol_type = unassigned DNA
agacactggacttgtaaacgaaaagcttcataagtccctctttgcttagtacttttctcgtcctttccccagggtgcacgtaaccctcaagcactaggaccgtgcggaatccaggctgcgatggcaccttcatttaccgcccgcattcagttgttcctcttgcgggcgctaggctttctcataggcttagtaggccgagcagctttagtcttagggggtccaaagtttgcctcaaagacccctcggccggtgactgaaccattgcttctgctttcggggatgcagctggccaagctgatccgacagagaaaggtgaaatgtatagatgttgttcaggcttatatcaacagaatcaaggacgtgaacccaatgatcaatggaattgtcaagtacaggtttgaggaagcgatgaaggaggctcatgctgtagatcaaaagcttgcagagaagcaggaagatgaagccaccctggaaaataaatggcccttccttggggttcctttgacagtcaaggaagctttccagctacaaggaatgcccaattcttctggactcatgaaccgtcgtgatgccattgccaaaacagatgccactgtggtggcattactgaagggagctggtgccattcctcttggcataaccaactgtagtgagttgtgtatgtggtatgaatccagtaacaagatctatggccgatcaaacaacccatatgatttacagcatattgtaggtggaagttctggtggtgagggctgcacactggcagctgcctgctcagttattggtgtgggctctgatattggtggtagcattcgaatgcctgctttcttcaatggtatatttggacacaagccttctccaggtgtggttcccaacaaaggtcagtttcccttggctgtgggagcccaggagttgtttctgtgcactggtcctatgtgccgttatgctgaagacctggcccccatgttgaaggtcatggcaggacctgggatcaaaaggttaaaactagacacaaaggtacatttaaaagacttaaaattttactggatggaacatgatggaggctcatttttaatgtccaaagtggaccaagatctcattatgactcagaaaaaggttgtggttcaccttgaaactattctaggagcctcagttcaacatgttaaactgaagaaaatgaagtactcttttcagttgtggatcgcaatgatgtcagcaaagggacatgatgggaaggaacctgtgaaatttgtagatttgcttggtgaccatgggaaacatgtcagtcctctgtgggagttgatcaaatggtgcctgggtctgtcagtgtacaccatcccttccattggactggctttgttggaagaaaagctcagatatagcaatgagaaataccaaaagtttaaggcagtggaagaaagcctgcgtaaagagctggtggatatgctaggtgatgatggtgtgttcttatatccctcacatcccacagtggcacctaagcatcatgtccctctaacacggcctttcaactttgcttacacaggtgtcttcagtgccctgggtttgcctgtgacccaatgcccactgggactgaatgccaaaggactccctttaggcatccaggttgtggctggaccctttaatgatcatctgaccctggctgtggcccagtacttggagaaaacttttgggggctgggtctgtccaggaaagttttaggaggaccttctgcaaggttaatgtgtgtgtgtgtttgtgttcgtgtggtggtgtttctattaattgggtgaaatcaagcaccagcagacaagcagagaaacaactggggaatttattgactcatttagttattctttctacttttatttccttctctaactgttggtcttactaaaatggtaatatttgcttcttgcttttatgttactggaaaattaggacatgtaaatggataagtgcaataaagtttcctaaatgctggaa

SEQ ID NO: 10473 - DNA, 546 bp, Homo sapiens
  source 1..546: mol_type = unassigned DNA
tattcgaagggaagggagccccctataaaacagcctacagtggacagtctggtcggcagagccgcaggtcagtcgtgaagagggagctctattgccaccatgagtttctccggcaagtaccaactgcagagccaggaaaactttgaagccttcatgaaggcaatcggtctgccggaagagctcatccagaaggggaaggatatcaagggggtgtcggaaatcgtgcagaatgggaagcacttcaagttcaccatcaccgctgggtccaaagtgatccaaaacgaattcacggtgggggaggaatgtgagctggagacaatgacaggggagaaagtcaagacagtggttcagttggaaggtgacaataaactggtgacaactttcaaaaacatcaagtctgtgaccgaactcaacggcgacataatcaccaataccatgacattgggtgacattgtcttcaagagaatcagcaagagaatttaaacaagtctgcatttcatattattttagtgtgtaaaattaatgtaataaagtgaactttgtttt

SEQ ID NO: 10474 - DNA, 2478 bp, Homo sapiens
  source 1..2478: mol_type = unassigned DNA
ctaattcttgaaataagtatgcccacaaactgtaatttaagacagaataggtatgcttctcatgttttaattcagttgaatttcagaagatctcaggaatgtacagaacgagaattaagaattaattaataagaattaattaattgcttgacatagttaggtgatttcctgaactttaagcttccacatcacagtatgaagttggttctaagataagaaatataataaattctcgcccaaggacagacctgaatctctagctgcctagaggctgactcaactgaaatcatggcgtttgacagcacttggaaggtagaccggagtgaaaactatgacaagttcatggaaaaaatgggtgttaatatagtgaaaaggaagcttgcagctcatgacaatttgaagctgacaattacacaagaaggaaataaattcacagtcaaagaatcaagcacttttcgaaacattgaagttgtttttgaacttggtgtcacctttaattacaatctagcagacggaactgaactcagggggacctggagccttgagggaaataaacttattggaaaattcaaacggacagacaatggaaacgaactgaatactgtccgagaaattataggtgatgaactagtccagacttatgtatatgaaggagtagaagccaaaaggatctttaaaaaggattgagcattattcttggcgcacagtccaaaatacaaattggacagaagatctatattgtaccagaactatttatttcaccccatcaagtataaggttactgattgattggtccttttataaacattggtatatttccattcatgccaaagcaaaagaagtaaaagctaattaggatttaatttgttttatattctctaagatatatatttactaaaagaatttgtgacattttaaaaaacaaaaataaatattgcgtccatgttgctttatatgtagccttgccttttaaaagaaaaagtatgtgaatatgaattgacagactgttttcgtagagagagggtcttactctttcactcaggctggaatgtagtggagagatcatagctcactgtaacctcaaactcctggactcatgcaatcttcctgcctcaggcttctgagtagctaggactatgggtacattccacagtgcccagctaatttttgttttgttttctttttattttttttagagatggggtcttgctatattgcccaggctggtcttgaacccctggcctcaagcaatcctcctgcctcagcctctcaagttgttttttttctttacatttgataaactaaaagcataggctgcatatgagtctttaacatcttgaactggttgtgaataattttctggcactggttgtaagtaatatctattattataaaaataatatatgctcaaccagaaaacttagaaataagaaacacaaatgtaaaataagtatttccataactcataatccagagataattgccattctgattttgatagatatcctctcagctctcttccctgggggcagatatttcccaatacataccactttgaataggatgataggaaataaatgatgtactacattaaattaaattattgtattacatttttgtacacatcagtcattcccacgcttggctgaaaatcaggatcatctgagaaacttaaacaatttctgcattcttaatctccactgttattctattatatcagaatcgctaatagaaccaagaattctagaaaatttcctggtgattctgatgcagcctgtccactaacttgtctttgagaacaatggagatatcagttatcaatgttatttttaaccacccccttcttttttgttgttgtgggttttttcacataaacacatacattgccaattttccagggctcaaaaagtttccttttattcatattttcacatgacgtaaaattttatgtgcttcacataattgtattttagcagggtacatattaggggatggagagggggtacaatttttaagcatttgcagctgcaactctatagacttttgacaaattctttttcacactgatgtagataacagcttaacatttacatagttcttactacttgccacacactgttctaagtggtatatacatatgacatatatattaaaatgtaggaagaaaaatgtttgagtacctgatgaaaatgaatagagagtatgtaatctttgaaagctgaatactgcgtgttctcacttataagtgggagctaaataatgtatacacatggacacaccagagtgtagaataatagacactggagacttggaagagttggagggttggcagggggcgatgataatttacttaatgggtacaatgtacattattcagggggtgatggttacagcccagactttaccactatgcaatatatcaatgtaacaaaactatacttgtactccttaaatttatataaaaataccttaaatcta

SEQ ID NO: 10475 - DNA, 725 bp, Homo sapiens
  source 1..725: mol_type = unassigned DNA
gccgtcggagcccttgcacgcctgctctcttgtagcttctctcagcctagcccagcatcactatggtggacgctttcctgggcacctggaagctagtggacagcaagaatttcgatgactacatgaagtcactcggtgtgggttttgctaccaggcaggtggccagcatgaccaagcctaccacaatcatcgaaaagaatggggacattctcaccctaaaaacacacagcaccttcaagaacacagagatcagctttaagttgggggtggagttcgatgagacaacagcagatgacaggaaggtcaagtccattgtgacactggatggagggaaacttgttcacctgcagaaatgggacgggcaagagaccacacttgtgcgggagctaattgatggaaaactcatcctgacactcacccacggcactgcagtttgcactcgcacttatgagaaagaggcatgacctgactgcactgttgctgactactactctgccaatcggctacccctcgactcagcaccacattgcctcatttcttcctctgcattttgtacaaatccacgaattcttctggggtcaggtgccactgaccgggatccagttccagttcccatggtgtatgtggttttttttttttttttttaactgcactcatagggtgctctgaggtcaataaagcagagccaaggccacccagttgcctttttgcctttggtaacataa

SEQ ID NO: 10476 - DNA, 851 bp, Homo sapiens
  source 1..851: mol_type = unassigned DNA
ggccgtcgcgtaccctggcaagaggagctggttagcacctcccgaccccgagaaggcccagggggcgcccggcgggcggggcggggaccgggcgaggcccgcctcccattggccgcatagcgccgcccagcgcgggccgccgttataaagcagccgccggcgccgggtgcctcacagcacgctgccacgccgacgcagacccctctctgcacgccagcccgcccgcacccaccatggccacagttcagcagctggaaggaagatggcgcctggtggacagcaaaggctttgatgaatacatgaaggagctaggagtgggaatagctttgcgaaaaatgggcgcaatggccaagccagattgtatcatcacttgtgatggtaaaaacctcaccataaaaactgagagcactttgaaaacaacacagttttcttgtaccctgggagagaagtttgaagaaaccacagctgatggcagaaaaactcagactgtctgcaactttacagatggtgcattggttcagcatcaggagtgggatgggaaggaaagcacaataacaagaaaattgaaagatgggaaattagtggtggagtgtgtcatgaacaatgtcacctgtactcggatctatgaaaaagtagaataaaaattccatcatcactttggacaggagttaattaagagaatgaccaagctcagttcaatgagcaaatctccatactgtttctttcttttttttttcattactgtgttcaattatctttatcataaacattttacatgcagctatttcaaagtgtgttggattaattaggatcatccctttggttaataaataaatgtgtttgtgctaata

SEQ ID NO: 10477 - DNA, 756 bp, Homo sapiens
  source 1..756: mol_type = unassigned DNA
gcgacaacaaaacagattactttgaagggactagaaggaggacacagggtcctggaggaaggcagctggcaagttacagagcagaaagactttgcacctctggctccagggagctcacaggcaggggctggtccagcccagaggcgatgaagacagtgacgatgatgatggtggtggagatgcaggcgctgactcaggttctgagagctgtgttgtctgcgtgcacatgggtgagccggaaaggagacctgcagagaatgaaacagacacataaaggaaagcctcccagcagcatggctttcaccggcaagttcgagatggagagtgagaagaattatgatgagttcatgaagctccttgggatctccagcgatgtaatcgaaaaggcccgcaacttcaagatcgtcacggaggtgcagcaggatgggcaggacttcacttggtcccagcactactccgggggccacaccatgaccaacaagttcactgttggcaaggaaagcaacatacagacaatggggggcaagacgttcaaggccactgtgcagatggagggcgggaagctggtggtgaatttccccaactatcaccagacctcagagatcgtgggtgacaagctggtggaggtctccaccatcggaggcgtgacctatgagcgcgtgagcaagagactggcctaagcagccaggcccggcccagggagctacaaacccaccaataaaactgatataaggacagacgctgctcgctccagaa

SEQ ID NO: 10478 - DNA, 663 bp, Homo sapiens
  source 1..663: mol_type = unassigned DNA
cattgcagactttgcacctctggctccagggagctcacaggcaggggctggtccagcccagaggcgatgaagacagtgacgatgatgatggtggtggagatgcaggcgctgactcaggttctgagagctgtgttgtctgcgtgcacatgggtgagccggaaaggagacctgcagagaatgaaacagacacataaaggaaagcctcccagcagcatggctttcaccggcaagttcgagatggagagtgagaagaattatgatgagttcatgaagctccttgggatctccagcgatgtaatcgaaaaggcccgcaacttcaagatcgtcacggaggtgcagcaggatgggcaggacttcacttggtcccagcactactccgggggccacaccatgaccaacaagttcactgttggcaaggaaagcaacatacagacaatggggggcaagacgttcaaggccactgtgcagatggagggcgggaagctggtggtgaatttccccaactatcaccagacctcagagatcgtgggtgacaagctggtggaggtctccaccatcggaggcgtgacctatgagcgcgtgagcaagagactggcctaagcagccaggcccggcccagggagctacaaacccaccaataaaactgatataaggacagacgct

SEQ ID NO: 10479 - DNA, 572 bp, Homo sapiens
  source 1..572: mol_type = unassigned DNA
gaagaagtggggtgacttaggggctgagcctcagcaactgggagagtttataagctgggatagcagacccctcagcaccacccattctcctcatccctctgctctctggcctccagcctcccagcagcatggctttcaccggcaagttcgagatggagagtgagaagaattatgatgagttcatgaagctccttgggatctccagcgatgtaatcgaaaaggcccgcaacttcaagatcgtcacggaggtgcagcaggatgggcaggacttcacttggtcccagcactactccgggggccacaccatgaccaacaagttcactgttggcaaggaaagcaacatacagacaatggggggcaagacgttcaaggccactgtgcagatggagggcgggaagctggtggtgaatttccccaactatcaccagacctcagagatcgtgggtgacaagctggtggaggtctccaccatcggaggcgtgacctatgagcgcgtgagcaagagactggcctaagcagccaggcccggcccagggagctacaaacccaccaataaaactgatataaggaca

SEQ ID NO: 10480 - DNA, 2086 bp, Homo sapiens
  source 1..2086: mol_type = unassigned DNA
ccccgctcctgtctctaaagaggggaaagggcaaggatggtggaggctttctgtgctacctggaagctgaccaacagtcagaactttgatgagtacatgaaggctctaggcgtgggctttgccactaggcaggtgggaaatgtgaccaaaccaacggtaattatcagtcaagaaggagacaaagtggtcatcaggactctcagcacattcaagaacacggagattagtttccagctgggagaagagtttgatgaaaccactgcagatgatagaaactgtaagtctgttgttagcctggatggagacaaacttgttcacatacagaaatgggatggcaaagaaacaaattttgtaagagaaattaaggatggcaaaatggttatggtaagtaatgacaattctccattcttccttgtttttttctcctctccgcacacctctcacctccttccttcttcttccctcctccttccattcttcctccttccttccttctttaataatacatcactggcaaggttctttaactatatgtaaaacaggggaaacaaaaagatcccagttaattttcttcttcagctcaacttctttgattgtagaaaaagagaaaaattcatgtgtagttaaaaaaataaaagttgccattgatttgcctaaaactgtgtcaaaagattttttgtaggataactatggatgtctctcaaataaaatttaatataaagcccataatcactgaaatatataaagataattgctattataagagaatctcagacagatgactttatagctcctgtaataagagatctttaaacagtttatattttaatttataaagttacacaagttctgggcagataatttagaatataacagaaaagtataacaaaaaaattaaaatcccctctgatttctcatcagtgataacccttttttttttttttttttgagataaagtcttgctgtgtcacccagactggagtgcagggggtgcattcttggctcactgcaacctctgcttcatgggctcaagcgattctacaacctcagcctcctaagtagctgggaccacaggtgcaagccaccaacgccgggctaatttttttgtatttttgtagagatgggatttcgccatgttgcccaggctggcctacagctcttgagctcaaagtgatgctcccgcctgctgcctcggcctcccagagtgctgggattacaggcctgagccaaggctcccagcccccaaagagaaccattttgatgttacttctttccagtttttttctcgaatgcataatatgccttttaaacatatatattcaatactaggtagacatgaaaaatatttttttcaatcagcctcttcttacttactaggaattatctgtaaaagaggatttattagtgtcctaaggctgccacaacaaagtaccacaaacttggtggcttaaaacaacagaaatgaattttctcagttctgaaagctggacgcctgagatcaaggcgaccctagtgttgccatccttctgcgggccccctcccttgcttcttcctacttcccggatggctcctggcaatcattgaggttgttgggcttacagttgttattactctgatccatttctgactccatctttacaagactttttcctctgtttttgtcctaaattgatcaaatataaaataattaacaaataatttatctaatgatggagtagtatcacaaactaggagaaatattatgccttcaccaagccttcctcagacactttttgtgtgacctgcaatggtatattgatgatactgacataggtgggtaggctcattcaattttggaggagggtgtgagaatgctttacatagtccttgtacgatgacagcagagaaagttttgttgtttaagaatggggactcatgtttccttctccccttgactactgcaatcagcactgttctgcattgagatattcatgtttctgtggagatggaggtggggagcagagggacagttttcctttcatgttaaaggatatttgctcacatttttttggcaacaatcaataaaagaaaggactcatttctaaaa

SEQ ID NO: 10481 - DNA, 1026 bp, Homo sapiens
  source 1..1026: mol_type = unassigned DNA
tttctcaggcataagggctgtagtgtgaggattgggaggaactcgacctactccgctaacccagtggcctgagccaatcacaaagaggattggagcctcactcgagcgctccttcccttctcctctctctgtgacagcctcttggaaagagggacactggaggggtgtgtttgcaatttaaatcactggatttttgcccaccctctttccaaataagaaggcaggagctgcttgctgaggtgtaaagggtcttctgagctgcagtggcaattagaccagaagatccccgctcctgtctctaaagaggggaaagggcaaggatggtggaggctttctgtgctacctggaagctgaccaacagtcagaactttgatgagtacatgaaggctctaggcgtgggctttgccactaggcaggtgggaaatgtgaccaaaccaacggtaattatcagtcaagaaggagacaaagtggtcatcaggactctcagcacattcaagaacacggagattagtttccagctgggagaagagtttgatgaaaccactgcagatgatagaaactgtaagtctgttgttagcctggatggagacaaacttgttcacatacagaaatgggatggcaaagaaacaaattttgtaagagaaattaaggatggcaaaatggttatgacccttacttttggtgatgtggttgctgttcgccactatgagaaggcataaaaatgttcctggtcggggcttggaagagctcttcagtttttctgtttcctcaagtctcagtgctatcctattacaacatggctgatcattaattagaaggttatccttggtgtggaggtggaaaatggtgatttaaaaacttgttactccaagcaacttgcccaattttaatctgaaaatttatcatgttttataatttgaattaaagttttgtcccccccccccttttttttataaacaagtgaatacattttataatttcttttggaatgtaaatcaaatttgaataaaaatcttacacgtgaaa

SEQ ID NO: 10482 - DNA, 4523 bp, Homo sapiens
  source 1..4523: mol_type = unassigned DNA
cattcactcctgcagcgcggccccgcacccagggcctgcactagaaccgctgttcctaccgcggcgccccctgggagccaacgccgcgatgcccgcctgacgtcaggaagtcgaatccggcggcgacgcctttagggagcccgcgagggggcgcgtgttggcagcccagctgtgagttgcccaagacccaccgggggacgggatctcgctccccgcgccacgaggctcggccaatgggaacgcgcgctgcgaggcccgccggtctgccctgcggtgctgaaaacccggcgcgcaggcggctggctctgggcgcgcgccagcaaatccactcctggagcccgcggaccccgagcacgcgcctgacagcccctgctggcccggcgcgcggcgtcgccaggccagctatggcccccgacccggtggccgccgagaccgcggctcagggacctaccccgcgctacttcacctgggacgaggtggcccagcgctcagggtgcgaggagcggtggctagtgatcgaccgtaaggtgtacaacatcagcgagttcacccgccggcatccagggggctcccgggtcatcagccactacgccgggcaggatgccacggatccctttgtggccttccacatcaacaagggccttgtgaagaagtatatgaactctctcctgattggagaactgtctccagagcagcccagctttgagcccaccaagaataaagagctgacagatgagttccgggagctgcgggccacagtggagcggatggggctcatgaaggccaaccatgtcttcttcctgctgtacctgctgcacatcttgctgctggatggtgcagcctggctcaccctttgggtctttgggacgtcctttttgcccttcctcctctgtgcggtgctgctcagtgcagttcaggcccaggctggctggctgcagcatgactttgggcacctgtcggtcttcagcacctcaaagtggaaccatctgctacatcattttgtgattggccacctgaagggggcccccgccagttggtggaaccacatgcacttccagcaccatgccaagcccaactgcttccgcaaagacccagacatcaacatgcatcccttcttctttgccttggggaagatcctctctgtggagcttgggaaacagaagaaaaaatatatgccgtacaaccaccagcacaaatacttcttcctaattgggcccccagccttgctgcctctctacttccagtggtatattttctattttgttatccagcgaaagaagtgggtggacttggcctggatgattaccttctacgtccgcttcttcctcacttatgtgccactattggggctgaaagccttcctgggccttttcttcatagtcaggttcctggaaagcaactggtttgtgtgggtgacacagatgaaccatattcccatgcacattgatcatgaccggaacatggactgggtttccacccagctccaggccacatgcaatgtccacaagtctgccttcaatgactggttcagtggacacctcaacttccagattgagcaccatctttttcccacgatgcctcgacacaattaccacaaagtggctcccctggtgcagtccttgtgtgccaagcatggcatagagtaccagtccaagcccctgctgtcagccttcgccgacatcatccactcactaaaggagtcagggcagctctggctagatgcctatcttcaccaataacaacagccaccctgcccagtctggaagaagaggaggaagactctggagccaaggcagaggggagcttgagggacaatgccactatagtttaatactcagagggggttgggtttggggacataaagcctctgactcaaactcctcccttttatcttctagccacagttctaagacccaaagtggggggtggacacagaagtccctaggagggaaggagctgttggggcaggggtgtaaattatttcctttttctagtttggcacatgcaggtagttggtgaacagagagaaccaggagggtaacagaagaggagggacctactgaacccagagtcaggaagagatttaacactaaaattccactcatgccgggcgtggtggcacgcgcctgtaatcccagctacccaggaggctgaggcaggagaatcgcttgaaccggggaggtggaggttgcagtgagctgagatcacgccattgtactccagcctgggcgacagagcaagactccatttcaaaaaaaaaaaaaaaatccactcatataaaaggtgagctcagctcactggtccatttctcagtggcttctccatcctcatttgcaaacctcagagggataaggcagttgaacctgatgagcaagaattataacagcaaggaaacattaatgcttagaattctgagatccagcacaactcagtctgtgggagctcagctcgctgcccagggataggtatgacctatgtctgccttaggctgctgggagatgccattctccagtttcagaagcaggcagggcaaaggtcaagactgtggtattggggtcttttggctctgaaggatcctggaaccactgattttggtttattccctccagggtctaaagagaacaagaggtgctagctcttaccaaaacagatggtagagagagttgctggctatttaaaaagctctttcatcttttaattcacctcttcttttcacctctttaaccactcctcaggaacagaacacttctaggactgggggtcttttagctccataagcaagtgagcagatgggacaagttagtcttttctccctagaaacaaaggggatgcccagtggtttccctttgcttcccaacctaaaatttcaagtttaataaaatagcaattagcagaagtgaccaaattgggagataattatcagtcatgaggaaagacacagatttcggtcataaagaatgtaagggctataagtagaaactttctataacctaaatgatgttatagaattatttttgagcaggagcagaaagattaaatatgatcacttcatacttctaaatcagaaataggaagattaaaaccacagaacagtttgtgatttctattgctgtagctaggtatcttactctgtccactcttgttcaagtatctaactcttctggaaaccaaataggctttagaagagattatcctatattcctatcagtataatactaaaatgtaactttttaatcatctggtttttaaaagataaacagtttagcccatctctccagagagcaaacataggaatatgactcaggagcctcctagggcttatcatcagccctcacacccgcttccccctccaacccacagcctttgcttccaggtggcaggattactactttgcctcttcagcagcatctactctaggcatattgatcattttagacactgggagaagagaacctcaaactaggaggaaaagacagagcctccacttagttttgggaggggatggcagacagtcaaggagatgagcgtcctaaggcatgttgggatagggtcagatgcaccacccatggagaggtttgtcaacacaaagacatggaaggttagaggtttgtcaacaaaaagacatggaaggttaggtttgtcaacacaaagacatggaagattagaggtttgtcaacacaaagacacaggaagaatgggctgcagaagatttagatgttttccatttgggcacattttacttagctggagaactaggtttaaaacagcctgggtaggaaaattagaagcaagctggatgcagtggctcatgcctgtaatcccaacacttttgggaggtccaggcaggaggatcacttgggcccaggaggtcaagcctgcagcgagctgagatcacaccactgcactccagcctggggtgatagaacaagaccctgtctcaaaaaaaaaaaaaacaacaaaaacttagaattgaggagttgtacctccattggcttcctcactccaaaataggtgctgatccttcctattcctattctttgccaccttttgggtgtggtgtcaccagcctgtttagccaagtagctttgggcataggctgcccaatctgagcaaacaccagtgaggctctattgagccaagaccaagtcctcaaagcacctgaaccactgtggccttctcagcctacagcagtgtggtctcttacatggccacaaagggacacacagtgacaaaaggctcggaatgttacaatggtaaaatgagtgatctcaaatccactgacagatataaaataggcttagagaggaaaagctgcctctggtcaagtagatcatggcagcatgaattccaactcacttttttacaactccaacttctatgtttatctttgttactttcacttttttacaacctggccagaggcattttttaaatcaggcccaatatcagtattctttttgtgtgtgccaattttgttatcacatccctatgaagttgaaaaataaagttaattttgaccaaaa

SEQ ID NO: 10483 - DNA, 2079 bp, Homo sapiens
  source 1..2079: mol_type = unassigned DNA
aatcttatcgccatggaccttaccttgcacaacccaaagtagctgccttggggcagggggtggccagagtgcttagggaaatgtggagccctacccagaacaacggtggagggaaagggaagaaacgcagaagtgccccagttcggacgtagggaagtcttcctcttcgtggtttttggagaaccctagctaagagaggaaagggacttattgaaagacccgcaagaagggacggaagtctcatagccctgagagacctctagctacagaaaagttctccaagtctgcactcgacccaggaagtccatctggcttcacctctcacttcaacttgggtacagccttctggcgggcaggaggatggcctttggtgcgaacactgccggagtccagggggctggctccctcacctttcatcttctcccggcacttgcaggatccctttgtggccttccacatcaacaagggccttgtgaagaagtatatgaactctctcctgattggagaactgtctccagagcagcccagctttgagcccaccaagaataaagagctgacagatgagttccgggagctgcgggccacagtggagcggatggggctcatgaaggccaaccatgtcttcttcctgctgtacctgctgcacatcttgctgctggatggtgcagcctggctcaccctttgggtctttgggacgtcctttttgcccttcctcctctgtgcggtgctgctcagtgcagttcaggcccaggctggctggctgcagcatgactttgggcacctgtcggtcttcagcacctcaaagtggaaccatctgctacatcattttgtgattggccacctgaagggggcccccgccagttggtggaaccacatgcacttccagcaccatgccaagcccaactgcttccgcaaagacccagacatcaacatgcatcccttcttctttgccttggggaagatcctctctgtggagcttgggaaacagaagaaaaaatatatgccgtacaaccaccagcacaaatacttcttcctaattgggcccccagccttgctgcctctctacttccagtggtatattttctattttgttatccagcgaaagaagtgggtggacttggcctggatgattaccttctacgtccgcttcttcctcacttatgtgccactattggggctgaaagccttcctgggccttttcttcatagtcaggttcctggaaagcaactggtttgtgtgggtgacacagatgaaccatattcccatgcacattgatcatgaccggaacatggactgggtttccacccagctccaggccacatgcaatgtccacaagtctgccttcaatgactggttcagtggacacctcaacttccagattgagcaccatctttttcccacgatgcctcgacacaattaccacaaagtggctcccctggtgcagtccttgtgtgccaagcatggcatagagtaccagtccaagcccctgctgtcagccttcgccgacatcatccactcactaaaggagtcagggcagctctggctagatgcctatcttcaccaataacaacagccaccctgcccagtctggaagaagaggaggaagactctggagccaaggcagaggggagcttgagggacaatgccactatagtttaatactcagagggggttgggtttggggacataaagcctctgactcaaactcctcccttttatcttctagccacagttctaagacccaaagtggggggtggacacagaagtccctaggagggaaggagctgttggggcaggggtgtaaattatttcctttttctagtttggcacatgcaggtagttggtgaacagagagaaccaggagggtaacagaagaggagggacctactgaacccagagtcaggaagagatttaacactaaaattccactcatgccgggcgtggtggcacgcgcctgtaatcccagctacccaggaggctgaggcaggagaatcgcttgaaccggggaggtggaggttgcagtgagctgagatcacgccattgtactccagcctgggcgacagagcaagactccatttc

SEQ ID NO: 10484 - DNA, 1690 bp, Homo sapiens
  source 1..1690: mol_type = unassigned DNA
gtctcgatggctaggagaggcagcgcagccgcgtctggacctaggtgccggtctccactcgccagcaggagcggagagggagcaggaaaggagcccattctcgaggatggggctgaaacgggaagcttggggagaccgctgccttggggacccctgcgtcgtgtgaagactggaggacgcggaagggacagcgctggccggggagggatccctttgtggccttccacatcaacaagggccttgtgaagaagtatatgaactctctcctgattggagaactgtctccagagcagcccagctttgagcccaccaagaataaagagctgacagatgagttccgggagctgcgggccacagtggagcggatggggctcatgaaggccaaccatgtcttcttcctgctgtacctgctgcacatcttgctgctggatggtgcagcctggctcaccctttgggtctttgggacgtcctttttgcccttcctcctctgtgcggtgctgctcagtgcagttcaggcccaggctggctggctgcagcatgactttgggcacctgtcggtcttcagcacctcaaagtggaaccatctgctacatcattttgtgattggccacctgaagggggcccccgccagttggtggaaccacatgcacttccagcaccatgccaagcccaactgcttccgcaaagacccagacatcaacatgcatcccttcttctttgccttggggaagatcctctctgtggagcttgggaaacagaagaaaaaatatatgccgtacaaccaccagcacaaatacttcttcctaattgggcccccagccttgctgcctctctacttccagtggtatattttctattttgttatccagcgaaagaagtgggtggacttggcctggatgattaccttctacgtccgcttcttcctcacttatgtgccactattggggctgaaagccttcctgggccttttcttcatagtcaggttcctggaaagcaactggtttgtgtgggtgacacagatgaaccatattcccatgcacattgatcatgaccggaacatggactgggtttccacccagctccaggccacatgcaatgtccacaagtctgccttcaatgactggttcagtggacacctcaacttccagattgagcaccatctttttcccacgatgcctcgacacaattaccacaaagtggctcccctggtgcagtccttgtgtgccaagcatggcatagagtaccagtccaagcccctgctgtcagccttcgccgacatcatccactcactaaaggagtcagggcagctctggctagatgcctatcttcaccaataacaacagccaccctgcccagtctggaagaagaggaggaagactctggagccaaggcagaggggagcttgagggacaatgccactatagtttaatactcagagggggttgggtttggggacataaagcctctgactcaaactcctcccttttatcttctagccacagttctaagacccaaagtggggggtggacacagaagtccctaggagggaaggagctgttggggcaggggtgtaaattatttcctttttctagtttggcacatgcaggtagttggtgaacagagagaaccaggagggtaacagaagaggagggacctactgaacccagagtcaggaagagatttaacacta

SEQ ID NO: 10485 - DNA, 1725 bp, Homo sapiens
  source 1..1725: mol_type = unassigned DNA
gcagacgaaacaggcaccaacgctggagcttcccgcagtgtgatttggggccgggaatgccgcggcggggacggcgattggtccgtatgtgtggtgccaccggccgccggctccgccccggcccccgccccacacgccgcatcacttacagggcccggggctgccggacctgccaacgtgaatcttatcgccatggaccttaccttgcacaacccaaagtagctgccttggggcagggggtggccagagtgcttagggaaatgtggagccctacccagaacaacggtggagggaaagggaagaaacgcagaagtgccccagttcggacgtagggaagtcttcctcttcgtggtttttggagaaccctagctaagagaggaaagggacttattgaaagacccgcaagaagggacggaagtctcatagccctgagaggtgaagccagctggagttgatgggtcgaatggggacctagagaacttttctgtatctagaggatccctttgtggccttccacatcaacaagggccttgtgaagaagtatatgaactctctcctgattggagaactgtctccagagcagcccagctttgagcccaccaagaataaagagctgacagatgagttccgggagctgcgggccacagtggagcggatggggctcatgaaggccaaccatgtcttcttcctgctgtacctgctgcacatcttgctgctggatggtgcagcctggctcaccctttgggtctttgggacgtcctttttgcccttcctcctctgtgcggtgctgctcagtgcagttcaggcccaggctggctggctgcagcatgactttgggcacctgtcggtcttcagcacctcaaagtggaaccatctgctacatcattttgtgattggccacctgaagggggcccccgccagttggtggaaccacatgcacttccagcaccatgccaagcccaactgcttccgcaaagacccagacatcaacatgcatcccttcttctttgccttggggaagatcctctctgtggagcttgggaaacagaagaaaaaatatatgccgtacaaccaccagcacaaatacttcttcctaattgggcccccagccttgctgcctctctacttccagtggtatattttctattttgttatccagcgaaagaagtgggtggacttggcctggatgattaccttctacgtccgcttcttcctcacttatgtgccactattggggctgaaagccttcctgggccttttcttcatagtcaggttcctggaaagcaactggtttgtgtgggtgacacagatgaaccatattcccatgcacattgatcatgaccggaacatggactgggtttccacccagctccaggccacatgcaatgtccacaagtctgccttcaatgactggttcagtggacacctcaacttccagattgagcaccatctttttcccacgatgcctcgacacaattaccacaaagtggctcccctggtgcagtccttgtgtgccaagcatggcatagagtaccagtccaagcccctgctgtcagccttcgccgacatcatccactcactaaaggagtcagggcagctctggctagatgcctatcttcaccaataacaacagccaccctgcccagtctggaagaagaggaggaagactctggagccaaggcagaggggagcttgagggacaatgccactatagtttaatactca

SEQ ID NO: 10486 - DNA, 3916 bp, Homo sapiens
  source 1..3916: mol_type = unassigned DNA
caggatgccttccgtgccttccatcaagatctcaattttgtgcgcaagttcctacagcccctgttgattggagagctggctccggaagaacccagccaggatggacccctgaatgcgcagctggtcgaggacttccgagccctgcaccaggcagccgaggacatgaagctgtttgatgccagtcccaccttctttgctttcctactgggccacatcctggccatggaggtgctggcctggctccttatctacctcctgggtcctggctgggtgcccagtgccctggccgccttcatcctggccatctctcaggcccaggctggctggctgcagcatgactttgggcacctgtcggtcttcagcacctcaaagtggaaccatctgctacatcattttgtgattggccacctgaagggggcccccgccagttggtggaaccacatgcacttccagcaccatgccaagcccaactgcttccgcaaagacccagacatcaacatgcatcccttcttctttgccttggggaagatcctctctgtggagcttgggaaacagaagaaaaaatatatgccgtacaaccaccagcacaaatacttcttcctaattgggcccccagccttgctgcctctctacttccagtggtatattttctattttgttatccagcgaaagaagtgggtggacttggcctggatgattaccttctacgtccgcttcttcctcacttatgtgccactattggggctgaaagccttcctgggccttttcttcataaggttcctggaaagcaactggtttgtgtgggtgacacagatgaaccatattcccatgcacattgatcatgaccggaacatggactgggtttccacccagctccaggccacatgcaatgtccacaagtctgccttcaatgactggttcagtggacacctcaacttccagattgagcaccatctttttcccacgatgcctcgacacaattaccacaaagtggctcccctggtgcagtccttgtgtgccaagcatggcatagagtaccagtccaagcccctgctgtcagccttcgccgacatcatccactcactaaaggagtcagggcagctctggctagatgcctatcttcaccaataacaacagccaccctgcccagtctggaagaagaggaggaagactctggagccaaggcagaggggagcttgagggacaatgccactatagtttaatactcagagggggttgggtttggggacataaagcctctgactcaaactcctcccttttatcttctagccacagttctaagacccaaagtggggggtggacacagaagtccctaggagggaaggagctgttggggcaggggtgtaaattatttcctttttctagtttggcacatgcaggtagttggtgaacagagagaaccaggagggtaacagaagaggagggacctactgaacccagagtcaggaagagatttaacactaaaattccactcatgccgggcgtggtggcacgcgcctgtaatcccagctacccaggaggctgaggcaggagaatcgcttgaaccggggaggtggaggttgcagtgagctgagatcacgccattgtactccagcctgggcgacagagcaagactccatttcaaaaaaaaaaaaaaaatccactcatataaaaggtgagctcagctcactggtccatttctcagtggcttctccatcctcatttgcaaacctcagagggataaggcagttgaacctgatgagcaagaattataacagcaaggaaacattaatgcttagaattctgagatccagcacaactcagtctgtgggagctcagctcgctgcccagggataggtatgacctatgtctgccttaggctgctgggagatgccattctccagtttcagaagcaggcagggcaaaggtcaagactgtggtattggggtcttttggctctgaaggatcctggaaccactgattttggtttattccctccagggtctaaagagaacaagaggtgctagctcttaccaaaacagatggtagagagagttgctggctatttaaaaagctctttcatcttttaattcacctcttcttttcacctctttaaccactcctcaggaacagaacacttctaggactgggggtcttttagctccataagcaagtgagcagatgggacaagttagtcttttctccctagaaacaaaggggatgcccagtggtttccctttgcttcccaacctaaaatttcaagtttaataaaatagcaattagcagaagtgaccaaattgggagataattatcagtcatgaggaaagacacagatttcggtcataaagaatgtaagggctataagtagaaactttctataacctaaatgatgttatagaattatttttgagcaggagcagaaagattaaatatgatcacttcatacttctaaatcagaaataggaagattaaaaccacagaacagtttgtgatttctattgctgtagctaggtatcttactctgtccactcttgttcaagtatctaactcttctggaaaccaaataggctttagaagagattatcctatattcctatcagtataatactaaaatgtaactttttaatcatctggtttttaaaagataaacagtttagcccatctctccagagagcaaacataggaatatgactcaggagcctcctagggcttatcatcagccctcacacccgcttccccctccaacccacagcctttgcttccaggtggcaggattactactttgcctcttcagcagcatctactctaggcatattgatcattttagacactgggagaagagaacctcaaactaggaggaaaagacagagcctccacttagttttgggaggggatggcagacagtcaaggagatgagcgtcctaaggcatgttgggatagggtcagatgcaccacccatggagaggtttgtcaacacaaagacatggaaggttagaggtttgtcaacaaaaagacatggaaggttaggtttgtcaacacaaagacatggaagattagaggtttgtcaacacaaagacacaggaagaatgggctgcagaagatttagatgttttccatttgggcacattttacttagctggagaactaggtttaaaacagcctgggtaggaaaattagaagcaagctggatgcagtggctcatgcctgtaatcccaacacttttgggaggtccaggcaggaggatcacttgggcccaggaggtcaagcctgcagcgagctgagatcacaccactgcactccagcctggggtgatagaacaagaccctgtctcaaaaaaaaaaaaaacaacaaaaacttagaattgaggagttgtacctccattggcttcctcactccaaaataggtgctgatccttcctattcctattctttgccaccttttgggtgtggtgtcaccagcctgtttagccaagtagctttgggcataggctgcccaatctgagcaaacaccagtgaggctctattgagccaagaccaagtcctcaaagcacctgaaccactgtggccttctcagcctacagcagtgtggtctcttacatggccacaaagggacacacagtgacaaaaggctcggaatgttacaatggtaaaatgagtgatctcaaatccactgacagatataaaataggcttagagaggaaaagctgcctctggtcaagtagatcatggcagcatgaattccaactcacttttttacaactccaacttctatgtttatctttgttactttcacttttttacaacctggccagaggcattttttaaatcaggcccaatatcagtattctttttgtgtgtgccaattttgttatcacatccctatgaagttgaaaaataaagttaattttgaccaaaag

SEQ ID NO: 10487 - DNA, 2964 bp, Homo sapiens
  source 1..2964: mol_type = unassigned DNA
agagacctgaggctcggggctgcagatggaatgcacggcagggaggcgggaccctttgtttgtgtgtgcgtgttgttggcctccatccccactccccagactccacttctccaggcctctctcccgccttttcatcccgcatccgcaggacacccaatcaccgggcaacaggatgccttccgcgccttccaccctgacctggaattcgtgggcaagttcttgaaacccctgctgattggtgaactggccccggaggagcccagccaggaccacggcaagaactcaaagatcactgaggacttccgggccctgaggaagacggctgaggacatgaacctgttcaagaccaaccacgtgttcttcctcctcctcctggcccacatcatcgccctggagagcattgcatggttcactgtcttttactttggcaatggctggattcctaccctcatcacggcctttgtccttgctacctctcaggcccaagctggatggctgcaacatgattatggccacctgtctgtctacagaaaacccaagtggaaccaccttgtccacaaattcgtcattggccacttaaagggtgcctctgccaactggtggaatcatcgccacttccagcaccacgccaagcctaacatcttccacaaggatcccgatgtgaacatgctgcacgtgtttgttctgggcgaatggcagcccatcgagtacggcaagaagaagctgaaatacctgccctacaatcaccagcacgaatacttcttcctgattgggccgccgctgctcatccccatgtatttccagtaccagatcatcatgaccatgatcgtccataagaactgggtggacctggcctgggccgtcagctactacatccggttcttcatcacctacatccctttctacggcatcctgggagccctccttttcctcaacttcatcaggttcctggagagccactggtttgtgtgggtcacacagatgaatcacatcgtcatggagattgaccaggaggcctaccgtgactggttcagtagccagctgacagccacctgcaacgtggagcagtccttcttcaacgactggttcagtggacaccttaacttccagattgagcaccacctcttccccaccatgccccggcacaacttacacaagatcgccccgctggtgaagtctctatgtgccaagcatggcattgaataccaggagaagccgctactgagggccctgctggacatcatcaggtccctgaagaagtctgggaagctgtggctggacgcctaccttcacaaatgaagccacagcccccgggacaccgtggggaaggggtgcaggtggggtgatggccagaggaatgatgggcttttgttctgaggggtgtccgagaggctggtgtatgcactgctcacggaccccatgttggatctttctccctttctcctctcctttttctcttcacatctcccccatagcaccctgccctcatgggacctgccctccctcagccgtcagccatcagccatggccctcccagtgcctcctagccccttcttccaaggagcagagaggtggccaccgggggtggctctgtcctacctccactctctgcccctaaagatgggaggagaccagcggtccatgggtctggcctgtgagtctccccttgcagcctggtcactaggcatcacccccgctttggttcttcagatgctcttggggttcataggggcaggtcctagtcgggcagggcccctgaccctcccggcctggcttcactctccctgacggctgccattggtccaccctttcatagagaggcctgctttgttacaaagctcgggtctccctcctgcagctcggttaagtacccgaggcctctcttaagatgtccagggccccaggcccgcgggcacagccagcccaaaccttgggccctggaagagtcctccaccccatcactagagtgctctgaccctgggctttcacgggccccattccaccgcctccccaacttgagcctgtgaccttgggaccaaagggggagtccctcgtctcttgtgactcagcagaggcagtggccacgttcagggaggggccggctggcctggaggctcagcccaccctccagcttttcctcagggtgtcctgaggtccaagattctggagcaatctgacccttctccaaaggctctgttatcagctgggcagtgccagccaatccctggccatttggccccaggggacgtgggccctgcaggctgcaggagggcactggagctgggaggtctcgtcccagccctccccatctcggggctgctgtgtggacggcgctgcctcaggcactctcctgtctgaacctgcccttactgtgtttaacctgttgctccaggatgcattctgataggagggggcggcagggctgggccttgtgacaatctgcctttcaccacatggccttgcctcggtggccctgactgtcagggagggccagggaggcagagcgggagggagtctcaggaggaggctgccctgaggggctggggagggggtacctcatgaggaccagggtggagctgagaagaggaggaggtgggggctggaggtgctggtagctgaggggacgggcaagtgagaggggagggagggaagtcctgggaggatcctgagctgctgttgcagtctaacccactaatcagttcttagattcaggggaagggcaggcaccaacaactcagaatgggggctttcggggagggcgcctagtccccccagctctaagcagccaggagggacctgcatctaagcatctgggttgccatggcaatggcatgccccccagctactgtatgcccccgacccccgcagaggcagaatgaacccatagggagctgatcgtaatgtttatcatgttacttccccacccctacattttttgaaataaaataaggaattttattctca

SEQ ID NO: 10488 - DNA, 3630 bp, Homo sapiens
  source 1..3630: mol_type = unassigned DNA
attcgttgcccccaccgggatctcctctaggatctcctccggcgcccggggccggagagtgggggagggaggaggtcggacacgtagcctgcctcgcagcagggctcgactccacgcgggagggcgggggagccggggacccgccgctccagcccgctggccttcgaaagatcctcctgggccaatggcaggcggggcgacgcgaccggattggtgcaggcgctctgctgatcgctgtggaaactcgggcggcggggaacgcgggaggatgtggaacccgaggcggggggagccggaggggcgggcagaggaggtgtcgaggccctgagctcccggggagtttttactggaggcaaaagtccatagcgggagggctgagggaggggcggaggaaggggaccgcttgggggcactgggaagccagggatcctccgccaggaaggcagggacactcccgagcgcaggcgagaaggctgggggagggggcgcggtgggaggagtaggagaagacaaaagccgaaagcgaagagggcccgggctgcacacaccggctgggaggcagccgtctgtgcagcgagcagccggcgcggggaggccgcagtgcacggggcgtcacagtcggcaggcagcatggggaagggagggaaccagggcgagggggccgccgagcgcgaggtgtcggtgcccaccttcagctgggaggagattcagaagcataacctgcgcaccgacaggtggctggtcattgaccgcaaggtttacaacatcaccaaatggtccatccagcacccggggggccagcgggtcatcgggcactacgctggagaagatgcaacggatgccttccgcgccttccaccctgacctggaattcgtgggcaagttcttgaaacccctgctgattggtgaactggccccggaggagcccagccaggaccacggcaagaactcaaagatcactgaggacttccgggccctgaggaagacggctgaggacatgaacctgttcaagaccaaccacgtgttcttcctcctcctcctggcccacatcatcgccctggagagcattgcatggttcactgtcttttactttggcaatggctggattcctaccctcatcacggcctttgtccttgctacctctcaggcccaagctggatggctgcaacatgattatggccacctgtctgtctacagaaaacccaagtggaaccaccttgtccacaaattcgtcattggccacttaaagggtgcctctgccaactggtggaatcatcgccacttccagcaccacgccaagcctaacatcttccacaaggatcccgatgtgaacatgctgcacgtgtttgttctgggcgaatggcagcccatcgagtacggcaagaagaagctgaaatacctgccctacaatcaccagcacgaatacttcttcctgattgggccgccgctgctcatccccatgtatttccagtaccagatcatcatgaccatgatcgtccataagaactgggtggacctggcctgggccgtcagctactacatccggttcttcatcacctacatccctttctacggcatcctgggagccctccttttcctcaacttcatcaggttcctggagagccactggtttgtgtgggtcacacagatgaatcacatcgtcatggagattgaccaggaggcctaccgtgactggttcagtagccagctgacagccacctgcaacgtggagcagtccttcttcaacgactggttcagtggacaccttaacttccagattgagcaccacctcttccccaccatgccccggcacaacttacacaagatcgccccgctggtgaagtctctatgtgccaagcatggcattgaataccaggagaagccgctactgagggccctgctggacatcatcaggtccctgaagaagtctgggaagctgtggctggacgcctaccttcacaaatgaagccacagcccccgggacaccgtggggaaggggtgcaggtggggtgatggccagaggaatgatgggcttttgttctgaggggtgtccgagaggctggtgtatgcactgctcacggaccccatgttggatctttctccctttctcctctcctttttctcttcacatctcccccatagcaccctgccctcatgggacctgccctccctcagccgtcagccatcagccatggccctcccagtgcctcctagccccttcttccaaggagcagagaggtggccaccgggggtggctctgtcctacctccactctctgcccctaaagatgggaggagaccagcggtccatgggtctggcctgtgagtctccccttgcagcctggtcactaggcatcacccccgctttggttcttcagatgctcttggggttcataggggcaggtcctagtcgggcagggcccctgaccctcccggcctggcttcactctccctgacggctgccattggtccaccctttcatagagaggcctgctttgttacaaagctcgggtctccctcctgcagctcggttaagtacccgaggcctctcttaagatgtccagggccccaggcccgcgggcacagccagcccaaaccttgggccctggaagagtcctccaccccatcactagagtgctctgaccctgggctttcacgggccccattccaccgcctccccaacttgagcctgtgaccttgggaccaaagggggagtccctcgtctcttgtgactcagcagaggcagtggccacgttcagggaggggccggctggcctggaggctcagcccaccctccagcttttcctcagggtgtcctgaggtccaagattctggagcaatctgacccttctccaaaggctctgttatcagctgggcagtgccagccaatccctggccatttggccccaggggacgtgggccctgcaggctgcaggagggcactggagctgggaggtctcgtcccagccctccccatctcggggctgctgtgtggacggcgctgcctcaggcactctcctgtctgaacctgcccttactgtgtttaacctgttgctccaggatgcattctgataggagggggcggcagggctgggccttgtgacaatctgcctttcaccacatggccttgcctcggtggccctgactgtcagggagggccagggaggcagagcgggagggagtctcaggaggaggctgccctgaggggctggggagggggtacctcatgaggaccagggtggagctgagaagaggaggaggtgggggctggaggtgctggtagctgaggggacgggcaagtgagaggggagggagggaagtcctgggaggatcctgagctgctgttgcagtctaacccactaatcagttcttagattcaggggaagggcaggcaccaacaactcagaatgggggctttcggggagggcgcctagtccccccagctctaagcagccaggagggacctgcatctaagcatctgggttgccatggcaatggcatgccccccagctactgtatgcccccgacccccgcagaggcagaatgaacccatagggagctgatcgtaatgtttatcatgttacttccccacccctacattttttgaaataaaataaggaattttattctca

SEQ ID NO: 10489 - DNA, 1703 bp, Homo sapiens
  source 1..1703: mol_type = unassigned DNA
aaagcgaagagggcccgggctgcacacaccggctgggaggcagccgtctgtgcagcgagcagccggcgcggggaggccgcagtgcacggggcgtcacagtcggcaggcagcatggggaagggagggaaccagggcgagggggccgccgagcgcgaggtgtcggtgcccaccttcagctgggaggagattcagaagcataacctgcgcaccgacaggtggctggtcattgaccgcaaggtttacaacatcaccaaatggtccatccagcacccggggggccagcgggtcatcgggcactacgctggagaagatgcaacggatgccttccgcgccttccaccctgacctggaattcgtgggcaagttcttgaaacccctgctgattggtgaactggccccggaggagcccagccaggaccacggcaagaactcaaagatcactgaggacttccgggccctgaggaagacggctgaggacatgaacctgttcaagaccaaccacgtgttcttcctcctcctcctggcccacatcatcgccctggagagcattgcatggttcactgtcttttactttggcaatggctggattcctaccctcatcacggcctttgtccttgctacctctcaggcccaagctggatggctgcaacatgattatggccacctgtctgtctacagaaaacccaagtggaaccaccttgtccacaaattcgtcattggccacttaaagggtgcctctgccaactggtggaatcatcgccacttccagcaccacgccaagcctaacatcttccacaaggatcccgatgtgaacatgctgcacgtgtttgttctgggcgaatggcagcccatcgagtacggcaagaagaagctgaaatacctgccctacaatcaccagcacgaatacttcttcctgattgggccgccgctgctcatccccatgtatttccagtaccagatcatcatgaccatgatcgtccataagaactgggtggacctggcctgggccgtcagctactacatccggttcttcatcacctacatccctttctacggcatcctgggagccctccttttcctcaacttcatcaggttcctggagagccactggtttgtgtgggtcacacagatgaatcacatcgtcatggagattgaccaggaggcctaccgtgactggttcagtagccagctgacagccacctgcaacgtggagcagtccttcttcaacgactggttcagtggacaccttaacttccagattgagcaccagtgagcgcggggctgcggggaggcggggagacccacagcgggagggaagtggccgctatcccactgggcagaatgcagaatgtgggggccacctctttgtctctctgacaaggtctctgcccaatatagagcaaggctcccagccagccccgctgaggtcaggagaggggctcccctattccatctccctgagggtcatcctgtgcccctcatgctgtgccacttggtcatagtggttaccacctccctccatgtgggcctgggactttgtagttatggagcctgcacacgcacctcatgaccctgtgaggctagcagggcagggctacgtagcttgcctggaacatcggccgagggactgccctgctgccccttgtccttgcttcacctcttgtcactgtttttttttttttttattaaaaaataaaaaatgta

SEQ ID NO: 10490 - DNA, 1779 bp, Homo sapiens
  source 1..1779: mol_type = unassigned DNA
cgcacgctcgctcgtacggcggccgcggcggcagggcggggccggagcagcgggcggcggcggaggcggcgcccgggagcgctcttcgcttccctcggggtcttgctcggacctcggccaccgcctgggatccccaggactcgtgcgtgcagcatgggcggcgtcggggagccgggaccgcgggagggacccgcgcagccgggggcgccgctgcccaccttctgctgggagcagatccgcgcgcacgaccagcccggcgacaagtggctggtcatcgagcgccgcgtctacgacatcagccgctgggcacagcggcacccagggggcagccgcctcatcggccaccacggcgctgaggacgccacggatgccttccgtgccttccatcaagatctcaattttgtgcgcaagttcctacagcccctgttgattggagagctggctccggaagaacccagccaggatggacccctgaatgcgcagctggtcgaggacttccgagccctgcaccaggcagccgaggacatgaagctgtttgatgccagtcccaccttctttgctttcctactgggccacatcctggccatggaggtgctggcctggctccttatctacctcctgggtcctggctgggtgcccagtgccctggccgccttcatcctggccatctctcaggctcagtcctggtgtctgcagcatgacctgggccatgcctccatcttcaagaagtcctggtggaaccacgtggcccagaagttcgtgatggggcagctaaagggcttctccgcccactggtggaacttccgccacttccagcaccacgccaagcccaacatcttccacaaagacccagacgtgacggtggcgcccgtcttcctcctgggggagtcatccgtcgagtatggcaagaagaaacgcagatacctaccctacaaccagcagcacctgtacttcttcctgatcggcccgccgctgctcaccctggtgaactttgaagtggaaaatctggcgtacatgctggtgtgcatgcagtgggcggatttgctctgggccgccagcttctatgcccgcttcttcttatcctacctccccttctacggcgtccctggggtgctgctcttctttgttgctgtcagggtcctggaaagccactggttcgtgtggatcacacagatgaaccacatccccaaggagatcggccacgagaagcaccgggactgggtcagctctcagctggcagccacctgcaacgtggagccctcacttttcaccaactggttcagcgggcacctcaacttccagatcgagcaccacctcttccccaggatgccgagacacaactacagccgggtggccccgctggtcaagtcgctgtgtgccaagcacggcctcagctacgaagtgaagcccttcctcaccgcgctggtggacatcgtcaggtccctgaagaagtctggtgacatctggctggacgcctacctccatcagtgaaggcaacacccaggcgggcagagaagggctcagggcaccagcaaccaagccagcccccggcgggatcgataccctcacccctccactggccagcctgggggtgccctgcctgccctcctggtactgttgtcttcccctcggccccctcacatgtgtattcagcagccctatggccttggctctgggcctgatgggacaggggtagagggaaggtgagcatagcacattttcctagagcgagaattgggggaaagctgttatttttatattaaaatacattcagatgta

SEQ ID NO: 10491 - DNA, 1834 bp, Homo sapiens
  source 1..1834: mol_type = unassigned DNA
gctcttcgcttccctcggggtcttgctcggacctcggccaccgcctgggatccccaggactcgtgcgtgcagcatgggcggcgtcggggagccgggaccgcgggagggacccgcgcagccgggggcgccgctgcccaccttctgctgggagcagatccgcgcgcacgaccagcccggcgacaagtggctggtcatcgagcgccgcgtctacgacatcagccgctgggcacagcggcacccagggggcagccgcctcatcggccaccacggcgctgaggacgccacggatgccttccgtgccttccatcaagatctcaattttgtgcgcaagttcctacagcccctgttgattggagagctggctccggaagaacccagccaggatggacccctgaatgcgcagctggtcgaggacttccgagccctgcaccaggcagccgaggacatgaagctgtttgatgccagtcccaccttctttgctttcctactgggccacatcctggccatggaggtgctggcctggctccttatctacctcctgggtcctggctgggtgcccagtgccctggccgccttcatcctggccatctctcaggctcagtcctggtgtctgcagcatgacctgggccatgcctccatcttcaagaagtcctggtggaaccacgtggcccagaagttcgtgatggggcagctaaagggcttctccgcccactggtggaacttccgccacttccagcaccacgccaagcccaacatcttccacaaagacccagacgtgacggtggcgcccgtcttcctcctgggggagtcatccgtcgagtatggcaagaagaaacgcagatacctaccctacaaccagcagcacctgtacttcttcctgatcggcccgccgctgctcaccctggtgaactttgaagtggaaaatctggcgtacatgctggtgtgcatgcagtgggcggatttgctctgggccgccagcttctatgcccgcttcttcttatcctacctccccttctacggcgtccctggggtgctgctcttctttgttgctgtcaggtatggcagggagtggcgaggtcacacacaggcgacaggtgacccccactgcagccccccaccagagcttcccttttcccgtctgcagaatggggccagtggtactgcctccctggcttgctggtggaatcacataaacacaagcgtggcaggagcccagggtcggtgggtttagggagcgtggcctggcttgtaagtggcccggtgggtgtcggagctgctctggactcagcctcacagtggacactgctccattcagattctttaaacactggcaagggggcgatggccacaatcctattgtacagataaggaagtcaaggccacttggggacagctgctctccagcctccactcagggtgcctaagtggtgagctggacctagggcagtgcccgagcctccccacagggtcctggaaagccactggttcgtgtggatcacacagatgaaccacatccccaaggagatcggccacgagaagcaccgggactgggtcagctctcagctggcagccacctgcaacgtggagccctcacttttcaccaactggttcagcgggcacctcaacttccagatcgagcaccacctcttccccaggatgccgagacacaactacagccgggtggccccgctggtcaagtcgctgtgtgccaagcacggcctcagctacgaagtgaagcccttcctcaccgcgctggtggacatcgtcaggtccctgaagaagtctggtgacatctggctggacgcctacctccatcagtgaaggcaacacccag

SEQ ID NO: 10492 - DNA, 3753 bp, Homo sapiens
  source 1..3753: mol_type = unassigned DNA
cattcataagactcagagctacggccacggcagggacacgcggaaccaagacttggaaacttgattgttgtggttcttcttgggggttatgaaatttcattaatctttttttttccggggagaaagtttttggaaagattcttccagatatttcttcattttcttttggaggaccgacttactttttttggtcttctttattactcccctccccccgtgggacccgccggacgcgtggaggagaccgtagctgaagctgattctgtacagcgggacagcgctttctgcccctgggggagcaacccctccctcgcccctgggtcctacggagcctgcactttcaagaggtacagcggcatcctgtgggggcctgggcaccgcaggaagactgcacagaaactttgccattgttggaacgggacgttgctccttccccgagcttccccggacagcgtactttgaggactcgctcagctcaccggggactcccacggctcaccccggacttgcaccttacttccccaacccggccatagccttggcttcccggcgacctcagcgtggtcacaggggcccccctgtgcccagggaaatgtttcaggctttccccggagactacgactccggctcccggtgcagctcctcaccctctgccgagtctcaatatctgtcttcggtggactccttcggcagtccacccaccgccgccgcctcccaggagtgcgccggtctcggggaaatgcccggttccttcgtgcccacggtcaccgcgatcacaaccagccaggacctccagtggcttgtgcaacccaccctcatctcttccatggcccagtcccaggggcagccactggcctcccagcccccggtcgtcgacccctacgacatgccgggaaccagctactccacaccaggcatgagtggctacagcagtggcggagcgagtggcagtggtgggccttccaccagcggaactaccagtgggcctgggcctgcccgcccagcccgagcccggcctaggagaccccgagaggagacgctcaccccagaggaagaggagaagcgaagggtgcgccgggaacgaaataaactagcagcagctaaatgcaggaaccggcggagggagctgaccgaccgactccaggcggagacagatcagttggaggaagaaaaagcagagctggagtcggagatcgccgagctccaaaaggagaaggaacgtctggagtttgtgctggtggcccacaaaccgggctgcaagatcccctacgaagaggggcccgggccgggcccgctggcggaggtgagagatttgccgggctcagcaccggctaaggaagatggcttcagctggctgctgccgcccccgccaccaccgcccctgcccttccagaccagccaagacgcaccccccaacctgacggcttctctctttacacacagtgaagttcaagtcctcggcgaccccttccccgttgttaacccttcgtacacttcttcgtttgtcctcacctgcccggaggtctccgcgttcgccggcgcccaacgcaccagcggcagtgaccagccttccgatcccctgaactcgccctccctcctcgctctgtgaactctttagacacacaaaacaaacaaacacatgggggagagagacttggaagaggaggaggaggaggagaaggaggagagagaggggaagagacaaagtgggtgtgtggcctccctggctcctccgtctgaccctctgcggccactgcgccactgccatcggacaggaggattccttgtgttttgtcctgcctcttgtttctgtgccccggcgaggccggagagctggtgactttggggacagggggtgggaaggggatggacacccccagctgactgttggctctctgacgtcaacccaagctctggggatgggtggggaggggggcgggtgacgcccaccttcgggcagtcctgtgtgaggattaagggacgggggtgggaggtaggctgtggggtgggctggagtcctctccagagaggctcaacaaggaaaaatgccactccctacccaatgtctcccacacccaccctttttttggggtgcctaggttggtttcccctgcactcccgaccttagcttattgatcccacatttccatggtgtgagatcctctttactctgggcagaagtgagccccccccttaaagggaattcgatgcccccctagaataatctcatccccccacccgacttcttttgaaatgtgaacgtccttccttgactgtctagccactccctcccagaaaaactggctctgattggaatttctggcctcctaaggctccccaccccgaaatcagcccccagccttgtttctgatgacagtgttatcccaagaccctgccccctgccagccgaccctcctggccttcctcgttgggccgctctgatttcaggcagcaggggctgctgtgatgccgtcctgctggagtgatttatactgtgaaatgagttggccagattgtggggtgcagctgggtggggcagcacacctctggggggataatgtccccactcccgaaagcctttcctcggtctcccttccgtccatcccccttcttcctcccctcaacagtgagttagactcaagggggtgacagaaccgagaagggggtgacagtcctccatccacgtggcctctctctctctcctcaggaccctcagccctggcctttttctttaaggtcccccgaccaatccccagcctaggacgccaacttctcccaccccttggcccctcacatcctctccaggaagggagtgaggggctgtgacatttttccggagaagatttcagagctgaggctttggtacccccaaacccccaatatttttggactggcagactcaaggggctggaatctcatgattccatgcccgagtccgcccatccctgaccatggttttggctctcccaccccgccgttccctgcgcttcatctcatgaggatttctttatgaggcaaatttatattttttaatatcggggggtggaccacgccgccctccatccgtgctgcatgaaaaacattccacgtgccccttgtcgcgcgtctcccatcctgatcccagacccattccttagctatttatccctttcctggtttccgaaaggcaattatatctattatgtataagtaaatatattatatatggatgtgtgtgtgtgcgtgcgcgtgagtgtgtgagcgcttctgcagcctcggcctaggtcacgttggccctcaaagcgagccgttgaattggaaactgcttctagaaactctggctcagcctgtctcgggctgacccttttctgatcgtctcggcccctctgattgttcccgatggtctctctccctctgtcttttctcctccgcctgtgtccatctgaccgttttcacttgtctcctttctgactgtccctgccaatgctccagctgtcgtctgactctgggttcgttggggacatgagattttattttttgtgagtgagactgagggatcgtagatttttacaatctgtatctttgacaattctgggtgcgagtgtgagagtgtgagcagggcttgctcctgccaaccacaattcaatgaatccccgacccccctaccccatgctgtacttgtggttctctttttgtattttgcatctgaccccggggggctgggacagattggcaatgggccgtcccctctccccttggttctgcactgttgcc

SEQ ID NO: 10493 - DNA, 3645 bp, Homo sapiens
  source 1..3645: mol_type = unassigned DNA
cattcataagactcagagctacggccacggcagggacacgcggaaccaagacttggaaacttgattgttgtggttcttcttgggggttatgaaatttcattaatctttttttttccggggagaaagtttttggaaagattcttccagatatttcttcattttcttttggaggaccgacttactttttttggtcttctttattactcccctccccccgtgggacccgccggacgcgtggaggagaccgtagctgaagctgattctgtacagcgggacagcgctttctgcccctgggggagcaacccctccctcgcccctgggtcctacggagcctgcactttcaagaggtacagcggcatcctgtgggggcctgggcaccgcaggaagactgcacagaaactttgccattgttggaacgggacgttgctccttccccgagcttccccggacagcgtactttgaggactcgctcagctcaccggggactcccacggctcaccccggacttgcaccttacttccccaacccggccatagccttggcttcccggcgacctcagcgtggtcacaggggcccccctgtgcccagggaaatgtttcaggctttccccggagactacgactccggctcccggtgcagctcctcaccctctgccgagtctcaatatctgtcttcggtggactccttcggcagtccacccaccgccgccgcctcccaggagtgcgccggtctcggggaaatgcccggttccttcgtgcccacggtcaccgcgatcacaaccagccaggacctccagtggcttgtgcaacccaccctcatctcttccatggcccagtcccaggggcagccactggcctcccagcccccggtcgtcgacccctacgacatgccgggaaccagctactccacaccaggcatgagtggctacagcagtggcggagcgagtggcagtggtgggccttccaccagcggaactaccagtgggcctgggcctgcccgcccagcccgagcccggcctaggagaccccgagaggagacggagacagatcagttggaggaagaaaaagcagagctggagtcggagatcgccgagctccaaaaggagaaggaacgtctggagtttgtgctggtggcccacaaaccgggctgcaagatcccctacgaagaggggcccgggccgggcccgctggcggaggtgagagatttgccgggctcagcaccggctaaggaagatggcttcagctggctgctgccgcccccgccaccaccgcccctgcccttccagaccagccaagacgcaccccccaacctgacggcttctctctttacacacagtgaagttcaagtcctcggcgaccccttccccgttgttaacccttcgtacacttcttcgtttgtcctcacctgcccggaggtctccgcgttcgccggcgcccaacgcaccagcggcagtgaccagccttccgatcccctgaactcgccctccctcctcgctctgtgaactctttagacacacaaaacaaacaaacacatgggggagagagacttggaagaggaggaggaggaggagaaggaggagagagaggggaagagacaaagtgggtgtgtggcctccctggctcctccgtctgaccctctgcggccactgcgccactgccatcggacaggaggattccttgtgttttgtcctgcctcttgtttctgtgccccggcgaggccggagagctggtgactttggggacagggggtgggaaggggatggacacccccagctgactgttggctctctgacgtcaacccaagctctggggatgggtggggaggggggcgggtgacgcccaccttcgggcagtcctgtgtgaggattaagggacgggggtgggaggtaggctgtggggtgggctggagtcctctccagagaggctcaacaaggaaaaatgccactccctacccaatgtctcccacacccaccctttttttggggtgcctaggttggtttcccctgcactcccgaccttagcttattgatcccacatttccatggtgtgagatcctctttactctgggcagaagtgagccccccccttaaagggaattcgatgcccccctagaataatctcatccccccacccgacttcttttgaaatgtgaacgtccttccttgactgtctagccactccctcccagaaaaactggctctgattggaatttctggcctcctaaggctccccaccccgaaatcagcccccagccttgtttctgatgacagtgttatcccaagaccctgccccctgccagccgaccctcctggccttcctcgttgggccgctctgatttcaggcagcaggggctgctgtgatgccgtcctgctggagtgatttatactgtgaaatgagttggccagattgtggggtgcagctgggtggggcagcacacctctggggggataatgtccccactcccgaaagcctttcctcggtctcccttccgtccatcccccttcttcctcccctcaacagtgagttagactcaagggggtgacagaaccgagaagggggtgacagtcctccatccacgtggcctctctctctctcctcaggaccctcagccctggcctttttctttaaggtcccccgaccaatccccagcctaggacgccaacttctcccaccccttggcccctcacatcctctccaggaagggagtgaggggctgtgacatttttccggagaagatttcagagctgaggctttggtacccccaaacccccaatatttttggactggcagactcaaggggctggaatctcatgattccatgcccgagtccgcccatccctgaccatggttttggctctcccaccccgccgttccctgcgcttcatctcatgaggatttctttatgaggcaaatttatattttttaatatcggggggtggaccacgccgccctccatccgtgctgcatgaaaaacattccacgtgccccttgtcgcgcgtctcccatcctgatcccagacccattccttagctatttatccctttcctggtttccgaaaggcaattatatctattatgtataagtaaatatattatatatggatgtgtgtgtgtgcgtgcgcgtgagtgtgtgagcgcttctgcagcctcggcctaggtcacgttggccctcaaagcgagccgttgaattggaaactgcttctagaaactctggctcagcctgtctcgggctgacccttttctgatcgtctcggcccctctgattgttcccgatggtctctctccctctgtcttttctcctccgcctgtgtccatctgaccgttttcacttgtctcctttctgactgtccctgccaatgctccagctgtcgtctgactctgggttcgttggggacatgagattttattttttgtgagtgagactgagggatcgtagatttttacaatctgtatctttgacaattctgggtgcgagtgtgagagtgtgagcagggcttgctcctgccaaccacaattcaatgaatccccgacccccctaccccatgctgtacttgtggttctctttttgtattttgcatctgaccccggggggctgggacagattggcaatgggccgtcccctctccccttggttctgcactgttgcc

SEQ ID NO: 10494 - DNA, 3324 bp, Homo sapiens
  source 1..3324: mol_type = unassigned DNA
cattcataagactcagagctacggccacggcagggacacgcggaaccaagacttggaaacttgattgttgtggttcttcttgggggttatgaaatttcattaatctttttttttccggggagaaagtttttggaaagattcttccagatatttcttcattttcttttggaggaccgacttactttttttggtcttctttattactcccctccccccgtgggacccgccggacgcgtggaggagaccgtagctgaagctgattctgtacagcgggacagcgctttctgcccctgggggagcaacccctccctcgcccctgggtcctacggagcctgcactttcaagaggtacagcggcatcctgtgggggcctgggcaccgcaggaagactgcacagaaactttgccattgttggaacgggacgttgctccttccccgagcttccccggacagcgtactttgaggactcgctcagctcaccggggactcccacggctcaccccggacttgcaccttacttccccaacccggccatagccttggcttcccggcgacctcagcgtggtcacaggggcccccctgtgcccagggaaatgtttcaggctttccccggagactacgactccggctcccggtgcagctcctcaccctctgccgagtctcaatatctgtcttcggtggactccttcggcagtccacccaccgccgccgcctcccaggagacagatcagttggaggaagaaaaagcagagctggagtcggagatcgccgagctccaaaaggagaaggaacgtctggagtttgtgctggtggcccacaaaccgggctgcaagatcccctacgaagaggggcccgggccgggcccgctggcggaggtgagagatttgccgggctcagcaccggctaaggaagatggcttcagctggctgctgccgcccccgccaccaccgcccctgcccttccagaccagccaagacgcaccccccaacctgacggcttctctctttacacacagtgaagttcaagtcctcggcgaccccttccccgttgttaacccttcgtacacttcttcgtttgtcctcacctgcccggaggtctccgcgttcgccggcgcccaacgcaccagcggcagtgaccagccttccgatcccctgaactcgccctccctcctcgctctgtgaactctttagacacacaaaacaaacaaacacatgggggagagagacttggaagaggaggaggaggaggagaaggaggagagagaggggaagagacaaagtgggtgtgtggcctccctggctcctccgtctgaccctctgcggccactgcgccactgccatcggacaggaggattccttgtgttttgtcctgcctcttgtttctgtgccccggcgaggccggagagctggtgactttggggacagggggtgggaaggggatggacacccccagctgactgttggctctctgacgtcaacccaagctctggggatgggtggggaggggggcgggtgacgcccaccttcgggcagtcctgtgtgaggattaagggacgggggtgggaggtaggctgtggggtgggctggagtcctctccagagaggctcaacaaggaaaaatgccactccctacccaatgtctcccacacccaccctttttttggggtgcctaggttggtttcccctgcactcccgaccttagcttattgatcccacatttccatggtgtgagatcctctttactctgggcagaagtgagccccccccttaaagggaattcgatgcccccctagaataatctcatccccccacccgacttcttttgaaatgtgaacgtccttccttgactgtctagccactccctcccagaaaaactggctctgattggaatttctggcctcctaaggctccccaccccgaaatcagcccccagccttgtttctgatgacagtgttatcccaagaccctgccccctgccagccgaccctcctggccttcctcgttgggccgctctgatttcaggcagcaggggctgctgtgatgccgtcctgctggagtgatttatactgtgaaatgagttggccagattgtggggtgcagctgggtggggcagcacacctctggggggataatgtccccactcccgaaagcctttcctcggtctcccttccgtccatcccccttcttcctcccctcaacagtgagttagactcaagggggtgacagaaccgagaagggggtgacagtcctccatccacgtggcctctctctctctcctcaggaccctcagccctggcctttttctttaaggtcccccgaccaatccccagcctaggacgccaacttctcccaccccttggcccctcacatcctctccaggaagggagtgaggggctgtgacatttttccggagaagatttcagagctgaggctttggtacccccaaacccccaatatttttggactggcagactcaaggggctggaatctcatgattccatgcccgagtccgcccatccctgaccatggttttggctctcccaccccgccgttccctgcgcttcatctcatgaggatttctttatgaggcaaatttatattttttaatatcggggggtggaccacgccgccctccatccgtgctgcatgaaaaacattccacgtgccccttgtcgcgcgtctcccatcctgatcccagacccattccttagctatttatccctttcctggtttccgaaaggcaattatatctattatgtataagtaaatatattatatatggatgtgtgtgtgtgcgtgcgcgtgagtgtgtgagcgcttctgcagcctcggcctaggtcacgttggccctcaaagcgagccgttgaattggaaactgcttctagaaactctggctcagcctgtctcgggctgacccttttctgatcgtctcggcccctctgattgttcccgatggtctctctccctctgtcttttctcctccgcctgtgtccatctgaccgttttcacttgtctcctttctgactgtccctgccaatgctccagctgtcgtctgactctgggttcgttggggacatgagattttattttttgtgagtgagactgagggatcgtagatttttacaatctgtatctttgacaattctgggtgcgagtgtgagagtgtgagcagggcttgctcctgccaaccacaattcaatgaatccccgacccccctaccccatgctgtacttgtggttctctttttgtattttgcatctgaccccggggggctgggacagattggcaatgggccgtcccctctccccttggttctgcactgttgcc

SEQ ID NO: 10495 - DNA, 3612 bp, Homo sapiens
  source 1..3612: mol_type = unassigned DNA
cattcataagactcagagctacggccacggcagggacacgcggaaccaagacttggaaacttgattgttgtggttcttcttgggggttatgaaatttcattaatctttttttttccggggagaaagtttttggaaagattcttccagatatttcttcattttcttttggaggaccgacttactttttttggtcttctttattactcccctccccccgtgggacccgccggacgcgtggaggagaccgtagctgaagctgattctgtacagcgggacagcgctttctgcccctgggggagcaacccctccctcgcccctgggtcctacggagcctgcactttcaagaggtacagcggcatcctgtgggggcctgggcaccgcaggaagactgcacagaaactttgccattgttggaacgggacgttgctccttccccgagcttccccggacagcgtactttgaggactcgctcagctcaccggggactcccacggctcaccccggacttgcaccttacttccccaacccggccatagccttggcttcccggcgacctcagcgtggtcacaggggcccccctgtgcccagggaaatgtttcaggctttccccggagactacgactccggctcccggtgcagctcctcaccctctgccgagtctcaatatctgtcttcggtggactccttcggcagtccacccaccgccgccgcctcccaggagtgcgccggtctcggggaaatgcccggttccttcgtgcccacggtcaccgcgatcacaaccagccaggacctccagtggcttgtgcaacccaccctcatctcttccatggcccagtcccaggggcagccactggcctcccagcccccggtcgtcgacccctacgacatgccgggaaccagctactccacaccaggcatgagtggctacagcagtggcggagcgagtggcagtggtgggccttccaccagcggaactaccagtgggcctgggcctgcccgcccagcccgagcccggcctaggagaccccgagaggagacgctcaccccagaggaagaggagaagcgaagggtgcgccgggaacgaaataaactagcagcagctaaatgcaggaaccggcggagggagctgaccgaccgactccaggcggagacagatcagttggaggaagaaaaagcagagctggagtcggagatcgccgagctccaaaaggagaaggaacgtctggagtttgtgctggtggcccacaaaccgggctgcaagatcccctacgaagaggggcccgggccgggcccgctggcggaggaagttcaagtcctcggcgaccccttccccgttgttaacccttcgtacacttcttcgtttgtcctcacctgcccggaggtctccgcgttcgccggcgcccaacgcaccagcggcagtgaccagccttccgatcccctgaactcgccctccctcctcgctctgtgaactctttagacacacaaaacaaacaaacacatgggggagagagacttggaagaggaggaggaggaggagaaggaggagagagaggggaagagacaaagtgggtgtgtggcctccctggctcctccgtctgaccctctgcggccactgcgccactgccatcggacaggaggattccttgtgttttgtcctgcctcttgtttctgtgccccggcgaggccggagagctggtgactttggggacagggggtgggaaggggatggacacccccagctgactgttggctctctgacgtcaacccaagctctggggatgggtggggaggggggcgggtgacgcccaccttcgggcagtcctgtgtgaggattaagggacgggggtgggaggtaggctgtggggtgggctggagtcctctccagagaggctcaacaaggaaaaatgccactccctacccaatgtctcccacacccaccctttttttggggtgcctaggttggtttcccctgcactcccgaccttagcttattgatcccacatttccatggtgtgagatcctctttactctgggcagaagtgagccccccccttaaagggaattcgatgcccccctagaataatctcatccccccacccgacttcttttgaaatgtgaacgtccttccttgactgtctagccactccctcccagaaaaactggctctgattggaatttctggcctcctaaggctccccaccccgaaatcagcccccagccttgtttctgatgacagtgttatcccaagaccctgccccctgccagccgaccctcctggccttcctcgttgggccgctctgatttcaggcagcaggggctgctgtgatgccgtcctgctggagtgatttatactgtgaaatgagttggccagattgtggggtgcagctgggtggggcagcacacctctggggggataatgtccccactcccgaaagcctttcctcggtctcccttccgtccatcccccttcttcctcccctcaacagtgagttagactcaagggggtgacagaaccgagaagggggtgacagtcctccatccacgtggcctctctctctctcctcaggaccctcagccctggcctttttctttaaggtcccccgaccaatccccagcctaggacgccaacttctcccaccccttggcccctcacatcctctccaggaagggagtgaggggctgtgacatttttccggagaagatttcagagctgaggctttggtacccccaaacccccaatatttttggactggcagactcaaggggctggaatctcatgattccatgcccgagtccgcccatccctgaccatggttttggctctcccaccccgccgttccctgcgcttcatctcatgaggatttctttatgaggcaaatttatattttttaatatcggggggtggaccacgccgccctccatccgtgctgcatgaaaaacattccacgtgccccttgtcgcgcgtctcccatcctgatcccagacccattccttagctatttatccctttcctggtttccgaaaggcaattatatctattatgtataagtaaatatattatatatggatgtgtgtgtgtgcgtgcgcgtgagtgtgtgagcgcttctgcagcctcggcctaggtcacgttggccctcaaagcgagccgttgaattggaaactgcttctagaaactctggctcagcctgtctcgggctgacccttttctgatcgtctcggcccctctgattgttcccgatggtctctctccctctgtcttttctcctccgcctgtgtccatctgaccgttttcacttgtctcctttctgactgtccctgccaatgctccagctgtcgtctgactctgggttcgttggggacatgagattttattttttgtgagtgagactgagggatcgtagatttttacaatctgtatctttgacaattctgggtgcgagtgtgagagtgtgagcagggcttgctcctgccaaccacaattcaatgaatccccgacccccctaccccatgctgtacttgtggttctctttttgtattttgcatctgaccccggggggctgggacagattggcaatgggccgtcccctctccccttggttctgcactgttgcc

SEQ ID NO: 10496 - DNA, 4386 bp, Homo sapiens
  source 1..4386: mol_type = unassigned DNA
ctcctcctctcagcacctggcgcggcgctacgcggccctggccgccgaggactgcgccgctgctgcccgccgcttcctgctatcctcggccgccgccgccgccgccgctgccgcctcggcttcgtcgcccgcctcctgctgcaaagagttggggctggctgcggccgccgcctgggagcagcagggccgaagtctcttcctggccagcttggggccggtgcgcttcctggggccgcccgccgccgtgcagctcttccgggggccgacaccgtcaccggccgagctccctacgccccccgaaatggtgtgcaagcggaagggggccggggtccccgcctgcaccccctgcaagcagccccgcagccgctctgccctccgccctcttctcccacctccgaaggtgcccccaccgaagctggcggggacgctgtccgagccgggggcaccgcccccttgtccgcccagcagcagcatgaatgtggcgacgcggactgtcgggagtcccccgaaaacccctgcgactgtcacagggagccgccccccgaaaccccagacatcaaccagctgccgccgtccatcctgctcaagatattttccaatttgtcactggatgagcgttgcctttccgcatcattggtttgcaagtactggcgtgacctttgtttagacttccagttttggaagcagctggatcttagtagtcgtcagcaggtcactgatgaattgttggaaaaaattgcatcaagaagtcagaatataattgaaatcaacatttctgattgtcgcagtatgtctgataatggcgtatgtgttttagcatttaaatgtcctggacttcttaggtatacagcctacaggtgtaaacagctttctgacacctctattattgcggttgcctctcactgtcctttacttcagaaagtgcatgtaggcaaccaggacaaactcactgatgaaggactcaagcagctgggctcaaaatgcagagaactcaaagatattcatttcggccagtgttacaagatctcagatgaaggcatgatcgtcatagctaagggctgtctgaaattacaaaggatatacatgcaggaaaacaaattagtgacagatcagtcagtgaaagcatttgctgaacactgtcctgagcttcaatatgtaggcttcatgggttgttcagtcacttctaaaggagtcattcacctaaccaagctaagaaacctttccagcttggacctacgtcatatcactgaactggataatgaaaccgtgatggaaattgtcaagaggtgcaaaaatcttagctctctcaatctctgtctgaactggatcataaatgacaggtgtgtggaggtcattgcaaaggaaggacaaaacctgaaagagctatatttggtgtcctgtaaaatcacagattatgcactgatagccattgggcgatacagcatgacaatagagactgtggatgtcggatggtgtaaagaaatcacagaccaaggagccaccctgattgcacagagcagcaagtctctgagatatttggggctgatgagatgtgataaagtcaacgaagtgacggtggaacagctggtgcagcagtacccccacatcaccttcagcaccgtcctgcaggactgcaagaggaccttggagagagcctatcagatgggctggacccccaacatgtctgccgcctcctcctagcgctcctgcctcgcctagtccactgggatcattcagcagagcagaggagaattgtacatttggggagctgatctctcggaagggttttaactgtcacctgtctgtgtgtgttcaagtatgtgtatttgtgtcttgtttgcatactgcataccaaaagtgcagttgtcatttgttcccaagtgagctggctttttttcttagaaattaaagattatgaaagccacaaactttttagtttttaacttcaaaggcttctttctctttaaaaaaaaattatttttaatatagagtcaaaaaattggatgtattattttgagcttctaattgctgccacttggagatgtccaagtaagaaggccttctttttacatgggatgaattgtgcacttctactgatgatgactacagcagaagtgatgttatacgtacaggcacttacactctctcacatattcacacgtgtgcacatctacaccagggctctgatctactctagatcgtttcctgacagagaagccttcttccaggccactaaggtagcatgttatccactgtggcactgcctaactccgtgtatcctcgggtggccaacttgctatctggtgggtgacttggggactagaaagaataaagccttttctaaatttgttatatagaggcaacagtctgaactctcctggccagctcacgaaagttaattatacattattctacaaatgcattctgttgagcactaaatattttagttggttttatgttaacattgtgttagcttttatttcctggatagtaactggtcaggatatattttaatgatatttgaaactaatcttagcattgaagccaccaatgtaattaatggtgtgcagttattttaaaaactacagatcatttcattattttcttaattttggtaattattaaagtctatttctgagatacgagagggtagtcacattaatagaagattcatgagtgagatataagtagacaatctttctactgttgttgctctttttgctttgctttgggttcttgaacaggttttttggatatatgcatgttgtcattttggactagttctcatgctactgcaaagatctattgctagctaatatatgagttaagaaagaaaattagaaaatctgttcattgaaattctgtttacacttgtcagaaataagcatttctttgtttaattaaggattgccagcttcagttaagacaagacctatcagtaaatgaatatatgttttgatttaacacatctttacaattaattcataatagggactcaggctcaaataactgttcctgtgtctagatttataatgaggacatcagggagcctttttaagctaaagagtgattatctttcacagtagaactagaaacaaaaccctaacttgtgaagttgctatttatttttccctgagtgaatataactgttatttggtctttaacagatatactgaggtttgagtttcactttctttaagtctcacattgctaacatgacattagctgtaagaaacaagatagctttacatttgaatgccatttactgatttctaatgattctctttttttgtaaacaactgtttcctttgattatgtcaacatgtttctgatgtggcatttttgttttaatcccaatcggttaggaaaatctagtcagtaagcgccatgagtattcttcccataactaaatgggtttctaatttaatttgaagggaataaaatttgtgtaagaaaaaagctgtttaacattaataaactatatttcttcttacacattgaactgtatcattttcatatccacttccccaccactgaaatatcttatttcacaatattttaactgatttttaatccaaaactaatttataagacagtatgtatagtaatagtagcttgagtgaatatgcaaaagtttaatttttatatatgtcatactatattttaaatagttaaaaaagacaaaagaagggagagccatctatgatatagatggtaccatttcagttcaaagttgtaataacctttggagtgttacagtttggttgtcaaatggtttcagaatgtataattgatttttttaaatgttgcattgtttgaatctaaagtacagcactataacatgctttagcttgggggggtgggggtggggtggggacttgcacttattctctaaaatgttgactaatccagaaagcctgatgcaacataatctggaaaactgctttggtacatttgtagaaatccgtagaaataccatatccagcctcaaagcattaatctcaaaaaaaaaaaaaaaaaaaaaaaaaaacagccagaaaaaagcatcaccttgagtggtcctgtgatggttgttgaatgtgttctcattagatgctttgaaatgaggcttaaaataatttttctgggcaatatagagtttcttttttttgcttagaatgtcataaatacatgtgaacacgtttaatgcagggctttttattctctccaaaatgtcaacagtattttcagaataaagactatgaaatatattgctgtagtggaaaattctggtcctttgtctttaatgtctttttgagtggataaagaaaattcacccggtttgtagtttctatatttccgtgaatctttgaccttgcagtgggttgcaataaaagagaaacaaaa

SEQ ID NO: 10497 - DNA, 3773 bp, Homo sapiens
  source 1..3773: mol_type = unassigned DNA
gatattttccaatttgtcactggatgagcgttgcctttccgcatcattggtttgcaagtactggcgtgacctttgtttagacttccagttttggaagcagctggatcttagtagtcgtcagcaggtcactgatgaattgttggaaaaaattgcatcaagaagtcagaatataattgaaatcaacatttctgattgtcgcagtatgtctgataatggcgtatgtgttttagcatttaaatgtcctggacttcttaggtatacagcctacaggtgtaaacagctttctgacacctctattattgcggttgcctctcactgtcctttacttcagaaagtgcatgtaggcaaccaggacaaactcactgatgaaggactcaagcagctgggctcaaaatgcagagaactcaaagatattcatttcggccagtgttacaagatctcagatgaaggcatgatcgtcatagctaagggctgtctgaaattacaaaggatatacatgcaggaaaacaaattagtgacagatcagtcagtgaaagcatttgctgaacactgtcctgagcttcaatatgtaggcttcatgggttgttcagtcacttctaaaggagtcattcacctaaccaagctaagaaacctttccagcttggacctacgtcatatcactgaactggataatgaaaccgtgatggaaattgtcaagaggtgcaaaaatcttagctctctcaatctctgtctgaactggatcataaatgacaggtgtgtggaggtcattgcaaaggaaggacaaaacctgaaagagctatatttggtgtcctgtaaaatcacagattatgcactgatagccattgggcgatacagcatgacaatagagactgtggatgtcggatggtgtaaagaaatcacagaccaaggagccaccctgattgcacagagcagcaagtctctgagatatttggggctgatgagatgtgataaagtaagagttgactatcaagttgtttgctttctacatatcagtatagttaatagcttgatgtcatatcctctctccttctctatctccacccccgtgtattatatattatatatacattttatatgtatatatgcaattatagctatgcattgtttgcctgcttttgtaaactaatctgagattatctttgtatttccccacttaataatgaattttgtgcttaagtagaaagaaaaagtaatcatatacatagtcaactagagtttggcatcctattcataagtccatggaccaaaatgtaaaagattacatgacaaactgcaatttgcagggtctaaccgtaaaattgtattctgggtttcaagtttccagcaacagtaaaggtggaaagaacagtgccaaattggtttttcacaagtgtgtaattttggtactgaacatctatgtattctggccattcgggaccaacaaagggccagtaagggggtatgtgggaatttgcatctccccatacatcagatgccactcccagcacatgataagaagtggttccagaggtcctggtggaaggcctgtagaaccagccagggatgtgagcatgagtttaggaaatggtgtagcatttaacgtgggaccctttgaagactgagaaaacagataataaaaatctatactgacacctgtaatcccagcacattgggaggccaaggcagaaggatcacttgagcccaggaatttgagaccagcctggacaacatgggaaaaccctgtctctatccccctctcccccaacaaaaaaaaattagccaggcataatggcacacacctgtagtcccagctactcgggaagctaaggtgggaggatcacctgagctcaagaggccgaggttgcagtgagccgtgattgtgccgcaaccacctcagcctggatgacggagcacgactgtgtcccaaacaaacaaaaaaaacctatactggacaccaggcactccacaggtgttttcttctttgtttattccatgttttacctataacaagtctaagaaatagttatttgcattgtgaaggggagaaaatggaggctcagaaagaccagtcagtggccccaggatactctggcaagacttcatgccgggtctttggagtctgtatccagtgctgctggcacaacccagggggcagtctgtggccacggggactgcttcccttggaaaaggtccagttcagatacttgctcagaaagtgccgccatcttgtactaatttacacatgtgtgctacttttgtaaatggtgattaggaacaaatctagcaaaataatgtgaaactaaatagacacgccattcaaagggcatgcatcttctaaatgtagcaaatgtgggggcaaatgaagtatggcccaaagctcttgtgtcctttgtgattttttgttaattggctaattcttttctccaaacactttagaatcccaacttatacgagacctttgccagctagttatgtttagagaaatgttattatatattctcagcccagcccagaagcgacttactttgtaactaagcaacagcactgagatccggggcttgcgagtctcccacaaatctttccactaaccaacctaatgccgctgctaaccctgccactttaaaatgacttcttttaagacaagttaaagggtccaccataggcatagtcctctagaaacaggaatcaatgacagcagaactcctcagcttccagcagaaggaactgccacatgaatgctaactaaagctaccaaaatgtacacattcatacatatgtgtccgcagccattctcagaaattgtcatatttctaacctgtaatctttagatggttaagatcagctccatcttcggagatacactgtagaagttgtatgttacagttactacaggagaatgttattccagacatatttgctgaccagcattttgctgatttttagttaagaaatgggttattttctacccaaatgcaaattagtccaaaattaaatagagacagtattcagattagctgtatccctgagggttttagcccttttcctgggctgcctctgaatcctttctctaaccagagagccactctgagaacccattggctccagcacgacgccgtctggtcagagcctgctgcagtgcagcccagggagatgctggacccagccttgctgtctggcttcctcagacttaaagcagctcagagccaaacacgagaggctctgtgaggatggaagacagttccaaaccacacacaaagcacaagtaaagccttgcacagaaaagcctgcttgttggtttagttggatggaaatctaaagtagctattcagttttcagattttgtatcatgccatccatctccagattttaagttaccatcaagattcaaaggaagatatgagtaacaaagaaaagaaattagtagcaacggtatggtctgcggagagccagagttcaggttcagatctgggctttgcacttactagttgtgtcaccgcgggcagttactaacctctcagtgcctgttccctcgtttgcaaaatgaggatgatactagtacctatcttgtagaattgtgagcatgtgaatgagttaacatacataaagcacttagaataatgtctattatatataaaatgctctgttactgattagtcttatcatccatatcattatattaacctgtgttgtgatactggaattttccaatgagaaaaaaaaattatattgcctactatcccattttgaaagacaattaaaaagaaaggaaaaaa

SEQ ID NO: 10498 - DNA, 5188 bp, Homo sapiens
  source 1..5188: mol_type = unassigned DNA
agagtcgcgggtgcgcgcgccggcggcggatccgcagttaaaatggtccgagcgggacccggcctttccccggccgctccgctgactgactgagccggctggccgggcccggactggtcgcctagccggcaggctcgctcgctccctccctcgcgtccccaaagctcgcgcccatcgttctcccggcttccctgggcaaagcatgtagcccccgtcgggcactccggcggcccgcagctgacgcccaccccccaccgtcgcgtgtgtgcccgtgtgtgcgtgtgtgtgcgcaggaagggcgacccctccgggggccgagccagcgagcggcctgccccgctgccgggagcccgcctctctgggtctccctccctcccgtcccggtccccctcctcggggccttctatatgggccaccttctctcgaaggagccgcgtaaccgcccgagccagaagaggcctcgctgttgcagttggtgccgccgccggcgccctctcctcaggctgccccgccggaccccagccaaggtgccccctcagccggcggcgccccggagccgggactgcttcttccgcgggccctgcatgctctgcttcatcgtgcacagtcccggcgcgcccgcccccgccggcccagaggaggagccgccgctctcgccgccgccgcgggacggggcctacgctgccgcctcctcctctcagcacctggcgcggcgctacgcggccctggccgccgaggactgcgccgctgctgcccgccgcttcctgctatcctcggccgccgccgccgccgccgctgccgcctcggcttcgtcgcccgcctcctgctgcaaagagttggggctggctgcggccgccgcctgggagcagcagggccgaagtctcttcctggccagcttggggccggtgcgcttcctggggccgcccgccgccgtgcagctcttccgggggccgacaccgtcaccggccgagctccctacgccccccgaaatggtgtgcaagcggaagggggccggggtccccgcctgcaccccctgcaagcagccccgctgcggcggcgggggctgcggcggcggcggcggcggcggtggcgggggagggcctgcggggggaggcgcttcgccgccccggccccccgacgccggctgctgccaggccccggagcagcccccgcagccgctctgccctccgccctcttctcccacctccgaaggtgcccccaccgaagctggcggggacgctgtccgagccgggggcaccgcccccttgtccgcccagcagcagcatgaatgtggcgacgcggactgtcgggagtcccccgaaaacccctgcgactgtcacagggagccgccccccgaaaccccagacatcaaccagctgccgccgtccatcctgctcaagatattttccaatttgtcactggatgagcgttgcctttccgcatcattggtttgcaagtactggcgtgacctttgtttagacttccagttttggaagcagctggatcttagtagtcgtcagcaggtcactgatgaattgttggaaaaaattgcatcaagaagtcagaatataattgaaatcaacatttctgattgtcgcagtatgtctgataatggcgtatgtgttttagcatttaaatgtcctggacttcttaggtatacagcctacaggtgtaaacagctttctgacacctctattattgcggttgcctctcactgtcctttacttcagaaagtgcatgtaggcaaccaggacaaactcactgatgaaggactcaagcagctgggctcaaaatgcagagaactcaaagatattcatttcggccagtgttacaagatctcagatgaaggcatgatcgtcatagctaagggctgtctgaaattacaaaggatatacatgcaggaaaacaaattagtgacagatcagtcagtgaaagcatttgctgaacactgtcctgagcttcaatatgtaggcttcatgggttgttcagtcacttctaaaggagtcattcacctaaccaagctaagaaacctttccagcttggacctacgtcatatcactgaactggataatgaaaccgtgatggaaattgtcaagaggtgcaaaaatcttagctctctcaatctctgtctgaactggatcataaatgacaggtgtgtggaggtcattgcaaaggaaggacaaaacctgaaagagctatatttggtgtcctgtaaaatcacagattatgcactgatagccattgggcgatacagcatgacaatagagactgtggatgtcggatggtgtaaagaaatcacagaccaaggagccaccctgattgcacagagcagcaagtctctgagatatttggggctgatgagatgtgataaagtcaacgaagtgacggtggaacagctggtgcagcagtacccccacatcaccttcagcaccgtcctgcaggactgcaagaggaccttggagagagcctatcagatgggctggacccccaacatgtctgccgcctcctcctagcgctcctgcctcgcctagtccactgggatcattcagcagagcagaggagaattgtacatttggggagctgatctctcggaagggttttaactgtcacctgtctgtgtgtgttcaagtatgtgtatttgtgtcttgtttgcatactgcataccaaaagtgcagttgtcatttgttcccaagtgagctggctttttttcttagaaattaaagattatgaaagccacaaactttttagtttttaacttcaaaggcttctttctctttaaaaaaaaattatttttaatatagagtcaaaaaattggatgtattattttgagcttctaattgctgccacttggagatgtccaagtaagaaggccttctttttacatgggatgaattgtgcacttctactgatgatgactacagcagaagtgatgttatacgtacaggcacttacactctctcacatattcacacgtgtgcacatctacaccagggctctgatctactctagatcgtttcctgacagagaagccttcttccaggccactaaggtagcatgttatccactgtggcactgcctaactccgtgtatcctcgggtggccaacttgctatctggtgggtgacttggggactagaaagaataaagccttttctaaatttgttatatagaggcaacagtctgaactctcctggccagctcacgaaagttaattatacattattctacaaatgcattctgttgagcactaaatattttagttggttttatgttaacattgtgttagcttttatttcctggatagtaactggtcaggatatattttaatgatatttgaaactaatcttagcattgaagccaccaatgtaattaatggtgtgcagttattttaaaaactacagatcatttcattattttcttaattttggtaattattaaagtctatttctgagatacgagagggtagtcacattaatagaagattcatgagtgagatataagtagacaatctttctactgttgttgctctttttgctttgctttgggttcttgaacaggttttttggatatatgcatgttgtcattttggactagttctcatgctactgcaaagatctattgctagctaatatatgagttaagaaagaaaattagaaaatctgttcattgaaattctgtttacacttgtcagaaataagcatttctttgtttaattaaggattgccagcttcagttaagacaagacctatcagtaaatgaatatatgttttgatttaacacatctttacaattaattcataatagggactcaggctcaaataactgttcctgtgtctagatttataatgaggacatcagggagcctttttaagctaaagagtgattatctttcacagtagaactagaaacaaaaccctaacttgtgaagttgctatttatttttccctgagtgaatataactgttatttggtctttaacagatatactgaggtttgagtttcactttctttaagtctcacattgctaacatgacattagctgtaagaaacaagatagctttacatttgaatgccatttactgatttctaatgattctctttttttgtaaacaactgtttcctttgattatgtcaacatgtttctgatgtggcatttttgttttaatcccaatcggttaggaaaatctagtcagtaagcgccatgagtattcttcccataactaaatgggtttctaatttaatttgaagggaataaaatttgtgtaagaaaaaagctgtttaacattaataaactatatttcttcttacacattgaactgtatcattttcatatccacttccccaccactgaaatatcttatttcacaatattttaactgatttttaatccaaaactaatttataagacagtatgtatagtaatagtagcttgagtgaatatgcaaaagtttaatttttatatatgtcatactatattttaaatagttaaaaaagacaaaagaagggagagccatctatgatatagatggtaccatttcagttcaaagttgtaataacctttggagtgttacagtttggttgtcaaatggtttcagaatgtataattgatttttttaaatgttgcattgtttgaatctaaagtacagcactataacatgctttagcttgggggggtgggggtggggtggggacttgcacttattctctaaaatgttgactaatccagaaagcctgatgcaacataatctggaaaactgctttggtacatttgtagaaatccgtagaaataccatatccagcctcaaagcattaatctcaaaaaaaaaaaaaaaaaaaaaaaaaaacagccagaaaaaagcatcaccttgagtggtcctgtgatggttgttgaatgtgttctcattagatgctttgaaatgaggcttaaaataatttttctgggcaatatagagtttcttttttttgcttagaatgtcataaatacatgtgaacacgtttaatgcagggctttttattctctccaaaatgtcaacagtattttcagaataaagactatgaaatatattgctgtagtggaaaattctggtcctttgtctttaatgtctttttgagtggataaagaaaattcacccggtttgtagtttctatatttccgtgaatctttgaccttgcagtgggttgcaataaaag

SEQ ID NO: 10499 - DNA, 3965 bp, Homo sapiens
  source 1..3965: mol_type = unassigned DNA
gggaggggagctgggactcggacccgggactgagtgggccccgggcagaagctgagcaccctgcgcccaaggagcccccgttggcctgggggggctgagggactgagcctcccagagcaggacctccccctggaagggccgcgccgcagcccgtgggagggcctcgcccccggcgccccccatctccactcgccgccgtcccggcctccgccggagggaggggccgagcgccctcggggggccgtggaccccggcgttctgagcgttccgcgccccgcgccgcccggcccccccgccgccgatggccgccgacccgccgggagctgccgagaagggagagatggctcccgggacacgtgtgagccctcggcgttgctgacgcccccaatgtcgtcgagcagccgggggccgggggccggagcgcgccgacgccgaacccgctgccgccgctgccgggcctgtgtgcgaactgagtgcggggattgccacttctgccgagacatgaagaagttcggggggcccgggcgcatgaagcagtcgtgcctgctccggcagtgcactgcccccgtgctcccacacacagctgtgtgcctcttgtgtggggaggctgggaaggaggacacggtggagggagaggaagagaaatttggtttgagcctcatggagtgtacaatctgcaacgagatcgtccaccccggctgcctgaagatggggaaggctgagggtgtcatcaatgcagagatccccaactgctgggagtgccctcgctgcacccaggaaggccgcaccagcaaggattcaggtgaggggcctggccgccgtagggccgacaacggcgaggagggcgccagcttggggagcggatggaagctgacagaggagccaccgcttccaccgcccccgcccaggcgcaagggccccctgcctgccgggccccccccggaggacgtgcctgggccccccaaacgaaaggaaagggaggcagggaatgagcctcccaccccaaggaaaaaggtgaaaggaggccgagagaggcacctgaagaaggtgggtggagacgcctgcctcctccgaggatcggacccaggcggcccgggcctgctgccccccagggttctgaatccgagccaggctttctcatcctgccaccctgggctccctcccgagaactgggagaaaccaaagccgcctttggcctctgcagagggcccagcggtgccgtccccgtccccgcagagggagaagctagagcgtttcaagcggatgtgccagctgctggaacgggtgcctgacacctcctcttcctcctcggactcagactccgactccgactcttcgggcacatcgctgagtgaggacgaagcccccggcgaggcccggaatgggcgacggccagcccggggcagctctggcgagaaggagaaccgtggggggcggcgggctgtgcgccctggcagtggggggcccctactcagctggcccctgggcccagccccaccaccccggcctccacagctggagcggcacgtggtgcggcccccgcctcgaagccctgagcccgacacactccccttggctgctggatccgaccaccccctgccccgggccgcctggcttcgcgtcttccagcacctcgggccgcgggagctgtgtatctgcatgcgagtctgccgaacttggagccgctggtgctatgacaagcgtctgtggcctcgaatggacctgagccggcggaagtcactgaccccgcccatgctcagtggtgtggttcgccgccagccccgtgccctggacctcagctggacaggtgtctccaagaagcagctcatgtggcttctgaaccgactacaaggcctgcaggagctggtgctctctggctgctcctggctctctgtctctgccctgggctcagccccactgccagccctgcggctcctggacctccgctggatcgaggatgttaaagactcccagctccgggagttgctgctgcctccaccagacaccaaaccagggcaaacagagagccgtggtcggctgcagggggtggcagaactgcgtctggcaggtttggagctgacagatgcctccctgcgtctcctgctgcgtcacgcaccccagctgagcgccctggacctgagccactgcgcccacgtcggggaccccagtgttcacctcctcacggcccccacgtccccactccgcgagaccctggtgcacctcaatcttgctggttgccaccgcctaacggaccactgcctcccgctgttccgccgctgccctcgtctacgccgcctagacctgcgctcctgccgccagctctcacccgaagcttgtgcccggctggcagctgccgggccccctggccccttccgctgccctgaggagaagctgcttctcaaggacagctagttgggcgccccccaccctcccccggactcgacaggagcctggacctccggcttcatttcacccctgctgggaggccaggttcccacctcaccaccctgggattcctgagtgtcagtgacttgggattcccacccagggactcaagccagccacccccttctttcccccctgcactgatatctctgggggtttctccttcctatgtcctgcccctgctacctgcttcattgtccatcccctgggggagtgggtcagaggtactggagggtgctgagccgaagggacggtgggaggggggttatggtgcaagtgttgggggggagaatggggaaaggacacacacaggatatgggagccaggggctgggggaggtggaaggggcggggggcggggcagacagcagaccaccaagggttcagggaacaaagaccagttacttggagtggggggtgggggtggggccacaaaaggaaaaccggaggagcaattggggatccaggtgtcagaggtaggggaaccaggggcaagctggggctgagctggaggtggggatgagagcaggtgtggggacagcaatacccccttgggggtcacctctctgcttcccccctccccaggcttcagttccttccccctgaccctgactccttgaacgtcactgaaaacggcagctattgcaaggagtgggggccgcgggcagccgctcttcagctcgcggcccaggggagtggcgaggggcgccccaaccccctgcccgcctctccgcacaatacttgaacattcatctgtactgaagtgttacttgaaccgggggaatctcggacctgggggagccggggtgtgaggggactggaccagcttggactgagacctgagaccgggccggtgggcgcccatttgggactgcgccacccccaggcttgttcttgttttactgtattgagcggcggcacccgccggacccgcattatggctgggggcgccagcccaagaatggggaccatgggactcctccagcctggctcttcccactctttcatcgtcatggaaacttgtatcccatttgcccagggaactgccactcctggttgccatggaaatagcagccaacggacacctcccgatgccagtgctaaggctggaaatggccccctcttagttgccatgggaacctagtaacagactctgctggccctccttccctgccccttcctcgagcgcggggtggggcttcgggaccccggggatgagccgggccaggtcccgcccctccgcgcaggcctccggggggccggggcttaccatgtaggggaggggagatctatccacatacctcaggtaacagggaggtgcgcgggtggggggagggctgggcggaccaaaggccggaggggtggggcctggggatagcgagaggcttgagaatggggccgcttgggggagggaagaggcagcccggcgaggggcaagcgggggacccagccgggctgggcccctgggccccgggtctgtacaatacggtttgctataaaactcaaaatcttccagccggg

SEQ ID NO: 10500 - DNA, 3796 bp, Homo sapiens
  source 1..3796: mol_type = unassigned DNA
aaactcatctccagccctccttcctatgacctctccaccctggggaactggccctccttcctagaccctgcttccccttgaaagcccccacccccgcctgcagtcgccgccctccaggcccctcccctggagcgctggagggccccttagccccatggatgggtatgaaagtccccggaaagggggaatctgggccctcggcgttgctgacgcccccaatgtcgtcgagcagccgggggccgggggccggagcgcgccgacgccgaacccgctgccgccgctgccgggcctgtgtgcgaactgagtgcggggattgccacttctgccgagacatgaagaagttcggggggcccgggcgcatgaagcagtcgtgcctgctccggcagtgcactgcccccgtgctcccacacacagctgtgtgcctcttgtgtggggaggctgggaaggaggacacggtggagggagaggaagagaaatttggtttgagcctcatggagtgtacaatctgcaacgagatcgtccaccccggctgcctgaagatggggaaggctgagggtgtcatcaatgcagagatccccaactgctgggagtgccctcgctgcacccaggaaggccgcaccagcaaggattcaggtgaggggcctggccgccgtagggccgacaacggcgaggagggcgccagcttggggagcggatggaagctgacagaggagccaccgcttccaccgcccccgcccaggcgcaagggccccctgcctgccgggccccccccggaggacgtgcctgggccccccaaacgaaaggaaagggaggcagggaatgagcctcccaccccaaggaaaaaggtgaaaggaggccgagagaggcacctgaagaaggtgggtggagacgcctgcctcctccgaggatcggacccaggcggcccgggcctgctgccccccagggttctgaatccgagccaggctttctcatcctgccaccctgggctccctcccgagaactgggagaaaccaaagccgcctttggcctctgcagagggcccagcggtgccgtccccgtccccgcagagggagaagctagagcgtttcaagcggatgtgccagctgctggaacgggtgcctgacacctcctcttcctcctcggactcagactccgactccgactcttcgggcacatcgctgagtgaggacgaagcccccggcgaggcccggaatgggcgacggccagcccggggcagctctggcgagaaggagaaccgtggggggcggcgggctgtgcgccctggcagtggggggcccctactcagctggcccctgggcccagccccaccaccccggcctccacagctggagcggcacgtggtgcggcccccgcctcgaagccctgagcccgacacactccccttggctgctggatccgaccaccccctgccccgggccgcctggcttcgcgtcttccagcacctcgggccgcgggagctgtgtatctgcatgcgagtctgccgaacttggagccgctggtgctatgacaagcgtctgtggcctcgaatggacctgagccggcggaagtcactgaccccgcccatgctcagtggtgtggttcgccgccagccccgtgccctggacctcagctggacaggtgtctccaagaagcagctcatgtggcttctgaaccgactacaaggcctgcaggagctggtgctctctggctgctcctggctctctgtctctgccctgggctcagccccactgccagccctgcggctcctggacctccgctggatcgaggatgttaaagactcccagctccgggagttgctgctgcctccaccagacaccaaaccagggcaaacagagagccgtggtcggctgcagggggtggcagaactgcgtctggcaggtttggagctgacagatgcctccctgcgtctcctgctgcgtcacgcaccccagctgagcgccctggacctgagccactgcgcccacgtcggggaccccagtgttcacctcctcacggcccccacgtccccactccgcgagaccctggtgcacctcaatcttgctggttgccaccgcctaacggaccactgcctcccgctgttccgccgctgccctcgtctacgccgcctagacctgcgctcctgccgccagctctcacccgaagcttgtgcccggctggcagctgccgggccccctggccccttccgctgccctgaggagaagctgcttctcaaggacagctagttgggcgccccccaccctcccccggactcgacaggagcctggacctccggcttcatttcacccctgctgggaggccaggttcccacctcaccaccctgggattcctgagtgtcagtgacttgggattcccacccagggactcaagccagccacccccttctttcccccctgcactgatatctctgggggtttctccttcctatgtcctgcccctgctacctgcttcattgtccatcccctgggggagtgggtcagaggtactggagggtgctgagccgaagggacggtgggaggggggttatggtgcaagtgttgggggggagaatggggaaaggacacacacaggatatgggagccaggggctgggggaggtggaaggggcggggggcggggcagacagcagaccaccaagggttcagggaacaaagaccagttacttggagtggggggtgggggtggggccacaaaaggaaaaccggaggagcaattggggatccaggtgtcagaggtaggggaaccaggggcaagctggggctgagctggaggtggggatgagagcaggtgtggggacagcaatacccccttgggggtcacctctctgcttcccccctccccaggcttcagttccttccccctgaccctgactccttgaacgtcactgaaaacggcagctattgcaaggagtgggggccgcgggcagccgctcttcagctcgcggcccaggggagtggcgaggggcgccccaaccccctgcccgcctctccgcacaatacttgaacattcatctgtactgaagtgttacttgaaccgggggaatctcggacctgggggagccggggtgtgaggggactggaccagcttggactgagacctgagaccgggccggtgggcgcccatttgggactgcgccacccccaggcttgttcttgttttactgtattgagcggcggcacccgccggacccgcattatggctgggggcgccagcccaagaatggggaccatgggactcctccagcctggctcttcccactctttcatcgtcatggaaacttgtatcccatttgcccagggaactgccactcctggttgccatggaaatagcagccaacggacacctcccgatgccagtgctaaggctggaaatggccccctcttagttgccatgggaacctagtaacagactctgctggccctccttccctgccccttcctcgagcgcggggtggggcttcgggaccccggggatgagccgggccaggtcccgcccctccgcgcaggcctccggggggccggggcttaccatgtaggggaggggagatctatccacatacctcaggtaacagggaggtgcgcgggtggggggagggctgggcggaccaaaggccggaggggtggggcctggggatagcgagaggcttgagaatggggccgcttgggggagggaagaggcagcccggcgaggggcaagcgggggacccagccgggctgggcccctgggccccgggtctgtacaatacggtttgctataaaactcaaaatcttccagccggg

SEQ ID NO: 10501 - DNA, 3312 bp, Homo sapiens
  source 1..3312: mol_type = unassigned DNA
gcgcatgaagcagtcgtgcctgctccggcagtgcactgcccccgtgctcccacacacagctgtgtgcctcttgtgtggggaggctgggaaggaggacacggtggagggagaggaagagaaatttggtttgagcctcatggagtgtacaatctgcaacgagatcgtccaccccggctgcctgaagatggggaaggctgagggtgtcatcaatgcagagatccccaactgctgggagtgccctcgctgcacccaggaaggccgcaccagcaaggattcaggtgaggggcctggccgccgtagggccgacaacggcgaggagggcgccagcttggggagcggatggaagctgacagaggagccaccgcttccaccgcccccgcccaggcgcaagggccccctgcctgccgggccccccccggaggacgtgcctgggccccccaaacgaaaggaaagggaggcagggaatgagcctcccaccccaaggaaaaaggtgaaaggaggccgagagaggcacctgaagaagaaaccaaagccgcctttggcctctgcagagggcccagcggtgccgtccccgtccccgcagagggagaagctagagcgtttcaagcggatgtgccagctgctggaacgggtgcctgacacctcctcttcctcctcggactcagactccgactccgactcttcgggcacatcgctgagtgaggacgaagcccccggcgaggcccggaatgggcgacggccagcccggggcagctctggcgagaaggagaaccgtggggggcggcgggctgtgcgccctggcagtggggggcccctactcagctggcccctgggcccagccccaccaccccggcctccacagctggagcggcacgtggtgcggcccccgcctcgaagccctgagcccgacacactccccttggctgctggatccgaccaccccctgccccgggccgcctggcttcgcgtcttccagcacctcgggccgcgggagctgtgtatctgcatgcgagtctgccgaacttggagccgctggtgctatgacaagcgtctgtggcctcgaatggacctgagccggcggaagtcactgaccccgcccatgctcagtggtgtggttcgccgccagccccgtgccctggacctcagctggacaggtgtctccaagaagcagctcatgtggcttctgaaccgactacaaggcctgcaggagctggtgctctctggctgctcctggctctctgtctctgccctgggctcagccccactgccagccctgcggctcctggacctccgctggatcgaggatgttaaagactcccagctccgggagttgctgctgcctccaccagacaccaaaccagggcaaacagagagccgtggtcggctgcagggggtggcagaactgcgtctggcaggtttggagctgacagatgcctccctgcgtctcctgctgcgtcacgcaccccagctgagcgccctggacctgagccactgcgcccacgtcggggaccccagtgttcacctcctcacggcccccacgtccccactccgcgagaccctggtgcacctcaatcttgctggttgccaccgcctaacggaccactgcctcccgctgttccgccgctgccctcgtctacgccgcctagacctgcgctcctgccgccagctctcacccgaagcttgtgcccggctggcagctgccgggccccctggccccttccgctgccctgaggagaagctgcttctcaaggacagctagttgggcgccccccaccctcccccggactcgacaggagcctggacctccggcttcatttcacccctgctgggaggccaggttcccacctcaccaccctgggattcctgagtgtcagtgacttgggattcccacccagggactcaagccagccacccccttctttcccccctgcactgatatctctgggggtttctccttcctatgtcctgcccctgctacctgcttcattgtccatcccctgggggagtgggtcagaggtactggagggtgctgagccgaagggacggtgggaggggggttatggtgcaagtgttgggggggagaatggggaaaggacacacacaggatatgggagccaggggctgggggaggtggaaggggcggggggcggggcagacagcagaccaccaagggttcagggaacaaagaccagttacttggagtggggggtgggggtggggccacaaaaggaaaaccggaggagcaattggggatccaggtgtcagaggtaggggaaccaggggcaagctggggctgagctggaggtggggatgagagcaggtgtggggacagcaatacccccttgggggtcacctctctgcttcccccctccccaggcttcagttccttccccctgaccctgactccttgaacgtcactgaaaacggcagctattgcaaggagtgggggccgcgggcagccgctcttcagctcgcggcccaggggagtggcgaggggcgccccaaccccctgcccgcctctccgcacaatacttgaacattcatctgtactgaagtgttacttgaaccgggggaatctcggacctgggggagccggggtgtgaggggactggaccagcttggactgagacctgagaccgggccggtgggcgcccatttgggactgcgccacccccaggcttgttcttgttttactgtattgagcggcggcacccgccggacccgcattatggctgggggcgccagcccaagaatggggaccatgggactcctccagcctggctcttcccactctttcatcgtcatggaaacttgtatcccatttgcccagggaactgccactcctggttgccatggaaatagcagccaacggacacctcccgatgccagtgctaaggctggaaatggccccctcttagttgccatgggaacctagtaacagactctgctggccctccttccctgccccttcctcgagcgcggggtggggcttcgggaccccggggatgagccgggccaggtcccgcccctccgcgcaggcctccggggggccggggcttaccatgtaggggaggggagatctatccacatacctcaggtaacagggaggtgcgcgggtggggggagggctgggcggaccaaaggccggaggggtggggcctggggatagcgagaggcttgagaatggggccgcttgggggagggaagaggcagcccggcgaggggcaagcgggggacccagccgggctgggcccctgggccccgggtctgtacaatacggtttgctataaaactcaaaatcttccagccggg

SEQ ID NO: 10502 - DNA, 1529 bp, Homo sapiens
  source 1..1529: mol_type = unassigned DNA
aacgggcgtcgccggcgccgtgtgacttcgggctgtgggctcgctcgcggctcttcggccatggttttctcaaacaatgatgaaggccttattaacaaaaagttacccaaagaacttctgttaagaatgctgttcagcttgttgttaaattttacttggtctaatccagaatgtactaagtatgtacatagcattggtctggattctttttgtaatgtgaatattttccttcttggatatagtaactttgtgccgatgtgcacagatttccaaggcttggaacatcttagccctggatggaagcaactggcaaagaatagatctttttaactttcaaacagatgtagagggtcgagtggtggaaaatatctcgaagcgatgcggtggattcctgaggaagctcagcttgcgaggctgcattggtgttggggattcctccttgaagacctttgcacagaactgccgaaacattgaacatttgaacctcaatggatgcacaaaaatcactgacagcacgtgttatagccttagcagattctgttccaagctgaaacatctggatctgacctcctgtgtgtctattacaaacagctccttgaaggggatcagtgagggctgccgaaacctggagtacctgaacctctcttggtgtgatcagatcacgaaggatggcatcgaggcactggtgcgaggttgtcgaggcctgaaagccctgctcctgaggggctgcacacagttagaagatgaagctctgaaacacattcagaattactgccatgagcttgtgagcctcaacttgcagtcctgctcacgtatcacggatgaaggtgtggtgcagatatgcaggggctgtcaccggctacaggctctctgcctttcgggttgcagcaacctcacagatgcctctcttacagccctgggtttgaactgtccgcgactgcaaattttggaggctgcccgatgctcccatttgactgacgcaggttttacacttttagctcggaattgccacgaattggagaagatggatcttgaagaatgcatcctgataaccgacagcacactcatccagctctccattcactgtcctaaactgcaagccctggtgagtctgagtttttctgacattattcacctgttaaagatgaaagagccctcccaccacaacaagaagctgtttgggttctctttctgtaagagcctgtcccactgtgaactcatcacagatgatgggatcctgcacctgagcaacagtacctgtggccatgagaggctgcgggtactggagttggacaactgcctcctcatcactgatgtggccctggaacacctagagaactgccgaggcctggagcgcctcgagctgtacgactgccagcaggttacccgtgcaggcatcaagcggatgcgggctcagctccctcatgtcaaagtccacgcctactttgctcccgtcaccccaccgacagcagtggcaggaagtggacagcgactgtgcaggtgctgtgtcattctctgacagcagctgc

SEQ ID NO: 10503 - DNA, 3847 bp, Homo sapiens
  source 1..3847: mol_type = unassigned DNA
gggcggggcgcctggctggcgtcaccaggacaacgggcgtcgccggcgccgtgtgacttcgggctgtgggctcgctcgcggctcttcggccatggttttctcaaacaatgatgaaggccttattaacaaaaagttacccaaagaacttctgttaagaatattttccttcttggatatagtaactttgtgccgatgtgcacagatttccaaggcttggaacatcttagccctggatggaagcaactggcaaagaatagatctttttaactttcaaacagatgtagagggtcgagtggtggaaaatatctcgaagcgatgcggtggattcctgaggaagctcagcttgcgaggctgcattggtgttggggattcctccttgaagacctttgcacagaactgccgaaacattgaacatttgaacctcaatggatgcacaaaaatcactgacagcacgtgttatagccttagcagattctgttccaagctgaaacatctggatctgacctcctgtgtgtctattacaaacagctccttgaaggggatcagtgagggctgccgaaacctggagtacctgaacctctcttggtgtgatcagatcacgaaggatggcatcgaggcactggtgcgaggttgtcgaggcctgaaagccctgctcctgaggggctgcacacagttagaagatgaagctctgaaacacattcagaattactgccatgagcttgtgagcctcaacttgcagtcctgctcacgtatcacggatgaaggtgtggtgcagatatgcaggggctgtcaccggctacaggctctctgcctttcgggttgcagcaacctcacagatgcctctcttacagccctgggtttgaactgtccgcgactgcaaattttggaggctgcccgatgctcccatttgactgacgcaggttttacacttttagctcggaattgccacgaattggagaagatggatcttgaagaatgcatcctgataaccgacagcacactcatccagctctccattcactgtcctaaactgcaagccctgagcctgtcccactgtgaactcatcacagatgatgggatcctgcacctgagcaacagtacctgtggccatgagaggctgcgggtactggagttggacaactgcctcctcatcactgatgtggccctggaacacctagagaactgccgaggcctggagcgcctcgagctgtacgactgccagcaggttacccgtgcaggcatcaagcggatgcgggctcagctccctcatgtcaaagtccacgcctactttgctcccgtcaccccaccgacagcagtggcaggaagtggacagcgactgtgcaggtgctgtgtcattctctgacagcagctgcctgggcccaaggggtgatgaggcatcctttcctctagaagacctgagtcttcctgaccgactccaccatcacccaatctgttgattctccattgggaaaggcatttacaggtaaaagacttctgtatggattgcagttactctggtgatagttttcacctttattctgctgtgaaacaatcaaatcaaagccttgtgtcagttaacacatgacaagtggtctcaatgcagctaggaccatgccagaaacctggatctcttaagagattggtacctacctaggtacgaaagttctacccttggcatactcagcattcctcaaaaagaccatcagtgttagcacaaactgagcagaaaaaataagctgttgattttctacctgatacttaagccagtggcctactttaattcacaattccattttgattagcaggacttttccactttgaagataaatagcaactttatcaaagtgactgtactgcaaattaattcataatgcctgatagttttatatatagagacttatgtggaaggcatgttaataggtttccatgagacaccaaagaaaagaggactctatactgggtggagcagggtcttcacctttttgtttctgtcaacttgtcatatacacctccagggaccaaaaacaaaagcagctcggagtctgtgttgcctgattggaaagtagaagctctggtgtatgctacagcacataacacatttttactaaaggaaaaaagctaattatgtccatgcctctcgtaaaactggggggaaccttaaagagaaagaactaaggcttaagttatctgtagtataatcaattagaagtaatgaatggatgcatgtaaaatggatgtgattttttttcaagcttattttgaaatcttaaaaatcaggttacaccatagctactcaaaagttttacacacttaaaactcagatcagtaagtgttggtaccttttagactcataaaattgaataaaccattgcaatgctttaaaaaaaattaagtcagagggttttattgctatgattttatggcagacacatccaagcaaaaccattttccaaatgcagaccttcctgatgttatctgaaatctgataaaatgaccctactctctgctgtggttcattcttgctccatgctgtccatatttatgatctttattaagaacctgtcaatcagtcatcaccaccttcattgtaaacttaggtgttcatggtggctggcccttccaaacaaccactcccccaaactgaagggccagagctcatgagaaacttaaaagtgaaacggcaaaagcaagatgtgttcccatgactaccaatacctttattaggcagttttagaagtgtttttaaggatatattatgtcagctgcattctaggaagagaagcagattatatatatatataatctccccataaacggacttagcacaattatcatcagagtaagcattaaagtcattttattgccttatgatatattccagtattccttggtctaaaaattgtgtggataccatagcagttagttaaatatacatttatacccactgtttgttgtggaagagatgatgggggaggaggactgatgcaggaagcaacttcaataaatgagcatataacagacttgcttcagtgattatgaattagtttagtttctattaaaaaaaattaacttaaggctggccacggtggttcatgcctataatcccagcacttggggaggccaaggcgggtggatcacctgaggtcaggagtttgagaccagcctggccaacacagtaaaaccccatctctactgaaaatacaaaaattagccgggcgtggtgctgggcacctgtaatctcagctactcgggaggctgaagcaggagaaatgctggaacccaggaggcggaggtggcagtgagccgagattgtgccattgcactccatccagcccaggagacaacagtgagactccatcatcatctcaaaacaaaacaaacaaacaaacaaaacaaaccaccagagccttctatacatgattgatttcttttgagccaggatacaacctatcatcagtcacagctattggacttgatgctcaatgatccatggcctcatttacaaaacaggagaacctcttgtaagaaaatcaggtttgcaggctgggcacggtggctcacgcctgtaatcccagcactttgggaggcagaggcgggcggatcgtgagatcaggagatcaagaccatcctggctaacacagtgaaaccccgtctctactaaaaatacaaaaaaaattagccgggcatagtggcgggtgcctgtagtcccagctactcaggagactgaggcagaagaatggcgtgaacccgggaggcagagcttgcagtgagccgagattgcgccactgcactccagcctgggtgacagagccagactccgtctcaaaaaaaaaaaaaaaaaagaaaa

SEQ ID NO: 10504 - DNA, 1618 bp, Homo sapiens
  source 1..1618: mol_type = unassigned DNA
acaacgggcgtcgccggcgccgtgtgacttcgggctgtgggctcgctcgcggctcttcggccatggttttctcaaacaatgatgaaggccttattaacaaaaagttacccaaagaacttctgttaagaatgctgttcagcttgttgttaaattttacttggtctaatccagaatgtactaagtatgtacatagcattggtctggattctttttgtaatgtggacctttgcacagaactgccgaaacattgaacatttgaacctcaatggatgcacaaaaatcactgacagcacgtgttatagccttagcagattctgttccaagctgaaacatctggatctgacctcctgtgtgtctattacaaacagctccttgaaggggatcagtgagggctgccgaaacctggagtacctgaacctctcttggtgtgatcagatcacgaaggatggcatcgaggcactggtgcgaggttgtcgaggcctgaaagccctgctcctgaggggctgcacacagttagaagatgaagctctgaaacacattcagaattactgccatgagcttgtgagcctcaacttgcagtcctgctcacgtatcacggatgaaggtgtggtgcagatatgcaggggctgtcaccggctacaggctctctgcctttcgggttgcagcaacctcacagatgcctctcttacagccctgggtttgaactgtccgcgactgcaaattttggaggctgcccgatgctcccatttgactgacgcaggttttacacttttagctcggaattgccacgaattggagaagatggatcttgaagaatgcatcctgataaccgacagcacactcatccagctctccattcactgtcctaaactgcaagccctgagcctgtcccactgtgaactcatcacagatgatgggatcctgcacctgagcaacagtacctgtggccatgagaggctgcgggtactggagttggacaactgcctcctcatcactgatgtggccctggaacacctagagaactgccgaggcctggagcgcctcgagctgtacgactgccagcaggttacccgtgcaggcatcaagcggatgcgggctcagctccctcatgtcaaagtccacgcctactttgctcccgtcaccccaccgacagcagtggcaggaagtggacagcgactgtgcaggtgctgtgtcattctctgacagcagctgcctgggcccaaggggtgatgaggcatcctttcctctagaagacctgagtcttcctgaccgactccaccatcacccaatctgttgattctccattgggaaaggcatttacaggtaaaagacttctgtatggattgcagttactctggtgatagttttcacctttattctgctgtgaaacaatcaaatcaaagccttgtgtcagttaacacatgacaagtggtctcaatgcagctaggaccatgccagaaacctggatctcttaagagattggtacctacctaggtacgaaagttctacccttggcatactcagcattcctcaaaaagaccatcagtgttagcacaaactgagcagaaaaaataagctgttgattttctacctgatacttaagccagtggcctacttt

SEQ ID NO: 10505 - DNA, 2793 bp, Homo sapiens
  source 1..2793: mol_type = unassigned DNA
accaggacaacgggcgtcgccggcgccgtgtgacttcgggctgtgggctcgctcgcggctcttcggccatggttttctcaaacaatgatgaaggccttattaacaaaaagttacccaaagaacttctgttaagaatattttccttcttggatatagtaactttgtgccgatgtgcacagatttccaaggcttggaacatcttagccctggatggaagcaactggcaaagaatagatctttttaactttcaaacagatgtagagggtcgagtggtggaaaatatctcgaagcgatgcggtggattcctgaggaagctcagcttgcgaggctgcattggtgttggggattcctccttgaagacctttgcacagaactgccgaaacattgaacatttgaacctcaatggatgcacaaaaatcactgacagcacgtgttatagccttagcagattctgttccaagctgaaacatattcagaattactgccatgagcttgtgagcctcaacttgcagtcctgctcacgtatcacggatgaaggtgtggtgcagatatgcaggggctgtcaccggctacaggctctctgcctttcgggttgcagcaacctcacagatgcctctcttacagccctgggtttgaactgtccgcgactgcaaattttggaggctgcccgatgctcccatttgactgacgcaggttttacacttttagctcggaattgccacgaattggagaagatggatcttgaagaatgcatcctgataaccgacagcacactcatccagctctccattcactgtcctaaactgcaagccctgagcctgtcccactgtgaactcatcacagatgatgggatcctgcacctgagcaacagtacctgtggccatgagaggctgcgggtactggagttggacaactgcctcctcatcactgatgtggccctggaacacctagagaactgccgaggcctggagcgcctcgagctgtacgactgccagcaggttacccgtgcaggcatcaagcggatgcgggctcagctccctcatgtcaaagtccacgcctactttgctcccgtcaccccaccgacagcagtggcaggaagtggacagcgactgtgcaggtgctgtgtcattctctgacagcagctgcctgggcccaaggggtgatgaggcatcctttcctctagaagacctgagtcttcctgaccgactccaccatcacccaatctgttgattctccattgggaaaggcatttacaggtaaaagacttctgtatggattgcagttactctggtgatagttttcacctttattctgctgtgaaacaatcaaatcaaagccttgtgtcagttaacacatgacaagtggtctcaatgcagctaggaccatgccagaaacctggatctcttaagagattggtacctacctaggtacgaaagttctacccttggcatactcagcattcctcaaaaagaccatcagtgttagcacaaactgagcagaaaaaataagctgttgattttctacctgatacttaagccagtggcctactttaattcacaattccattttgattagcaggacttttccactttgaagataaatagcaactttatcaaagtgactgtactgcaaattaattcataatgcctgatagttttatatatagagacttatgtggaaggcatgttaataggtttccatgagacaccaaagaaaagaggactctatactgggtggagcagggtcttcacctttttgtttctgtcaacttgtcatatacacctccagggaccaaaaacaaaagcagctcggagtctgtgttgcctgattggaaagtagaagctctggtgtatgctacagcacataacacatttttactaaaggaaaaaagctaattatgtccatgcctctcgtaaaactggggggaaccttaaagagaaagaactaaggcttaagttatctgtagtataatcaattagaagtaatgaatggatgcatgtaaaatggatgtgattttttttcaagcttattttgaaatcttaaaaatcaggttacaccatagctactcaaaagttttacacacttaaaactcagatcagtaagtgttggtaccttttagactcataaaattgaataaaccattgcaatgctttaaaaaaaattaagtcagagggttttattgctatgattttatggcagacacatccaagcaaaaccattttccaaatgcagaccttcctgatgttatctgaaatctgataaaatgaccctactctctgctgtggttcattcttgctccatgctgtccatatttatgatctttattaagaacctgtcaatcagtcatcaccaccttcattgtaaacttaggtgttcatggtggctggcccttccaaacaaccactcccccaaactgaagggccagagctcatgagaaacttaaaagtgaaacggcaaaagcaagatgtgttcccatgactaccaatacctttattaggcagttttagaagtgtttttaaggatatattatgtcagctgcattctaggaagagaagcagattatatatatatataatctccccataaacggacttagcacaattatcatcagagtaagcattaaagtcattttattgccttatgatatattccagtattccttggtctaaaaattgtgtggataccatagcagttagttaaatatacatttatacccactgtttgttgtggaagagatgatgggggaggaggactgatgcaggaagcaacttcaataaatgagcatataacaga

SEQ ID NO: 10506 - DNA, 1556 bp, Homo sapiens
  source 1..1556: mol_type = unassigned DNA
agctacagtgcaggactacacctacctgccaacttttcccatgggccttcaattagtacattggaataggagttcggatgctggggcaagggaaagagagctaagaagggtcctgctgaggttttctcaaacaatgatgaaggccttattaacaaaaagttacccaaagaacttctgttaagaatgctgttcagcttgttgttaaattttacttggtctaatccagaatgtactaagtatgtacatagcattggtctggattctttttgtaatgtgaatattttccttcttggatatagtaactttgtgccgatgtgcacagatttccaaggcttggaacatcttagccctggatggaagcaactggcaaagaatagatctttttaactttcaaacagatgtagagggtcgagtggtggaaaatatctcgaagcgatgcggtggattcctgaggaagctcagcttgcgaggctgcattggtgttggggattcctccttgaagacctttgcacagaactgccgaaacattgaacatttgaacctcaatggatgcacaaaaatcactgacagcacgtgttatagccttagcagattctgttccaagctgaaacatctggatctgacctcctgtgtgtctattacaaacagctccttgaaggggatcagtgagggctgccgaaacctggagtacctgaacctctcttggtgtgatcagatcacgaaggatggcatcgaggcactggtgcgaggttgtcgaggcctgaaagccctgctcctgaggggctgcacacagttagaagatgaagctctgaaacacattcagaattactgccatgagcttgtgagcctcaacttgcagtcctgctcacgtatcacggatgaaggtgtggtgcagatatgcaggggctgtcaccggctacaggctctctgcctttcgggttgcagcaacctcacagatgcctctcttacagccctgggtttgaactgtccgcgactgcaaattttggaggctgcccgatgctcccatttgactgacgcaggttttacacttttagctcggaattgccacgaattggagaagatggatcttgaagaatgcatcctgataaccgacagcacactcatccagctctccattcactgtcctaaactgcaagccctgagcctgtcccactgtgaactcatcacagatgatgggatcctgcacctgagcaacagtacctgtggccatgagaggctgcgggtactggagttggacaactgcctcctcatcactgatgtggccctggaacacctagagaactgccgaggcctggagcgcctcgagctgtacgactgccagcaggttacccgtgcaggcatcaagcggatgcgggctcagctccctcatgtcaaagtccacgcctactttgctcccgtcaccccaccgacagcagtggcaggaagtggacagcgactgtgcaggtgctgtgtcattctctgacagcagctgcctgggcccaaggggtgatgaggcatcctttcctctagaagacctgagtcttcctgaccgactc

SEQ ID NO: 10507 - DNA, 1259 bp, Homo sapiens
  source 1..1259: mol_type = unassigned DNA
gacttcgggctgtgggctcgctcgcggctcttcggccatggttttctcaaacaatgatgaaggccttattaacaaaaagttacccaaagaacttctgttaagaatattttccttcttggatatagtaactttgtgccgatgtgcacagatttccaaggcttggaacatcttagccctggatggaagcaactggcaaagaatagatctttttaactttcaaacagatgtagagggtcgagtggtggaaaatatctcgaagcgatgcggtggattcctgaggaagctcagcttgcgaggctgcattggtgttggggattcctccttgaagacctttgcacagaactgccgaaacattgaacatttgaacctcaatggatgcacaaaaatcactgacagcacgtgttatagccttagcagattctgttccaagctgaaacacattcagaattactgccatgagcttgtgagcctcaacttgcagtcctgctcacgtatcacggatgaaggtgtggtgcagatatgcaggggctgtcaccggctacaggctctctgcctttcgggttgcagcaacctcacagatgcctctcttacagccctgggtttgaactgtccgcgactgcaaattttggaggctgcccgatgctcccatttgactgacgcaggttttacacttttagctcggaattgccacgaattggagaagatggatcttgaagaatgcatcctgataaccgacagcacactcatccagctctccattcactgtcctaaactgcaagccctgagcctgtcccactgtgaactcatcacagatgatgggatcctgcacctgagcaacagtacctgtggccatgagaggctgcgggtactggagttggacaactgcctcctcatcactgatgtggccctggaacacctagagaactgccgaggcctggagcgcctcgagctgtacgactgccagcaggttacccgtgcaggcatcaagcggatgcgggctcagctccctcatgtcaaagtccacgcctactttgctcccgtcaccccaccgacagcagtggcaggaagtggacagcgactgtgcaggtgctgtgtcattctctgacagcagctgcctgggcccaaggggtgatgaggcatcctttcctctagaagacctgagtcttcctgaccgactccaccatcacccaatctgttgattctccattgggaaaggcatttacaggtaaaagacttctgtatggattgcagttactctg

SEQ ID NO: 10508 - DNA, 2777 bp, Homo sapiens
  source 1..2777: mol_type = unassigned DNA
cgccgctcctcgcggcctccgcgtcttccttccgggtcgcgctaggccgggcttgcggcggttgtgccgcatctagagagtcggggagccgcccccgcacccaggccttctcgcgctgcctggtcgctggtgaagcccgcggcgcgcgcctctcccggaccctgcagggtaaaagaatgtcacatgtcagcatttgtacctgaagtcagcatgcaaagttcagggtacctggatgaatgccaacttttgcatttcccatgtgtatcctgtgaccattctatctgggaacatccttcaaagagttcatgcatcttactgaggacacctgaccttttgaagcttcataattcacatctagatgtcaccggtctttcccatgttaacagttctgaccatgttttattatatatgccttcggcgccgagccaggacagctacaagaggagaaatgatgaacacccatagagctatagaatcaaacagccagacttcccctctcaatgcagaggtagtccagtatgccaaagaagtagtggatttcagttcccattatggaagtgagaatagtatgtcctatactatgtggaatttggctggtgtaccaaatgtattcccaagttctggtgactttactcagacagctgtgtttcgaacttatgggacatggtgggatcagtgtcctagtgcttccttgccattcaagaggacgccacctaattttcagagccaggactatgtggaacttacttttgaacaacaggtgtatcctacagctgtacatgttctagaaacctatcatcccggagcagtcattagaattctcgcttgttctgcaaatccttattccccaaatccaccagctgaagtaagatgggagattctttggtcagagagacctacgaaggtgaatgcttcccaagctcgccagtttaaaccttgtattaagcagataaatttccccacaaatcttatacgactggaagtaaatagttctcttctggaatattacactgaattagatgcagttgtgctacatggtgtgaaggacaagccagtgctttctctcaagacttcacttattgacatgaatgatatagaagatgatgcctatgcagaaaaggatggttgtggaatggacagtcttaacaaaaagtttagcagtgctgtcctcggggaagggccaaataatgggtattttgataaactaccttatgagcttattcagctgattctgaatcatcttacactaccagacctgtgtagattagcacagacttgcaaactactgagccagcattgctgtgatcctctgcaatacatccacctcaatctgcaaccatactgggcaaaactagatgacacttctctggaatttctacagtctcgctgcactcttgtccagtggcttaatttatcttggactggcaatagaggcttcatctctgttgcaggatttagcaggtttctgaaggtttgtggatccgaattagtacgccttgaattgtcttgcagccactttcttaatgaaacttgcttagaagttatttctgagatgtgtccaaatctacaggccttaaatctctcctcctgtgataagctaccacctcaagctttcaaccacattgccaagttatgcagccttaaacgacttgttctctatcgaacaaaagtagagcaaacagcactgctcagcattttgaacttctgttcagagcttcagcacctcagtttaggcagttgtgtcatgattgaagactatgatgtgatagctagcatgataggagccaagtgtaaaaaactccggaccctggatctgtggagatgtaagaatattactgagaatggaatagcagaactggcttctgggtgtccactactggaggagcttgaccttggctggtgcccaactctgcagagcagcaccgggtgcttcaccagactggcacaccagctcccaaacttgcaaaaactctttcttacagctaatagatctgtgtgtgacacagacattgatgaattggcatgtaattgtaccaggttacagcagctggacatattaggaacaagaatggtaagtccggcatccttaagaaaactcctggaatcttgtaaagatctttctttacttgatgtgtccttctgttcgcagattgataacagagctgtgctagaactgaatgcaagctttccaaaagtgttcataaaaaagagctttactcagtgacttaatatatgttctgtattaaaattaatgtgctttgttggggtttaattttgggattggttttgggttttgtttttagttgttttaatggtaagaattaagacatttgtagattttaaagaaaaatatgaaattgtccattaaatcaagtaaaaatgtgcacaaatgttttcataaaatactgcaagcacttctcttcaagaatatgagtggatattatttttaccttatgttaatcagtgatatgctttagtcaataatatgattgataaaagaataacatggaatcatgctaacttattttcaaaggaacactgagcaataaagtatcgtggcatttatgcaaaaaaaaaagttaattttttacaccttcatgtaaggatgtcttattaagcctgtgacctggcaagtgttttgtttggtatgtacaaaatggtcagagctagttggagaatgagacatgcttttccagctgtttggttatttctctggattaactgttcaactggaaaatttttagtttttctagccaggtgtggtggcacacacttgt

SEQ ID NO: 10509 - DNA, 3115 bp, Homo sapiens
  source 1..3115: mol_type = unassigned DNA
cgggcttgcggcggttgtgccgcatctagagagtcggggagccgcccccgcacccaggccttctcgcgctgcctggtcgctggtgaagcccgcggcgcgcgcctctcccggaccctgcaggatttttcttcctggcctggttcccttgccttctccatttgcttcattcgcttggattttcaagaagctttgaagctggataggagtctccagtcttcctcttgatccatatgtttcaggtaaaagaatgtcacatgtcagcatttgtacctgaagtcagcatgcaaagttcagggtacctggatgaatgccaacttttgcatttcccatgtgtatcctgtgaccattctatctgggaacatccttcaaagagttcatgcatcttactgaggacacctgaccttttgaagcttcataattcacatctagatgtcaccggtctttcccatgttaacagttctgaccatgttttattatatatgccttcggcgccgagccaggacagctacaagaggagaaatgatgaacacccatagagctatagaatcaaacagccagacttcccctctcaatgcagaggtagtccagtatgccaaagaagtagtggatttcagttcccattatggaagtgagaatagtatgtcctatactatgtggaatttggctggtgtaccaaatgtattcccaagttctggtgactttactcagacagctgtgtttcgaacttatgggacatggtgggatcagtgtcctagtgcttccttgccattcaagaggacgccacctaattttcagagccaggactatgtggaacttacttttgaacaacaggtgtatcctacagctgtacatgttctagaaacctatcatcccggagcagtcattagaattctcgcttgttctgcaaatccttattccccaaatccaccagctgaagtaagatgggagattctttggtcagagagacctacgaaggtgaatgcttcccaagctcgccagtttaaaccttgtattaagcagataaatttccccacaaatcttatacgactggaagtaaatagttctcttctggaatattacactgaattagatgcagttgtgctacatggtgtgaaggacaagccagtgctttctctcaagacttcacttattgacatgaatgatatagaagatgatgcctatgcagaaaaggatggttgtggaatggacagtcttaacaaaaagtttagcagtgctgtcctcggggaagggccaaataatgggtattttgataaactaccttatgagcttattcagctgattctgaatcatcttacactaccagacctgtgtagattagcacagacttgcaaactactgagccagcattgctgtgatcctctgcaatacatccacctcaatctgcaaccatactgggcaaaactagatgacacttctctggaatttctacagtctcgctgcactcttgtccagtggcttaatttatcttggactggcaatagaggcttcatctctgttgcaggatttagcaggtttctgaaggtttgtggatccgaattagtacgccttgaattgtcttgcagccactttcttaatgaaacttgcttagaagttatttctgagatgtgtccaaatctacaggccttaaatctctcctcctgtgataagctaccacctcaagctttcaaccacattgccaagttatgcagccttaaacgacttgttctctatcgaacaaaagtagagcaaacagcactgctcagcattttgaacttctgttcagagcttcagcacctcagtttaggcagttgtgtcatgattgaagactatgatgtgatagctagcatgataggagccaagtgtaaaaaactccggaccctggatctgtggagatgtaagaatattactgagaatggaatagcagaactggcttctgggtgtccactactggaggagcttgaccttggctggtgcccaactctgcagagcagcaccgggtgcttcaccagactggcacaccagctcccaaacttgcaaaaactctttcttacagctaatagatctgtgtgtgacacagacattgatgaattggcatgtaattgtaccaggttacagcagctggacatattaggaacaagaatggtaagtccggcatccttaagaaaactcctggaatcttgtaaagatctttctttacttgatgtgtccttctgttcgcagattgataacagagctgtgctagaactgaatgcaagctttccaaaagtgttcataaaaaagagctttactcagtgacttaatatatgttctgtattaaaattaatgtgctttgttggggtttaattttgggattggttttgggttttgtttttagttgttttaatggtaagaattaagacatttgtagattttaaagaaaaatatgaaattgtccattaaatcaagtaaaaatgtgcacaaatgttttcataaaatactgcaagcacttctcttcaagaatatgagtggatattatttttaccttatgttaatcagtgatatgctttagtcaataatatgattgataaaagaataacatggaatcatgctaacttattttcaaaggaacactgagcaataaagtatcgtggcatttatgcaaaaaaaaaagttaattttttacaccttcatgtaaggatgtcttattaagcctgtgacctggcaagtgttttgtttggtatgtacaaaatggtcagagctagttggagaatgagacatgcttttccagctgtttggttatttctctggattaactgttcaactggaaaatttttagtttttctagccaggtgtggtggcacacacttgtagtcctagcgacacaggaggtggaggcaggaggattacttgagatgggattttgagactctagtgtacttatgattgcacctgtgagcagccactgcactccaacctgggcaatatagcaagtccctttctcttaaaaaaaattgtagtgtttccacttttcttctgatatttttgtctatttcactactggataatgccaatataaaaatttgggtataatcaagaataagaggtaaactactaaataaaaaaagctttccaactg

SEQ ID NO: 10510 - DNA, 3385 bp, Homo sapiens
  source 1..3385: mol_type = unassigned DNA
accgggcgcgcgcgccgacggggcgggcgcatgcgcaagggggcgcgccgcctctgccccgcggcgagggtgtctatggagaggcggcggccgcggctgctgaggcggaggctgaggcagtggcgatggcgccctttcctgaagaagtggacgtcttcaccgccccacactggcggatgaagcagctggtggggctctactgcgacaagctttctaaaaccaatttttccaacaacaacgatttccgtgctcttctgcagtctttgtatgctactttcaaggagttcaaaatgcatgagcagattgaaaatgaatacattattggtttgcttcaacaacgcagccagaccatttataatgtacattctgacaataaactctccgagatgcttagcctctttgaaaagggactgaagaatgttaagaatgaatatgaacagttaaattatgcaaaacaactgaaagagagattggaggcttttacaagagattttcttcctcacatgaaagaggaagaggaggtttttcagcccatgttaatggaatattttacctatgaagagcttaaggatattaaaaagaaagtgattgcacaacactgctctcagaaggatactgcagaactccttagaggtcttagcctatggaatcatgctgaagagcgacagaagttttttaaatattccgtggatgaaaagtcagataaagaagcagaagtgtcagaacactccacaggtataacccatcttcctcctgaggtaatgctgtcaattttcagctatcttaatcctcaagagttatgtcgatgcagtcaagtaagcatgaaatggtctcagctgacaaaaacgggatcgctttggaaacatctttaccctgttcattgggccagaggtgactggtatagtggtcccgcaactgaacttgatactgaacctgatgatgaatgggtgaaaaataggaaagatgaaagtcgtgcttttcatgagtgggatgaagatgctgacattgatgaatctgaagagtctgcggaggaatcaattgctatcagcattgcacaaatggaaaaacgtttactccatggcttaattcataacgttctaccatatgttggtacttctgtaaaaaccttagtattagcatacagctctgcagtttccagcaaaatggttaggcagattttagagctttgtcctaacctggagcatctggatcttacccagactgacatttcagattctgcatttgacagttggtcttggcttggttgctgccagagtcttcggcatcttgatctgtctggttgtgagaaaatcacagatgtggccctagagaagatttccagagctcttggaattctgacatctcatcaaagtggctttttgaaaacatctacaagcaaaattacttcaactgcgtggaaaaataaagacattaccatgcagtccaccaagcagtatgcctgtttgcacgatttaactaacaagggcattggagaagaaatagataatgaacacccctggactaagcctgtttcttctgagaatttcacttctccttatgtgtggatgttagatgctgaagatttggctgatattgaagatactgtggaatggagacatagaaatgttgaaagtctttgtgtaatggaaacagcatccaactttagttgttccacctctggttgttttagtaaggacattgttggactaaggactagtgtctgttggcagcagcattgtgcttctccagcctttgcgtattgtggtcactcattttgttgtacaggaacagctttaagaactatgtcatcactcccagaatcttctgcaatgtgtagaaaagcagcaaggactagattgcctaggggaaaagacttaatttactttgggagtgaaaaatctgatcaagagactggacgtgtacttctgtttctcagtttatctggatgttatcagatcacagaccatggtctcagggttttgactctgggaggagggctgccttatttggagcaccttaatctctctggttgtcttactataactggtgcaggcctgcaggatttggtttcagcatgtccttctctgaatgatgaatacttttactactgtgacaacattaacggtcctcatgctgataccgccagtggatgccagaatttgcagtgtggttttcgagcctgctgccgctctggcgaatgacccttgacttctgatctttgtctacttcatttagctgagcaggctttctttcatgcactttactcatagcacatttcttgtgttaaccatccctttttgagcgtgacttgttttggccccatttcttacaacttcagaaatcttaatttaccagtgaattgtaatgttgtttctcttgcaaattatacttttggtttagaaagggattaggtcttttcaaaagggtgagaacagtcttacatttttcttttaaatgaaatgctttaaagaatgttggtaatgccatgtcatttaaagtatttcatagataattttgagttttaaagtccatggaggtgattggttctctttacacattaacactgtaccaagctttgcagatcttttccgacacacatgtctgaagacttattttcaaagacagcacatttttggaaactaatctcttttccgtaatatttcctttatttcaatgattctcagaaggccaattcaaacaaacccacatttaaggttctttaggattatagaataaattggcttctgagtgttagctcagtgagctaggaaagcaccaatcgatatttgtttcctttagggatactttgttctcaccactgtccctatgtcatcaaatttgggagagattttttaaaataccacaatcatttgaagaaatgtataaataaaatctactttgaggactttaccaagtaatactgttgtgttgtgatttttattataaatctcaatccaggtttactttagtatagaataggactacatactttgtctttggacctcccatgaacttattaccctgacaaatagttttagacagatactgaattttattgagctgaattttctttttgaaatgagttattcagtagtcaaaatttgaatccgtaagtatatctactttgctttgttaaaacatcatgagagtggaggcctgccacccagaaaggcacatactagtgccttttagtacaattttatgtcatgtagaagaaaatggcaatgttcctcctattgatacagatacaggcatatgtcatcttattgcgttttgctttattgcactttgcaaataatgcattttttacaaatggaaggtttatggcaactctgcgttgagccagtctattggtgccatgtttccaataaaacttctcctttca

SEQ ID NO: 10511 - DNA, 2949 bp, Homo sapiens
  source 1..2949: mol_type = unassigned DNA
gtctatggagaggcggcggccgcggctgctgaggcggaggctgaggcagtggcgatggcgccctttcctgaagaagtggacgtcttcaccgccccacactggcggatgaagcagctggtggggctctactgcgacaagctttctaaaaccaatttttccaacaacaacgatttccgtgctcttctgcagtctttgtatgctactttcaaggagttcaaaatgcatgagcagattgaaaatgaatacattattggtttgcttcaacaacgcagccagaccatttataatgtacattctgacaataaactctccgagatgcttagcctctttgaaaagggactgaagaatgttaagcctactactgttgactggaagccttaccaataacataaaacaatcgaataacaattatttcatgtattatatgtaaaatatatatactggattcttacagtaagaatgaatatgaacagttaaattatgcaaaacaactgaaagagagattggaggcttttacaagagattttcttcctcacatgaaagaggaagaggaggtttttcagcccatgttaatggaatattttacctatgaagagcttaaggatattaaaaagaaagtgattgcacaacactgctctcagaaggatactgcagaactccttagaggtcttagcctatggaatcatgctgaagagcgacagaagttttttaaatattccgtggatgaaaagtcagataaagaagcagaagtgtcagaacactccacaggtataacccatcttcctcctgaggtaatgctgtcaattttcagctatcttaatcctcaagagttatgtcgatgcagtcaagtaagcatgaaatggtctcagctgacaaaaacgggatcgctttggaaacatctttaccctgttcattgggccagaggtgactggtatagtggtcccgcaactgaacttgatactgaacctgatgatgaatgggtgaaaaataggaaagatgaaagtcgtgcttttcatgagtgggatgaagatgctgacattgatgaatctgaagagtctgcggaggaatcaattgctatcagcattgcacaaatggaaaaacgtttactccatggcttaattcataacgttctaccatatgttggtacttctgtaaaaaccttagtattagcatacagctctgcagtttccagcaaaatggttaggcagattttagagctttgtcctaacctggagcatctggatcttacccagactgacatttcagattctgcatttgacagttggtcttggcttggttgctgccagagtcttcggcatcttgatctgtctggttgtgagaaaatcacagatgtggccctagagaagatttccagagctcttggaattctgacatctcatcaaagtggctttttgaaaacatctacaagcaaaattacttcaactgcgtggaaaaataaagacattaccatgcagtccaccaagcagtatgcctgtttgcacgatttaactaacaagggcattggagaagaaatagataatgaacacccctggactaagcctgtttcttctgagaatttcacttctccttatgtgtggatgttagatgctgaagatttggctgatattgaagatactgtggaatggagacatagaaatgttgaaagtctttgtgtaatggaaacagcatccaactttagttgttccacctctggttgttttagtaaggacattgttggactaaggactagtgtctgttggcagcagcattgtgcttctccagcctttgcgtattgtggtcactcattttgttgtacaggaacagctttaagaactatgtcatcactcccagaatcttctgcaatgtgtagaaaagcagcaaggactagattgcctaggggaaaagacttaatttactttgggagtgaaaaatctgatcaagagactggacgtgtacttctgtttctcagtttatctggatgttatcagatcacagaccatggtctcagggttttgactctgggaggagggctgccttatttggagcaccttaatctctctggttgtcttactataactggtgcaggcctgcaggatttggtttcagcatgtccttctctgaatgatgaatacttttactactgtgacaacattaacggtcctcatgctgataccgccagtggatgccagaatttgcagtgtggttttcgagcctgctgccgctctggcgaatgacccttgacttctgatctttgtctacttcatttagctgagcaggctttctttcatgcactttactcatagcacatttcttgtgttaaccatccctttttgagcgtgacttgttttggccccatttcttacaacttcagaaatcttaatttaccagtgaattgtaatgttgtttctcttgcaaattatacttttggtttagaaagggattaggtcttttcaaaagggtgagaacagtcttacatttttcttttaaatgaaatgctttaaagaatgttggtaatgccatgtcatttaaagtatttcatagataattttgagttttaaagtccatggaggtgattggttctctttacacattaacactgtaccaagctttgcagatcttttccgacacacatgtctgaagacttattttcaaagacagcacatttttggaaactaatctcttttccgtaatatttcctttatttcaatgattctcagaaggccaattcaaacaaacccacatttaaggttctttaggattatagaataaattggcttctgagtgttagctcagtgagctaggaaagcaccaatcgatatttgtttcctttagggatactttgttctcaccactgtccctatgtcatcaaatttgggagagattttttaaaataccacaatcatttgaagaaatgtataaataaaatctactttgaggactttaccaagt

SEQ ID NO: 10512 - DNA, 2837 bp, Homo sapiens
  source 1..2837: mol_type = unassigned DNA
atgcgcaagggggcgcgccgcctctgccccgcggcgagggtgtctatggagaggcggcggccgcggctgctgaggcggaggctgaggcagtggcgatggcgccctttcctgaagaagtggacgtcttcaccgccccacactggcggatgaagcagctggtggggctctactgcgacaagtctttgtatgctactttcaaggagttcaaaatgcatgagcagattgaaaatgaatacattattggtttgcttcaacaacgcagccagaccatttataatgtacattctgacaataaactctccgagatgcttagcctctttgaaaagggactgaagaatgttaagaatgaatatgaacagttaaattatgcaaaacaactgaaagagagattggaggcttttacaagagattttcttcctcacatgaaagaggaagaggaggtttttcagcccatgttaatggaatattttacctatgaagagcttaaggatattaaaaagaaagtgattgcacaacactgctctcagaaggatactgcagaactccttagaggtcttagcctatggaatcatgctgaagagcgacagaagttttttaaatattccgtggatgaaaagtcagataaagaagcagaagtgtcagaacactccacaggtataacccatcttcctcctgaggtaatgctgtcaattttcagctatcttaatcctcaagagttatgtcgatgcagtcaagtaagcatgaaatggtctcagctgacaaaaacgggatcgctttggaaacatctttaccctgttcattgggccagaggtgactggtatagtggtcccgcaactgaacttgatactgaacctgatgatgaatgggtgaaaaataggaaagatgaaagtcgtgcttttcatgagtgggatgaagatgctgacattgatgaatctgaagagtctgcggaggaatcaattgctatcagcattgcacaaatggaaaaacgtttactccatggcttaattcataacgttctaccatatgttggtacttctgtaaaaaccttagtattagcatacagctctgcagtttccagcaaaatggttaggcagattttagagctttgtcctaacctggagcatctggatcttacccagactgacatttcagattctgcatttgacagttggtcttggcttggttgctgccagagtcttcggcatcttgatctgtctggttgtgagaaaatcacagatgtggccctagagaagatttccagagctcttggaattctgacatctcatcaaagtggctttttgaaaacatctacaagcaaaattacttcaactgcgtggaaaaataaagacattaccatgcagtccaccaagcagtatgcctgtttgcacgatttaactaacaagggcattggagaagaaatagataatgaacacccctggactaagcctgtttcttctgagaatttcacttctccttatgtgtggatgttagatgctgaagatttggctgatattgaagatactgtggaatggagacatagaaatgttgaaagtctttgtgtaatggaaacagcatccaactttagttgttccacctctggttgttttagtaaggacattgttggactaaggactagtgtctgttggcagcagcattgtgcttctccagcctttgcgtattgtggtcactcattttgttgtacaggaacagctttaagaactatgtcatcactcccagaatcttctgcaatgtgtagaaaagcagcaaggactagattgcctaggggaaaagacttaatttactttgggagtgaaaaatctgatcaagagactggacgtgtacttctgtttctcagtttatctggatgttatcagatcacagaccatggtctcagggttttgactctgggaggagggctgccttatttggagcaccttaatctctctggttgtcttactataactggtgcaggcctgcaggatttggtttcagcatgtccttctctgaatgatgaatacttttactactgtgacaacattaacggtcctcatgctgataccgccagtggatgccagaatttgcagtgtggttttcgagcctgctgccgctctggcgaatgacccttgacttctgatctttgtctacttcatttagctgagcaggctttctttcatgcactttactcatagcacatttcttgtgttaaccatccctttttgagcgtgacttgttttggccccatttcttacaacttcagaaatcttaatttaccagtgaattgtaatgttgtttctcttgcaaattatacttttggtttagaaagggattaggtcttttcaaaagggtgagaacagtcttacatttttcttttaaatgaaatgctttaaagaatgttggtaatgccatgtcatttaaagtatttcatagataattttgagttttaaagtccatggaggtgattggttctctttacacattaacactgtaccaagctttgcagatcttttccgacacacatgtctgaagacttattttcaaagacagcacatttttggaaactaatctcttttccgtaatatttcctttatttcaatgattctcagaaggccaattcaaacaaacccacatttaaggttctttaggattatagaataaattggcttctgagtgttagctcagtgagctaggaaagcaccaatcgatatttgtttcctttagggatactttgttctcaccactgtccctatgtcatcaaatttgggagagattttttaaaataccacaatcatttgaagaaatgtataaataaaatctactttgaggactttaccaagtaa

SEQ ID NO: 10513 - DNA, 1440 bp, Homo sapiens
  source 1..1440: mol_type = unassigned DNA
ggcaaaggcagctcgagcatctcatctgacgtgagttcaagtacagatcacacgcccactaaagcccagaagaatgtggctaccagcgaagactccgacctgagcatgcgcacactgagcacgcccagcccagccctgatatgtccaccgaatctcccaggatttcagaatggaaggggctcgtccacctcctcgtcctccatcaccggggagacggtggccatggtgcactccccgcccccgacccgcctcacacacccgctcatccggctcgcctccagaccccagaaggagcaggccagcatagaccggctcccggaccactccatggtgcagatcttctccttcctgcccaccaaccagctgtgccgctgcgcgcgagtgtgccgccgctggtacaacctggcctgggacccgcggctctggaggactatccgcctgacgggcgagaccatcaacgtggaccgcgccctcaaggtgctgacccgcagactctgccaggacacccccaacgtgtgtctcatgctggaaaccgtaactgtcagtggctgcaggcggctcacagaccgagggctgtacaccatcgcccagtgctgccccgaactgaggcgactggaagtctcaggctgttacaatatctccaacgaggccgtctttgatgtggtgtccctctgccctaatctggagcacctggatgtgtcaggatgctccaaagtgacctgcatcagcttgacccgggaggcctccattaaactgtcacccttgcatggcaaacagatttccatccgctacctggacatgacggactgcttcgtgctggaggacgaaggcctgcacaccatcgcggcgcactgcacgcagctcacccacctctacctgcgccgctgcgtccgcctgaccgacgaaggcctgcgctacctggtgatctactgcgcctccatcaaggagctgagcgtcagcgactgccgcttcgtcagcgacttcggcctgcgggagatcgccaagctggagtcccgcctgcggtacctgagcatcgcgcactgcggccgggtcaccgacgtgggcatccgctacgtggccaagtactgcagcaagctgcgctacctcaacgcgaggggctgcgagggcatcacggaccacggtgtggagtacctcgccaagaactgcaccaaactcaaatccctggatatcggcaaatgccctttggtatccgacacgggcctggagtgcctggccctgaactgcttcaacctcaagcggctcagcctcaagtcctgcgagagcatcaccggccagggcttgcagatcgtggccgccaactgctttgacctccagacgctgaatgtccaggactgcgaggtctccgtggaggccctgcgctttgtcaaacgccactgcaagcgctgcgtcatcgagcacaccaacccggctttcttctga

SEQ ID NO: 10514 - DNA, 4562 bp, Homo sapiens
  source 1..4562: mol_type = unassigned DNA
tcactcgctccggggacccgcaacaagtggccgccgcgccctccccggggaagccgcgggcgcgcaggggcagccgaaggaggcggtcgagccgcggagcccaggggcctgcccggctcagcgcccaccggaggggatcggggcgggcggatggggacccggcggcggcggcgcggtgagcctctgggcggccccggggcgcgggctgtgcgcggcgctgcgcccgccggcccccagcgcggattgtaagtgctgcagctgtgcccggccccgcctggagccaccgggggtgccaggaggggacgcagcaccccctcccactggagtgcggggacctctccaggccggaggtcggccccggagcttgggggggatgtgcagctaacggtcccgtcgggcgggctttcctcgggccgagcgcgcaggacgtgcgccgcagctatggagtgtcccgggagacggcgggcatgacggctacaggatgggcgcgaacaatggcaaacagtacggcagtgagggcaaaggcagctcgagcatctcatctgacgtgagttcaagtacagatcacacgcccactaaagcccagaagaatgtggctaccagcgaagactccgacctgagcatgcgcacactgagcacgcccagcccagccctgatatgtccaccgaatctcccaggatttcagaatggaaggggctcgtccacctcctcgtcctccatcaccggggagacggtggccatggtgcactccccgcccccgacccgcctcacacacccgctcatccggctcgcctccagaccccagaaggagcaggccagcatagaccggctcccggaccactccatggtgcagatcttctccttcctgcccaccaaccagctgtgccgctgcgcgcgagtgtgccgccgctggtacaacctggcctgggacccgcggctctggaggactatccgcctgacgggcgagaccatcaacgtggaccgcgccctcaaggtgctgacccgcagactctgccaggacacccccaacgtgtgtctcatgctggaaaccgtaactgtcagtggctgcaggcggctcacagaccgagggctgtacaccatcgcccagtgctgccccgaactgaggcgactggaagtctcaggctgttacaatatctccaacgaggccgtctttgatgtggtgtccctctgccctaatctggagcacctggatgtgtcaggatgctccaaagtgacctgcatcagcttgacccgggaggcctccattaaactgtcacccttgcatggcaaacagatttccatccgctacctggacatgacggactgcttcgtgctggaggacgaaggcctgcacaccatcgcggcgcactgcacgcagctcacccacctctacctgcgccgctgcgtccgcctgaccgacgaaggcctgcgctacctggtgatctactgcgcctccatcaaggagctgagcgtcagcgactgccgcttcgtcagcgacttcggcctgcgggagatcgccaagctggagtcccgcctgcggtacctgagcatcgcgcactgcggccgggtcaccgacgtgggcatccgctacgtggccaagtactgcagcaagctgcgctacctcaacgcgaggggctgcgagggcatcacggaccacggtgtggagtacctcgccaagaactgcaccaaactcaaatccctggatatcggcaaatgccctttggtatccgacacgggcctggagtgcctggccctgaactgcttcaacctcaagcggctcagcctcaagtcctgcgagagcatcaccggccagggcttgcagatcgtggccgccaactgctttgacctccagacgctgaatgtccaggactgcgaggtctccgtggaggccctgcgctttgtcaaacgccactgcaagcgctgcgtcatcgagcacaccaacccggctttcttctgaagggacagagttcatccggcgttgtattcacacaaacctgaacaaagcaaatttttttaaaagcagcgtatgtaagcaccgacacccactcaaaacagctctttcttccgggaaggttattaggaatctggcctttatttttcctcatttctcatgggcaacagaggccaaagaaacgaagcaagacaaacagcaaacaggcattttggtcaggtcatttgtaggcagtttctcttctcacaaaagatgtacttaagcaggctgatcgctgttccttgagcaaggcgcttactctcctccgctcaggcccccaaggccgccctttccctcgcacacaggccccacccccacagttccacgccccccccccaaggccacaccctccctccctagagcagcagcgaggatccatcatcagaatcacagtgctctccagacctcctctctaaactgcttcattgacctaagtcactctcttcaatcccacacccatggacattcttgtcaactcaataccatagcactttgcataggcaaaatacttttcaggcctttttaaaaaattcattacagcaaacagctggggaaggacatgcagtcctcccccagctctgtcaatgactatgaccttggccaaagcacttcactgctctgggctgcagcttccagcactgaatcagaggccacacagcccaaagattagcttcatgtccattatagcattgagggagcagagatacccatacacagaagcaccttggcatagagcacccaggcatcgacctcttccaggagaactgattctgtggatggatgtgatttcaggagattgtgcagtgccagcatcagtgcataaagggtcctgtatgtcctttggctgcaaatcacccacttccctgtgtttcagtgggagaatttcctctcccacctcctcacatcctcttttgccaggctggatgctgtcgtctctgtacacaaatactttctgcattcccccctccacaccatcctagcgaggcaccagcacacctaatcacagcaaagcccagatccccccatcagttgcttttactcagtgttttcaaataggagtaaaggcccttgcaatttttaattaacaagcaaggcccaagggaacacatgtcctcaaaagtttttctgatccctcgccttgcacacctggcatgcatcaggcacatctgtcctacagctggcagagacagatgcctcggttctttgtcattcagattgcatttgacctcttctcatctatttatttctttatacatccagacttcatcacatgaagcctattggggttaagtttgtaagtgtttaattgtgcaaattgccaccctgtgtacctcctccatgtctgtctgcgtgttttccaccaaagaatgcaaagcagacttccaggtgtttaaattctgttcactcaacaatgccagatgaatggaagagggaacacactgagatgacttagactctggtccaccaaccagacccttggaaaggaatactaaaatcattacaaggtatggattttaaatggatgaaacttcaaattatcttatttggatagaagtctatattctagcctcatttgcatgaagtcagatagccagaagaaattccattgctggttttcacgaaattcacttgtcttttgctaataaacacatggccctttcccagattattctctagccaagccccacctttgttacgttgaaatccctcatttattttcttctcaaaatgcccattatccaaatgcagaacctctgcatctccaagccagttatgctgaatttgtcaaacttagacacccttgacaactgcactcctactgtaggctcctgtgcatactgtcgtcttctgtgggggatggagaggttagtgtgatgaggtggtgtctgcccaggaggtttctttcaaacatcatggcctcccatccaatcaacatcatcaaattacatgtgtaatcaaggctctgtgccatgggggaaatgaatcatttagctaggccaggatctagtgaaagccacagagtttaaaaccatgaaagaagttgaaggcagcattcctcagctctgtgacttgtgaccctatttgaagtttcaggatttgggtgtcacaaaggattgtccctaatccttggccctggggtcttccgagtgagctggtttaatactctgagaatgagcagggagatccagagaatgaatccctgaccgcatcacctaaactgtcttccaaacatgagacaaagctgactgttcacactgattgcccagcacataccgtcttgccagtttcttcttttctcccagtctcctgttcatccattctgttctcccttggggtgggaatctatgatggaggttactggggaaacagctcagcagatttttggagaccaaaccaaaggtctcactaggaaatttatctgttttaaaacattgcttccttcctggctctgctaaattgaatgctcattgtttgttgttgttgttttttaattctaatgttcaaatcactgcgtgctgtatgaatctagaaagccttaatttactaccaagaaataaagcaatatgttcgt

SEQ ID NO: 10515 - DNA, 3221 bp, Homo sapiens
  source 1..3221: mol_type = unassigned DNA
gagagagataggctttccatccatggcagccatttacttttgctctgggagacgtttgtaatagaaaaggcacaactggggtatttattcattccccccgttcctctagtgtttggtggcgttgccgttgcaagtgcgcagggctaaaatggactggttatcttaggatcatggaaaacctggaatcaaggctcaagaatgccccctattttcgttgtgagaagggaaccgattccatccctctatgccggaagtgtgagacgtgtgtcttagcctggaagatcttctctaccaaagagtggttctgcaggatcaatgacatatcacagaggaggtttctagttggcattctgaagcagttaaatagcttatatttgttacactatttccaaaatatccttcagaccacacagggaaaggatttcatctataacaggtcccggatcaacctcagcaagaaagaggggaaagttgtgaagtcctccttgaaccaaatgttggataaaacagtagaacagaagatgaaagagatcttgtactggtttgcgaacagcacccagtggaccaaggcgaattatactctcttactgctgcagatgtgcaaccccaaattactgctcactgctgccaatgtgatcagagtcctgtttctgagagaggagaacaatatctcagggctcaatcaagacatcacagatgtgtgtttttcccctgagaaagaccacagctccaagtctgcgacctcacaagtctattggacagccaaaactcagcacacatcccttcctttgtccaaagccccagaaaatgaacacttgcttggggcagcatctaaccctgaggaaccatggaggaattcactccggtgtatatccgaaatgaataggctgttttctggaaaaggagacataaccaagccagggtacgatccctgcaatctattggttgacctggatgacatcagagacctgtcttctgggttcagcaaataccgagacttcatccgttacctgcccatccacctctccaagtacattctaagaatgctggatagacacaccctgaacaagtgcgcctctgtgagccagcactgggccgccatggctcaacaggtcaagatggacttgtcagcgcacggcttcattcagaaccagattaccttcttgcaggggtcctacacaagaggaattgatcctaattatgccaataaggtttctatcccagttcctaaaatggtagatgacgggaagagcatgcgtgtgaaacatccgaagtggaagctgagaacgaagaatgagtacaacctgtggactgcataccagaacgaggaaacgcagcaggtcctgatagaggagagaaatgttttctgtgggacctacaatgttcgcattctctctgacacgtgggatcaaaaccgagtcatccactattccgggggagatctgatagctgtgtcatctaatcgaaagatccatcttctggacatcatacaagtgaaagcgatacccgttgaattccgaggccatgctgggagtgtccgggccctcttcctgtgtgaggaggaaaactttctcctaagcgggagctatgacctaagtatcagatactgggatctgaaaagtggggtttgcacacgaatcttcggtggtcaccaggggactatcacttgcatggacttgtgtaagaacaggctcgtatctggaggaagagattgccaggtaaaagtatgggatgtagacacagggaagtgcctgaagacgtttagacacaaagaccccatcttggccaccaggatcaatgatacctacattgtgagcagctgtgagcgagggctggtgaaagtgtggcacattgccatggcccagttggtaaagactctcagtggccatgagggagccgtgaaatgcctgttctttgaccagtggcatctcctctcaggaagtactgatggcctggtcatggcctggagcatggtggggaagtacgagcgctgcctgatggccttcaagcatcccaagatggtggtcaacacagagagcaatgttctcatgttccagtttgagcacataaagtggcagtatgccgtggaaaaaacgaaacaaaagaagaataaggagaaagaggaggaaaaagaagaaaatagtctcatggaaattctctctaagtgtaatattcaggttcacagcccaagagagtctgtatccagtaaacaaactgtgatccaagagctcctaccaggcaaacctcccaagtcccgagtactcctgaagccggccaagttctcttcagcagtgttaatagaggaacttcaaagtcaaggaaagtcaaaatcaccccgaagagatgcagatgatgtggagaaagcacaaaaacaaggacaattggaaactcctggaaaactgcccagtcacccaaagaaaaagtcttggaaaatccctatgtcacctgaccaattcctcctgactgttagcgccctgcagcacgcccataattccggggaatttgcctatccctgtaggccccaaacagaaattactgatgtctggggaccttcaatttcatacccaaggaaggtcttgaatttcaaaggaaaatcaatccaacgtgcagttgatcggttgagattgagcaatcctcctatagatgtgaaacgaaccagtattccccttgaaatccagaaactgcagcccaacttgaagatctctttgcacagtcctagagtccagtccaccataccccagcccatgattatccgctccaggttctctggcagcttaaagggtggagaccaagtgaccagttcaattgaaagggctgtgtgcagtacgggtcccctgaccagtatgcaggtcattaaaccaaaccgcatgctagctccacaagtgggcacagccaccctgtctcttaagaaagaacggcctcgcatctatacagcccttgatccttttagagtgaacactgagttcgtgctgttgaccgtgaaggaggagaaggagcaccaggaagccaagatgaaggaatatcaggccagggagtccactggagtggttgatccaggaaaagtcagcaaagctgcatggatcaggaagatcaaaggcctgcctattgataatttcacgaagcaagggaaaacagcggcccctgaacttggacaaaatgtatttatctaaaccagccttgggaaattacaatgttttacaataaacagaaagccaagcgga

SEQ ID NO: 10516 - DNA, 3456 bp, Homo sapiens
  source 1..3456: mol_type = unassigned DNA
gtttccaaggaggtctgtacaaaaagccagacttctgctggcagttactgagagagataggctttccatccatggcagccatttacttttgctctgggagacgtttgtaatagaaaaggcacaactggggtatttattcattccccccgttcctctagtgtttggtggcgttgccgttgcaagtgcgcagggctaaaatggactggttatcttaggatcatggaaaacctggaatcaaggctcaagaatgccccctattttcgttgtgagaagggaaccgattccatccctctatgccggaagtgtgagacgtgtgtcttagcctggaagatcttctctaccaaagagtggttctgcaggatcaatgacatatcacagaggaggtttctagttggcattctgaagcagttaaatagcttatatttgttacactatttccaaaatatccttcagaccacacagggaaaggatttcatctataacaggtcccggatcaacctcagcaagaaagaggggaaagttgtgaagtcctccttgaaccaaatgttggataaaacagtagaacagaagatgaaagagatcttgtactggtttgcgaacagcacccagtggaccaaggcgaattatactctcttactgctgcagatgtgcaaccccaaattactgctcactgctgccaatgtgatcagagtcctgtttctgagagaggagaacaatatctcagggctcaatcaagacatcacagatgtgtgtttttcccctgagaaagaccacagctccaagtctgcgacctcacaagtctattggacagccaaaactcagcacacatcccttcctttgtccaaagccccagaaaatgaacacttgcttggggcagcatctaaccctgaggaaccatggaggaattcactccggtgtatatccgaaatgaataggctgttttctggaaaaggagacataaccaagccagggtacgatccctgcaatctattggttgacctggatgacatcagagacctgtcttctgggttcagcaaataccgagacttcatccgttacctgcccatccacctctccaagtacattctaagtatgctggggtgtatgaggggatttcccagacacctcccctcttggcccagttctggggtttctgggtccatctttttttttccaggaatgctggatagacacaccctgaacaagtgcgcctctgtgagccagcactgggccgccatggctcaacaggtcaagatggacttgtcagcgcacggcttcattcagaaccagattaccttcttgcaggggtcctacacaagaggaattgatcctaattatgccaataaggtttctatcccagttcctaaaatggtagatgacgggaagagcatgcgtgtgaaacatccgaagtggaagctgagaacgaagaatgagtacaacctgtggactgcataccagaacgaggaaacgcagcaggtcctgatagaggagagaaatgttttctgtgggacctacaatgttcgcattctctctgacacgtgggatcaaaaccgagtcatccactattccgggggagatctgatagctgtgtcatctaatcgaaagatccatcttctggacatcatacaagtgaaagcgatacccgttgaattccgaggccatgctgggagtgtccgggccctcttcctgtgtgaggaggaaaactttctcctaagcgggagctatgacctaagtatcagatactgggatctgaaaagtggggtttgcacacgaatcttcggtggtcaccaggggactatcacttgcatggacttgtgtaagaacaggctcgtatctggaggaagagattgccaggtaaaagtatgggatgtagacacagggaagtgcctgaagacgtttagacacaaagaccccatcttggccaccaggatcaatgatacctacattgtgagcagctgtgagcgagggctggtgaaagtgtggcacattgccatggcccagttggtaaagactctcagtggccatgagggagccgtgaaatgcctgttctttgaccagtggcatctcctctcaggaagtactgatggcctggtcatggcctggagcatggtggggaagtacgagcgctgcctgatggccttcaagcatcccaaggaggtgctcgacgtgtcccttctcttcctccgggtcatcagcgcctgtgcagatggcaagatccgaatttacaatttcctcaacgggaactgtatgaaggtgttaaaagccaatggcagaggtgatcctgtgctgtccttctttattcagggcaacaggatggtggtcaacacagagagcaatgttctcatgttccagtttgagcacataaagtggcagtatgccgtggaaaaaacgaaacaaaagaagaataaggagaaagaggaggaaaaagaagaaaatagtctcatggaaattctctctaagtgtaatattcaggttcacagcccaagagagtctgtatccagtaaacaaactgtgatccaagagctcctaccaggcaaacctcccaagtcccgagtactcctgaagccggccaagttctcttcagatgatgtggagaaagcacaaaaacaaggacaattggaaactcctggaaaactgcccagtcacccaaagaaaaagtcttggaaaatccctatgtcacctgaccaattcctcctgactgttagcgccctgcagcacgcccataattccggggaatttgcctatccctgtaggccccaaacagaaattactgatgtctggggaccttcaatttcatacccaaggaaggtcttgaatttcaaaggaaaatcaatccaacgtgcagttgatcggttgagattgagcaatcctcctatagatgtgaaacgaaccagtattccccttgaaatccagaaactgcagcccaacttgaagatctctttgcacagtcctagagtccagtccaccataccccagcccatgattatccgctccaggttctctggcagcttaaagggtggagaccaagtgaccagttcaattgaaagggctgtgtgcagtacgggtcccctgaccagtatgcaggtcattaaaccaaaccgcatgctagctccacaagtgggcacagccaccctgtctcttaagaaagaacggcctcgcatctatacagcccttgatccttttagagtgaacactgagttcgtgctgttgaccgtgaaggaggagaaggagcaccaggaagccaagatgaaggaatatcaggccagggagtccactggagtggttgatccaggaaaagtcagcaaagctgcatggatcaggaagatcaaaggcctgcctattgataatttcacgaagcaagggaaaacagcggcccctgaacttggacaaaatgtatttatctaaaccagccttgggaaattacaatgttttacaataaacagaaagccaagcgga

SEQ ID NO: 10517 - DNA, 3159 bp, Homo sapiens
  source 1..3159: mol_type = unassigned DNA
atggaaaacctggaatcaaggctcaagaatgccccctattttcgttgtgagaagggaaccgattccatccctctatgccggaagtgtgagacgtgtgtcttagcctggaagatcttctctaccaaagagtggttctgcaggatcaatgacatatcacagaggaggtttctagttggcattctgaagcagttaaatagcttatatttgttacactatttccaaaatatccttcagaccacacagggaaaggatttcatctataacaggtcccggatcaacctcagcaagaaagaggggaaagttgtgaagtcctccttgaaccaaatgttggataaaacagtagaacagaagatgaaagagatcttgtactggtttgcgaacagcacccagtggaccaaggcgaattatactctcttactgctgcagatgtgcaaccccaaattactgctcactgctgccaatgtgatcagagtcctgtttctgagagaggagaacaatatctcagggctcaatcaagacatcacagatgtgtgtttttcccctgagaaagaccacagctccaagtctgcgacctcacaagtctattggacagccaaaactcagcacacatcccttcctttgtccaaagccccagaaaatgaacacttgcttggggcagcatctaaccctgaggaaccatggaggaattcactccggtgtatatccgaaatgaataggctgttttctggaaaaggagacataaccaagccagggtacgatccctgcaatctattggttgacctggatgacatcagagacctgtcttctgggttcagcaaataccgagacttcatccgttacctgcccatccacctctccaagtacattctaagaatgctggatagacacaccctgaacaagtgcgcctctgtgagccagcactgggccgccatggctcaacaggtcaagatggacttgtcagcgcacggcttcattcagaaccagattaccttcttgcaggggtcctacacaagaggaattgatcctaattatgccaataaggtttctatcccagttcctaaaatggtagatgacgggaagagcatgcgtgtgaaacatccgaagtggaagctgagaacgaagaatgagtacaacctgtggactgcataccagaacgaggaaacgcagcaggtcctgatagaggagagaaatgttttctgtgggacctacaatgttcgcattctctctgacacgtgggatcaaaaccgagtcatccactattccgggggagatctgatagctgtgtcatctaatcgaaagatccatcttctggacatcatacaagtgaaagcgatacccgttgaattccgaggccatgctgggagtgtccgggccctcttcctgtgtgaggaggaaaactttctcctaagcgggagctatgacctaagtatcagatactgggatctgaaaagtggggtttgcacacgaatcttcggtggtcaccaggggactatcacttgcatggacttgtgtaagaacaggctcgtatctggaggaagagattgccaggtaaaagtatgggatgtagacacagggaagtgcctgaagacgtttagacacaaagaccccatcttggccaccaggatcaatgatacctacattgtgagcagctgtgagcgagggctggtgaaagtgtggcacattgccatggcccagttggtaaagactctcagtggccatgagggagccgtgaaatgcctgttctttgaccagtggcatctcctctcaggaagtactgatggcctggtcatggcctggagcatggtggggaagtacgagcgctgcctgatggccttcaagcatcccaaggaggtgctcgacgtgtcccttctcttcctccgggtcatcagcgcctgtgcagatggcaagatccgaatttacaatttcctcaacgggaactgtatgaaggtgttaaaagccaatggcagaggtgatcctgtgctgtccttctttattcagggcaacaggatggtggtcaacacagagagcaatgttctcatgttccagtttgagcacataaagtggcagtatgccgtggaaaaaacgaaacaaaagaagaataaggagaaagaggaggaaaaagaagaaaatagtctcatggaaattctctctaagtgtaatattcaggttcacagcccaagagagtctgtatccagtaaacaaactgtgatccaagagctcctaccaggcaaacctcccaagtcccgagtactcctgaagccggccaagttctcttcagcagtgttaatagaggaacttcaaagtcaaggaaagtcaaaatcaccccgaagagatgcagatgatgtggagaaagcacaaaaacaaggacaattggaaactcctggaaaactgcccagtcacccaaagaaaaagtcttggaaaatccctatgtcacctgaccaattcctcctgactgttagcgccctgcagcacgcccataattccggggaatttgcctatccctgtaggccccaaacagaaattactgatgtctggggaccttcaatttcatacccaaggaaggtcttgaatttcaaaggaaaatcaatccaacgtgcagttgatcggttgagattgagcaatcctcctatagatgtgaaacgaaccagtattccccttgaaatccagaaactgcagcccaacttgaagatctctttgcacagtcctagagtccagtccaccataccccagcccatgattatccgctccaggttctctggcagcttaaagggtggagaccaagtgaccagttcaattgaaagggctgtgtgcagtacgggtcccctgaccagtatgcaggtcattaaaccaaaccgcatgctagctccacaagtgggcacagccaccctgtctcttaagaaagaacggcctcgcatctatacagcccttgatccttttagagtgaacactgagttcgtgctgttgaccgtgaaggaggagaaggagcaccaggaagccaagatgaaggaatatcaggccagggagtccactggagtggttgatccaggaaaagtcagcaaagctgcatggatcaggaagatcaaaggcctgcctattgataatttcacgaagcaagggaaaacagcggcccctgaacttggacaaaatgtatttatctaa

SEQ ID NO: 10518 - DNA, 3438 bp, Homo sapiens
  source 1..3438: mol_type = unassigned DNA
acggtaaagccatgtttccaaggaggtctgtacaaaaagccagacttctgctggcagttactgagagagataggctttccatccatggcagccatttacttttgctctgggagacgtttgtaatagaaaaggcacaactggggtatttattcattccccccgttcctctagtgtttggtggcgttgccgttgcaagtgcgcagggctaaaatggactggttatcttaggatcatggaaaacctggaatcaaggctcaagaatgccccctattttcgttgtgagaagggaaccgattccatccctctatgccggaagtgtgagacgtgtgtcttagcctggaagatcttctctaccaaagagtggttctgcaggatcaatgacatatcacagaggaggtttctagttggcattctgaagcagttaaatagcttatatttgttacactatttccaaaatatccttcagaccacacagggaaaggatttcatctataacaggtcccggatcaacctcagcaagaaagaggggaaagttgtgaagtcctccttgaaccaaatgttggataaaacagtagaacagaagatgaaagagatcttgtactggtttgcgaacagcacccagtggaccaaggcgaattatactctcttactgctgcagatgtgcaaccccaaattactgctcactgctgccaatgtgatcagagtcctgtttctgagagaggagaacaatatctcagggctcaatcaagacatcacagatgtgtgtttttcccctgagaaagaccacagctccaagtctgcgacctcacaagtctattggacagccaaaactcagcacacatcccttcctttgtccaaagccccagaaaatgaacacttgcttggggcagcatctaaccctgaggaaccatggaggaattcactccggtgtatatccgaaatgaataggctgttttctggaaaaggagacataaccaagccagggtacgatccctgcaatctattggttgacctggatgacatcagagacctgtcttctgggttcagcaaataccgagacttcatccgttacctgcccatccacctctccaagtacattctaagaatgctggatagacacaccctgaacaagtgcgcctctgtgagccagcactgggccgccatggctcaacaggtcaagatggacttgtcagcgcacggcttcattcagaaccagattaccttcttgcaggggtcctacacaagaggaattgatcctaattatgccaataaggtttctatcccagttcctaaaatggtagatgacgggaagagcatgcgtgtgaaacatccgaagtggaagctgagaacgaagaatgagtacaacctgtggactgcataccagaacgaggaaacgcagcaggtcctgatagaggagagaaatgttttctgtgggacctacaatgttcgcattctctctgacacgtgggatcaaaaccgagtcatccactattccgggggagatctgatagctgtgtcatctaatcgaaagatccatcttctggacatcatacaagtgaaagcgatacccgttgaattccgaggccatgctgggagtgtccgggccctcttcctgtgtgaggaggaaaactttctcctaagcgggagctatgacctaagtatcagatactgggatctgaaaagtggggtttgcacacgaatcttcggtggtcaccaggggactatcacttgcatggacttgtgtaagaacaggctcgtatctggaggaagagattgccaggtaaaagtatgggatgtagacacagggaagtgcctgaagacgtttagacacaaagaccccatcttggccaccaggatcaatgatacctacattgtgagcagctgtgagcgagggctggtgaaagtgtggcacattgccatggcccagttggtaaagactctcagtggccatgagggagccgtgaaatgcctgttctttgaccagtggcatctcctctcaggaagtactgatggcctggtcatggcctggagcatggtggggaagtacgagcgctgcctgatggccttcaagcatcccaaggaggtgctcgacgtgtcccttctcttcctccgggtcatcagcgcctgtgcagatggcaagatccgaatttacaatttcctcaacgggaactgtatgaaggtgttaaaagccaatggcagaggtgatcctgtgctgtccttctttattcagggcaacaggatggtggtcaacacagagagcaatgttctcatgttccagtttgagcacataaagtggcagtatgccgtggaaaaaacgaaacaaaagaagaataaggagaaagaggaggaaaaagaagaaaatagtctcatggaaattctctctaagtgtaatattcaggttcacagcccaagagagtctgtatccagtaaacaaactgtgatccaagagctcctaccaggcaaacctcccaagtcccgagtactcctgaagccggccaagttctcttcagcagtgttaatagaggaacttcaaagtcaaggaaagtcaaaatcaccccgaagagatgatgatgtggagaaagcacaaaaacaaggacaattggaaactcctggaaaactgcccagtcacccaaagaaaaagtcttggaaaatccctatgtcacctgaccaattcctcctgactgttagcgccctgcagcacgcccataattccggggaatttgcctatccctgtaggccccaaacagaaattactgatgtctggggaccttcaatttcatacccaaggaaggtcttgaatttcaaaggaaaatcaatccaacgtgcagttgatcggttgagattgagcaatcctcctatagatgtgaaacgaaccagtattccccttgaaatccagaaactgcagcccaacttgaagatctctttgcacagtcctagagtccagtccaccataccccagcccatgattatccgctccaggttctctggcagcttaaagggtggagaccaagtgaccagttcaattgaaagggctgtgtgcagtacgggtcccctgaccagtatgcaggtcattaaaccaaaccgcatgctagctccacaagtgggcacagccaccctgtctcttaagaaagaacggcctcgcatctatacagcccttgatccttttagagtgaacactgagttcgtgctgttgaccgtgaaggaggagaaggagcaccaggaagccaagatgaaggaatatcaggccagggagtccactggagtggttgatccaggaaaagtcagcaaagctgcatggatcaggaagatcaaaggcctgcctattgataatttcacgaagcaagggaaaacagcggcccctgaacttggacaaaatgtatttatctaaaccagccttgggaaattacaatgttttacaataaacagaaagccaagcgg

SEQ ID NO: 10519 - DNA, 4342 bp, Homo sapiens
  source 1..4342: mol_type = unassigned DNA
ctgccggcggcccgggcgggctggcagctagagtgggtgcgatagccgcctccgcctctgccgcctccgccgtcgcctcctccgcccgggccgttcgctgctgcgcggggagagcgaggcggggccgccggggccgccatggagcccgactcggtgattgaggacaagaccatcgagctcatgtgttctgtgccaaggtctttgtggctaggctgcgccaacctggtagagagcatgtgcgcactgagttgcctgcagagcatgcccagtgtcagatgtctccagataagtaatggaacatcatctgtgatcgtctccagaaagaggccatcagaaggaaactatcaaaaagaaaaagacttgtgtattaaatattttgaccagtggtctgaatcagatcaagtggaatttgtggaacatcttatttcacgaatgtgtcattatcagcatggacatattaactcttacctgaagcccatgttgcagcgggactttattaccgctttaccagagcaaggcttagatcacatagcagaaaacattctttcgtacctggatgccaggtctctgtgtgcagcagagctggtatgtaaagaatggcagcgagtgatctcagaaggaatgctttggaagaagctgattgaacgaatggtacgcactgatcccctatggaaaggactttcagaaagaagagggtgggatcagtacctgtttaaaaacagacccacagatggccctccaaattcattttataggtcattatacccaaagattatccaggatatagagactatagaatctaactggcggtgtggacgacacaacttgcagaggattcagtgccgctctgaaaatagtaaaggtgtctactgtttacagtacgatgatgaaaaaattatcagtggcctacgagataattctattaagatatgggataaaaccagcctggaatgtttgaaagtgttaacaggacacacaggctctgtcctctgtctgcagtatgatgagcgtgtcattgtaactggctcttcagattctacggtgagagtgtgggatgtgaacacgggtgaagttcttaacacattgatccaccacaatgaggctgtattgcacttacgcttcagcaatggactgatggtgacctgttccaaggaccgctccattgctgtgtgggacatggcttctgcgaccgacatcactttacgccgtgtcctggttggccaccgggctgccgtcaatgtagtagactttgacgacaagtacatcgtgtctgcctctggtgacaggaccatcaaagtctggagcacgagcacctgtgaatttgttcgtactctcaatgggcacaagcggggcattgcctgtctccagtacagggatcgcctggttgttagtggatcatcagataataccattaggctctgggatattgaatgtggtgcctgtttaagagtcctagagggacatgaagaattggtccgatgcatccggtttgataacaagaggattgtcagtggggcctatgatgggaaaattaaagtttgggacttgcaagctgctcttgaccctcgagccccagcaagcacattgtgtttgcgcacattggtggaacattctggacgtgtgtttcggctccagtttgatgagtttcagatcatcagcagctcccatgatgacactattttgatttgggatttcttaaatgtgcctcccagtgcccagaatgagacccgttctccctccagaacatacacttacatctctagataacagtctgcactttcacccgtttcagggttttctagtcttgaactactggctacgtggctaccaaatgcctaagggagttcgttcacagctgagttatgaagctggaattggttctagacgctgggtagatgcaaagcagcctaactcttcaagtaccgacatttctcacctctgattccggctctcctttgagaaggagaccttagcttccccggcttcaagtagaacagaagcccgtttccttccctcatcagtgaaaaaatctaatgtttcaaatgtaaattgttcatagaaaaggaacatagaatctgttttacagaagtaaatcgaccgtcaagagaagacttggcctctaatttatattgctttgcactttggtttgatattaagaaacagcattcttcttcagtgaaattttgggtgccaaacacctacccagaatgtccagggctttcattttcaaaagttagcattctccttttgaccgtccaagtcattatgaattctgacttgttgtattaggaacatgttggacagtggaaaattttctctggattgttttagtaatatttttgggattatacttcctttctgtaccaatttcttttaatttaaagaactataagtcagttatattatctaccaacaggtaatatagctctttcttttattaactgttctctgtcccccaaccatctcctgatatttggtagagtaacacctttatacgtgtgcttgcctcctaatttaaaatactgtattcgcatgtagatataatgtacataacagtttaacctcaaagttgctggagtcagggccccctgtgcttgagacactaatacagagtgtgttcgcacttagccatgggctgggctcaagaacctgatacctgggttgatgtggattacctagaacccttcctgcagtattcatacagtgtttttattttgttgttgtcattgcgtgtgtgtggtttgtgtgtgtttttaatgagaatcttgttttaaaatgtaatttctaaggtttaacaccaaaatgttttatttgttgtggagtatatattatacaatagagaggtaccttaaacattttttgttcttattctttttctcataagtactcctgagtacaagtggtcacctcccatagtattcatttggcttcgctgtcaaaaatcattattctgtgcagtcgtggccctgggaaggggaaataagaaggccctgttgacgggctgtcttggctctggaattcatgcatcctggccttgccaaggttctggcagggcctgctggtgtgttggagcctgcagggcaggtcaggctggttcagaggcccatgctgaggggtgggtgctctgaagtggagtgaagcctcaagcccatgaatgccaccccagtcatctctggtgtcagctgctgctgtggccccagcaggttctcaaagctcccaagtcctccctacgacacagcccaaatgtgtaaatggcactgttgccctgacagtgcatggaaaggacgttggcatccaattggcactccttctcccttattcaatattaggtttgatttgcccttcgccattgtttccaaagatcaaggaatgtcaataacattttaaaggaccaataaacagcctcctataaagtaaacctcttcccgtggaagcacactctactactaaagggaaggccctgggctctgatttgtcctttgcattgagaacggtgtggggatcagtgtgtgtgtatgtgatttgtttattgagttggctttgcttttttagtttttcttttaaaaataaaatccttccttcccatgttactaaattaatttatgtttttgagaggttgagtctcaaagtgtaaacaataaacctccattcataaggtggatgttgtaagcttgatggtggttgtgaaagtgatttagctttgaccacttttcatcctacagcttcaatatcaaactggttaggaaagcccagggggaagggagggggcaggggaggaggcaattctgaatgaatgaatggattttttgttgtttttgcatgtttaatatagaagttcccctcgttccttgggagatgatggcctttgaatatgcagacaacctttgaattgtgcctactaaattatagcaggggactttggcacccaaggagttctgactttctgggattataatagtaattcccagccatactctggactttattttgctaaccataactgagcaaatgtaaattactgctatattaatgttttaaagcactgggatagtctaattctaacttgtaattaattatgtttgccaattatctgtttgaaataaatttgtgtctgaacagctattgaaactgttaaattgtacagatattattcatgacagctttgtactgtggaatgtgcttaataaaaaacaaaaaagtttgacttttgtccagtaaattgctaagtaatgtcaataaatcgagtatgggtattatgcagtgcacctaatctggcttcatgcaattgttacttcagctactgattcaaagccaatactcttaataaagtgttgcaatactc

SEQ ID NO: 10520 - DNA, 4539 bp, Homo sapiens
  source 1..4539: mol_type = unassigned DNA
gtagtcgtggcgctctcgaggccctgccatgagcaagctcttaactcttcaggtctgcacgtcctacgcccaccgtccagtgctactctcagctcggagttcagcttcgggctgccaagagccagcaacctggtgtcagaggctcggtcccacaacgctctgcgggccgcggcgcctgctgggaggtgtagtccccgatctgcgtactgcgttcgccgagggggagggcggagctgccggcggcccgggcgggctggcagctagagtgggtgcgatagccgcctccgcctctgccgcctccgccgtcgcctcctccgcccgggccgttcgctgctgcgcggggagagcgaggcggggccgccggggccgccatggagcccgactcggtgattgaggacaagaccatcgagctcatgaacacttcagttatggaagatcaaaatgaagatgagtccccaaagaaaaatactctttggcagataagtaatggaacatcatctgtgatcgtctccagaaagaggccatcagaaggaaactatcaaaaagaaaaagacttgtgtattaaatattttgaccagtggtctgaatcagatcaagtggaatttgtggaacatcttatttcacgaatgtgtcattatcagcatggacatattaactcttacctgaagcccatgttgcagcgggactttattaccgctttaccagagcaaggcttagatcacatagcagaaaacattctttcgtacctggatgccaggtctctgtgtgcagcagagctggtatgtaaagaatggcagcgagtgatctcagaaggaatgctttggaagaagctgattgaacgaatggtacgcactgatcccctatggaaaggactttcagaaagaagagggtgggatcagtacctgtttaaaaacagacccacagatggccctccaaattcattttataggtcattatacccaaagattatccaggatatagagactatagaatctaactggcggtgtggacgacacaacttgcagaggattcagtgccgctctgaaaatagtaaaggtgtctactgtttacagtacgatgatgaaaaaattatcagtggcctacgagataattctattaagatatgggataaaaccagcctggaatgtttgaaagtgttaacaggacacacaggctctgtcctctgtctgcagtatgatgagcgtgtcattgtaactggctcttcagattctacggtgagagtgtgggatgtgaacacgggtgaagttcttaacacattgatccaccacaatgaggctgtattgcacttacgcttcagcaatggactgatggtgacctgttccaaggaccgctccattgctgtgtgggacatggcttctgcgaccgacatcactttacgccgtgtcctggttggccaccgggctgccgtcaatgtagtagactttgacgacaagtacatcgtgtctgcctctggtgacaggaccatcaaagtctggagcacgagcacctgtgaatttgttcgtactctcaatgggcacaagcggggcattgcctgtctccagtacagggatcgcctggttgttagtggatcatcagataataccattaggctctgggatattgaatgtggtgcctgtttaagagtcctagagggacatgaagaattggtccgatgcatccggtttgataacaagaggattgtcagtggggcctatgatgggaaaattaaagtttgggacttgcaagctgctcttgaccctcgagccccagcaagcacattgtgtttgcgcacattggtggaacattctggacgtgtgtttcggctccagtttgatgagtttcagatcatcagcagctcccatgatgacactattttgatttgggatttcttaaatgtgcctcccagtgcccagaatgagacccgttctccctccagaacatacacttacatctctagataacagtctgcactttcacccgtttcagggttttctagtcttgaactactggctacgtggctaccaaatgcctaagggagttcgttcacagctgagttatgaagctggaattggttctagacgctgggtagatgcaaagcagcctaactcttcaagtaccgacatttctcacctctgattccggctctcctttgagaaggagaccttagcttccccggcttcaagtagaacagaagcccgtttccttccctcatcagtgaaaaaatctaatgtttcaaatgtaaattgttcatagaaaaggaacatagaatctgttttacagaagtaaatcgaccgtcaagagaagacttggcctctaatttatattgctttgcactttggtttgatattaagaaacagcattcttcttcagtgaaattttgggtgccaaacacctacccagaatgtccagggctttcattttcaaaagttagcattctccttttgaccgtccaagtcattatgaattctgacttgttgtattaggaacatgttggacagtggaaaattttctctggattgttttagtaatatttttgggattatacttcctttctgtaccaatttcttttaatttaaagaactataagtcagttatattatctaccaacaggtaatatagctctttcttttattaactgttctctgtcccccaaccatctcctgatatttggtagagtaacacctttatacgtgtgcttgcctcctaatttaaaatactgtattcgcatgtagatataatgtacataacagtttaacctcaaagttgctggagtcagggccccctgtgcttgagacactaatacagagtgtgttcgcacttagccatgggctgggctcaagaacctgatacctgggttgatgtggattacctagaacccttcctgcagtattcatacagtgtttttattttgttgttgtcattgcgtgtgtgtggtttgtgtgtgtttttaatgagaatcttgttttaaaatgtaatttctaaggtttaacaccaaaatgttttatttgttgtggagtatatattatacaatagagaggtaccttaaacattttttgttcttattctttttctcataagtactcctgagtacaagtggtcacctcccatagtattcatttggcttcgctgtcaaaaatcattattctgtgcagtcgtggccctgggaaggggaaataagaaggccctgttgacgggctgtcttggctctggaattcatgcatcctggccttgccaaggttctggcagggcctgctggtgtgttggagcctgcagggcaggtcaggctggttcagaggcccatgctgaggggtgggtgctctgaagtggagtgaagcctcaagcccatgaatgccaccccagtcatctctggtgtcagctgctgctgtggccccagcaggttctcaaagctcccaagtcctccctacgacacagcccaaatgtgtaaatggcactgttgccctgacagtgcatggaaaggacgttggcatccaattggcactccttctcccttattcaatattaggtttgatttgcccttcgccattgtttccaaagatcaaggaatgtcaataacattttaaaggaccaataaacagcctcctataaagtaaacctcttcccgtggaagcacactctactactaaagggaaggccctgggctctgatttgtcctttgcattgagaacggtgtggggatcagtgtgtgtgtatgtgatttgtttattgagttggctttgcttttttagtttttcttttaaaaataaaatccttccttcccatgttactaaattaatttatgtttttgagaggttgagtctcaaagtgtaaacaataaacctccattcataaggtggatgttgtaagcttgatggtggttgtgaaagtgatttagctttgaccacttttcatcctacagcttcaatatcaaactggttaggaaagcccagggggaagggagggggcaggggaggaggcaattctgaatgaatgaatggattttttgttgtttttgcatgtttaatatagaagttcccctcgttccttgggagatgatggcctttgaatatgcagacaacctttgaattgtgcctactaaattatagcaggggactttggcacccaaggagttctgactttctgggattataatagtaattcccagccatactctggactttattttgctaaccataactgagcaaatgtaaattactgctatattaatgttttaaagcactgggatagtctaattctaacttgtaattaattatgtttgccaattatctgtttgaaataaatttgtgtctgaacagctattgaaactgttaaattgtacagatattattcatgacagctttgtactgtggaatgtgcttaataaaaaacaaaaaagtttgacttttgtccagtaaattgctaagtaatgtcaataaatcgagtatgggtattatgcagtgcacctaatctggcttcatgcaattgttacttcagctactgattcaaagccaatactcttaataaagtgttgcaatactctga

SEQ ID NO: 10521 - DNA, 2181 bp, Homo sapiens
  source 1..2181: mol_type = unassigned DNA
gagggcggagctgccggcggcccgggcgggctggcagctagagtgggtgcgatagccgcctccgcctctgccgcctccgccgtcgcctcctccgcccgggccgttcgctgctgcgcggggagagcgaggcggggccgccggggccgccatggagcccgactcggtgattgaggacaagaccatcgagctcatgataagtaatggaacatcatctgtgatcgtctccagaaagaggccatcagaaggaaactatcaaaaagaaaaagacttgtgtattaaatattttgaccagtggtctgaatcagatcaagtggaatttgtggaacatcttatttcacgaatgtgtcattatcagcatggacatattaactcttacctgaagcccatgttgcagcgggactttattaccgctttaccagagcaaggcttagatcacatagcagaaaacattctttcgtacctggatgccaggtctctgtgtgcagcagagctggtatgtaaagaatggcagcgagtgatctcagaaggaatgctttggaagaagctgattgaacgaatggtacgcactgatcccctatggaaaggactttcagaaagaagagggtgggatcagtacctgtttaaaaacagacccacagatggccctccaaattcattttataggtcattatacccaaagattatccaggatatagagactatagaatctaactggcggtgtggacgacacaacttgcagaggattcagtgccgctctgaaaatagtaaaggtgtctactgtttacagtacgatgatgaaaaaattatcagtggcctacgagataattctattaagatatgggataaaaccagcctggaatgtttgaaagtgttaacaggacacacaggctctgtcctctgtctgcagtatgatgagcgtgtcattgtaactggctcttcagattctacggtgagagtgtgggatgtgaacacgggtgaagttcttaacacattgatccaccacaatgaggctgtattgcacttacgcttcagcaatggactgatggtgacctgttccaaggaccgctccattgctgtgtgggacatggcttctgcgaccgacatcactttacgccgtgtcctggttggccaccgggctgccgtcaatgtagtagactttgacgacaagtacatcgtgtctgcctctggtgacaggaccatcaaagtctggagcacgagcacctgtgaatttgttcgtactctcaatgggcacaagcggggcattgcctgtctccagtacagggatcgcctggttgttagtggatcatcagataataccattaggctctgggatattgaatgtggtgcctgtttaagagtcctagagggacatgaagaattggtccgatgcatccggtttgataacaagaggattgtcagtggggcctatgatgggaaaattaaagtttgggacttgcaagctgctcttgaccctcgagccccagcaagcacattgtgtttgcgcacattggtggaacattctggacgtgtgtttcggctccagtttgatgagtttcagatcatcagcagctcccatgatgacactattttgatttgggatttcttaaatgtgcctcccagtgcccagaatgagacccgttctccctccagaacatacacttacatctctagataacagtctgcactttcacccgtttcagggttttctagtcttgaactactggctacgtggctaccaaatgcctaagggagttcgttcacagctgagttatgaagctggaattggttctagacgctgggtagatgcaaagcagcctaactcttcaagtaccgacatttctcacctctgattccggctctcctttgagaaggagaccttagcttccccggcttcaagtagaacagaagcccgtttccttccctcatcagtgaaaaaatctaatgtttcaaatgtaaattgttcatagaaaaggaacatagaatctgttttacagaagtaaatcgaccgtcaagagaagacttggcctctaatttatattgctttgcactttggtttgatattaagaaacagcattcttcttcagtgaaattttgggtgccaaacacctacccagaatgtccagggctttcattttcaaaagttagcattctccttttgaccgtccaagtcattatgaattc

SEQ ID NO: 10522 - DNA, 1843 bp, Homo sapiens
  source 1..1843: mol_type = unassigned DNA
ggaagatgcttgactgctgtcttttctcagactagtctgaaagggaaaacccccattcattctggattggtggatctgaagtacaaaatattttccagaacacttcagttatggaagatcaaaatgaagatgagtccccaaagaaaaatactctttggcagataagtaatggaacatcatctgtgatcgtctccagaaagaggccatcagaaggaaactatcaaaaagaaaaagacttgtgtattaaatattttgaccagtggtctgaatcagatcaagtggaatttgtggaacatcttatttcacgaatgtgtcattatcagcatggacatattaactcttacctgaagcccatgttgcagcgggactttattaccgctttaccagagcaaggcttagatcacatagcagaaaacattctttcgtacctggatgccaggtctctgtgtgcagcagagctggtatgtaaagaatggcagcgagtgatctcagaaggaatgctttggaagaagctgattgaacgaatggtacgcactgatcccctatggaaaggactttcagaaagaagagggtgggatcagtacctgtttaaaaacagacccacagatggccctccaaattcattttataggtcattatacccaaagattatccaggatatagagactatagaatctaactggcggtgtggacgacacaacttgcagaggattcagtgccgctctgaaaatagtaaaggtgtctactgtttacagtacgatgatgaaaaaattatcagtggcctacgagataattctattaagatatgggataaaaccagcctggaatgtttgaaagtgttaacaggacacacaggctctgtcctctgtctgcagtatgatgagcgtgtcattgtaactggctcttcagattctacggtgagagtgtgggatgtgaacacgggtgaagttcttaacacattgatccaccacaatgaggctgtattgcacttacgcttcagcaatggactgatggtgacctgttccaaggaccgctccattgctgtgtgggacatggcttctgcgaccgacatcactttacgccgtgtcctggttggccaccgggctgccgtcaatgtagtagactttgacgacaagtacatcgtgtctgcctctggtgacaggaccatcaaagtctggagcacgagcacctgtgaatttgttcgtactctcaatgggcacaagcggggcattgcctgtctccagtacagggatcgcctggttgttagtggatcatcagataataccattaggctctgggatattgaatgtggtgcctgtttaagagtcctagagggacatgaagaattggtccgatgcatccggtttgataacaagaggattgtcagtggggcctatgatgggaaaattaaagtttgggacttgcaagctgctcttgaccctcgagccccagcaagcacattgtgtttgcgcacattggtggaacattctggacgtgtgtttcggctccagtttgatgagtttcagatcatcagcagctcccatgatgacactattttgatttgggatttcttaaatgtgcctcccagtgcccagaatgagacccgttctccctccagaacatacacttacatctctagataacagtctgcactttcacccgtttcagggttttctagtcttgaactactggctacgtggctaccaaatgcctaagggagttcgttcacagctgagttatgaagctggaattggttctagacgctgggtagatgcaaagcagcctaactcttcaagtaccgacatttctcacctctgattccggctctcctttgagaaggaga

SEQ ID NO: 10523 - DNA, 1647 bp, Homo sapiens
  source 1..1647: mol_type = unassigned DNA
ttctttctcctccactgcaaagttaaatgcgagaaggtagaaacccagaggccatgctggcgctgagagatgagccccactcaccagattcaagatcccaagtgctgcagactttggcaaagcctataaattcagagcagcccggagaggagaaaggaaagtggatgtgggttcaggccgcatgaaatggagatccgattgcctgacttagctttgaagcgaatcttctctttcctggacctgttcggcttgctgcaggtttcccaggtgaacaagcattggaataggattgcagacagtgattacctgtggaggtcactatctctgcagagatgggactgcagcaacttcaccaatcaacacctgggcacacacacatggaagcaatttttcctgcatcaaagaaggaaggagcttcggttggcattggcacagccgcataactttatctacaaagtaactaagaacatcgcatttgagacggagttggcttatctctcaggaaatagacttacagtggatgaacaggagaaatcaatcatttgtagtgtatctccaaagcaagagctttgtgcctgggatgtgcaagagggtaccatgatctggtcaagcccagtccaggagttccatttctcaaatctggtaaccctccctcagatgcatctcgccatcactatggatcggaaaaaaactatcaaagtgtggaactgtcaggacagggacgctctggctgttctccccatgccacagccctgttattgcatggaagcctatcttacaaaggatggcccattcctgatggttggcgatgctgcaggtgacatctacacatttacactgcctgggttaagagatgtttctaaagttactgcatttcaatatggtattgtacttctacactgctctcctgacaagaaatgggtatttgcatgtgggacatacagtcgtaccttgccacaggtattcctcacagagtccttactgagaccatcagaaggcagtgttcctctgtctacctttctcccacataaattatgtgccagcgcctgctggaccccaaaggtgaaaaacaggataacactgatgtcccaaagtagcactggaaaaaagacagaatttatcacctttgatctaacaaccaagaagactggaggccaaacagtcatccaagcatatgagatcgcaagtttccaggtggcagctcatctgaagtgccctatctggatgggagccagtgatggatatatgattgtctttaccagtggaccatacttgttactcttcagcatcactggcttcctgctgcaacgatttgaggaccatcaggcagccatcaacaacttctgggtggatccttgctatgtgctcaccacatccgagaactctgtgcacgtgtacatgtgggaagaaggaggccgccatccatacctcaggagctgctgtcacctggaaaacacgtggcatgatcacacaacagacagctgcatctccagtgtgatgtgtgataatgcaagcatagtacttagggtgaggaaagtaagtgactccagcattctggtgatgtattctttgaatacgtaatatggaaactaacaaaattgaccttgcatcatcttctgcaatgtagtaaagaaattctatttgcaa

SEQ ID NO: 10524 - DNA, 1211 bp, Homo sapiens
  source 1..1211: mol_type = unassigned DNA
ttctttctcctccactgcaaagttaaatgcgagaaggtagaaacccagaggccatgctggcgctgagagatgagccccactcaccagattcaagatcccaagcatttgagacggagttggcttatctctcaggaaatagacttacagtggatgaacaggagaaatcaatcatttgtagtgtatctccaaagcaagagctttgtgcctgggatgtgcaagagatgcatctcgccatcactatggatcggaaaaaaactatcaaagtgtggaactgtcaggacagggacgctctggctgttctccccatgccacagccctgttattgcatggaagcctatcttacaaaggatggcccattcctgatggttggcgatgctgcaggtgacatctacacatttacactgcctgggttaagagatgtttctaaagttactgcatttcaatatggtattgtacttctacactgctctcctgacaagaaatgggtatttgcatgtgggacatacagtcgtaccttgccacaggtattcctcacagagtccttactgagaccatcagaaggcagtgttcctctgtctacctttctcccacataaattatgtgccagcgcctgctggaccccaaaggtgaaaaacaggataacactgatgtcccaaagtagcactggaaaaaagacagaatttatcacctttgatctaacaaccaagaagactggaggccaaacagtcatccaagcatatgagatcgcaagtttccaggtggcagctcatctgaagtgccctatctggatgggagccagtgatggatatatgattgtctttaccagtggaccatacttgttactcttcagcatcactggcttcctgctgcaacgatttgaggaccatcaggcagccatcaacaacttctgggtggatccttgctatgtgctcaccacatccgagaactctgtgcacgtgtacatgtgggaagaaggaggccgccatccatacctcaggagctgctgtcacctggaaaacacgtggcatgatcacacaacagacagctgcatctccagtgtgatgtgtgataatgcaagcatagtacttagggtgaggaaagtaagtgactccagcattctggtgatgtattctttgaatacgtaatatggaaactaacaaaattgaccttgcatcatcttctgcaatgtagtaaagaaattctatttgcaa

SEQ ID NO: 10525 - DNA, 1370 bp, Homo sapiens
  source 1..1370: mol_type = unassigned DNA
ctggcgctgagagatgagccccactcaccagattcaagatcccaagatgggcatgggtgaaaatctttacaagtgctgcagactttggcaaagcctataaattcagagcagcccggagaggagaaaggaaagtggatgtgggttcaggccgcatgaaatggagatccgattgcctgacttagctttgaagcgaatcttctctttcctggacctgttcggcttgctgcaggtttcccaggtgaacaagcattggaataggattgcagacagtgattacctgtggaggtcactatctctgcagagatgggactgcagcaacttcaccaatcaacacctgggcacacacacatggaagcaatttttcctgcatcaaagaaggaaggagcttcggttggcattggcacagccgcataactttatctacaaagtaactaagaacatcgcatttgagacggagttggcttatctctcaggaaatagacttacagtggatgaacaggagaaatcaatcatttgtagtgtatctccaaagcaagagctttgtgcctgggatgtgcaagaggttggcgatgctgcaggtgacatctacacatttacactgcctgggttaagagatgtttctaaagttactgcatttcaatatggtattgtacttctacactgctctcctgacaagaaatgggtatttgcatgtgggacatacagtcgtaccttgccacaggtattcctcacagagtccttactgagaccatcagaaggcagtgttcctctgtctacctttctcccacataaattatgtgccagcgcctgctggaccccaaaggtgaaaaacaggataacactgatgtcccaaagtagcactggaaaaaagacagaatttatcacctttgatctaacaaccaagaagactggaggccaaacagtcatccaagcatatgagatcgcaagtttccaggtggcagctcatctgaagtgccctatctggatgggagccagtgatggatatatgattgtctttaccagtggaccatacttgttactcttcagcatcactggcttcctgctgcaacgatttgaggaccatcaggcagccatcaacaacttctgggtggatccttgctatgtgctcaccacatccgagaactctgtgcacgtgtacatgtgggaagaaggaggccgccatccatacctcaggagctgctgtcacctggaaaacacgtggcatgatcacacaacagacagctgcatctccagtgtgatgtgtgataatgcaagcatagtacttagggtgaggaaagtaagtgactccagcattctggtgatgtattctttgaatacgtaatatggaaactaacaaaattgaccttgca

SEQ ID NO: 10526 - DNA, 1379 bp, Homo sapiens
  source 1..1379: mol_type = unassigned DNA
ctggcgctgagagatgagccccactcaccagattcaagatcccaagcattggaataggattgcagacagtgattacctgtggaggtcactatctctgcagagatgggactgcagcaacttcaccaatcaacacctgggcacacacacatggaagcaatttttcctgcatcaaagaaggaaggagcttcggttggcattggcacagccgcataactttatctacaaagtaactaagaacatcgcatttgagacggagttggcttatctctcaggaaatagacttacagtggatgaacaggagaaatcaatcatttgtagtgtatctccaaagcaagagctttgtgcctgggatgtgcaagagggtaccatgatctggtcaagcccagtccaggagttccatttctcaaatctggtaaccctccctcagatgcatctcgccatcactatggatcggaaaaaaactatcaaagtgtggaactgtcaggacagggacgctctggctgttctccccatgccacagccctgttattgcatggaagcctatcttacaaaggatggcccattcctgatggttggcgatgctgcaggtgacatctacacatttacactgcctgggttaagagatgtttctaaagttactgcatttcaatatggtattgtacttctacactgctctcctgacaagaaatgggtatttgcatgtgggacatacagtcgtaccttgccacaggtattcctcacagagtccttactgagaccatcagaaggcagtgttcctctgtctacctttctcccacataaattatgtgccagcgcctgctggaccccaaaggtgaaaaacaggataacactgatgtcccaaagtagcactggaaaaaagacagaatttatcacctttgatctaacaaccaagaagactggaggccaaacagtcatccaagcatatgagatcgcaagtttccaggtggcagctcatctgaagtgccctatctggatgggagccagtgatggatatatgattgtctttaccagtggaccatacttgttactcttcagcatcactggcttcctgctgcaacgatttgaggaccatcaggcagccatcaacaacttctgggtggatccttgctatgtgctcaccacatccgagaactctgtgcacgtgtacatgtgggaagaaggaggccgccatccatacctcaggagctgctgtcacctggaaaacacgtggcatgatcacacaacagacagctgcatctccagtgtgatgtgtgataatgcaagcatagtacttagggtgaggaaagtaagtgactccagcattctggtgatgtattctttgaatacgtaatatggaaactaacaaaattgaccttgca

SEQ ID NO: 10527 - DNA, 2483 bp, Homo sapiens
  source 1..2483: mol_type = unassigned DNA
aagtggctccaaggctgcaggtgtgaggggcgtgcccagggctcggcccgcgccgccccatgtgacccggtccgacatggtgtcgcctcctcccggggcggcggcggtggcggctcgggctgggctccgcgtcgggccggccccgcggccgctcatgggcagccagggccgctcggggccccccgggaacggcgggcccggcgagggcgagggcggagaggcgaggaagctgcaggaagggagggtggcgagggggaagcgaaggaaggggaaggggaagggaaaagcgagagcggggcaaggcggaagaggaagcggggcggaagggaagcccgggccgcagacggcgaaggaggcagccgggccgggggctgacgcgggagcgagggcatgcccaagggaggaagcagagggaggcagaagcgtggaggaaggggcgagaggcatcgtcaagggagtcgaggggagcgcaggggccgggaaggaggcacaaggaagagagtatgggaagaaggaggaatggagggtcagggctaggcggcgggagggcgccaggccgggaagagcacagggacgagggggtcaggcttgggccgacatcgcggggacaggggtggccatggcggcggcggccggggaggaggaggaggaggaggaggcggctcgggagtcggctgcccgcccggccgcggggcctgcgctctggcgcctgccggaggagctgctgctgctcatctgctcctacctggacatgcgggccctcggccgcctggcccaggtgtgccgctggctgcggcgcttcaccagctgcgatctgctctggcgccggatagcccgggcctcgctcaactccggcttcacgcggctcggcaccgacctgatgaccagtgtcccagtgaaggaacgagtgaaggtgtctcagaactggagactggggcgctgccgagaggggattctgctgaagtggagatgcaggcaaatgccctggatgcagctagaggatgattctctgtacatatcccaggctaatttcatcctggcctaccagttccgtccagatggtgccagcttgaatcgtcggcctctgggagtctttgctgggcatgatgaggacgtttgccactttgtgctggccaactcgcatattgttagtgcaggaggggatgggaagattggcattcataagattcacagcaccttcactgtcaagtactcggctcatgaacaggaggtgaactgtgtggattgcaaagggggcatcattgtgagtggctccagggacaggacggccaaggtgtggcctttggcctcaggccggctggggcagtgcttacacaccatccagactgaagaccgagtctggtccattgctatcagcccattactcagctcttttgtgacagggacggcttgttgcgggcacttctcacccctgagaatctgggacctcaacagtgggcagctgatgacacacttgggcagtgactttcccccaggggctggggtgctggatgtcatgtatgagtcccctttcacactgctgtcctgtggctatgacacctatgttcgctactgggacctccgcaccagcgtccggaaatgtgtcatggagtgggaggagccccacgacagcaccctgtactgcctgcagacagatggcaaccacctgctggccacaggttcctcctactacggtgttgtacggctgtgggaccggcgtcaaagggcctgcctgcacgccttcccgctgacgtcgactcccctcagcagccctgtgtactgcctgcgtctcaccaccaagcatctctatgctgccctgtcttacaacctccacgtcctggattttcaaaacccatgaccgtcagggccacccctgcctctgggccagggaaaccagctactcagggacttctcttgcctggagggtgcagtgatagctcctcctcactgccccactgtgctcctgggcctgtgaccccagtgctcaggcaccttgcactagaggcttctgactcctgggactttggagcttaccagagatgcagtccctcccaggaacctgttggagaggcaggacctgctgctttagagtgcggctgaacccgggccttgcgtccctgtttggccagagcaaggatctggcctggagaggcccatcctataccccttattagagccatgacagcctacagagtgaggtgaggtgctcccaccttcccagatggttcctttctgccccttcctggaaggaaaggtgaggctgccaatagcctcctggcaccagccagacctcacccttgaccaacctctcggggctgggggttcattcctggggcactgtggcctggttttgctttgaaaccaagaaagagcaaagggaacccagcagttctgagtgagttctgagccagccctacctcaggctggctgttgagacatgctacaattttcatttttgtaaaaataaagcttgattgttcaca

SEQ ID NO: 10528 - DNA, 2209 bp, Homo sapiens
  source 1..2209: mol_type = unassigned DNA
ggggaagggaaaagcgagagcggggcaaggcggaagaggaagcggggcggaagggaagcccgggccgcagacggcgaaggaggcagccgggccgggggctgacgcgggagcgagggcatgcccaagggaggaagcagagggaggcagaagcgtggaggaaggggcgagaggcatcgtcaagggagtcgaggggagcgcaggggccgggaaggaggcacaaggaagagagtatgggaagaaggaggaatggagggtcagggctaggcggcgggagggcgccaggccgggaagagcacagggacgagggggtcaggcttgggccgacatcgcggggacaggggtggccatggcggcggcggccggggaggaggaggaggaggaggaggcggctcgggagtcggctgcccgcccggccgcggggcctgcgctctggcgcctgccggaggagctgctgctgctcatctgctcctacctggacatgcgggccctcggccgcctggcccaggtgtgccgctggctgcggcgcttcaccagctgcgatctgctctggcgccggatagcccgggcctcgctcaactccggcttcacgcggctcggcaccgacctgatgaccagtgtcccagtgaaggaacgagtgaaggtgtctcagaactggagactggggcgctgccgagaggggattctgctgaagtggagatgcagtcagatgccctggatgcagctagaggatgattctctgtacatatcccaggctaatttcatcctggcctaccagttccgtccagatggtgccagcttgaatcgtcggcctctgggagtctttgctgggcatgatgaggacgtttgccactttgtgctggccaactcgcatattgttagtgcaggaggggatgggaagattggcattcataagattcacagcaccttcactgtcaagtactcggctcatgaacaggaggtgaactgtgtggattgcaaagggggcatcattgtgagtggctccagggacaggacggccaaggtgtggcctttggcctcaggccggctggggcagtgcttacacaccatccagactgaagaccgagtctggtccattgctatcagcccattactcagctcttttgtgacagggacggcttgttgcgggcacttctcacccctgagaatctgggacctcaacagtgggcagctgatgacacacttgggcagtgactttcccccaggggctggggtgctggatgtcatgtatgagtcccctttcacactgctgtcctgtggctatgacacctatgttcgctactgggacctccgcaccagcgtccggaaatgtgtcatggagtgggaggagccccacgacagcaccctgtactgcctgcagacagatggcaaccacctgctggccacaggttcctcctactacggtgttgtacggctgtgggaccggcgtcaaagggcctgcctgcacgccttcccgctgacgtcgactcccctcagcagccctgtgtactgcctgcgtctcaccaccaagcatctctatgctgccctgtcttacaacctccacgtcctggattttcaaaacccatgaccgtcagggccacccctgcctctgggccagggaaaccagctactcagggacttctcttgcctggagggtgcagtgatagctcctcctcactgccccactgtgctcctgggcctgtgaccccagtgctcaggcaccttgcactagaggcttctgactcctgggactttggagcttaccagagatgcagtccctcccaggaacctgttggagaggcaggacctgctgctttagagtgcggctgaacccgggccttgcgtccctgtttggccagagcaaggatctggcctggagaggcccatcctataccccttattagagccatgacagcctacagagtgaggtgaggtgctcccaccttcccagatggttcctttctgccccttcctggaaggaaaggtgaggctgccaatagcctcctggcaccagccagacctcacccttgaccaacctctcggggctgggggttcattcctggggcactgtggcctggttttgctttgaaaccaagaaagagcaaagggaacccagcagttctgagtgagttctgagccagccctacctcaggctggctgttgagacatgctacaattttcatttttgtaaaaataaagcttgattgttcac

SEQ ID NO: 10529 - DNA, 756 bp, Homo sapiens
  source 1..756: mol_type = unassigned DNA
gggcgccaggccgggaagagcacagggacgagggggtcaggcttgggccgacatcgcggggcctgcgctctggcgcctgccggaggagctgctgctgctcatctgctcctacctggacatgcgggccctcggccgcctggcccaggtgtgccgctggctgcggcgcttcaccagctgcgatctgctctggcgccggatagcccgggcctcgctcaactccggcttcacgcggctcggcaccgacctgatgaccagtgtcccagtgaaggaacgagtgaaggtgtctcagaactggagactggggcgctgccgagaggggattctgctgaagtggagatgcaggcaaatgccctggatgcagctagaggatgattctctgtacatatcccaggctaatttcatcctggcctaccagttccgtccagatggtgccagcttgaatcgtcggcctctgggagtctttgctgggcatgatgaggacgtttgccactttgtgctggccaactcgcatattgttagtgcaggaggggatgggaagattggcattcataagattcacagcaccttcactgtcaagtactcggctcatgaacaggaggtgaactgtgtggattgcaaagggggcatcattgtgagtggctccagggacaggacggccaaggtgtggcctttggcctcaggccggctggggcagtgcttacacaccatccagactgaagaccgagtctggtccattgctatcagcccattactcag

SEQ ID NO: 10530 - DNA, 688 bp, Homo sapiens
  source 1..688: mol_type = unassigned DNA
ctcacgtgtttgcagcgcgaactcctgtgcttccaccaagcgctctcggggatgcgggggtggtgtcagcgccccggccccagcccgcaccccgaagtggctccaaggctgcaggatgaccagtgtcccagtgaaggaacgagtgaaggtgtctcagaactggagactggggcgctgccgagaggggattctgctgaagtggagatgcaggcaaatgccctggatgcagctagaggatgattctctgtacatatcccaggctaatttcatcctggcctaccagttccgtccagatggtgccagcttgaatcgtcggcctctgggagtctttgctgggcatgatgaggacgtttgccactttgtgctggccaactcgcatattgttagtgcaggaggggatgggaagattggcattcataagattcacagcaccttcactgtcaagtactcggctcatgaacaggaggtgaactgtgtggattgcaaagggggcatcattgtgagtggctccagggacaggacggccaaggtgtggcctttggcctcaggccggctggggcagtgcttacacaccatccagactgaagaccgagtctggtccattgctatcagcccattactcagctcttttgtgacagggacggcttgttgcgggcacttctcacccctgagaatctgggacctcaac

SEQ ID NO: 10531 - DNA, 3734 bp, Homo sapiens
  source 1..3734: mol_type = unassigned DNA
cttacgggttccctggagcggatcaccatataattgatgtgcagtctgcattgctgaatcctggactgcaccattctgtgttcaagggaagatgtaatctgatccctctgctgctgagggaggaatctgttcagtcaaggctttgacagggcatagtctcctccaataatcttctccgttctctctcattattccctcgagttcttctcagtcaagctgcatgtatgtatgtgtgtcccgagaagcggtttgatactgagctgcatttgcctttactgtggagttttgttgccggttctgctccctaatcttccttttctgacgtgcctgagcatgtccacattagaatctgtgacatacctacctgaaaaaggtttatattgtcagagactgccaagcagccggacacacgggggcacagaatcactgaaggggaaaaatacagaaaatatgggtttctacggcacattaaaaatgattttttacaaaatgaaaagaaagttggaccatggttctgaggtccgctctttttctttgggaaagaaaccatgcaaagtctcagaatatacaagtaccactgggcttgtaccatgttcagcaacaccaacaacttttggggacctcagagcagccaatggccaagggcaacaacgacgccgaattacatctgtccagccacctacaggcctccaggaatggctaaaaatgtttcagagctggagtggaccagagaaattgcttgctttagatgaactcattgatagttgtgaaccaacacaagtaaaacatatgatgcaagtgatagaaccccagtttcaacgagacttcatttcattgctccctaaagagttggcactctatgtgctttcattcctggaacccaaagacctgctacaagcagctcagacatgtcgctactggagaattttggctgaagacaaccttctctggagagagaaatgcaaagaagaggggattgatgaaccattgcacatcaagagaagaaaagtaataaaaccaggtttcatacacagtccatggaaaagtgcatacatcagacagcacagaattgatactaactggaggcgaggagaactcaaatctcctaaggtgctgaaaggacatgatgatcatgtgatcacatgcttacagttttgtggtaaccgaatagttagtggttctgatgacaacactttaaaagtttggtcagcagtcacaggcaaatgtctgagaacattagtgggacatacaggtggagtatggtcatcacaaatgagagacaacatcatcattagtggatctacagatcggacactcaaagtgtggaatgcagagactggagaatgtatacacaccttatatgggcatacttccactgtgcgttgtatgcatcttcatgaaaaaagagttgttagcggttctcgagatgccactcttagggtttgggatattgagacaggccagtgtttacatgttttgatgggtcatgttgcagcagtccgctgtgttcaatatgatggcaggagggttgttagtggagcatatgattttatggtaaaggtgtgggatccagagactgaaacctgtctacacacgttgcaggggcatactaatagagtctattcattacagtttgatggtatccatgtggtgagtggatctcttgatacatcaatccgtgtttgggatgtggagacagggaattgcattcacacgttaacagggcaccagtcgttaacaagtggaatggaactcaaagacaatattcttgtctctgggaatgcagattctacagttaaaatctgggatatcaaaacaggacagtgtttacaaacattgcaaggtcccaacaagcatcagagtgctgtgacctgtttacagttcaacaagaactttgtaattaccagctcagatgatggaactgtaaaactatgggacttgaaaacgggtgaatttattcgaaacctagtcacattggagagtggggggagtgggggagttgtgtggcggatcagagcctcaaacacaaagctggtgtgtgcagttgggagtcggaatgggactgaagaaaccaagctgctggtgctggactttgatgtggacatgaagtgaagagcagaaaagatgaatttgtccaattgtgtagacgatatactccctgcccttccccctgcaaaaagaaaaaaagaaaagaaaaagaaaaaaatcccttgttctcagtggtgcaggatgttggcttggggcaacagattgaaaagacctacagactaagaaggaaaagaagaagagatgacaaaccataactgacaagagaggcgtctgctgtctcatcacataaaaggcttcacttttgactgagggcagctttgcaaaatgagactttctaaatcaaaccaggtgcaattatttctttattttcttctccagtggtcattgggcagtgttaatgctgaaacatcattacagattctgctagcctgttcttttaccactgacagctagacacctagaaaggaactgcaataatatcaaaacaagtactggttgactttctaattagagagcatctgcaacaaaaagtcatttttctggagtggaaaagcttaaaaaaattactgtgaattgtttttgtacagttatcatgaaaagcttttttttttttttttttgccaaccattgccaatgtcaatcaatcacagtattagcctctgttaatctatttactgttgcttccatatacattcttcaatgcatatgttgctcaaaggtggcaagttgtcctgggttctgtgagtcctgagatggatttaattcttgatgctggtgctagaagtaggtcttcaaatatgggattgttgtcccaaccctgtactgtactcccagtggccaaacttatttatgctgctaaatgaaagaaagaaaaaagcaaattatttttttttattttttttctgctgtgacgttttagtcccagactgaattccaaatttgctctagtttggttatggaaaaaagactttttgccactgaaacttgagccatctgtgcctctaagaggctgagaatggaagagtttcagataataaagagtgaagtttgcctgcaagtaaagaattgagagtgtgtgcaaagcttattttcttttatctgggcaaaaattaaaacacattccttggaacagagctattacttgcctgttctgtggagaaacttttctttttgagggctgtggtgaatggatgaacgtacatcgtaaaactgacaaaatattttaaaaatatataaaacacaaaattaaaataaagttgctggtcagtcttagtgttttacagtatttgggaaaacaactgttacagttttattgctctgagtaactgacaaagcagaaactattcagtttttgtagtaaaggcgtcacatgcaaacaaacaaaatgaatgaaacagtcaaatggtttgcctcattctccaagagccacaactcaagctgaactgtgaaagtggtttaacactgtatcctaggcgatcttttttcctccttctgtttatttttttgtttgttttatttatagtctgatttaaaacaatcagattcaagttggttaattttagttatgtaacaacctgacatgatggaggaaaacaacctttaaagggattgtgtctatggtttgattcacttagaaattttattttcttataacttaagtgcaataaaatgtgttttttcatgtt

SEQ ID NO: 10532 - DNA, 3896 bp, Homo sapiens
  source 1..3896: mol_type = unassigned DNA
ccttccgcagctgccgcttcagtccgaaggaggaagggaaccaacccactttctcggcgccgcggctcttttctaaaagtaatgtgaaaacctttgcatcttctgatagtctagccaaggtccaagaagtagcaagctggcttttggaaatgaatcaggaactgctctctgtgggcagcaaaagacgacgaactggaggctctctgagaggtaacccttcctcaagccaggtagatgaagaacagatgaatcgtgtggtagaggaggaacagcaacagcaactcagacaacaagaggaggagcacactgcaaggaatggtgaagttgttggagtagaacctagacctggaggccaaaatgattcccagcaaggacagttggaagaaaacaataatagatttatttcggtagatgaggactcctcaggaaaccaagaagaacaagaggaagatgaagaacatgctggtgaacaagatgaggaggatgaggaggaggaggagatggaccaggagagtgacgattttgatcagtctgatgatagtagcagagaagatgaacatacacatactaacagtgtcacgaactccagtagtattgtggacctgcccgttcaccaactctcctccccattctatacaaaaacaacaaaaatgaaaagaaagttggaccatggttctgaggtccgctctttttctttgggaaagaaaccatgcaaagtctcagaatatacaagtaccactgggcttgtaccatgttcagcaacaccaacaacttttggggacctcagagcagccaatggccaagggcaacaacgacgccgaattacatctgtccagccacctacaggcctccaggaatggctaaaaatgtttcagagctggagtggaccagagaaattgcttgctttagatgaactcattgatagttgtgaaccaacacaagtaaaacatatgatgcaagtgatagaaccccagtttcaacgagacttcatttcattgctccctaaagagttggcactctatgtgctttcattcctggaacccaaagacctgctacaagcagctcagacatgtcgctactggagaattttggctgaagacaaccttctctggagagagaaatgcaaagaagaggggattgatgaaccattgcacatcaagagaagaaaagtaataaaaccaggtttcatacacagtccatggaaaagtgcatacatcagacagcacagaattgatactaactggaggcgaggagaactcaaatctcctaaggtgctgaaaggacatgatgatcatgtgatcacatgcttacagttttgtggtaaccgaatagttagtggttctgatgacaacactttaaaagtttggtcagcagtcacaggcaaatgtctgagaacattagtgggacatacaggtggagtatggtcatcacaaatgagagacaacatcatcattagtggatctacagatcggacactcaaagtgtggaatgcagagactggagaatgtatacacaccttatatgggcatacttccactgtgcgttgtatgcatcttcatgaaaaaagagttgttagcggttctcgagatgccactcttagggtttgggatattgagacaggccagtgtttacatgttttgatgggtcatgttgcagcagtccgctgtgttcaatatgatggcaggagggttgttagtggagcatatgattttatggtaaaggtgtgggatccagagactgaaacctgtctacacacgttgcaggggcatactaatagagtctattcattacagtttgatggtatccatgtggtgagtggatctcttgatacatcaatccgtgtttgggatgtggagacagggaattgcattcacacgttaacagggcaccagtcgttaacaagtggaatggaactcaaagacaatattcttgtctctgggaatgcagattctacagttaaaatctgggatatcaaaacaggacagtgtttacaaacattgcaaggtcccaacaagcatcagagtgctgtgacctgtttacagttcaacaagaactttgtaattaccagctcagatgatggaactgtaaaactatgggacttgaaaacgggtgaatttattcgaaacctagtcacattggagagtggggggagtgggggagttgtgtggcggatcagagcctcaaacacaaagctggtgtgtgcagttgggagtcggaatgggactgaagaaaccaagctgctggtgctggactttgatgtggacatgaagtgaagagcagaaaagatgaatttgtccaattgtgtagacgatatactccctgcccttccccctgcaaaaagaaaaaaagaaaagaaaaagaaaaaaatcccttgttctcagtggtgcaggatgttggcttggggcaacagattgaaaagacctacagactaagaaggaaaagaagaagagatgacaaaccataactgacaagagaggcgtctgctgtctcatcacataaaaggcttcacttttgactgagggcagctttgcaaaatgagactttctaaatcaaaccaggtgcaattatttctttattttcttctccagtggtcattgggcagtgttaatgctgaaacatcattacagattctgctagcctgttcttttaccactgacagctagacacctagaaaggaactgcaataatatcaaaacaagtactggttgactttctaattagagagcatctgcaacaaaaagtcatttttctggagtggaaaagcttaaaaaaattactgtgaattgtttttgtacagttatcatgaaaagcttttttttttttttttttgccaaccattgccaatgtcaatcaatcacagtattagcctctgttaatctatttactgttgcttccatatacattcttcaatgcatatgttgctcaaaggtggcaagttgtcctgggttctgtgagtcctgagatggatttaattcttgatgctggtgctagaagtaggtcttcaaatatgggattgttgtcccaaccctgtactgtactcccagtggccaaacttatttatgctgctaaatgaaagaaagaaaaaagcaaattatttttttttattttttttctgctgtgacgttttagtcccagactgaattccaaatttgctctagtttggttatggaaaaaagactttttgccactgaaacttgagccatctgtgcctctaagaggctgagaatggaagagtttcagataataaagagtgaagtttgcctgcaagtaaagaattgagagtgtgtgcaaagcttattttcttttatctgggcaaaaattaaaacacattccttggaacagagctattacttgcctgttctgtggagaaacttttctttttgagggctgtggtgaatggatgaacgtacatcgtaaaactgacaaaatattttaaaaatatataaaacacaaaattaaaataaagttgctggtcagtcttagtgttttacagtatttgggaaaacaactgttacagttttattgctctgagtaactgacaaagcagaaactattcagtttttgtagtaaaggcgtcacatgcaaacaaacaaaatgaatgaaacagtcaaatggtttgcctcattctccaagagccacaactcaagctgaactgtgaaagtggtttaacactgtatcctaggcgatcttttttcctccttctgtttatttttttgtttgttttatttatagtctgatttaaaacaatcagattcaagttggttaattttagttatgtaacaacctgacatgatggaggaaaacaacctttaaagggattgtgtctatggtttgattcacttagaaattttattttcttataacttaagtgcaataaaatgtgttttttcatgtta

SEQ ID NO: 10533 - DNA, 3570 bp, Homo sapiens
  source 1..3570: mol_type = unassigned DNA
agacaggtcaggacatttggtaggggaaggttgaaagacaaaagcagcaggccttgggttctcagccttttaaaaactattattaaatatatatttttaaaatttagtggttagagcttttagtaatgtgcctgtattacatgtagagagtattcgtcaaccaagaggagttttaaaatgtcaaaaccgggaaaacctactctaaaccatggcttggttcctgttgatcttaaaagtgcaaaagagcctctaccacatcaaactgtgatgaagatatttagcattagcatcattgcccaaggcctccctttttgtcgaagacggatgaaaagaaagttggaccatggttctgaggtccgctctttttctttgggaaagaaaccatgcaaagtctcagaatatacaagtaccactgggcttgtaccatgttcagcaacaccaacaacttttggggacctcagagcagccaatggccaagggcaacaacgacgccgaattacatctgtccagccacctacaggcctccaggaatggctaaaaatgtttcagagctggagtggaccagagaaattgcttgctttagatgaactcattgatagttgtgaaccaacacaagtaaaacatatgatgcaagtgatagaaccccagtttcaacgagacttcatttcattgctccctaaagagttggcactctatgtgctttcattcctggaacccaaagacctgctacaagcagctcagacatgtcgctactggagaattttggctgaagacaaccttctctggagagagaaatgcaaagaagaggggattgatgaaccattgcacatcaagagaagaaaagtaataaaaccaggtttcatacacagtccatggaaaagtgcatacatcagacagcacagaattgatactaactggaggcgaggagaactcaaatctcctaaggtgctgaaaggacatgatgatcatgtgatcacatgcttacagttttgtggtaaccgaatagttagtggttctgatgacaacactttaaaagtttggtcagcagtcacaggcaaatgtctgagaacattagtgggacatacaggtggagtatggtcatcacaaatgagagacaacatcatcattagtggatctacagatcggacactcaaagtgtggaatgcagagactggagaatgtatacacaccttatatgggcatacttccactgtgcgttgtatgcatcttcatgaaaaaagagttgttagcggttctcgagatgccactcttagggtttgggatattgagacaggccagtgtttacatgttttgatgggtcatgttgcagcagtccgctgtgttcaatatgatggcaggagggttgttagtggagcatatgattttatggtaaaggtgtgggatccagagactgaaacctgtctacacacgttgcaggggcatactaatagagtctattcattacagtttgatggtatccatgtggtgagtggatctcttgatacatcaatccgtgtttgggatgtggagacagggaattgcattcacacgttaacagggcaccagtcgttaacaagtggaatggaactcaaagacaatattcttgtctctgggaatgcagattctacagttaaaatctgggatatcaaaacaggacagtgtttacaaacattgcaaggtcccaacaagcatcagagtgctgtgacctgtttacagttcaacaagaactttgtaattaccagctcagatgatggaactgtaaaactatgggacttgaaaacgggtgaatttattcgaaacctagtcacattggagagtggggggagtgggggagttgtgtggcggatcagagcctcaaacacaaagctggtgtgtgcagttgggagtcggaatgggactgaagaaaccaagctgctggtgctggactttgatgtggacatgaagtgaagagcagaaaagatgaatttgtccaattgtgtagacgatatactccctgcccttccccctgcaaaaagaaaaaaagaaaagaaaaagaaaaaaatcccttgttctcagtggtgcaggatgttggcttggggcaacagattgaaaagacctacagactaagaaggaaaagaagaagagatgacaaaccataactgacaagagaggcgtctgctgtctcatcacataaaaggcttcacttttgactgagggcagctttgcaaaatgagactttctaaatcaaaccaggtgcaattatttctttattttcttctccagtggtcattgggcagtgttaatgctgaaacatcattacagattctgctagcctgttcttttaccactgacagctagacacctagaaaggaactgcaataatatcaaaacaagtactggttgactttctaattagagagcatctgcaacaaaaagtcatttttctggagtggaaaagcttaaaaaaattactgtgaattgtttttgtacagttatcatgaaaagcttttttttttttttttttgccaaccattgccaatgtcaatcaatcacagtattagcctctgttaatctatttactgttgcttccatatacattcttcaatgcatatgttgctcaaaggtggcaagttgtcctgggttctgtgagtcctgagatggatttaattcttgatgctggtgctagaagtaggtcttcaaatatgggattgttgtcccaaccctgtactgtactcccagtggccaaacttatttatgctgctaaatgaaagaaagaaaaaagcaaattatttttttttattttttttctgctgtgacgttttagtcccagactgaattccaaatttgctctagtttggttatggaaaaaagactttttgccactgaaacttgagccatctgtgcctctaagaggctgagaatggaagagtttcagataataaagagtgaagtttgcctgcaagtaaagaattgagagtgtgtgcaaagcttattttcttttatctgggcaaaaattaaaacacattccttggaacagagctattacttgcctgttctgtggagaaacttttctttttgagggctgtggtgaatggatgaacgtacatcgtaaaactgacaaaatattttaaaaatatataaaacacaaaattaaaataaagttgctggtcagtcttagtgttttacagtatttgggaaaacaactgttacagttttattgctctgagtaactgacaaagcagaaactattcagtttttgtagtaaaggcgtcacatgcaaacaaacaaaatgaatgaaacagtcaaatggtttgcctcattctccaagagccacaactcaagctgaactgtgaaagtggtttaacactgtatcctaggcgatcttttttcctccttctgtttatttttttgtttgttttatttatagtctgatttaaaacaatcagattcaagttggttaattttagttatgtaacaacctgacatgatggaggaaaacaacctttaaagggattgtgtctatggtttgattcacttagaaattttattttcttataacttaagtgcaataaaatgtgttttttcatgtta

SEQ ID NO: 10534 - DNA, 1735 bp, Homo sapiens
  source 1..1735: mol_type = unassigned DNA
attttgcttttcccttctagtcatgataaagtatttcttggatgagaaatttgcatttaatgttaaactaactgttaatgctattttttaaatgtatcagtcttctattaatatggctgataccaggacaaagtaccactgggcttgtaccatgttcagcaacaccaacaacttttggggacctcagagcagccaatggccaagggcaacaacgacgccgaattacatctgtccagccacctacaggcctccaggaatggctaaaaatgtttcagagctggagtggaccagagaaattgcttgctttagatgaactcattgatagttgtgaaccaacacaagtaaaacatatgatgcaagtgatagaaccccagtttcaacgagacttcatttcattgctccctaaagagttggcactctatgtgctttcattcctggaacccaaagacctgctacaagcagctcagacatgtcgctactggagaattttggctgaagacaaccttctctggagagagaaatgcaaagaagaggggattgatgaaccattgcacatcaagagaagaaaagtaataaaaccaggtttcatacacagtccatggaaaagtgcatacatcagacagcacagaattgatactaactggaggcgaggagaactcaaatctcctaaggtgctgaaaggacatgatgatcatgtgatcacatgcttacagttttgtggtaaccgaatagttagtggttctgatgacaacactttaaaagtttggtcagcagtcacaggcaaatgtctgagaacattagtgggacatacaggtggagtatggtcatcacaaatgagagacaacatcatcattagtggatctacagatcggacactcaaagtgtggaatgcagagactggagaatgtatacacaccttatatgggcatacttccactgtgcgttgtatgcatcttcatgaaaaaagagttgttagcggttctcgagatgccactcttagggtttgggatattgagacaggccagtgtttacatgttttgatgggtcatgttgcagcagtccgctgtgttcaatatgatggcaggagggttgttagtggagcatatgattttatggtaaaggtgtgggatccagagactgaaacctgtctacacacgttgcaggggcatactaatagagtctattcattacagtttgatggtatccatgtggtgagtggatctcttgatacatcaatccgtgtttgggatgtggagacagggaattgcattcacacgttaacagggcaccagtcgttaacaagtggaatggaactcaaagacaatattcttgtctctgggaatgcagattctacagttaaaatctgggatatcaaaacaggacagtgtttacaaacattgcaaggtcccaacaagcatcagagtgctgtgacctgtttacagttcaacaagaactttgtaattaccagctcagatgatggaactgtaaaactatgggacttgaaaacgggtgaatttattcgaaacctagtcacattggagagtggggggagtgggggagttgtgtggcggatcagagcctcaaacacaaagctggtgtgtgcagttgggagtcggaatgggactgaagaaaccaagctgctggtgctggactttgatgtggacatgaagtgaagagcagaaaagatgaatttgtccaattgtgtagacgatatactccctgcccttccccctgc

SEQ ID NO: 10535 - DNA, 2343 bp, Homo sapiens
  source 1..2343: mol_type = unassigned DNA
gcggcggacacttccctgggcgggactgtctcgtggcacccggtggaaccgaggagaacgtggagcgccgggagcggcgaatatggacgactacagcctggatgagttccgtcggcgctggcaggaggagctggcgcaggcccaggcgccgaagaagcggcgacggcccgaggctgccgagaggcgggctcggcggccggaggtgggctccgggcgcggcgaacaggcctcgggggacccggcgctggcccagcgtctcctggagggcgcggggaggcccccggcggcgcgggcgactcgggccgaggggcaggacgtagcgagccgctcacgttctcctctggcccgcgagggcgccgggggcggggagcagctggtggaccagctcatccgcgacctgaatgaaatgaatgatgtgcctttctttgatatccaactgccttacgaattggcaatcaatatatttcagtatctggacaggaaagaactaggaagatgtgcacaggtgagcaagacgtggaaggtgattgcagaggatgaggtgctgtggtacaggctgtgccagcaggaagggcaccttccggatagcagcatctctgactattcttgctggaagctcatcttccaagagtgccgagccaaggaacacatgttacgaaccaactggaagaatcgcaaaggtgccgtgagcgagctggagcatgttcctgacacagttttgtgtgatgtgcattctcacgatggtgtggtcattgcgggatatacatcaggggatgtgagagtgtgggacacccgcacctgggactacgtagcccccttcctggaatcagaggacgaggaggatgagcctggaatgcagccaaatgtctcctttgtgaggataaacagctcgttggcagtagcagcttatgaggatgggtttcttaatatttgggatttaaggaccggaaagtaccctgttcatcgttttgagcacgatgcaagaatacaggcactagccctcagccaggacgatgcaaccgtggccacagcttctgcttttgatgtcgtgatgttatcccccaatgaggaggggtactggcagatagctgcggaatttgaagttccgaaactggttcagtaccttgaaatagttccagaaaccagaaggtaccctgtggcagtagccgctgctggagatctgatgtacctgctcaaagccgaagactccgccagaaccctcctttacgcccacggcccgcctgtcacatgtctagacgtctcggccaaccaagttgcttttggtgtacagggtctgggatgggtgtacgaaggaagcaagatcctggtgtatagcctggaagcaggacgccgcctcttgaagctgggtaacgttctccgtgacttcacgtgtgtcaacctcagcgacagccctcccaacctcatggtcagtggcaacatggacgggagggtgaggatccacgacctccgcagtggtaacatcgccctgtcgctctccgcccatcagctcagggtctctgctgtgcagatggatgactggaagatcgtcagtggaggcgaggaaggcctggtgtccgtgtgggattatcggatgaaccagaagctgtgggaggtgtattccgggcacccggtgcagcacatctcattcagcagccacagcctcatcacggccaacgtgccttaccagacggtaatgcgaaacgccgacctggacagcttcactactcacaggagacaccgggggctgatccgcgcctatgagtttgcggtggaccagctggccttccagagccctctccctgtctgccgttcatcctgtgacgccatggccactcactactacgacctcgcactggcctttccctataaccatgtttagggatgtgcctcagttgggagcaaggagaaaaatgggaagaaccagttttatccatcttaaaacgccaggcacctcttcacaggtggtaaacatttaggggaagaaagcagcccagggtgccatgcctgacagcacgcatctccctgacccctgcacttcccccagcgcctggggcaagctggcgtgtgccagggctcgagtcccacgtgctgccaactcaaacatagcctccttccccacccagctggccaccctggcctcagctccctcaggacgcctcagggatctcgctgcgcggtcctatacggtccctgcttagccagcttctgtgtgtccgccctcccagctccagccctgcaggccgtcttttccgtctccagccccttacctcttttcctccgagggcctttggatgtgcttgttcctggcctccaaggcaataacctccatgtccttttccctgt

SEQ ID NO: 10536 - DNA, 4648 bp, Homo sapiens
  source 1..4648: mol_type = unassigned DNA
acttccctgggcgggactgtctcgtggcacccggtggaaccgaggagaacgtggagcgccgggagcggcgaatatggacgactacagcctggatgagttccgtcggcgctggcaggaggagctggcgcaggcccaggcgccgaagaagcggcgacggcccgaggctgccgagaggcgggctcggcggccggagaatgaaatgaatgatgtgcctttctttgatatccaactgccttacgaattggcaatcaatatatttcagtatctggacaggaaagaactaggaagatgtgcacaggtgagcaagacgtggaaggtgattgcagaggatgaggtgctgtggtacaggctgtgccagcaggaagggcaccttccggatagcagcatctctgactattcttgctggaagctcatcttccaagagtgccgagccaaggaacacatgttacgaaccaactggaagaatcgcaaaggtgccgtgagcgagctggagcatgttcctgacacagttttgtgtgatgtgcattctcacgatggtgtggtcattgcgggatatacatcaggggatgtgagagtgtgggacacccgcacctgggactacgtagcccccttcctggaatcagaggacgaggaggatgagcctggaatgcagccaaatgtctcctttgtgaggataaacagctcgttggcagtagcagcttatgaggatgggtttcttaatatttgggatttaaggaccggaaagtaccctgttcatcgttttgagcacgatgcaagaatacaggcactagccctcagccaggacgatgcaaccgtggccacagcttctgcttttgatgtcgtgatgttatcccccaatgaggaggggtactggcagatagctgcggaatttgaagttccgaaactggttcagtaccttgaaatagttccagaaaccagaaggtaccctgtggcagtagccgctgctggagatctgatgtacctgctcaaagccgaagactccgccagaaccctcctttacgcccacggcccgcctgtcacatgtctagacgtctcggccaaccaagttgcttttggtgtacagggtctgggatgggtgtacgaaggaagcaagatcctggtgtatagcctggaagcaggacgccgcctcttgaagctgggtaacgttctccgtgacttcacgtgtgtcaacctcagcgacagccctcccaacctcatggtcagtggcaacatggacgggagggtgaggatccacgacctccgcagtggtaacatcgccctgtcgctctccgcccatcagctcagggtctctgctgtgcagatggatgactggaagatcgtcagtggaggcgaggaaggcctggtgtccgtgtgggattatcggatgaaccagaagctgtgggaggtgtattccgggcacccggtgcagcacatctcattcagcagccacagcctcatcacggccaacgtgccttaccagacggtaatgcgaaacgccgacctggacagcttcactactcacaggagacaccgggggctgatccgcgcctatgagtttgcggtggaccagctggccttccagagccctctccctgtctgccgttcatcctgtgacgccatggccactcactactacgacctcgcactggcctttccctataaccatgtttagggatgtgcctcagttgggagcaaggagaaaaatgggaagaaccagttttatccatcttaaaacgccaggcacctcttcacaggtggtaaacatttaggggaagaaagcagcccagggtgccatgcctgacagcacgcatctccctgacccctgcacttcccccagcgcctggggcaagctggcgtgtgccagggctcgagtcccacgtgctgccaactcaaacatagcctccttccccacccagctggccaccctggcctcagctccctcaggacgcctcagggatctcgctgcgcggtcctatacggtccctgcttagccagcttctgtgtgtccgccctcccagctccagccctgcaggccgtcttttccgtctccagccccttacctcttttcctccgagggcctttggatgtgcttgttcctggcctccaaggcaataacctccatgtccttttccctgtatttacttggggtgctcttctgtgacacttgccaccaccaccttccagtagcaagctggtagagctgtactttttcttcacagcttttaccatggtttataattatatacttatacagtttagtcatcaatgactattttgcttactattgtgtctatgatatgtgatacaaagcaaatattttctaaatattcattgactaaacagccatcaagatgaaacaggacaggagagaactgttcagtgtgatacagagctgccatttccaaagtattctggaagcaagccattgccttactcttgattttcaacagttctaaacagcaacagcatccacctaatataccttcagaatatcaaagcgaaaactgatagaactacaaagagaaataaaatccattctcacggcaggcaaatcagtgagaaaaatgtaaagatctggaggatttacttagtatcgctaacaagctggatccagtagatgcgtatggaatttcaaatacacatagacgatgcacaaaaaaccaccctgtacgaaggccacaaagaacagctcagatgcacaaagattcacaccatacaggccaaattatagaatcccccaaccccaagacactgcaccctatgggctataccctcaggcagggccctgcttttctaggaattgactccaatgcagaatagtgagaaatcaacaaaaagcaaaataagacaattccagacactcctgaatttacttggatttaaagaggttaataaaaacaaactataaactctctagactgggctgacagtaaaagcacagaatacaaaacccaggggatggggctgggaggggctgtgaggggctggcacctcagctcagaaaaggtagcagcaatcccaaagcagcagaaggcaggggttaaatcaggataaaaacagacatcagtggaatcgaaaaccaatagttagttaatataaagccagaaggttttgttttttttcaggtggggtctcgctctgtcacctagactagactggagtgcaatggcctgatctcggctcactgcaacctctgcctcccgagttcaagcaattctcctgcctcagcctcctgagtagctgggattacaggcgtccgctaccacaactggctaatttttacatttttagtagagacgggggatattgctatgttggccaggctggtctcaaacttctgacctcaaatgattgcctgcctcagcctcccaaagtgctgggattacaggtgtaagtcactgtacccagcccaaaagcagtttaaaaaaaaaaaagacaaaatatacaactcttgataaaacataaaggtacagtggtctatgaggaagagaaaaggtacctgaggatgcagaagtacctaccacatgggaaccgtttgtccacactcattccagagaaaaccgagtcctctcagttgcacacgtgtacgtatcagtgggaagtgcttgccattactccaaagcctagaaccttcacgtcatgaaggttctggaaggtttttcagattgcttaagatacgcagccattccatattcatctccaactacacaggggaacggagcagatagagctgcgactgggaagcgtcaccttcccgtccagagcgctttctttcagaccctgcctacctgcaggcagatggaccggagggttttctgcttcctttcaaccagataacttcctaagtggagatggcctgtaggtagcaaatgcaggattttgtttactttcatcatgtcatgtggtggtcagactgctcgctggtggcctcgctttagaaggttttcatcaagccccgccctttctctctcatagtcttaatgcgtctggaccactggggaaaatatttttcttttcaaaaagcagccccttcagtctgcgttcccagttcattttgcaggcgcattcgcccttcctagtttgcagcaattaaagataacggagtgtaaagtcattagacccagaattagagcagccagcagctggcccagtgtaaaaatgtcccaagtgtagcccctcccaccgcagagcctgtttctaacgtacctgccattcgtggaagtcgcctgggttttgtaaaggagaattttttggactcaagctgtcatcttcaagcacgccaacttcaggcagtgttttctactgcaaacctccacatcctggaatcaatcacactgacagggaaaggataaatgctcctttataagccaacatgtatccaaattaagcccccttacctttatccagaccctttcacaaacaagttctgagtttttagccaattgatcctctactttccttctttagtccctctcagggacgcctccatccccggctcccctaaaggtagaagatactcgagcatgctgccaggggagctggatggtgaaacacctgaagatctcatatcgcctctcaaaacactgtcggacttgctttctgctttatgatgtccgtagttgttctaatattaaatgctttgaatttc

SEQ ID NO: 10537 - DNA, 2243 bp, Homo sapiens
  source 1..2243: mol_type = unassigned DNA
acttccctgggcgggactgtctcgtggcacccggtggaaccgaggagaacgtggagcgccgggagcggcgaatatggacgactacagcctggatgagttccgtcggcgctggcaggaggagctggcgcaggcccaggcgccgaagaagcggcgacggcccgaggctgccgagaggcgggctcggcggccggagaatgaaatgaatgatgtgcctttctttgatatccaactgccttacgaattggcaatcaatatatttcagtatctggacaggaaagaactaggaagatgtgcacaggtgagcaagacgtggaaggtgattgcagaggatgaggtgctgtggtacaggctgtgccagcaggaagggcaccttccggatagcagcatctctgactattcttgctggaagctcatcttccaagagtgccgagccaaggaacacatgttacgaaccaactggaagaatcgcaaaggtgccgtgagcgagctggagcatgttcctgacacagttttgtgtgatgtgcattctcacgatggtgtggtcattgcgggatatacatcaggggatgtgagagtgtgggacacccgcacctgggactacgtagcccccttcctggaatcagaggacgaggaggatgagcctggaatgcagccaaatgtctcctttgtgaggataaacagctcgttggcagtagcagcttatgaggatgggtttcttaatatttgggatttaaggaccggaaagtaccctgttcatcgttttgagcacgatgcaagaatacaggcactagccctcagccaggacgatgcaaccgtggccacagcttctgcttttgatgtcgtgatgttatcccccaatgaggaggggtactggcagatagctgcggaatttgaagttccgaaactggttcagtaccttgaaatagttccagaaaccagaaggtaccctgtggcagtagccgctgctggagatctgatgtacctgctcaaagccgaagactccgccagaaccctcctttacgcccacggcccgcctgtcacatgtctagacgtctcggccaaccaagttgcttttggtgtacagggtctgggatgggtgtacgaaggaagcaagatcctggtgtatagcctggaagcaggacgccgcctcttgaagctgggtaacgttctccgtgacttcacgtgtgtcaacctcagcgacagccctcccaacctcatggtcagtggcaacatggacgggagggtgaggatccacgacctccgcagtggtaacatcgccctgtcgctctccgcccatcagctcagggtctctgctgtgcagatggatgactggaagatcgtcagtggaggcgaggaaggcctggtgtccgtgtgggattatcggatgaaccagaagctgtgggaggtgtattccgggcacccggtgcagcacatctcattcagcagccacagcctcatcacggccaacgtgccttaccagacggtaatgcgaaacgccgacctggacagcttcactactcacaggagacaccgggggctgatccgcgcctatgagtttgcggtggaccagctggccttccagagccctctccctgtctgccgttcatcctgtgacgccatggccactcactactacgacctcgcactggcctttccctataaccatgtttagggatgtgcctcagttgggagcaaggagaaaaatgggaagaaccagttttatccatcttaaaacgccaggcacctcttcacaggtggtaaacatttaggggaagaaagcagcccagggtgccatgcctgacagcacgcatctccctgacccctgcacttcccccagcgcctggggcaagctggcgtgtgccagggctcgagtcccacgtgctgccaactcaaacatagcctccttccccacccaggtcaaacaccagaatgaacgggctcactgggcacttccgtacagcgtcatttactattgtgcatttgtatggttatgggaggcaatttttattttacaataattttttattcattccttctttcattttccaactcagttattccagtttaaggtggtgggcgaccagagcctatcccaacagctcagtgtgcaaggcagggaccaccctggacaggatgccctcccatcacagggcacactcaccccccacacacactcagactgcgaccagacaccaacaaacctcacctgcacatctttggggcgtgggaggaaaccagagtgc

SEQ ID NO: 10538 - DNA, 4575 bp, Homo sapiens
  source 1..4575: mol_type = unassigned DNA
gcggccgcggcccggactccgcggtgggcgagcgccctgtgaggtgaccatggaggctggtggcctccccttggagctgtggcgcatgatcttagcctacttgcaccttcccgacctgggccgctgcagcctggtatgcagggcctggtatgaactgatcctcagtctcgacagcacccgctggcggcagctgtgtctgggttgcaccgagtgccgccatcccaattggcccaaccagccagatgtggagcctgagtcttggagagaagccttcaagcagcattaccttgcatccaagacatggaccaagaatgccttggacttggagtcttccatctgcttttctctattccgccggaggagggaacgacgtaccctgagtgttgggccaggccgtgagtttgacagcctgggcagtgccttggccatggccagcctgtatgaccgaattgtgctcttcccaggtgtgtacgaagagcaaggtgaaatcatcttgaaggtgcctgtggagattgtagggcaggggaagttgggtgaagtggccctgctggccagcattgatcagcactgctcaaccacacgcctgtgcaacctcgtcttcacgccagcctggttctcacccatcatgtataagacaacatcaggtcacgtccagtttgacaactgcaactttgagaacgggcacatccaggtccatggcccgggtacttgccaagtgaagttctgtaccttcaaaaacacccatatcttcctgcacaacgtgcccctgtgtgtcctggaaaactgtgaatttgtgggcagtgaaaacaactctgtgactgttgagggtcacccatctgcagataagaactgggcctacaagtatctactagggcttatcaagtcctcacccacttttctccccacagaggactctgactttttaatgtccctggacctagagagccgggaccaggcctggagcccaaagacctgtgacattgttatcgagggcagccagagccctaccagcccagcctctagctccccaaagccaggctccaaggctggctcacaggaggcagaggtgggtagtgatggtgaaagggtggcccagaccccggacagcagcgatggaggcctgagtcccagcggtgaggatgaagatgaggaccagctgatgtacagactatcctaccaagtgcagggcccacgccctgtattggggggctcatttctgggcccacctctaccaggagcatccattcagctgcccagctgcctagtgctgaactcactgcagcaggagctgcagaaggataaggaggccatggcactggccaactccgtgcagggctgcctcatccgcaagtgcctcttccgggacgggaagggaggcgtcttcgtctgctcccacggcagagccaagatggaaggaaacatcttccggaacctgacttacgcagtgcggtgtatacataatagcaagatcatcatgctcaggaacgacatttaccgctgccgagcgtcaggcatctttcttcgcttggagggcggtggcttgattgccggcaacaacatttaccacaatgcagaggctggtgtagacatccggaaaaagtccaacccactcatactgtgtaaccagatccaccatggccttcgctctggcattgtcgtccttggcaatgggaaaggcatcatccggaacaatcaaatcttttccaataaggaggctggcatttacatcctgtaccacggaaaccccgttgtgagcgggaaccacatcttcaagggccgtgctgccggcatagcagtgaatgagaacggcaaaggcctcatcacagaaaatgtcatccgtgagaatcagtggggaggtgtggacatccgccgtggagggatccccgttctcaggagtaacctcatctgctttggctattcagatggtgtggttgtgggagacgaaggcaaaggcctcatagaaggaaataccatctacgctaacaagggctgtggtgtgtggatgatgtcgtccagcctcccccatgtcaccagcaaccacgtcagctacaatggcctgtatggagtggcagtatttagccagaaggatggctccagcgagttacctcgaggccacagggctcaagagaacttcagcgaggatggggacgccatcctctgggagacagagctggagaaggaggacgacccactgcgccggcccatcaccatagctcttgttgagtctaacagtattaatcacaatggagcctcaggactctatgtccagagcagcgaggcactgcatgtcatcaccaatgtgatccacgcgaatggggacagaggcattactgtggcccagagcagccaacccacccgagtggccaacaacagcatctcctgcaaccggcaaagtggggtcaaggttgaggcccagtgcaaagtggagctccggggcaatggtatctatgacaacagaggccacggcattatcaccaagggcgacagcaccatcgtcattgaaaacgatatcattggcaaccggggcagcgggctgcagctgctgcccaggtccgacactaaagtaataaagaaccggatccactcgttccgggcctacggcatcgccgtgcggggccgtgccaaggccctggtgcaggaaaacatcatcttccagggcaaaaccagtaagaccatctttcagcagatctcaaacaaccgagaatgcatcatgcaaaacaacaagttcctggtcttcaagaaaaagtctgatacgtggcgcctggtgaacccaccagcacggccccaccttgaaaattctctcagacgtccctcggcagcccacaatgggcagaaggtgacagccatggcaacgaggatcacagcccgggtggaaggtggttaccacagcaaccgcagtgtcttctgcaccatcctgtgaggacacagacctgcttcagggccaagcctggatgggtgctcagaggagctaaggtggaaatactgcctgaaaagactccgcccctccccctccccctcgaacaaatgggtcccgggcctccaaaacacggtacctccagaacacttcagctccacagcccatagcaagaagaaagtgggcaatgtttttcagggagaagggatagaagctggtgggtttccagtcactcgaagtctataaagattgtgaagagcgggggaagctcaaatgctgaagcttttggtcaggattttctctgagttctaaggaactgtgttttacacacaccaaacccagactcttctcaggaaagagcagatttacttctgatggcgggaagtgattctagtgaggtggagagagacaactgctccagaattttcccctttgctagagctgtctccctctcaatccctccagggaccccaccacaccctcccagctgtctctggaggctggaggagttgagtttggttgacttgaggacttggacatggacctgggaggaaggaaggacctgggagcaacaggagaccccatggaaaggctgccccagggatgacaagagggacatgctgaaacaggtggggctgcagcgtgcaggcagatgctaggctgggtgggcagggatgcacaaggctctactccatccccagagagctcccaaatgcagaaggattcaaaccccatgtgagcgtgcccacaccagccgcccctcctgagcatcagcctgttcagatgagggtacctgggcctctcgttcgcatctgtgttctcatggatgagcgctggtctttactgaccctcccaagcctccccactctgtgccttggctcatgctctttcctcctcccggcatgcccttctcccccatctccgtgtcctcgttcctcaaggtttagccgagacactgccacctccacatagctctccctgccctctttccccctctgggcctcagtggcctttctctgctccctctcagggtactgagcactttctgccttgtcctggagctatctgggtccattgcctgaccccccactcacctgtgtgctccccgtaggtagggccacttctgactgtgtgtccccagatccagcctggggttggggtaggattagtggcctgagtgaggagaggaaggccagctcccagaggactttactgaaccgtactgtgaatatgtccaagtcccaaagccaggtgaggtcagaccccactgcctgaggaagagggctggatgcagggccagctcaacctgaacaatcccctcccactcggcctttcctgtggggccttcaccagcctgctggggtcactgtcgtgcacttggctgcgtggctggttctattggccctaggtgctgctctgttgggtgggatgggagggggtagagggagccaggagcactgggttctccctgagaacactgggcacaagagtactggcctcttctatccctggcactgtcctttgcacttgtttggtggccccaatgtgagtcgctgtaaaaaatgctgccgttactattttctaagaaatgacttttctgtgaaccaacagtaacaaaaacctcagtaaccaaaataaagttctatattttaaaaaaggca

SEQ ID NO: 10539 - DNA, 498 bp, Homo sapiens
  source 1..498: mol_type = unassigned DNA
ggcagctgtccgcccccgggcggggctggccgcacgccgcaatcctaccggctgctgcggctccagcgggggcggcgggtggcttccagggcaccggcggccgcggcccggactccgcggtgggcgagcgccctgtgaggactacagtgaagaacagaggggaaagtcatttgaggagccagaactctggagtcagttagctctggttcagatcacagttctgccacttactggctttgtgaccttcagccagattgattcctcatctgtgaaaaggaggtgaccatggaggctggtggcctccccttggagctgtggcgcatgatcttagcctacttgcaccttcccgacctgggccgctgcagcctggtatgcagggcctggtatgaactgatcctcagtctcgacagcacccgctggcggcagctgtgtctgggttgcaccgagtgccgccatcccaattggcccaaccagccagatgtggagcctgagtcttgg

SEQ ID NO: 10540 - DNA, 1514 bp, Homo sapiens
  source 1..1514: mol_type = unassigned DNA
cacgatatgaagagcctggttacagtttcgactcctctctgcaagtgaataggcccagaaagatcatcatgctcaggaacgacatttaccgctgccgagcgtcaggcatctttcttcgcttggagggcggtggcttgattgccggcaacaacatttaccacaatgcagaggctggtgtagacatccggaaaaagtccaacccactcatactgtgtaaccagatccaccatggccttcgctctggcattgtcgtccttggcaatgggaaaggcatcatccggaacaatcaaatcttttccaataaggaggctggcatttacatcctgtaccacggaaaccccgttgtgagcgggaaccacatcttcaagggccgtgctgccggcatagcagtgaatgagaacggcaaaggcctcatcacagaaaatgtcatccgtgagaatcagtggggaggtgtggacatccgccgtggagggatccccgttctcaggagtaacctcatctgctttggctattcagatggtgtggttgtgggagacgaaggcaaaggcctcatagaaggaaataccatctacgctaacaagggctgtggtgtgtggatgatgtcgtccagcctcccccatgtcaccagcaaccacgtcagctacaatggcctgtatggagtggcagtatttagccagaaggatggctccagcgagttacctcgaggccacagggctcaagagaacttcagcgaggatggggacgccatcctctgggagacagagctggagaaggaggacgacccactgcgccggcccatcaccatagctcttgttgagtctaacagtattaatcacaatggagcctcaggactctatgtccagagcagcgaggcactgcatgtcatcaccaatgtgatccacgcgaatggggacagaggcattactgtggcccagagcagccaacccacccgagtggccaacaacagcatctcctgcaaccggcaaagtggggtcaaggttgaggcccagtgcaaagtggagctccggggcaatggtatctatgacaacagaggccacggcattatcaccaagggcgacagcaccatcgtcattgaaaacgatatcattggcaaccggggcagcgggctgcagctgctgcccaggtccgacactaaagtaataaagaaccggatccactcgttccgggcctacggcatcgccgtgcggggccgtgccaaggccctggtgcaggaaaacatcatcttccagggcaaaaccagtaagaccatctttcagcagatctcaaacaaccgagaatgcatcatgcaaaacaacaagttcctggtcttcaagaaaaagtctgatacgtggcgcctggtgaacccaccagcacggccccaccttgaaaattctctcagacgtccctcggcagcccacaatgggcagaaggtgacagccatggcaacgaggatcacagcccgggtggaaggtggttaccacagcaaccgcagtgtcttctgcaccatcctgtga

SEQ ID NO: 10541 - DNA, 3933 bp, Homo sapiens
  source 1..3933: mol_type = unassigned DNA
cggccgcgcccggtgcagcaacagcagcagcagcccccgcagcagccgccgccgcagccgccccagcagcagccgccccagcagcagcctccgccgccgccgcagcagcagcagcagcagcagcctccgccgccgccaccgccgcctccgccgctgcctcaggagcggaacaacgtcggcgagcgggatgatgatgtgcctgcagatatggttgcagaagaatcaggtcctggtgcacaaaatagtccataccaacttcgtagaaaaactcttttgccgaaaagaacagcgtgtcccacaaagaacagtatggagggcgcctcaacttcaactacagaaaactttggtcatcgtgcaaaacgtgcaagagtgtctggaaaatcacaagatctatcagcagcacctgctgaacagtatcttcaggagaaactgccagatgaagtggttctaaaaatcttctcttacttgctggaacaggatctttgtagagcagcttgtgtatgtaaacgcttcagtgaacttgctaatgatccaattttgtggaaacgattatatatggaagtatttgaatatactcgccctatgatgcatcctgaacctggaaaattctaccagattaatccagaagagtatgaacatccaaatccctggaaagagagtttccagcagttgtataaaggtgcacatgtaaagccaggatttgctgaacatttctacagtaaccctgcaagatataaaggaagagaaaatatgttgtattatgatactattgaagatgcccttggtggggtacaagaggctcattttgatggacttatctttgttcattctggaatatatactgatgaatggatatatattgaatctccaatcaccatgattggtgcagcacctgggaaagtggcagacaaagttataattgaaaacactagagattcaaccttcgtttttatggaaggctctgaagatgcttatgttggatatatgacaataaggtttaaccctgatgacaaatctgcacaacaccacaatgcacaccactgcttagagattacagtaaattgtagccctattattgatcactgtatcatccgaagtacatgtacagttggttctgcagtatgtgttagtggtcaaggagcatgtcccaccatcaagcactgtaacatcagtgactgtgaaaatgttggactatatataacagatcatgcacagggaatatatgaggataatgaaatttccaataatgcgttagctgggatttgggttaaaaatcatggaaacccaattattagacggaatcatattcatcatggacgtgatgttggtgtgttcacatttgatcatggcatgggttactttgaaagttgcaatatacacagaaataggatagcaggctttgaagtaaaagcctatgctaaccctacagtggttcgatgtgaaattcaccatgggcagactggaggaatatatgtccatgaaaaaggaagaggacaattcatagagaataaaatctatgcaaacaactttgcaggtgtatggattacctcaaatagtgacccaacaataaggggaaattctatatttaatggaaatcaaggaggagtttacatctttggtgatggacgaggccttattgaaggaaatgacatttatggcaatgcattagcaggaattcaaattaggacaaacagttgtccaattgttcggcataacaaaattcatgatggccagcatggtgggatttatgtgcatgaaaagggacaaggagtaatagaagagaatgaagtttatagtaacactctagctggagtctgggtgacaactggcagcactccagtactgagaagaaaccggatacacagtggcaagcaggttggtgtttatttttatgacaatggacatggagtgctagaagacaatgatatctataatcatatgtattcaggggttcagataaggactggaagcaaccccaaaattagacgcaacaaaatctggggaggacagaatggtggaattctagtttataattctggtctaggctgtatagaagacaatgaaatatttgacaatgcaatggctggagtctggattaagacagatagtaatcctacactaagaagaaataaaatccatgatggaagagatggtggcatctgtatatttaatgggggtcgaggtctccttgaagaaaatgatattttcaggaatgctcaagcaggtgttctcatcagcactaatagtcatccaatcttaaggaaaaacagaatatttgatggatttgccgcaggtattgaaattacaaatcacgcaactgcaacactagaaggcaatcagatttttaacaaccggtttggaggcttatttttagcatctggtgttaatgtgacaatgaaagataacaaaataatgaacaatcaagatgccatagaaaaggctgttagtagaggccaatgtttatataaaatatcaagttataccagctatcccatgcatgatttctacagatgtcatacttgtaacaccacagatcgaaatgccatatgtgtgaactgcattaagaagtgccatcagggacatgatgtagagtttattagacatgataggtttttctgtgactgtggtgctggaacactgtctaatccttgtacattagctggtgagcctacacatgatacagatacactatatgactctgctccacctatagaatctaatacattgcagcacaactgaattccttccctaaagaaaaagtcctgccattgtaacatcataacttaaaacacttttttggaagaagatttaaaatatttgcccatgctacaggaagagactgtattaaaaatggatacacaaggtcagttgacactatgaagctcaagctaccaaaaagaaagtggcaatatattgactcaggatctcaaagctgggtgttttagcattactgtgtaaagacttgaagggacagaagtgaagaaaataagctgcaattttgtacagataccaacttctgaaaagctggtgtttttacaactagcattgaatgcagtccaatttgcagtagtaatcttcaatagacaagcagctttgttgctgcctttatggacatgggtaccaattgcttttgtaatatggtaaaaatgtgagctagcacttctgcgttccttttgattttttttttttaacatgtattcagattgagaaatatgattttaatgctttaatctcatgtagtttgtttttaatttcaagcaaaatcttactgtacttgaatgtgccctgttttgttagcacacctagacttgctgtaactgtactcatgtcccagtatgtacgttctttctatgaaagagaaaacactaatcttaaattatatccagcaatgtttctggtatcctttaagaaaagttaagactattatttccttcccttccctgtgcagcattcaaaatcacccctagaaaaagtgagtgttttaatgagacttcctaggaagggatgcactgtaaaacaaaagtattcttgtaactcagttttgtgaaaggtaaaaaactactatgttttaagtacactttagaaagtctcttcaaaacaaacagtcctgtatttgaactctgttcatagtttttttttgaacagtttagacaaaactgctggaaattaaaccaatttcctgcattaagctgagacaagtatatatacagccctatacagtttcatagcttttcctcccccatttatgtgtattggtgacagtgggtataaaacagcctgaaagtgtatgcatgtaccataacatctagacttaatatattgtggagtattcaataaccattatgtagaaggtagataagaattaaaagggtttaatttcctagaaagaaaatggaaaaatggtcatttttaaaaaataaagtttattagatc

SEQ ID NO: 10542 - DNA, 591 bp, Homo sapiens
  source 1..591: mol_type = unassigned DNA
cggccgcgcccggtgcagcaacagcagcagcagcccccgcagcagccgccgccgcagccgccccagcagcagccgccccagcagcagcctccgccgccgccgcagcagcagcagcagcagcagcctccgccgccgccaccgccgcctccgccgctgcctcaggagcggaacaacgtcggcgagcgggatgatgatgtgcctgcagatatggttgcagaagaatcaggtcctggtgcacaaaatagtccataccaacttcgtagaaaaactcttttgccgaaaagaacagcgtgtcccacaaagaacagtatggagggcgcctcaacttcaactacagaaaactttggtcatcgtgcaaaacgtgcaagagtgtctggaaaatcacaagatctatcagcagcacctgctgaacagtatcttcaggagaaactgccagatgaagtggttctaaaaatcttctcttacttgctggaacaggatctttgtagagcagcttgtgtatgtaaacgcttcagtgaacttgctaatgatccaattttgtggctaggcgaagtggctcacgcctataatcccagcactttgggaggctga

SEQ ID NO: 10543 - DNA, 3844 bp, Homo sapiens
  source 1..3844: mol_type = unassigned DNA
atcatagcaataagatttgtaaaacattgcaatggctgaaaaactgtctaacaggaaattttaagtgttattccaaagaagaacaagcctaaaaatgatgatgtgcctgcagatatggttgcagaagaatcaggtcctggtgcacaaaatagtccataccaacttcgtagaaaaactcttttgccgaaaagaacagcgtgtcccacaaagaacagtatggagggcgcctcaacttcaactacagaaaactttggtcatcgtgcaaaacgtgcaagagtgtctggaaaatcacaagatctatcagcagcacctgctgaacagtatcttcaggagaaactgccagatgaagtggttctaaaaatcttctcttacttgctggaacaggatctttgtagagcagcttgtgtatgtaaacgcttcagtgaacttgctaatgatccaattttgtggaaacgattatatatggaagtatttgaatatactcgccctatgatgcatcctgaacctggaaaattctaccagattaatccagaagagtatgaacatccaaatccctggaaagagagtttccagcagttgtataaaggtgcacatgtaaagccaggatttgctgaacatttctacagtaaccctgcaagatataaaggaagagaaaatatgttgtattatgatactattgaagatgcccttggtggggtacaagaggctcattttgatggacttatctttgttcattctggaatatatactgatgaatggatatatattgaatctccaatcaccatgattggtgcagcacctgggaaagtggcagacaaagttataattgaaaacactagagattcaaccttcgtttttatggaaggctctgaagatgcttatgttggatatatgacaataaggtttaaccctgatgacaaatctgcacaacaccacaatgcacaccactgcttagagattacagtaaattgtagccctattattgatcactgtatcatccgaagtacatgtacagttggttctgcagtatgtgttagtggtcaaggagcatgtcccaccatcaagcactgtaacatcagtgactgtgaaaatgttggactatatataacagatcatgcacagggaatatatgaggataatgaaatttccaataatgcgttagctgggatttgggttaaaaatcatggaaacccaattattagacggaatcatattcatcatggacgtgatgttggtgtgttcacatttgatcatggcatgggttactttgaaagttgcaatatacacagaaataggatagcaggctttgaagtaaaagcctatgctaaccctacagtggttcgatgtgaaattcaccatgggcagactggaggaatatatgtccatgaaaaaggaagaggacaattcatagagaataaaatctatgcaaacaactttgcaggtgtatggattacctcaaatagtgacccaacaataaggggaaattctatatttaatggaaatcaaggaggagtttacatctttggtgatggacgaggccttattgaaggaaatgacatttatggcaatgcattagcaggaattcaaattaggacaaacagttgtccaattgttcggcataacaaaattcatgatggccagcatggtgggatttatgtgcatgaaaagggacaaggagtaatagaagagaatgaagtttatagtaacactctagctggagtctgggtgacaactggcagcactccagtactgagaagaaaccggatacacagtggcaagcaggttggtgtttatttttatgacaatggacatggagtgctagaagacaatgatatctataatcatatgtattcaggggttcagataaggactggaagcaaccccaaaattagacgcaacaaaatctggggaggacagaatggtggaattctagtttataattctggtctaggctgtatagaagacaatgaaatatttgacaatgcaatggctggagtctggattaagacagatagtaatcctacactaagaagaaataaaatccatgatggaagagatggtggcatctgtatatttaatgggggtcgaggtctccttgaagaaaatgatattttcaggaatgctcaagcaggtgttctcatcagcactaatagtcatccaatcttaaggaaaaacagaatatttgatggatttgccgcaggtattgaaattacaaatcacgcaactgcaacactagaaggcaatcagatttttaacaaccggtttggaggcttatttttagcatctggtgttaatgtgacaatgaaagataacaaaataatgaacaatcaagatgccatagaaaaggctgttagtagaggccaatgtttatataaaatatcaagttataccagctatcccatgcatgatttctacagatgtcatacttgtaacaccacagatcgaaatgccatatgtgtgaactgcattaagaagtgccatcagggacatgatgtagagtttattagacatgataggtttttctgtgactgtggtgctggaacactgtctaatccttgtacattagctggtgagcctacacatgatacagatacactatatgactctgctccacctatagaatctaatacattgcagcacaactgaattccttccctaaagaaaaagtcctgccattgtaacatcataacttaaaacacttttttggaagaagatttaaaatatttgcccatgctacaggaagagactgtattaaaaatggatacacaaggtcagttgacactatgaagctcaagctaccaaaaagaaagtggcaatatattgactcaggatctcaaagctgggtgttttagcattactgtgtaaagacttgaagggacagaagtgaagaaaataagctgcaattttgtacagataccaacttctgaaaagctggtgtttttacaactagcattgaatgcagtccaatttgcagtagtaatcttcaatagacaagcagctttgttgctgcctttatggacatgggtaccaattgcttttgtaatatggtaaaaatgtgagctagcacttctgcgttccttttgattttttttttttaacatgtattcagattgagaaatatgattttaatgctttaatctcatgtagtttgtttttaatttcaagcaaaatcttactgtacttgaatgtgccctgttttgttagcacacctagacttgctgtaactgtactcatgtcccagtatgtacgttctttctatgaaagagaaaacactaatcttaaattatatccagcaatgtttctggtatcctttaagaaaagttaagactattatttccttcccttccctgtgcagcattcaaaatcacccctagaaaaagtgagtgttttaatgagacttcctaggaagggatgcactgtaaaacaaaagtattcttgtaactcagttttgtgaaaggtaaaaaactactatgttttaagtacactttagaaagtctcttcaaaacaaacagtcctgtatttgaactctgttcatagtttttttttgaacagtttagacaaaactgctggaaattaaaccaatttcctgcattaagctgagacaagtatatatacagccctatacagtttcatagcttttcctcccccatttatgtgtattggtgacagtgggtataaaacagcctgaaagtgtatgcatgtaccataacatctagacttaatatattgtggagtattcaataaccattatgtagaaggtagataagaattaaaagggtttaatttcctagaaagaaaatggaaaaatggtcatttttaaaaaataaagtttattagatcataa

SEQ ID NO: 10544 - DNA, 4055 bp, Homo sapiens
  source 1..4055: mol_type = unassigned DNA
ctcctgccccgaagctcgctgtgcgtgtgcgtgtgtgtgtccctccgccaacgccgccacctcagcccggcaaatgaactccgtccgagccgccaaccggagacccaggcgagtgtcgcggccgcgcccggtgcagcaacagcagcagcagcccccgcagcagccgccgccgcagccgccccagcagcagccgccccagcagcagcctccgccgccgccgcagcagcagcagcagcagcagcctccgccgccgccaccgccgcctccgccgctgcctcaggagcggaacaacgtcggcgagcgggatgatgatgtgcctgcagatatggttgcagaagaatcaggtcctggtgcacaaaatagtccataccaacttcgtagaaaaactcttttgccgaaaagaacagcgtgtcccacaaagaacagtatggagggcgcctcaacttcaactacagaaaactttggtcatcgtgcaaaacgtgcaagagtgtctggaaaatcacaagatctatcagcagcacctgctgaacagtatcttcaggagaaactgccagatgaagtggttctaaaaatcttctcttacttgctggaacaggatctttgtagagcagcttgtgtatgtaaacgcttcagtgaacttgctaatgatccaattttgtggaaacgattatatatggaagtatttgaatatactcgccctatgatgcatcctgaacctggaaaattctaccagattaatccagaagagtatgaacatccaaatccctggaaagagagtttccagcagttgtataaaggtgcacatgtaaagccaggatttgctgaacatttctacagtaaccctgcaagatataaaggaagagaaaatatgttgtattatgatactattgaagatgcccttggtggggtacaagaggctcattttgatggacttatctttgttcattctggaatatatactgatgaatggatatatattgaatctccaatcaccatgattggtgcagcacctgggaaagtggcagacaaagttataattgaaaacactagagattcaaccttcgtttttatggaaggctctgaagatgcttatgttggatatatgacaataaggtttaaccctgatgacaaatctgcacaacaccacaatgcacaccactgcttagagattacagtaaattgtagccctattattgatcactgtatcatccgaagtacatgtacagttggttctgcagtatgtgttagtggtcaaggagcatgtcccaccatcaagcactgtaacatcagtgactgtgaaaatgttggactatatataacagatcatgcacagggaatatatgaggataatgaaatttccaataatgcgttagctgggatttgggttaaaaatcatggaaacccaattattagacggaatcatattcatcatggacgtgatgttggtgtgttcacatttgatcatggcatgggttactttgaaagttgcaatatacacagaaataggatagcaggctttgaagtaaaagcctatgctaaccctacagtggttcgatgtgaaattcaccatgggcagactggaggaatatatgtccatgaaaaaggaagaggacaattcatagagaataaaatctatgcaaacaactttgcaggtgtatggattacctcaaatagtgacccaacaataaggggaaattctatatttaatggaaatcaaggaggagtttacatctttggtgatggacgaggccttattgaaggaaatgacatttatggcaatgcattagcaggaattcaaattaggacaaacagttgtccaattgttcggcataacaaaattcatgatggccagcatggtgggatttatgtgcatgaaaagggacaaggagtaatagaagagaatgaagtttatagtaacactctagctggagtctgggtgacaactggcagcactccagtactgagaagaaaccggatacacagtggcaagcaggttggtgtttatttttatgacaatggacatggagtgctagaagacaatgatatctataatcatatgtattcaggggttcagataaggactggaagcaaccccaaaattagacgcaacaaaatctggggaggacagaatggtggaattctagtttataattctggtctaggctgtatagaagacaatgaaatatttgacaatgcaatggctggagtctggattaagacagatagtaatcctacactaagaagaaataaaatccatgatggaagagatggtggcatctgtatatttaatgggggtcgaggtctccttgaagaaaatgatattttcaggaatgctcaagcaggtgttctcatcagcactaatagtcatccaatcttaaggaaaaacagaatatttgatggatttgccgcaggtattgaaattacaaatcacgcaactgcaacactagaaggcaatcagatttttaacaaccggtttggaggcttatttttagcatctggtgttaatgtgacaatgaaagataacaaaataatgaacaatcaagatgccatagaaaaggctgttagtagaggccaatgtttatataaaatatcaagttataccagctatcccatgcatgatttctacagatgtcatacttgtaacaccacagatcgaaatgccatatgtgtgaactgcattaagaagtgccatcagggacatgatgtagagtttattagacatgataggtttttctgtgactgtggtgctggaacactgtctaatccttgtacattagctggtgagcctacacatgatacagatacactatatgactctgctccacctatagaatctaatacattgcagcacaactgaattccttccctaaagaaaaagtcctgccattgtaacatcataacttaaaacacttttttggaagaagatttaaaatatttgcccatgctacaggaagagactgtattaaaaatggatacacaaggtcagttgacactatgaagctcaagctaccaaaaagaaagtggcaatatattgactcaggatctcaaagctgggtgttttagcattactgtgtaaagacttgaagggacagaagtgaagaaaataagctgcaattttgtacagataccaacttctgaaaagctggtgtttttacaactagcattgaatgcagtccaatttgcagtagtaatcttcaatagacaagcagctttgttgctgcctttatggacatgggtaccaattgcttttgtaatatggtaaaaatgtgagctagcacttctgcgttccttttgattttttttttttaacatgtattcagattgagaaatatgattttaatgctttaatctcatgtagtttgtttttaatttcaagcaaaatcttactgtacttgaatgtgccctgttttgttagcacacctagacttgctgtaactgtactcatgtcccagtatgtacgttctttctatgaaagagaaaacactaatcttaaattatatccagcaatgtttctggtatcctttaagaaaagttaagactattatttccttcccttccctgtgcagcattcaaaatcacccctagaaaaagtgagtgttttaatgagacttcctaggaagggatgcactgtaaaacaaaagtattcttgtaactcagttttgtgaaaggtaaaaaactactatgttttaagtacactttagaaagtctcttcaaaacaaacagtcctgtatttgaactctgttcatagtttttttttgaacagtttagacaaaactgctggaaattaaaccaatttcctgcattaagctgagacaagtatatatacagccctatacagtttcatagcttttcctcccccatttatgtgtattggtgacagtgggtataaaacagcctgaaagtgtatgcatgtaccataacatctagacttaatatattgtggagtattcaataaccattatgtagaaggtagataagaattaaaagggtttaatttcctagaaagaaaatggaaaaatggtcatttttaaaaaataaagtttattagatcataa

SEQ ID NO: 10545 - DNA, 2028 bp, Homo sapiens
  source 1..2028: mol_type = unassigned DNA
gttagctgggatttgggttaaaaatcatggaaacccaattattagacggaatcatattcatcatggacgtgatgttggtgtgttcacatttgatcatggcatgggttactttgaaagttgcaatatacacagaaataggatagcaggctttgaagtaaaagcctatgctaaccctacagtggttcgatgtgaaattcaccatgggcagactggaggaatatatgtccatgaaaaaggaagaggacaattcatagagaataaaatctatgcaaacaactttgcaggtgtatggattacctcaaatagtgacccaacaataaggggaaattctatatttaatggaaatcaaggaggagtttacatctttggtgatggacgaggccttattgaaggaaatgacatttatgcatgaaaagggacaaggagtaatagaagagaatgaagtttatagtaacactctagctggagtctgggtgacaactggcagcactccagtactgagaagaaaccggatacacagtggcaagcaggttggtgtttatttttatgacaatggacatggagtgctagaagacaatgatatctataatcatatgtattcaggggttcagataaggactggaagcaaccccaaaattagacgcaacaaaatctggggaggacagaatggtggaattctagtttataattctggtctaggctgtatagaagacaatgaaatatttgacaatgcaatggctggagtctggattaagacagatagtaatcctacactaagaagaaataaaatccatgatggaagagatggtggcatctgtatatttaatgggggtcgaggtctccttgaagaaaatgatattttcaggaatgctcaagcaggtgttctcatcagcactaatagtcatccaatcttaaggaaaaacagaatatttgatggatttgccgcaggtattgaaattacaaatcacgcaactgcaacactagaaggcaatcagatttttaacaaccggtttggaggcttatttttagcatctggtgttaatgtgacaatgaaagataacaaaataatgaacaatcaagatgccatagaaaaggctgttagtagaggccaatgtttatataaaatatcaagttataccagctatcccatgcatgatttctacagatgtcatacttgtaacaccacagatcgaaatgccatatgtgtgaactgcattaagaagtgccatcagggacatgatgtagagtttattagacatgataggtttttctgtgactgtggtgctggaacactgtctaatccttgtacattagctggtgagcctacacatgatacagatacactatatgactctgctccacctatagaatctaatacattgcagcacaactgaattccttccctaaagaaaaagtcctgccattgtaacatcataacttaaaacacttttttggaagaagatttaaaatatttgcccatgctacaggaagagactgtattaaaaatggatacacaaggtcagttgacactatgaagctcaagctaccaaaaagaaagtggcaatatattgactcaggatctcaaagctgggtgttttagcattactgtgtaaagacttgaagggacagaagtgaagaaaataagctgcaattttgtacagataccaacttctgaaaagctggtgtttttacaactagcattgaatgcagtccaatttgcagtagtaatcttcaatagacaagcagctttgttgctgcctttatggacatgggtaccaattgcttttgtaatatggtaaaaatgtgagctagcacttctgcgttccttttgattttttttttttaacatgtattcagattgagaaatatgattttaatgctttaatctcatgtagtttgtttttaatttcaagcaaaatcttactgtacttgaatgtgccctgttttgttagcacacctagacttgctgtaactgtactcatgtcccagtatgtacgttctttctatgaaagagaaaacactaatctt

SEQ ID NO: 10546 - DNA, 1816 bp, Homo sapiens
  source 1..1816: mol_type = unassigned DNA
cttcgtttcagccctggcgcggtcctgtggtgaactccttgtctctatggcgactggacgcggtcggatcttgcagcagcactggctcggcctccagacgctgcgcgggcccagcaggggcggtggcgcggcccgggggcgcgccagggcctttgggtgcaggtgactgtagggcctgcgggtggggtcccctggcgggaagcccgtcactgcgcggccccgctctcttcaccgtgtattttattcgtccagcttggcgcaaggcccgtggccgtcttcaacgtgagaaggaaaggggccaggggtcaagctttctgcaggctctgctgccctgaggtgccatgccggaggtggacagcactgggagagctctttctcctgctgttctgggttcctggatggaatgccttcagaaatcttgctgaagatattttcctacttggatgctgtgagccttctgtgtactggatgtgtgagcaggcgcttttatcatctagccaatgacaattttatttggatcggaatctactcaactgctttttcacctgcaagatcaaattggaaatttaattcagtagagaagatagctatgtctatgagctttctgtcagttcaggataaagaagctggttattggaagaaagaatatatcacaaaacaaatagcatctgtaaaagccgcactagctgacattctcaaacctgtcaacccttacacaggccttccagttaagaccaaagaggccctcagaatatttggtttaggttgggcaattatactgaaagaaaaaggtggaaaagaatatatcatggagcatgttgatctttccataaatgacacatcagttactgttatatggtatggcaaaaaatggccatgcctagcatcattgtcaaccttagatttatgtggcatgacaccagtttttaccgactggtataaaactcccaccaaacatagactccgatggcattctttaattgcaaagtacaatctgagtcatttgaccatatctaccatgattggctgtgacagactcattcggatcttctgcctgcaccctggcctcctggtgggagtgtggaagaaggaggaagaactggcttttgttatggcaaatcttcattttcatcaccttgtggagaggagcacattaggctcggctactatcccctatgaactgcctccacatagcccctttttggatgatagccccgagtatggactgcacggctaccaactccatgttgatctgcacagcggtggggttttctacctatgtggtacatttcgcaatctcttcaccaagagaggaaatattgaaaatggacatgtgaagctcattgttatacatttaaaaaataacagagaacacctacctcttattggaaaagttggcctctcgtggaaaactgatatttttgatggctgtataaagagttgttccatgatggacgtaactcttttggatgaacatgggaaacccttttggtgtttcagttccccggtgtgcctgagatcgcctgccacaccctctgacagctctagcttcttgggacagacatacaacgtggactacgttgatgcggaaggaagagtgcacgtggagctggtgtggatcagagagaccgaagaataccttattgtcaacctggtcctttatcttagtatcgcaaaaatcaaccattggtttgggactgaatattagcagtaggtggcaaattattgttgttatttagttgtttatttttgactggctttgttcttggtgttgaaaattaaaataaagcaaatctgcagagtgctgtgcaatgcc

SEQ ID NO: 10547 - DNA, 1721 bp, Homo sapiens
  source 1..1721: mol_type = unassigned DNA
ggcgacgtgcgggcgtgggggcggtgcgtgcactcttcgtttcagccctggcgcggtcctgtggtgaactccttgtctctatggcgactggacgcggtcggatcttgcagcagcactggctcggcctccagacgctgcgcgggcccagcaggggcggtggcgcggcccgggggcgcgccagggcctttgggtgcagaaaggggccaggggtcaagctttctgcaggctctgctgccctgaggtgccatgccggaggtggacagcactgggagagctctttctcctgctgttctgggttcctggatggaatgccttcagaaatcttgctgaagatattttcctacttggatgctgtgagccttctgtgtactggatgtgtgagcaggcgcttttatcatctagccaatgacaattttatttggatcggaatctactcaactgctttttcacctgcaagatcaaattggaaatttaattcagtagagaagatagctatgtctatgagctttctgtcagttcaggataaagaagctggttattggaagaaagaatatatcacaaaacaaatagcatctgtaaaagccgcactagctgacattctcaaacctgtcaacccttacacaggccttccagttaagaccaaagaggccctcagaatatttggtttaggttgggcaattatactgaaagaaaaaggtggaaaagaatatatcatggagcatgttgatctttccataaatgacacatcagttactgttatatggtatggcaaaaaatggccatgcctagcatcattgtcaaccttagatttatgtggcatgacaccagtttttaccgactggtataaaactcccaccaaacatagactccgatggcattctttaattgcaaagtacaatctgagtcatttgaccatatctaccatgattggctgtgacagactcattcggatcttctgcctgcaccctggcctcctggtgggagtgtggaagaaggaggaagaactggcttttgttatggcaaatcttcattttcatcaccttgtggagaggagcacattaggctcggctactatcccctatgaactgcctccacatagcccctttttggatgatagccccgagtatggactgcacggctaccaactccatgttgatctgcacagcggtggggttttctacctatgtggtacatttcgcaatctcttcaccaagagaggaaatattgaaaatggacatgtgaagctcattgttatacatttaaaaaataacagagaacacctacctcttattggaaaagttggcctctcgtggaaaactgatatttttgatggctgtataaagagttgttccatgatggacgtaactcttttggatgaacatgggaaacccttttggtgtttcagttccccggtgtgcctgagatcgcctgccacaccctctgacagctctagcttcttgggacagacatacaacgtggactacgttgatgcggaaggaagagtgcacgtggagctggtgtggatcagagagaccgaagaataccttattgtcaacctggtcctttatcttagtatcgcaaaaatcaaccattggtttgggactgaatattagcagtaggtggcaaattattgttgttatttagttgtttatttttgactggctttgttcttggtgttgaaaattaaaataaagcaaatctgcagagtgctgtgcaatgcc

SEQ ID NO: 10548 - DNA, 1343 bp, Homo sapiens
  source 1..1343: mol_type = unassigned DNA
tttatagacggtgattgggctgctggaagctgggaggggtgagggactggagggagtcggagaaaaagctgacctaatgaaactgtggcaacgtcagcgcttgaggcttgaagagggagacaagctaaaagaggatatccagttgtttcatgatggcatttgcacctccaaaaaacacagatggtcccaaaatgcagacaaagatgagcacctggacacccctaaaccatcagctattgaatgaccgggtatttgaagaaagaagagccctgcttggcaaatggtttgacaaatggacagactctcaaagaagaagaatcctcacaggcctgttggagcgctgctcgctgtcccagcaaaagttctgctgtcgaaagcttcaagagaaaattccagcagaagccctggactttacaaccaagcttccaagggtgttatctttatacatcttttctttcctggaccctcggagcctttgtcgttgtgcacaggtgtgctggcattggaagaaccttgctgagctggaccagctctggatgctgaaatgtttacggtttaactggtacatcaatttctctccaactccctttgagcaggggatctggaagaagcactatattcaaatggtgaaagaacttcatattaccaagcctaagacacccccaaaggatggatttgtaatcgctgacgttcaactagttacaagcaattctccagaggaaaaacagtcccctttatcagcttttcggtcctcttcctctttaagaaagaagaataactcaggggagaaagcacttccaccctggcgatcttctgataagcacccaacagatatcattcgttttaattacctagacaaccgtgaccccatggagactgtccagcaaggaagaagaaaaagaaaccaaatgaccccagacttcagccgacagtcacatgataagaaaaataaattgcaggacagaactaggctaagaaaagcacaatcaatgatgtcgaggagaaatcccttcccactatgtccctaagtgccagctctcccctaaaagttccagctcatctcgcctggcctccccctgagtcagtgggactcccagacactgccaccacagctgaaattctcatgcagcatcctcacaggcaccctgggccccaagcatgactcatccaggttccagagccaaagtggactgaacatggaaagacttttattatagaaatgacaagatgctttgcacagtggagagctgaatttacttggctcccattagaaactctttcagcttaagtacttattgtggtagtgagtcctacggtatttcagtaaaaaggaattcatggca

SEQ ID NO: 10549 - DNA, 1560 bp, Homo sapiens
  source 1..1560: mol_type = unassigned DNA
gtgcctcccctagccgcctcctcccagcagtcccccaggagcgagctgcgagatgccccaaatcggacccctccccagttggaaaaaaaacgactcctgacctttcccagcctcctcggtccgctgaggaacccgcagccccgggcctcgagcagactgctgggactgcggggcggccgggcgcggggccagaggcggggcggggcgggtcgggtcgggggcctttaagaggcgcggtcgccgggaccgacacagacgcggacagcgccgggactcgccgccccgggactcgcgcagcccgcagcgctccggctcctcctctcgcgaccgccctccgcagcgatggacggagacggtgacccagagagcgtgggccagcccgaggaggcaagcccggaggagcagccagaggaggcgagtgctgaggaggagcggccggaggaccagcaggaggaggaggcggcggccgccgccgcgtacctggacgagctgcccgagccgctgctgctgcgcgtgctggccgcactgccggccgccgagctggtgcaggcctgccgcctggtgtgcctgcgctggaaggagctggtggacggcgccccgctgtggctgctcaagtgccagcaggaggggctggtgcccgagggcggcgtggaggaggagcgcgaccactggcagcagttctacttcctgagcaagcggcgccgcaaccttctgcgtaacccgtgtggggaagaggacttggaaggctggtgtgacgtggagcatggtggggacggctggagggtggaggagctgcctggagacagtggggtggagttcacccacgatgagagcgtcaagaagtacttcgcctcctcctttgagtggtgtcgcaaagcacaggtcattgacctgcaggctgagggctactgggaggagctgctggacacgactcagccggccatcgtggtgaaggactggtactcgggccgcagcgacgctggttgcctctacgagctcaccgttaagctactgtccgagcacgagaacgtgctggctgagttcagcagcgggcaggtggcagtgccccaagacagtgacggcgggggctggatggagatctcccacaccttcaccgactacgggccgggcgtccgcttcgtccgcttcgagcacggggggcaggactccgtctactggaagggctggttcggggcccgggtgaccaacagcagcgtgtgggtagaaccctgagcgaccctgcctccactctcccccagctgcctggaggggcaaaggtcgagggtagataggccttaacttagtccatagcgtcctcaccttccccaagccacacatcctcctcccatcccttgctccgatcccagcccctgagcagggagagagaagttttgttggcataggtttgcttaggtagccggcttctagaatgtagatccgtgagggcgtgagcttggactggacccactgctgattccctgcacctagcacagtgcttgccacaaagtgggctctcaataaatattatttgtccaaggaaggaatgaatgaaaaaatgga

SEQ ID NO: 10550 - DNA, 682 bp, Homo sapiens
  source 1..682: mol_type = unassigned DNA
acagacgcggacagcgccgggactcgccgccccgggactcgcgcagcccgcagcgctccggctcctcctctcgcgaccgccctccgcagcgatggacggagacggtgacccagagagcgtgggccagcccgaggaggcaagcccggaggagcagccagaggaggcgagtgctgaggaggagcggccggaggaccagcaggaggaggaggcggcggccgccgccgcgtacctggacgagctgcccgagccgctgctgctgcgcgtgctggccgcactgccggccgccgagctggtgcaggcctgccgcctggtgtgcctgcgctggaaggagctggtggacggcgccccgctgtggctgctcaagtgccagcaggaggggctggtgcccgagggcggcgtggaggaggagcgcgaccactggcagcagttctacttcctgagcaagcggcgccgcaaccttctgcgtaacccgtgtggggaagaggacttggaaggctggtgtgacgtggagcatggtggggacggctggagggtggaggagctgcctggagacagtggggtggagttcacccacgatgagagcgctccagttctcccaggtggtgtcgcaaagcacagagggctactgggaggagctgctggacacgactcagccggccatcgtggtgaaggactggtgaga

SEQ ID NO: 10551 - DNA, 4138 bp, Homo sapiens
  source 1..4138: mol_type = unassigned DNA
aggtacgcggacaagatggcggcggcagcagtcgacagcgcgatggaggtggtgccggcgctggcggaggaggccgcgccggaggtagcgggcctcagctgcctcgtcaacctgccgggtgaggtgctggagtacatcctgtgctgcggctgcgcgagctgtgccagagcagcgggaaggtgtggaaggagcagttccgggtgaggtggccttcccttatgaaacactacagccccaccgactacgtcaattggttggaagagtataaagttcggcaaaaagctgggttagaagcgcggaagattgtagcctcgttctcaaagaggttcttttcagagcacgttccttgtaatggcttcagtgacattgagaaccttgaaggaccagagattttttttgaggatgaactggtgtgtatcctaaatatggaaggaagaaaagctttgacctggaaatactacgcaaaaaaaattctttactacctgcggcaacagaagatcttaaataatcttaaggcctttcttcagcagccagatgactatgagtcgtatcttgaaggtgctgtatatattgaccagtactgcaatcctctctccgacatcagcctcaaagacatccaggcccaaattgacagcatcgtggagcttgtttgcaaaacccttcggggcataaacagtcgccaccccagcttggccttcaaggcaggtgaatcatccatgataatggaaatagaactccagagccaggtgctggatgccatgaactatgtcctttacgaccaactgaagttcaaggggaatcgaatggattactataatgccctcaacttatatatgcatcaggttttgattcgcagaacaggaatcccaatcagcatgtctctgctctatttgacaattgctcggcagttgggagtcccactggagcctgtcaacttcccaagtcacttcttattaaggtggtgccaaggcgcagaaggggcgaccctggacatctttgactacatctacatagatgcttttgggaaaggcaagcagctgacagtgaaagaatgcgagtacttgatcggccagcacgtgactgcagcactgtatggggtggtcaatgtcaagaaggtgttacagagaatggtgggaaacctgttaagcctggggaagcgggaaggcatcgaccagtcataccagctcctgagagactcgctggatctctatctggcaatgtacccggaccaggtgcagcttctcctcctccaagccaggctttacttccacctgggaatctggccagagaaggtgcttgacatcctccagcacatccaaaccctagacccggggcagcacggggcggtgggctacctggtgcagcacactctagagcacattgagcgcaaaaaggaggaggtgggcgtagaggtgaagctgcgctccgatgagaagcacagagatgtctgctactccatcgggctcattatgaagcataagaggtatggctataactgtgtgatctacggctgggaccccacctgcatgatgggacacgagtggatccggaacatgaacgtccacagcctgccgcacggccaccaccagcctttctataacgtgctggtggaggacggctcctgtcgatacgcagcccaagaaaacttggaatataacgtggagcctcaagaaatctcacaccctgacgtgggacgctatttctcagagtttactggcactcactacatcccaaacgcagagctggagatccggtatccagaagatctggagtttgtctatgaaacggtgcagaatatttacagtgcaaagaaagagaacatagatgagtaaagtctagagaggacattgcacctttgctgctgctgctatcttccaagagaacgggactccggaagaagacgtctccacggagccctcgggacctgctgcaccaggaaagccactccaccagtagtgctggttgcctcctactaagtttaaataccgtgtgctcttccccagctgcaaagacaatgttgctctccgcctacactagtgaattaatctgaaaggcactgtgtcagtggcatggcttgtatgcttgtcctgtggtgacagtttgtgacattctgtcttcatgaggtctcacagtcgacgctcctgtaatcattctttgtattcactccattcccctgtctgtctgcatttgtctcagaacatttccttggctggacagatggggttatgcatttgcaataatttccttctgatttctctgtggaacgtgttcggtcccgagtgaggactgtgtgtctttttaccctgaagttagttgcatattcagaggtaaagttgtgtgctatcttggcagcatcttagagatggagacattaacaagctaatggtaattagaatcatttgaatttatttttttctaatatgtgaaacacagatttcaagtgttttatcttttttttttaaatttaaatgggaatataacacagttttcccttccatattcctctcttgagtttatgcacatctctataaatcattagttttctattttattacataaaattcttttagaaaatgcaaatagtgaactttgtgaatggatttttccatactcatctacaattcctccattttaaatgactacttttattttttaatttaaaaaatctacttcagtatcatgagtaggtcttacatcagtgatgggttctttttgtagtgagacatacaaatctgatgttaatgtttgctcttagaagtcatactccatggtcttcaaagaccaaaaaatgaggttttgcttttgtaatcaggaaaaaaaaaaattaatgaaccttaaaaaaaaaaaaaaaggttttgaagggaaaaaaagtggtttcacacctcttgttattccttagagtcacttcaaggcctgtttgaatgtggcaggttagaaagagagagaatgtctttcatttgaagagtgttggacttgtgtgaaaggagatgtgcgtgttggaatctgcttttccaagccgccagggtcctgacggcagcaggacgaagcctgttgtggcgtcttctgggaaagcctgaccgtgtgttcggacggcactggctcctttccgaagttctcagtaactgagcccagagtaactgcacgcctttgtgcagctctggagctccaccaactctcggcctgccagttctcaagcgagctaatcttgtcattaatcgatagaagctaacttccgaagttaggacctagttactttgctctcaacatttaaaataatgcagttgctctagtgaatggggcgttaggggcctgtctctgcacctgtctgtccatctgcatgcagtattctcacccatgttgaatgcctgctgcttgtttaccctttggaaaccctggggtgaccaaggtttggaaagccacctgagaccacttcatagcaagggaaggctttaagcagttactagaaagagatggggatttggcccctggctcctccagcctgaatgagctatttaatccactgtccatgttcctcatcagtcaaatccaaagtcaaaggatttgaacctgcatctggaaacgtaaccactcacagcacctggcccgccaaggttgggaggattgtacactactttcatttaaaggggaaagtttgataatacggaattaattaatatgaatgagatgcattaataagaacctgagcatgctgagagttgcaattgttggttttctggtttgattgatttccttttttcttagacacatcaaagtcaagaaagatggttttacctttactgacccagctgtacatatgtatctagactgtttttaaatgtctttcttcatgaatgcttcatggggctccaggaagcctgtatcacctgtgtaagttggtatttgggcactttatatttttctaaaaacgtgttttggatcctgtactctaataaatcataagtttctttttaaaaattttccaaaacttttctccattttaaaaagccctgttataaacgttgaactttcacaatgttaaaatgttaaatatttggatatagcaacttcttttctcttcaaatgaatgccaagatttttttgtacaatgattaataaatggaacttatccagagaaacc

SEQ ID NO: 10552 - DNA, 2906 bp, Homo sapiens
  source 1..2906: mol_type = unassigned DNA
atggcggcggcagcagtcgacagcgcgatggaggtggtgccggcgctggcggaggaggccgcgccggaggtagcgggcctcagctgcctcgtcaacctgccgggtgaggtgctggagtacatcctgtgctgcggctcgctgacggccgccgacatcggccgtgtctccagcacctgccggcggctgcgcgagctgtgccagagcagcgggaaggtgtggaaggagcagttccgggtgaggtggccttcccttatgaaacactacagccccaccgactacgtcaattggttggaagagtataaagttcggcaaaaagctgggttagaagcgcggaagattgtagcctcgttctcaaagaggttcttttcagagcacgttccttgtaatggcttcagtgacattgagaaccttgaaggaccagagattttttttgaggatgaactggtgtgtatcctaaatatggaaggaagaaaagctttgacctggaaatactacgcaaaaaaaattctttactacctgcggcaacagaagatcttaaataatcttaaggcctttcttcagcagccagatgactatgagtcgtatcttgaaggtgctgtatatattgaccagtactgcaatcctctctccgacatcagcctcaaagacatccaggcccaaattgacagcatcgtggagcttgtttgcaaaacccttcggggcataaacagtcgccaccccagcttggccttcaaggcaggtgaatcatccatgataatggaaatagaactccagagccaggtgctggatgccatgaactatgtcctttacgaccaactgaagttcaaggggaatcgaatggattactataatgccctcaacttatatatgcatcaggttttgattcgcagaacaggaatcccaatcagcatgtctctgctctatttgacaattgctcggcagttgggagtcccactggagcctgtcaacttcccaagtcacttcttattaaggtggtgccaaggcgcagaaggggcgaccctggacatctttgactacatctacatagatgcttttgggaaaggcaagcagctgacagtgaaagaatgcgagtacttgatcggccagcacgtgactgcagcactgtatggggtggtcaatgtcaagaaggtgttacagagaatggtgggaaacctgttaagcctggggaagcgggaaggcatcgaccagtcataccagctcctgagagactcgctggatctctatctggcaatgtacccggaccaggtgcagcttctcctcctccaagccaggctttacttccacctgggaatctggccagagaagtctttctgtcttgttttgaaggtgcttgacatcctccagcacatccaaaccctagacccggggcagcacggggcggtgggctacctggtgcagcacactctagagcacattgagcgcaaaaaggaggaggtgggcgtagaggtgaagctgcgctccgatgagaagcacagagatgtctgctactccatcgggctcattatgaagcataagaggtatggctataactgtgtgatctacggctgggaccccacctgcatgatgggacacgagtggatccggaacatgaacgtccacagcctgccgcacggccaccaccagcctttctataacgtgctggtggaggacggctcctgtcgatacgcagcccaagaaaacttggaatataacgtggagcctcaagaaatctcacaccctgacgtgggacgctatttctcagagtttactggcactcactacatcccaaacgcagagctggagatccggtatccagaagatctggagtttgtctatgaaacggtgcagaatatttacagtgcaaagaaagagaacatagatgagtaaagtctagagaggacattgcacctttgctgctgctgctatcttccaagagaacgggactccggaagaagacgtctccacggagccctcgggacctgctgcaccaggaaagccactccaccagtagtgctggttgcctcctactaagtttaaataccgtgtgctcttccccagctgcaaagacaatgttgctctccgcctacactagtgaattaatctgaaaggcactgtgtcagtggcatggcttgtatgcttgtcctgtggtgacagtttgtgacattctgtcttcatgaggtctcacagtcgacgctcctgtaatcattctttgtattcactccattcccctgtctgtctgcatttgtctcagaacatttccttggctggacagatggggttatgcatttgcaataatttccttctgatttctctgtggaacgtgttcggtcccgagtgaggactgtgtgtctttttaccctgaagttagttgcatattcagaggtaaagttgtgtgctatcttggcagcatcttagagatggagacattaacaagctaatggtaattagaatcatttgaatttatttttttctaatatgtgaaacacagatttcaagtgttttatcttttttttttaaatttaaatgggaatataacacagttttcccttccatattcctctcttgagtttatgcacatctctataaatcattagttttctattttattacataaaattcttttagaaaatgcaaatagtgaactttgtgaatggatttttccatactcatctacaattcctccattttaaatgactacttttattttttaatttaaaaaatctacttcagtatcatgagtaggtcttacatcagtgatgggttctttttgtagtgagacatacaaatctgatgttaatgtttgctcttagaagtcatactccatggtcttcaaagaccaaaaaatgaggttttgcttttgtaatcaggaaaaaaaaaaattaatgaaccttaaaaaaaaaaaaaaa

SEQ ID NO: 10553 - DNA, 4687 bp, Homo sapiens
  source 1..4687: mol_type = unassigned DNA
cagtaggcggggccaggcggggcgcccgggcactctcgcacgcgcgcgcgcggcggccccaggtacgcggacaagatggcggcggcagcagtcgacagcgcgatggaggtggtgccggcgctggcggaggaggccgcgccggaggtagcgggcctcagctgcctcgtcaacctgccgggtgaggtgctggagtacatcctgtgctgcggctcgctgacggccgccgacatcggccgtgtctccagcacctgccggcggctgcgcgagctgtgccagagcagcgggaaggtgtggaaggagcagttccgggtgaggtggccttcccttatgaaacactacagccccaccgactacgtcaattggttggaagagtataaagttcggcaaaaagctgggttagaagcgcggaagattgtagcctcgttctcaaagaggttcttttcagagcacgttccttgtaatggcttcagtgacattgagaaccttgaaggaccagagattttttttgaggatgaactggtgtgtatcctaaatatggaaggaagaaaagctttgacctggaaatactacgcaaaaaaaattctttactacctgcggcaacagaagatcttaaataatcttaaggcctttcttcagcagccagatgactatgagtcgtatcttgaaggtgctgtatatattgaccagtactgcaatcctctctccgacatcagcctcaaagacatccaggcccaaattgacagcatcgtggagcttgtttgcaaaacccttcggggcataaacagtcgccaccccagcttggccttcaaggcaggtgaatcatccatgataatggaaatagaactccagagccaggtgctggatgccatgaactatgtcctttacgaccaactgaagttcaaggggaatcgaatggattactataatgccctcaacttatatatgcatcaggttttgattcgcagaacaggaatcccaatcagcatgtctctgctctatttgacaattgctcggcagttgggagtcccactggagcctgtcaacttcccaagtcacttcttattaaggtggtgccaaggcgcagaaggggcgaccctggacatctttgactacatctacatagatgcttttgggaaaggcaagcagctgacagtgaaagaatgcgagtacttgatcggccagcacgtgactgcagcactgtatggggtggtcaatgtcaagaaggtgttacagagaatggtgggaaacctgttaagcctggggaagcgggaaggcatcgaccagtcataccagctcctgagagactcgctggatctctatctggcaatgtacccggaccaggtgcagcttctcctcctccaagccaggctttacttccacctgggaatctggccagagaaggtgcttgacatcctccagcacatccaaaccctagacccggggcagcacggggcggtgggctacctggtgcagcacactctagagcacattgagcgcaaaaaggaggaggtgggcgtagaggtgaagctgcgctccgatgagaagcacagagatgtctgctactccatcgggctcattatgaagcataagaggtatggctataactgtgtgatctacggctgggaccccacctgcatgatgggacacgagtggatccggaacatgaacgtccacagcctgccgcacggccaccaccagcctttctataacgtgctggtggaggacggctcctgtcgatacgcagcccaagaaaacttggaatataacgtggagcctcaagaaatctcacaccctgacgtgggacgctatttctcagagtttactggcactcactacatcccaaacgcagagctggagatccggtatccagaagatctggagtttgtctatgaaacggtgcagaatatttacagtgcaaagaaagagaacatagatgagtaaagtctagagaggacattgcacctttgctgctgctgctatcttccaagagaacgggactccggaagaagacgtctccacggagccctcgggacctgctgcaccaggaaagccactccaccagtagtgctggttgcctcctactaagtttaaataccgtgtgctcttccccagctgcaaagacaatgttgctctccgcctacactagtgaattaatctgaaaggcactgtgtcagtggcatggcttgtatgcttgtcctgtggtgacagtttgtgacattctgtcttcatgaggtctcacagtcgacgctcctgtaatcattctttgtattcactccattcccctgtctgtctgcatttgtctcagaacatttccttggctggacagatggggttatgcatttgcaataatttccttctgatttctctgtggaacgtgttcggtcccgagtgaggactgtgtgtctttttaccctgaagttagttgcatattcagaggtaaagttgtgtgctatcttggcagcatcttagagatggagacattaacaagctaatggtaattagaatcatttgaatttatttttttctaatatgtgaaacacagatttcaagtgttttatcttttttttttaaatttaaatgggaatataacacagttttcccttccatattcctctcttgagtttatgcacatctctataaatcattagttttctattttattacataaaattcttttagaaaatgcaaatagtgaactttgtgaatggatttttccatactcatctacaattcctccattttaaatgactacttttattttttaatttaaaaaatctacttcagtatcatgagtaggtcttacatcagtgatgggttctttttgtagtgagacatacaaatctgatgttaatgtttgctcttagaagtcatactccatggtcttcaaagaccaaaaaatgaggttttgcttttgtaatcaggaaaaaaaaaaattaatgaaccttaaaaaaaaaaaaaaaggttttgaagggaaaaaaagtggtttcacacctcttgttattccttagagtcacttcaaggcctgtttgaatgtggcaggttagaaagagagagaatgtctttcatttgaagagtgttggacttgtgtgaaaggagatgtgcgtgttggaatctgcttttccaagccgccagggtcctgacggcagcaggacgaagcctgttgtggcgtcttctgggaaagcctgaccgtgtgttcggacggcactggctcctttccgaagttctcagtaactgagcccagagtaactgcacgcctttgtgcagctctggagctccaccaactctcggcctgccagttctcaagcgagctaatcttgtcattaatcgatagaagctaacttccgaagttaggacctagttactttgctctcaacatttaaaataatgcagttgctctagtgaatggggcgttaggggcctgtctctgcacctgtctgtccatctgcatgcagtattctcacccatgttgaatgcctgctgcttgtttaccctttggaaaccctggggtgaccaaggtttggaaagccacctgagaccacttcatagcaagggaaggctttaagcagttactagaaagagatggggatttggcccctggctcctccagcctgaatgagctatttaatccactgtccatgttcctcatcagtcaaatccaaagtcaaaggatttgaacctgcatctggaaacgtaaccactcacagcacctggcccgccaaggttgggaggattgtacactactttcatttaaaggggaaagtttgataatacggaattaattaatatgaatgagatgcattaataagaacctgagcatgctgagagttgcaattgttggttttctggtttgattgatttccttttttcttagacacatcaaagtcaagaaagatggttttacctttactgacccagctgtacatatgtatctagactgtttttaaatgtctttcttcatgaatgcttcatggggctccaggaagcctgtatcacctgtgtaagttggtatttgggcactttatatttttctaaaaacgtgttttggatcctgtactctaataaatcataagtttctttttaaaaattttccaaaacttttctccattttaaaaagccctgttataaacgttgaactttcacaatgttaaaatgttaaatatttggatatagcaacttcttttctcttcaaatgaatgccaagatttttttgtacaatgattaataaatggaacttatccagagaaaccacgcaaatggcctgcccaatttcgtttgaggacagaaagcccagccatgacttgagtagaatgtctctcacctctcttcggatctaaatatgaaaagtatgttctgctgaatttttctgagcattggtgagcggacagcctacctgtaaaccatgacctccttgccaaacgttaattttatcagctcactagtaacctttgagaattatctggttgtcatgcaaagattgcactttctgaattatgttaaaacacatgttgtaaaatgagaactgctcatgctttgaaagaaaaccaggttcttcgtgcgttctgttgccgttgatttgaatggctgtgctgtatacgatgtgtccagaatgtcttcagagcactgtttccgtgtgatgttactacctactatgtgggaggaaaaaaggttataggttaaacaaagtcaa

SEQ ID NO: 10554 - DNA, 2656 bp, Homo sapiens
  source 1..2656: mol_type = unassigned DNA
caggtacgcggacaagatggcggcggcagcagtcgacagcgcgatggaggtggtgccggcgctggcggaggaggccgcgccggaggtagcgggcctcagctgcctcgtcaacctgccggcggctgcgcgagctgtgccagagcagcgggaaggtgtggaaggagcagttccgggtgaggtggccttcccttatgaaacactacagccccaccgactacgtcaattggttggaagagtataaagttcggcaaaaagctgggttagaagcgcggaagattgtagcctcgttctcaaagaggttcttttcagagcacgttccttgtaatggcttcagtgacattgagaaccttgaaggaccagagattttttttgaggatgaactggtgtgtatcctaaatatggaaggaagaaaagctttgacctggaaatactacgcaaaaaaaattctttactacctgcggcaacagaagatcttaaataatcttaaggcctttcttcagcagccagatgactatgagtcgtatcttgaaggtgctgtatatattgaccagtactgcaatcctctctccgacatcagcctcaaagacatccaggcccaaattgacagcatcgtggagcttgtttgcaaaacccttcggggcataaacagtcgccaccccagcttggccttcaaggcaggtgaatcatccatgataatggaaatagaactccagagccaggtgctggatgccatgaactatgtcctttacgaccaactgaagttcaaggggaatcgaatggattactataatgccctcaacttatatatgcatcaggttttgattcgcagaacaggaatcccaatcagcatgtctctgctctatttgacaattgctcggcagttgggagtcccactggagcctgtcaacttcccaagtcacttcttattaaggtggtgccaaggcgcagaaggggaaggcatcgaccagtcataccagctcctgagagactcgctggatctctatctggcaatgtacccggaccaggtgcagcttctcctcctccaagccaggctttacttccacctgggaatctggccagagaaggtgcttgacatcctccagcacatccaaaccctagacccggggcagcacggggcggtgggctacctggtgcagcacactctagagcacattgagcgcaaaaaggaggaggtgggcgtagaggtgaagctgcgctccgatgagaagcacagagatgtctgctactccatcgggctcattatgaagcataagaggtatggctataactgtgtgatctacggctgggaccccacctgcatgatgggacacgagtggatccggaacatgaacgtccacagcctgccgcacggccaccaccagcctttctataacgtgctggtggaggacggctcctgtcgatacgcagcccaagaaaacttggaatataacgtggagcctcaagaaatctcacaccctgacgtgggacgctatttctcagagtttactggcactcactacatcccaaacgcagagctggagatccggtatccagaagatctggagtttgtctatgaaacggtgcagaatatttacagtgcaaagaaagagaacatagatgagtaaagtctagagaggacattgcacctttgctgctgctgctatcttccaagagaacgggactccggaagaagacgtctccacggagccctcgggacctgctgcaccaggaaagccactccaccagtagtgctggttgcctcctactaagtttaaataccgtgtgctcttccccagctgcaaagacaatgttgctctccgcctacactagtgaattaatctgaaaggcactgtgtcagtggcatggcttgtatgcttgtcctgtggtgacagtttgtgacattctgtcttcatgaggtctcacagtcgacgctcctgtaatcattctttgtattcactccattcccctgtctgtctgcatttgtctcagaacatttccttggctggacagatggggttatgcatttgcaataatttccttctgatttctctgtggaacgtgttcggtcccgagtgaggactgtgtgtctttttaccctgaagttagttgcatattcagaggtaaagttgtgtgctatcttggcagcatcttagagatggagacattaacaagctaatggtaattagaatcatttgaatttatttttttctaatatgtgaaacacagatttcaagtgttttatcttttttttttaaatttaaatgggaatataacacagttttcccttccatattcctctcttgagtttatgcacatctctataaatcattagttttctattttattacataaaattcttttagaaaatgcaaatagtgaactttgtgaatggatttttccatactcatctacaattcctccattttaaatgactacttttattttttaatttaaaaaatctacttcagtatcatgagtaggtcttacatcagtgatgggttctttttgtagtgagacatacaaatctgatgttaatgtttgctcttagaagtcatactccatggtcttcaaagaccaaaaaatgaggttttgcttttgtaatcaggaaaaaaaaaaattaatgaaccttaaaaaaaaaaaaaaaggttttgaaggg

SEQ ID NO: 10555 - DNA, 3483 bp, Homo sapiens
  source 1..3483: mol_type = unassigned DNA
gtggcgcggacgcctgctcagtgcgcgccggccgggcaaccctatgctggcgtaatcgggttcctccgagccgccgtaggactggttccggcgggctggtgaggaatggagccggtaggctgctgcggcgagtgccgcggctcctccgtagacccgcggagcaccttcgtgttgagtaacctggcggaggtggtggagcgtgtgctcaccttcctgcccgccaaggcgttgctgcgggtggcctgcgtgtgccgcttatggagggagtgtgtgcgcagagtattgcggacccatcggagcgtaacctggatctccgcaggcctggcggaggccggccacctggaggggcattgcttggttcgcgtggtagcagaggagcttgagaatgttcgcatcttaccacatacagttctttacatggctgattcagaaactttcattagtctggaagagtgtcgtggccataagagagcaaggaaaagaactagtatggaaacagcacttgcccttgagaagctattccccaaacaatgccaagtccttgggattgtgaccccaggaattgtagtgactccaatgggatcaggtagcaatcgacctcaggaaatagaaattggagaatctggttttgctttattattccctcaaattgaaggaataaaaatacaaccctttcattttattaaggatccaaagaatttaacattagaaagacatcaactcactgaagtaggtcttttagataaccctgaacttcgtgtggtccttgtctttggttataattgctgtaaggtgggagccagtaattatctgcagcaagtagtcagcactttcagtgatatgaatatcatcttggctggaggccaggtggacaacctgtcatcactgacttctgaaaagaaccctctggatattgatgcctcgggtgtggttggactgtcatttagtggacaccgaatccagagtgccactgtgctcctcaacgaggacgtcagtgatgagaagactgctgaggctgcgatgcagcgcctcaaagcggccaacattccagagcataacaccattggcttcatgtttgcatgcgttggcaggggctttcagtattacagagccaaggggaatgttgaggctgatgcatttagaaagttttttcctagtgttcccttattcggcttctttggaaatggagaaattggatgtgatcggatagtcactgggaactttatattgaggaaatgtaatgaggtaaaagatgatgatctgtttcatagctatacaacaataatggcactcatacatctggggtcatctaaataataattaaagtggctttcataatatgtaacttttgggttctgcctttttcagaaaatggaaacttgggccatgtgtatttcaaacaaaaataactttagatatatcttttttgtagctttgattgatgctctaagatcacatgagggtagtatttaatatattagatgaaggacaactttggacataacactgactaggagttgagagcttttgcatcaggcagaagcaaactgattatagttgtgttgcaccagatcatgtagctgctgtgtaacatgaccttaaatagtcttcctgcataggaagagcaaaagggtattcatcaataggatatagatttaagacattccctgactaccccttgcgttgttaggtgatgtcttttagcagaatcatgaagaccttttttctcccttaataaaggagaaaaatatactgatggctggagaaatttttctctgcctttcagttttatgaattttttcagaagtaacaatattattattgactttttacttatttgataaaaattaaagaactatttttgttttggtcagataaattgacaagactaatcagtattttattataagtaaaagatttttcttctttccttaaaaatatttttttttcacctaggtctaaatagctaactaactggtagaccagagtattacatcatcttattttggttttataccaataaaacatagcgtggaactcattcaggtaatgttttgcatttcattgcttttggatgaacaaaggaagtaaactaatcctttataaatgaaaacccagaatagttggtatgtcagctagtcattcctgtcatattcccagtagaatgattttcaagtttgaatttctgtacaaatatctaaataagagatgtgcagagagcaccaattttccttcaatatccattctttacttttcacataatgatagaacctttgatttttcaagtgggtatgcctcctagaataaagactacatttcccagtctcctgtgcaggtatgactgtgttctggacaatggaatgtgaggggaaacgattttttgtgtccttaaaatggcatgaccatttatttgcccctttctccatcctgttgcttggaatgtggatctggtagtgagccatcttggaccctgaagaggaggcaacacaccattgtagaagaaaaacaacagaaggatcctggtccctgtacgacctcattgaagaaacaccataagtggcgtggactatctacctccagactgttttacaagagagaaattagcatattccatctaatacagtatgatgtaactaatgttacttttgtaacagtcagtggtttgttctaacaggacagtagaacacttgcaaggtaagtaaaaccaaatgtattagcattattcctgcttttccttttttgtcacttttatcctttttttaaaactgaaaatatttttctcttgctatttatatatatatgataaaaatgcttggaagagtcctttaatttatggttattctaaatcctagttcctgaggcaagtccaaagaaaaatttgtcaaaacttttcatctatgaatatttatatttagctcttgctatttagctattatcaaaatacctcaaaattttagtccttgaatgtgctcatatagcccataaggcaaatattttttaaactttattgtccctgatattaaccagaattggttgaatagtagaggaaaagggatttttaaaactgaaaatatgaacaaaatgagccttagaattgaatggattattttaaacaaattaatactcatataaaatgttttgctgcttctcaaagagtctgatacagggtaatttcatacaatatttgatgttgttaaagcattcctttttatagctgagcctttggagcttgttatgaacagtaaaatcatttagtcacatggttgtaaccttagtgcaaagtaaaaagggaaaagttgacctaatagaaacaatagtagtattgataagaacaaaagtcatcctccctgcctctcagaggccctgaagtcctgtgaggaagggaaatagtaatttaaccaaagttaaatctgtgtaactcatttattacaattttgaaaggcttgtcttagaagcattaaaggagtattagctaaaaacaaa

SEQ ID NO: 10556 - DNA, 1822 bp, Homo sapiens
  source 1..1822: mol_type = unassigned DNA
gtggcgcggacgcctgctcagtgcgcgccggccgggcaaccctatgctggcgtaatcgggttcctccgagccgccgtaggactggttccggcgggctggtgaggaatggagccggtaggctgctgcggcgagtgccgcggctcctccgtagacccgcggagcaccttcgtgttgagtaacctggcggaggtggtggagcgtgtgctcaccttcctgcccgccaaggcgttgctgcgggtggcctgcgtgtgccgcttatggagggagtgtgtgcgcagagtattgcggacccatcggagcgtaacctggatctccgcaggcctggcggaggccggccacctggaggggcattgcttggttcgcgtggtagcagaggagcttgagaatgttcgcatcttaccacatacagttctttacatggctgattcagaaactttcattagtctggaagagtgtcgtggccataagagagcaaggaaaagaactagtatggaaacagcacttgcccttgagaagctattccccaaacaatgccaagtccttgggattgtgaccccaggaattgtagtgactccaatgggatcaggtagcaatcgacctcaggaaatagaaattggagaatctggttttgctttattattccctcaaattgaaggaataaaaatacaaccctttcattttattaaggatccaaagaatttaacattagaaagacatcaactcactgaagtaggtcttttagataaccctgaacttcgtgtggtccttgtctttggttataattgctgtaaggtgggagccagtaattatctgcagcaagtagtcagcactttcagtgatatgaatatcatcttggctggaggccaggtggacaacctgtcatcactgacttctgaaaagtatgtcttgtgtgcttctgatttcgtctgtgaatgaagggaaatggtctcaggttttgtcactttggggttaacaatttaaaaaacgtgtttaaagaattattaagataatagttcattccattttgtagtagacattggctaaggggcttactgaacataattctgcttacggttgaataattacatttttatatatattgtccttcaagaacttccttgagtcacattctccttaaaatttgacattgcctgttgatctttcctttgacagatgtggtactctgtgtgacctcaatgtgtcacctcctttctagtttcctcctttaaaggaaacacatggttagagtgtatctttatggcaaaacttctcagagcttctaatatgcccagtgctgtggaaatctggaaggagaatagcattacctgtgacagttcccaaatgtgtttggtcacaaaacttttttccacagaatgtcttgcaagtcgtactggtttttggaaattctgtattagatcttttgaaaggctttttcaagcttaaaaattgtggatcttttttgttactaaggcttttgctttcaaagataaaaatatttgctcttctgtcttgggagccattacttcctttccatcttgaatgaaaatacatatcattttgagtttgaaacaattaggtggacataaatatcatttgtttccagcaggaaaatcagaccctaccccaccctcaatgcttgtaaacactactatttgtttcccactctgtttaatatttgcatcctagagtggtgacatggggacagactgttgcagatcagtatctataagaataatgtaagtcatcctagttatagtctctcttctggttatctctatgagctagatctgggaaaatagctaaagttgaggtccctggactg

SEQ ID NO: 10557 - DNA, 1402 bp, Homo sapiens
  source 1..1402: mol_type = unassigned DNA
aggactggttccggcgggctggtgaggaatggagccggtaggctgctgcggcgagtgccgcggctcctccgtagacccgcggagcaccttcgtgttgagtaacctggcggaggtggtggagcgtgtgctcaccttcctgcccgccaaggcgttgctgcgggtggcctgaatgttcgcatcttaccacatacagttctttacatggctgattcagaaactttcattagtctggaagagtgtcgtggccataagagagcaaggaaaagaactagtatggaaacagcacttgcccttgagaagctattccccaaacaatgccaagtccttgggattgtgaccccaggaattgtagtgactccaatgggatcaggtagcaatcgacctcaggaaatagaaattggagaatctggttttgctttattattccctcaaattgaaggaataaaaatacaaccctttcattttattaaggatccaaagaatttaacattagaaagacatcaactcactgaagtaggtcttttagataaccctgaacttcgtgtggtccttgtctttggttataattgctgtaaggtgggagccagtaattatctgcagcaagtagtcagcactttcagtgatatgaatatcatcttggctggaggccaggtggacaacctgtcatcactgacttctgaaaagaaccctctggatattgatgcctcgggtgtggttggactgtcatttagtggacaccgaatccagagtgccactgtgctcctcaacgaggacgtcagtgatgagaagactgctgaggctgcgatgcagcgcctcaaagcggccaacattccagagcataacaccattggcttcatgtttgcatgcgttggcaggggctttcagtattacagagccaaggggaatgttgaggctgatgcatttagaaagttttttcctagtgttcccttattcggcttctttggaaatggagaaattggatgtgatcggatagtcactgggaactttatattgaggaaatgtaatgaggtaaaagatgatgatctgtttcatagctatacaacaataatggcactcatacatctggggtcatctaaataataattaaagtggctttcataatatgtaacttttgggttctgcctttttcagaaaatggaaacttgggccatgtgtatttcaaacaaaaataactttagatatatcttttttgtagctttgattgatgctctaagatcacatgagggtagtatttaatatattagatgaaggacaactttggacataacactgactaggagttgagagcttttgcatcaggcagaagcaaactgattatagttgtgttgcaccagatcatgtagctgctgtgtaacatgaccttaaatagtcttcctgcata

SEQ ID NO: 10558 - DNA, 2276 bp, Homo sapiens
  source 1..2276: mol_type = unassigned DNA
gagagaagggaggggaacaaggatagagcgctcgccaacggccgacgctccaggccgtcccgcccagcgcagctgcacccaatcacaatgctcagatcgggaggtggagccaatcaggtccaaccaagaggaggggacaccggcactccactagcaggaaaacgggccgagggaccgcaagcagggggtgcctagtcctcgtcccccaaagaccaatcgtaagccagatacaggcgagtgactgtcaagaaggccaattagagcctccgaagggaatctggacctgcctcttctctgagggacggctctacctaccaatagcatgggcgagaaggcggtccctttgctaaggaggaggcgggtgaagagaagctgcccttcttgtggctcggagcttggggttgaagagaagagggggaaaggaaatccgatttccatccagttgttccccccagagctggtggagcatatcatctcattcctcccagtcagagaccttgttgccctcggccagacctgccgctacttccacgaagtgtgcgatggggaaggcgtgtggagacgcatctgtcgcagactcagtccgcgcctccaagatcagggttctggagtccggccctggaagagagctgccattctgaactacacgaagggcctgtatttccaggcatttggaggccgccgccgatgtctcagcaagagcgtggcccccttgctagcccacggctaccgccgcttcttgcccaccaaggatcacgtcttcattcttgactacgtggggaccctcttcttcctcaaaaatgccctggtctccaccctcggccagatgcagtggaagcgggcctgtcgctatgttgtgttgtgtcgtggagccaaggattttgcctcggacccaaggtgtgacacagtttaccgtaaatacctctacgtcttggccactcgggagccgcaggaagtggtgggtaccaccagcagccgggcctgtgactgtgttgaggtctatctgcagtctagtgggcagcgggtcttcaagatgacattccaccactcaatgaccttcaagcagatcgtgctggttggtcaggagacccagcgggctctactgctcctcacagaggaaggaaagatctactctttggtagtgaatgagacccagcttgaccagccacgctcctacacggttcagctggccctgaggaaggtgtcccactacctgcctcacctgcgcgtggcctgcatgacttccaaccagagcagcaccctctacgtcacagaccaggggggagtgtattttgaggtgcataccccaggggtgtatcgcgatctctttgggacccttcaagcctttgaccccctggaccagcagatgccgcttgctctctcactgcctgccaagatcctattctgtgctcttggctacaaccaccttggcctggtggatgaatttggccgaatcttcatgcaaggaaataacagatacgggcagctaggaacaggggacaaaatggaccgaggggaacccacacaggtttgttacctgcagcggcccatcaccctgtggtgcggcctcaaccactccctggtgctgagccagagctcagagttcagcaaggagctgctgggctgcggctgtggggctgggggccgcctcccaggctggcccaaggggagtgcctccttcgtcaagctccaagtcaaggtccctctgtgtgcctgtgccctctgtgccaccagggagtgcctatacatcctgtccagccacgacattgagcagcacgccccctatcgccacctgccagccagcagggtggtggggactcctgagcccagcctgggggccagagcaccccaggaccccggggggatggcccaggcctgcgaggagtacctcagccagatccacagttgccaaacgttgcaggaccgcacggagaagatgaaggagatcgtagggtggatgcccctgatggccgcacagaaggacttcttctgggaggccctggacatgctgcagagggctgaaggaggcgggggtggtgtagggcccccagcccctgagacctaatccccctcatgctagcctagtccctggaggagggagtccggccccaggccagggactaaggagcaatgaccattgtgcacatgcgtgtgggaaggggttgctagggggtggggacggctaaccagggtaagaatgttcagggggctgcccaggaggggcccccaacctgactatcatggacaagagatttgatggatagaataaaaggctg

SEQ ID NO: 10559 - DNA, 2088 bp, Homo sapiens
  source 1..2088: mol_type = unassigned DNA
gctcgccaacggccgacgctccaggccgtcccgcccagcgcagctgcacccaatcacaatgctcagatcgggaggtggagccaatcaggtccaaccaagaggaggggacaccggcactccactagcaggaaaacgggccgagggaccgcaagcagggggtgcctagtcctcgtcccccaaagaccaatcgtaagccagatacaggcgagtgactgtcaagaaggccaattagagcctccgaagggaatctggacctgcctcttctctgagggacggctctacctaccaatagcatgggcgagaaggcggtccctttgctaaggaggaggcgggtgaagagaagctgcccttcttgtggctcggagcttggggttgaagagaagagggggaaaggaaatccgatttccatccagttgttccccccagagctggtggagcatatcatctcattcctcccagtcagagaccttgttgccctcggccagacctgccgctacttccacgaagtgtgcgatggggaaggcgtgtggagacgcatctgtcgcagactcagtccgcgcctccaagatcaggacacgaagggcctgtatttccaggcatttggaggccgccgccgatgtctcagcaagagcgtggcccccttgctagcccacggctaccgccgcttcttgcccaccaaggatcacgtcttcattcttgactacgtggggaccctcttcttcctcaaaaatgccctggtctccaccctcggccagatgcagtggaagcgggcctgtcgctatgttgtgttgtgtcgtggagccaaggattttgcctcggacccaaggtgtgacacagtttaccgtaaatacctctacgtcttggccactcgggagccgcaggaagtggtgggtaccaccagcagccgggcctgtgactgtgttgaggtctatctgcagtctagtgggcagcgggtcttcaagatgacattccaccactcaatgaccttcaagcagatcgtgctggttggtcaggagacccagcgggctctactgctcctcacagaggaaggaaagatctactctttggtagtgaatgagacccagcttgaccagccacgctcctacacggttcagctggccctgaggaaggtgtcccactacctgcctcacctgcgcgtggcctgcatgacttccaaccagagcagcaccctctacgtcacagatcctattctgtgctcttggctacaaccaccttggcctggtggatgaatttggccgaatcttcatgcaaggaaataacagatacgggcagctaggaacaggggacaaaatggaccgaggggaacccacacaggtttgttacctgcagcggcccatcaccctgtggtgcggcctcaaccactccctggtgctgagccagagctcagagttcagcaaggagctgctgggctgcggctgtggggctgggggccgcctcccaggctggcccaaggggagtgcctccttcgtcaagctccaagtcaaggtccctctgtgtgcctgtgccctctgtgccaccagggagtgcctatacatcctgtccagccacgacattgagcagcacgccccctatcgccacctgccagccagcagggtggtggggactcctgagcccagcctgggggccagagcaccccaggaccccggggggatggcccaggcctgcgaggagtacctcagccagatccacagttgccaaacgttgcaggaccgcacggagaagatgaaggagatcgtagggtggatgcccctgatggccgcacagaaggacttcttctgggaggccctggacatgctgcagagggctgaaggaggcgggggtggtgtagggcccccagcccctgagacctaatccccctcatgctagcctagtccctggaggagggagtccggccccaggccagggactaaggagcaatgaccattgtgcacatgcgtgtgggaaggggttgctagggggtggggacggctaaccagggtaagaatgttcagggggctgcccaggaggggcccccaacctgactatcatggacaagagatttgatggatagaataaaaggctgcagcg

SEQ ID NO: 10560 - DNA, 2087 bp, Homo sapiens
  source 1..2087: mol_type = unassigned DNA
taggctggggacatggtgtgggaaagccagcaggaacgggggggccaagggcctaggagacaggagggcaggagcagggagggggcaatcaggatggtcaggggaagccagagacggaagctgcaaaaattcaccaggctgtgtggacgggaggaggggctccgggtgaagagaagctgcccttcttgtggctcggagcttggggttgaagagaagagggggaaaggaaatccgatttccatccagttgttccccccagagctggtggagcatatcatctcattcctcccagtcagagaccttgttgccctcggccagacctgccgctacttccacgaagtgtgcgatggggaaggcgtgtggagacgcatctgtcgcagactcagtccgcgcctccaagatcagggttctggagtccggccctggaagagagctgccattctgaactacacgaagggcctgtatttccaggcatttggaggccgccgccgatgtctcagcaagagcgtggcccccttgctagcccacggctaccgccgcttcttgcccaccaaggatcacgtcttcattcttgactacgtggggaccctcttcttcctcaaaaatgccctggtctccaccctcggccagatgcagtggaagcgggcctgtcgctatgttgtgttgtgtcgtggagccaaggattttgcctcggacccaaggtgtgacacagtttaccgtaaatacctctacgtcttggccactcgggagccgcaggaagtggtgggtaccaccagcagccgggcctgtgactgtgttgaggtctatctgcagtctagtgggcagcgggtcttcaagatgacattccaccactcaatgaccttcaagcagatcgtgctggttggtcaggagacccagcgggctctactgctcctcacagaggaaggaaagatctactctttggtagtgaatgagacccagcttgaccagccacgctcctacacggttcagctggccctgaggaaggtgtcccactacctgcctcacctgcgcgtggcctgcatgacttccaaccagagcagcaccctctacgtcacagaccaggggggagtgtattttgaggtgcataccccaggggtgtatcgcgatctctttgggacccttcaagcctttgaccccctggaccagcagatgccgcttgctctctcactgcctgccaagatcctattctgtgctcttggctacaaccaccttggcctggtggatgaatttggccgaatcttcatgcaaggaaataacagatacgggcagctaggaacaggggacaaaatggaccgaggggaacccacacaggtttgttacctgcagcggcccatcaccctgtggtgcggcctcaaccactccctggtgctgagccagagctcagagttcagcaaggagctgctgggctgcggctgtggggctgggggccgcctcccaggctggcccaaggggagtgcctccttcgtcaagctccaagtcaaggtccctctgtgtgcctgtgccctctgtgccaccagggagtgcctatacatcctgtccagccacgacattgagcagcacgccccctatcgccacctgccagccagcagggtggtggggactcctgagcccagcctgggggccagagcaccccaggaccccggggggatggcccaggcctgcgaggagtacctcagccagatccacagttgccaaacgttgcaggaccgcacggagaagatgaaggagatcgtagggtggatgcccctgatggccgcacagaaggacttcttctgggaggccctggacatgctgcagagggctgaaggaggcgggggtggtgtagggcccccagcccctgagacctaatccccctcatgctagcctagtccctggaggagggagtccggccccaggccagggactaaggagcaatgaccattgtgcacatgcgtgtgggaaggggttgctagggggtggggacggctaaccagggtaagaatgttcagggggctgcccaggaggggcccccaacctgactatcatggacaagagatttgatggatagaataaaaggctgcagcgag

SEQ ID NO: 10561 - DNA, 957 bp, Homo sapiens
  source 1..957: mol_type = unassigned DNA
atgggcgagaaggcggtccctttgctaaggaggaggcgggtgaagagaagctgcccttcttgtggctcggagcttggggttgaagagaagagggggaaaggaaatccgatttccatccagttgttccccccagagctggtggagcatatcatctcattcctcccagtcagagaccttgttgccctcggccagacctgccgctacttccacgaagtgtgcgatggggaaggcgtgtggagacgcatctgtcgcagactcagtccgcgcctccaagatcaggacacgaagggcctgtatttccaggcatttggaggccgccgccgatgtctcagcaagagcgtggcccccttgctagcccacggctaccgccgcttcttgcccaccaaggatcacgtcttcattcttgactacgtggggaccctcttcttcctcaaaaatgccctggtctccaccctcggccagatgcagtggaagcgggcctgtcgctatgttgtgttgtgtcgtggagccaaggattttgcctcggacccaaggtgtgacacagtttaccgtaaatacctctacgtcttggccactcgggagccgcaggaagtggtgggtaccaccagcagccgggcctgtgactgtgttgaggtctatctgcagtctagtgggcagcgggtcttcaagatgacattccaccactcaatgaccttcaagcagatcgtgctggttggtcaggagacccagcgggctctactgctcctcacagaggaaggaaagatctactctttggtagtgaatgagacccagcttgaccagccacgctcctacacggttcagctggccctgaggaaggtgtcccactacctgcctcacctgcgcgtggcctgcatgacttccaaccagagcagcaccctctacgtcacagatcctattctgtgctcttggctacaaccaccttggcctggtggatga

SEQ ID NO: 10562 - DNA, 1901 bp, Homo sapiens
  source 1..1901: mol_type = unassigned DNA
agactccatgggggaggggcctaggaggcagaggggcctcagaggtcccccaagcctaggctggggacatggtgaagagaagctgcccttcttgtggctcggagcttggggttgaagagaagagggggaaaggaaatccgatttccatccagttgttccccccagagctggtggagcatatcatctcattcctcccagtcagagaccttgttgccctcggccagacctgccgctacttccacgaagtgtgcgatggggaaggcgtgtggagacgcatctgtcgcagactcagtccgcgcctccaagatcagggttctggagtccggccctggaagagagctgccattctgaactacacgaagggcctgtatttccaggcatttggaggccgccgccgatgtctcagcaagagcgtggcccccttgctagcccacggctaccgccgcttcttgcccaccaaggatcacgtcttcattcttgactacgtggggaccctcttcttcctcaaaaatgccctggtctccaccctcggccagatgcagtggaagcgggcctgtcgctatgttgtgttgtgtcgtggagccaaggattttgcctcggacccaaggtgtgacacagtttaccgtaaatacctctacgtcttggccactcgggagccgcaggaagtggtgggtaccaccagcagccgggcctgtgactgtgttgaggtctatctgcagtctagtgggcagcgggtcttcaagatgacattccaccactcaatgaccttcaagcagatcgtgctggttggtcaggagacccagcgggctctactgctcctcacagaggaaggaaagatctactctttggtagtgaatgagacccagcttgaccagccacgctcctacacggttcagctggccctgaggaaggtgtcccactacctgcctcacctgcgcgtggcctgcatgacttccaaccagagcagcaccctctacgtcacagaccaggggggagtgtattttgaggtgcataccccaggggtgtatcgcgatctctttgggacccttcaagcctttgaccccctggaccagcagatgccgcttgctctctcactgcctgccaagatcctattctgtgctcttggctacaaccaccttggcctggtggatgaatttggccgaatcttcatgcaaggaaataacagatacgggcagctaggaacaggggacaaaatggaccgaggggaacccacacaggtttgttacctgcagcggcccatcaccctgtggtgcggcctcaaccactccctggtgctgagccagagctcagagttcagcaaggagctgctgggctgcggctgtggggctgggggccgcctcccaggctggcccaaggggagtgcctccttcgtcaagctccaagtcaaggtccctctgtgtgcctgtgccctctgtgccaccagggagtgcctatacatcctgtccagccacgacattgagcagcacgccccctatcgccacctgccagccagcagggtggtggggactcctgagcccagcctgggggccagagcaccccaggaccccggggggatggcccaggcctgcgaggagtacctcagccagatccacagttgccaaacgttgcaggaccgcacggagaagatgaaggagatcgtagggtggatgcccctgatggccgcacagaaggacttcttctgggaggccctggacatgctgcagagggctgaaggaggcgggggtggtgtagggcccccagcccctgagacctaatccccctcatgctagcctagtccctggaggagggagtccggccccaggccagggactaaggagcaatgaccattgtgcacatgcgtgtgggaaggggttgctagggggtggggacggctaaccagg

SEQ ID NO: 10563 - DNA, 2292 bp, Homo sapiens
  source 1..2292: mol_type = unassigned DNA
ggcaataaccgcctggtcgccgtcaggtgcgggcccaggtggccggcgcgcccgttgggcactgggggacgcgggcgcgtcaggtgaagactgggggccgcaggcgcgctaggagaactatgccatttttgggtcaggactggagatctcctggatggagttggattaagacagaagatggctggaagagatgtgaatcttgtagtcagaaacttgaaagagagaataaccgttgtaacatcagtcacagcattatcttaaatagtgaagatggagaaatattcaataatgaagagcatgaatatgcatcgaaaaaaaggaaaaaggaccattttagaaatgacacaaatactcaaagtttttatcgtgaaaaatggatctatgtccataaagaaagcacaaaggaaaggcatggctattgcaccttgggagaagcctttaatcggttagacttctcaagtgcaattcaagatatccgaaggttcaattatgtggtcaaactgttgcagctaattgcaaaatcccagttaacttcattgagtggcgtggcacagaagaattacttcaacattttggataaaatcgttcaaaaggttcttgatgaccaccacaatcctcgcttaatcaaagatcttctgcaagacctaagctctaccctctgcattcttattagaggagtagggaagtctgtattagtgggaaacatcaatatttggatttgccgattagaaactattctcgcctggcaacaacagctacaggatcttcagatgactaagcaagtgaacaatggcctcaccctcagtgaccttcctctgcacatgctgaacaacatcctataccggttctcagacggatgggacatcatcaccttaggccaggtgacccccacgttgtatatgcttagtgaagacagacagctgtggaagaagctttgtcagtaccattttgctgaaaagcagttttgtagacatttgatcctttcagaaaaaggtcatattgaatggaagttgatgtactttgcacttcagaaacattacccagcgaaggagcagtacggagacacactgcatttctgtcggcactgcagcattctcttttggaaggactaccatcttgctttactattcaaggactcaggacacccctgcacggcggccgaccctgacagctgcttcacgcctgtgtctccgcagcacttcatcgacctcttcaagttttaagggctgcccctgccatccctattggagattgtgaatcctgctgtctgtgcagggctcatagtgagtgttctgtgaggtgggtggagactcctcggaagcccctgcttccagaaagcctgggaagaactgcccttctgcaaaggggggactgcatggttgcattttcatcactgaaagtcagaggccaaggaaatcatttctacttctttaaaaactccttctaagcatattaaaatgtgaaattttgcgtactctctctctctatatatatagttcaaaaatactttaggtggtcagctccacattctttgttgacgtgacactaacggccaataatatgcttcttaattatcaaattatagtttcccaattgggaaactaattgggggtgggttacaaaacatttgatccttgtaaatacattgtacagaatatttattttttctcaaaatgcattttaactactacattggctgtgcccaaatgagtcctctttgaatagaaagtgaacccagggcaatgacagccattcttgtcttagggattatggatcggggtatgaagtgtgcacacgcagcccaacaacgggcagtggtctctgtgctcctaggcatccagcacaggttctggcagggcacccctgctggggttgggggctggtctgtgcataatcctggactgtgatgggaacagcccagtgcagtctaaacttcaattgtgttgaaactactttaatagacaaagtaataaatcatgtttatctattgatttaaacttcatcagttttgcatcctactgagaaatgttagtgattttgatacttaaatccttaaaagattgcttcgtttttaaaataacgcatgtccattttagaaaattagaaaatcagtcccaccacccaaagattattgtgcatgctgaaaagagtatgaaaaatcccctcagcaggcataggatagaaacgtattgttgtatatttccatttttgaatagggtcaaggagcccaagcaaatcatttctactttttcctttaagcataataataaaagtatacttttatggcgttat

SEQ ID NO: 10564 - DNA, 2229 bp, Homo sapiens
  source 1..2229: mol_type = unassigned DNA
gacggaggggcagtgcctactacgcaggcgcacgctgcgggcgacaggaccaggcagcaacattgccacgcggatccgcgccggccaatcagcatggccaggggcggggcttccctgaggcgcgccgggaggcggcggcccacttccggcaataaccgcctggtcgccgtcaggtgcgggcccaggtggccggcgcgcccgttgggcactgggggacgcgggcgcgtcaggtgaagactgggggccgcaggcgcgctaggagaactatgccatttttgggtcaggactggagatctcctggatggagttggattaagacagaagatggctggaagagatgtgaatcttgtagtcagaaacttgaaagagagaataaccgttgtaacatcagtcacagcattatcttaaatagtgaagatggagaaatattcaataatgaagagcatgaatatgcatcgaaaaaaaggaaaaaggaccattttagaaatgacacaaatactcaaagtttttatcgtgaaaaatggatctatgtccataaagaaagcacaaaggaaaggcatggctattgcaccttgggagaagcctttaatcggttagacttctcaagtgcaattcaagatatccgaaggttcaattatgtggtcaaactgttgcagctaattgcaaaatcccagttaacttcattgagtggcgtggcacagaagaattacttcaacattttggataaaatcgttcaaaaggttcttgatgaccaccacaatcctcgcttaatcaaagatcttctgcaagacctaagctctaccctctgcattcttattagaggagtagggaagtctgtattagtgggaaacatcaatatttggatttgccgattagaaactattctcgcctggcaacaacagctacaggatcttcagatgactaagcaagtgaacaatggcctcaccctcagtgaccttcctctgcacatgctgaacaacatcctataccggttctcagacggatgggacatcatcaccttaggccaggtgacccccacgttgtatatgcttagtgaagacagacagctgtggaagaagctttgtcagtaccattttgctgaaaagcagttttgtagacatttgatcctttcagaaaaaggtcatattgaatggaagttgatgtactttgcacttcagaaacattacccagcgaaggagcagtacggagacacactgcatttctgtcggcactgcagcattctcttttggaaggactcaggacacccctgcacggcggccgaccctgacagctgcttcacgcctgtgtctccgcagcacttcatcgacctcttcaagttttaagggctgcccctgccatccctattggagattgtgaatcctgctgtctgtgcagggctcatagtgagtgttctgtgaggtgggtggagactcctcggaagcccctgcttccagaaagcctgggaagaactgcccttctgcaaaggggggactgcatggttgcattttcatcactgaaagtcagaggccaaggaaatcatttctacttctttaaaaactccttctaagcatattaaaatgtgaaattttgcgtactctctctctctatatatatagttcaaaaatactttaggtggtcagctccacattctttgttgacgtgacactaacggccaataatatgcttcttaattatcaaattatagtttcccaattgggaaactaattgggggtgggttacaaaacatttgatccttgtaaatacattgtacagaatatttattttttctcaaaatgcattttaactactacattggctgtgcccaaatgagtcctctttgaatagaaagtgaacccagggcaatgacagccattcttgtcttagggattatggatcggggtatgaagtgtgcacacgcagcccaacaacgggcagtggtctctgtgctcctaggcatccagcacaggttctggcagggcacccctgctggggttgggggctggtctgtgcataatcctggactgtgatgggaacagcccagtgcagtctaaacttcaattgtgttgaaactactttaatagacaaagtaataaatcatgtttatctattgatttaaacttcatcagttttgcatcctactgagaaatgttagtgattttgatacttaaatccttaaaagattgcttcgtttttaaaataacgcatgtccattttagaaaattagaaaat

SEQ ID NO: 10565 - DNA, 2360 bp, Homo sapiens
  source 1..2360: mol_type = unassigned DNA
gacggaggggcagtgcctactacgcaggcgcacgctgcgggcgacaggaccaggcagcaacattgccacgcggatccgcgccggccaatcagcatggccaggggcggggcttccctgaggcgcgccgggaggcggcggcccacttccggcaataaccgcctggtcgccgtcaggtgcgggcccaggtggccggcgcgcccgttgggcactgggggacgcgggcgcgtcaggtgaagactgggggccgcaggcgcgctaggagaactatgccatttttgggtcaggactggagatctcctggatggagttggattaagacagaagatggctggaagagatgtgaatcttgtagtcagaaacttgaaagagagaataaccgttgtaacatcagtcacagcattatcttaaatagtgaagatggagaaatattcaataatgaagagcatgaatatgcatcgaaaaaaaggaaaaaggaccattttagaaatgacacaaatactcaaaaggcatggctattgcaccttgggagaagcctttaatcggttagacttctcaagtgcaattcaagatatccgaaggttcaattatgtggtcaaactgttgcagctaattgcaaaatcccagttaacttcattgagtggcgtggcacagaagaattacttcaacattttggataaaatcgttcaaaaggttcttgatgaccaccacaatcctcgcttaatcaaagatcttctgcaagacctaagctctaccctctgcattcttattagaggagtagggaagtctgtattagtgggaaacatcaatatttggatttgccgattagaaactattctcgcctggcaacaacagctacaggatcttcagatgactaagcaagtgaacaatggcctcaccctcagtgaccttcctctgcacatgctgaacaacatcctataccggttctcagacggatgggacatcatcaccttaggccaggtgacccccacgttgtatatgcttagtgaagacagacagctgtggaagaagctttgtcagtaccattttgctgaaaagcagttttgtagacatttgatcctttcagaaaaaggtcatattgaatggaagttgatgtactttgcacttcagaaacattacccagcgaaggagcagtacggagacacactgcatttctgtcggcactgcagcattctcttttggaaggactcaggacacccctgcacggcggccgaccctgacagctgcttcacgcctgtgtctccgcagcacttcatcgacctcttcaagttttaagggctgcccctgccatccctattggagattgtgaatcctgctgtctgtgcagggctcatagtgagtgttctgtgaggtgggtggagactcctcggaagcccctgcttccagaaagcctgggaagaactgcccttctgcaaaggggggactgcatggttgcattttcatcactgaaagtcagaggccaaggaaatcatttctacttctttaaaaactccttctaagcatattaaaatgtgaaattttgcgtactctctctctctatatatatagttcaaaaatactttaggtggtcagctccacattctttgttgacgtgacactaacggccaataatatgcttcttaattatcaaattatagtttcccaattgggaaactaattgggggtgggttacaaaacatttgatccttgtaaatacattgtacagaatatttattttttctcaaaatgcattttaactactacattggctgtgcccaaatgagtcctctttgaatagaaagtgaacccagggcaatgacagccattcttgtcttagggattatggatcggggtatgaagtgtgcacacgcagcccaacaacgggcagtggtctctgtgctcctaggcatccagcacaggttctggcagggcacccctgctggggttgggggctggtctgtgcataatcctggactgtgatgggaacagcccagtgcagtctaaacttcaattgtgttgaaactactttaatagacaaagtaataaatcatgtttatctattgatttaaacttcatcagttttgcatcctactgagaaatgttagtgattttgatacttaaatccttaaaagattgcttcgtttttaaaataacgcatgtccattttagaaaattagaaaatcagtcccaccacccaaagattattgtgcatgctgaaaagagtatgaaaaatcccctcagcaggcataggatagaaacgtattgttgtatatttccatttttgaatagggtcaaggagcccaagcaaatcatttctactttttcctttaagcataataataaaagtatacttttatggcgtt

SEQ ID NO: 10566 - DNA, 1286 bp, Homo sapiens
  source 1..1286: mol_type = unassigned DNA
ggagaactatgccatttttgggtcaggactggagatctcctggatggagttggattaagacagaagatggctggaagagatgtgaatcttgtagtcagaaacttgaaagagagaataaccgttgtaacatcagtcacagcattatcttaaatagtgaagatggagaaatattcaataatgaagagcatgaatatgcatcgaaaaaaaggaaaaaggaccattttagaaatgacacaaatactcaaaaggcatggctattgcaccttgggagaagcctttaatcggttagacttctcaagtgcaattcaagatatccgaaggttcaattatgtggtcaaactgttgcagctaattgcaaaatcccagttaacttcattgagtggcgtggcacagaagaattacttcaacattttggataaaatcgttcaaaaggttcttgatgaccaccacaatcctcgcttaatcaaagatcttctgcaagacctaagctctaccctctgcattcttattagaggagtagggaagtctgtattagtgggaaacatcaatatttggatttgccgattagaaactattctcgcctggcaacaacagctacaggatcttcagatgactaagcaagtgaacaatggcctcaccctcagtgaccttcctctgcacatgctgaacaacatcctataccggttctcagacggatgggacatcatcaccttaggccaggtgacccccacgttgtatatgcttagtgaagacagacagctgtggaagaagctttgtcagtaccattttgctgaaaagcagttttgtagacatttgatcctttcagaaaaaggtcatattgaatggaagttgatgtactttgcacttcagaaacattacccagcgaaggagcagtacggagacacactgcatttctgtcggcactgcagcattctcttttggaaggactcaggacacccctgcacggcggccgaccctgacagctgcttcacgcctgtgtctccgcagcacttcatcgacctcttcaagttttaagggctgcccctgccatccctattggagattgtgaatcctgctgtctgtgcagggctcatagtgagtgttctgtgaggtgggtggagactcctcggaagcccctgcttccagaaagcctgggaagaactgcccttctgcaaaggggggactgcatggttgcattttcatcactgaaagtcagaggccaaggaaatcatttctacttctttaaaaactccttctaagcatattaaaatgtgaaattttgcgta

SEQ ID NO: 10567 - DNA, 1019 bp, Homo sapiens
  source 1..1019: mol_type = unassigned DNA
gggccgcgggcgcgtcaggagaactatgccatttttgggtcaggactggagatctcctggatggagttggattaagacagaagatggctggaagagatgtgaatcttgtagtcagaaacttgaaagagagaataaccgttgtaacatcagtcacagcattatcttaaatagtgaagatggagaaatattcaataatgaagagcatgaatatgcatcgaaaaaaaggaaaaaggaccattttagaaatgacacaaatactcaaagtttttatcgtgaaaaatggatctatgtccataaagaaagcacaaaggaaaggcatggctattgcaccttgggagaagcctttaatcggttagacttctcaagtgcaattcaagatatccgaaggttcaattatgtggtcaaactgttgcagctaattgcaaaatcccagttaacttcattgagtggcgtggcacagaagaattacttcaacattttggataaaatcgttcaaaaggttcttgatgaccaccacaatcctcgcttaatcaaagatcttctgcaagacctaagctctaccctctgcattcttattagaggagtagggaagtctgtattagtgggaaacatcaatatttggatttgccgattagaaactattctcgcctggcaacaacagctacaggatcttcagatgactaagcaagtgaacaatggcctcaccctcagtgaccttcctctgcttagtgaagacagacagctgtggaagaagctttgtcagtaccattttgctgaaaagcagttttgtagacatttgatcctttcagaaaaaggtcatattgaatggaagttgatgtactttgcacttcagaaacattacccagcgaaggagcagtacggagacacactgcatttctgtcggcactgcagcattctcttttggaaggactcaggacacccctgcacggcggccgaccctgacagctgcttcacgcctgtgtctccgcagcacttcatcgacctcttcaagttttaag

SEQ ID NO: 10568 - DNA, 632 bp, Homo sapiens
  source 1..632: mol_type = unassigned DNA
gtgtgagcgcgcagtgatgccctagagtgcagtcatcccgggcttggcgcccagcgggtggaaatacggccgcagggtggaaatgcggcggcggggctgcccaggctcctgtgggacccgcgcggcgcgggcacgcacattctcagggacgcgcgtcctcaggccacgagaacacctgaaggccccggccagcgtcctcccgtgaagacccggaccggcgtcgtcacccgccgcgcaggcctaaatctcaggagaactatgccatttttgggtcaggactggagatctcctggatggagttggattaagacagaagatggctggaagagatgtgaatcttgtagtcagaaacttgaaagagagaataaccgttgtaacatcagtcacagcattatcttaaatagtgaagatggagaaatattcaataatgaagagcatgaatatgcatcgaaaaaaaggaaaaaggaccattttagaaatgacacaaatactcaaagtttttatcgtgaaaaatggatctatgtccataaagaaagcacaaaggaaaggcatggctattgcaccttgggagaagcctttaatcggttagacttctcaagtgcaattcaagatatccgaaggttcaattatgt

SEQ ID NO: 10569 - DNA, 2320 bp, Homo sapiens
  source 1..2320: mol_type = unassigned DNA
ggggagcttgcggcacagctagggcatcccggcgaggagcgccgccaggccccgggccacagccgggcctggcggggggaccatgggcgcctcggtctccaggggccgggccgcccgggtccccgcgccggagccggaacccgaagaggcgctggacctgagccaactacccccagagctgcttctggtggtgctgagccacgtccccccgcgcacgctgctcgggcgctgccgccaagtgtgccggggctggcgagccctggtggacggccaggccctgtggctgctgatcctggcccgcgaccacggcgccaccggccgcgcgctgctgcacctcgcccgcagctgccagtctcccgcccgtaacgccaggccttgccccctgggccgcttctgcgcgcgcagacccatcggacgcaaccttattcgcaacccctgcggccaagaaggcctccgaaagtggatggtgcaacacggtggggacggctgggtggtggaggaaaacaggacaaccgtgcctggggccccttctcagacgtgcttcgtgacttcattcagctggtgttgcaagaagcaggtcttggacctagaggaggagggtctgtggccagaactgctggatagtggcaggattgagatttgtgtctctgactggtggggagcccgacacgacagcggctgtatgtacagactcctcgtccaacttctagacgccaaccagactgttctagataaattctctgctgtgcctgatcccatcccgcagtggaacaacaatgcctgccttcacgtcacccacgtgttctccaacatcaagatgggcgtccgctttgtgtctttcgaacaccggggccaggacacacagttctgggctggccactatggagcccgtgtgaccaactccagtgtgatcgtgcgagtccgtctgtcctagtccagcactacccttcttgcaagacagcctgactgtgccttccagggcctgggaccattggctgggacccctcattaaccaaccaagcacttgtacctccctggcatactgagaattcctgggtccaatcaaaggccctgacgggccctgtcttcaggttctagaaactaccagaagaagcttcttccatcttatctacctactgcagctgctgctttgcgggggggccctactgtactgaggggaaacccacaagtgagcatgggggaatgcccatcctggagaagaattcttgccctcccctctcttctcctcccaaccaaaaccctccgatccagccccaggcccctctgtaccatcccctcccctccgcaccactgacctcttgtctcctgttgtttctgccacagggacttccttggtcccttcagggaagccctcaactcatctctgaacttagaatctcatccttagggctcagagagtcccagccctaagggtgtgaacctcacctcctggggcttccgagctacagggctgggaccaggtcatgcagctgaaagtctacgttaaaaaaaaaaagtttgggccaggcacagtggctcatgcctgtaatcccagcactttgggaggctgaggcaggcggatcacctgaggtcaggagttcaagaccagcctggccaacatggtgaaaccccgtctctactaaaaatccaaaaaattagccgggcttggtggtgtgcacctgtaattccagctactcgggaggctgaggcaggagaattgcttgagcccgggaggcagaggctgcagtgaaccaagatcatgccactgcactccagcctgggcaacacagcgagactccgtctcaaaaagaaaaagtttggatcaggcagggtggctcacacctgtaatccctgcactttgggaggccaaggtgggaggatcagttgagccccagagttcaagaccagcctgggcaatgtagtaagacccccatcgctacaaaaaatacaaaagttagccaggtacagtagtacacacctgtagtccaagctacttgggaggctgaagtgggaggatcatttgtgcccaggttgaggctatagtgagccatgatcataccactgcactccagcctgggtgacagagcgagaccctgtctcaaaaaaaaaaaagaatttggagatggttctgcccactctggtttctctgaaaaaacgaggtaattccctgagcccaaccctgatcctcaaggacctgtaattgtgtggtatttaaaattaaaataacattatttttattttgactttttttcaaacagtaagaataatatatcagcagcatgtatctgccaatcatatgtaataaatttcttattttgcc

SEQ ID NO: 10570 - DNA, 2130 bp, Homo sapiens
  source 1..2130: mol_type = unassigned DNA
gaggagcgccgccaggccccgggccacagccgggcctggcggggggaccatgggcgcctcggtctccaggggccgggccgcccgggtccccgcgccggagccggaacccgaagaggcgctggacctgagccaactacccccagagctgcttctggtggtgctgagccacgtccccccgcgcacgctgctcgggcgctgccgccaagtgtgccggggctggcgagccctggtggacggccaggccctgtggctgctgatcctggcccgcgaccacggcgccaccggccgcgcgctgctgcacctcgcccgcagctgccagtctcccgcccgtaacgccaggccttgccccctgggccgcttctgcgcgcgcagacccatcggacgcaaccttattcgcaacccctgcggccaagaaggcctccgaaagtggatggtgcaacacggtggggacggctgggtggtggaggaaaacaggacaaccgtgcctggggccccttctcagacgtgcttcgtgacttcattcagctggtgttgcaagaagcaggtcttggacctagaggaggagggtctgtggccagaactgctggatagtggcaggattgagatttgtgtctctgactggtggggagcccgacacgacagcggctgtatgtacagactcctcgtccaacttctagacgccaaccagactgttctagataaattctctgctgtgcctgatcccatcccgcagtggaacaacaatgcctgccttcacgtcacccacgtgttctccaacatcaagatgggcgtccgctttgtgtctttcgaacaccggggccaggacacacagttctgggctggccactatggagcccgtgtgaccaactccagtgtgatcgtgcgagtccgtctgtcctagtccagcactacccttcttgcaagacagcctgactgtgccttccagggcctgggaccattggctgggacccctcattaaccaaccaagcacttgtacctccctggcatactgagaattcctgggtccaatcaaaggccctgacgggccctgtcttcaggttctagaaactaccagaagaagcttcttccatcttatctacctactgcagctgctgctttgcgggggggccctactgtactgaggggaaacccacaagtgagcatgggggaatgcccatcctggagaagaattcttgccctcccctctcttctcctcccaaccaaaaccctccgatccagccccaggcccctctgtaccatcccctcccctccgcaccactgacctcttgtctcctgttgtttctgccacagggacttccttggtcccttcagggaagccctcaactcatctctgaacttagaatctcatccttagggctcagagagtcccagccctaagggtgtgaacctcacctcctggggcttccgagctacagggctgggaccaggtcatgcagctgaaagtctacgttaaaaaaaaaaagtttgggccaggcacagtggctcatgcctgtaatcccagcactttgggaggctgaggcaggcggatcacctgaggtcaggagttcaagaccagcctggccaacatggtgaaaccccgtctctactaaaaatccaaaaaattagccgggcttggtggtgtgcacctgtaattccagctactcgggaggctgaggcaggagaattgcttgagcccgggaggcagaggctgcagtgaaccaagatcatgccactgcactccagcctgggcaacacagcgagactccgtctcaaaaagaaaaagtttggatcaggcagggtggctcacacctgtaatccctgcactttgggaggccaaggtgggaggatcagttgagccccagagttcaagaccagcctgggcaatgtagtaagacccccatcgctacaaaaaaaaaaaaaaagaatttggagatggttctgcccactctggtttctctgaaaaaacgaggtaattccctgagcccaaccctgatcctcaaggacctgtaattgtgtggtatttaaaattaaaataacattatttttattttgactttttttcaaacagtaagaataatatatcagcagcatgtatctgccaatcatatgtaataaatttcttattttgcc

SEQ ID NO: 10571 - DNA, 5451 bp, Homo sapiens
  source 1..5451: mol_type = unassigned DNA
ccctgttccccttgctgtgggggtaaggaatcaagcccccaagatggcggcagcggcggaggagcggatggcagaggaaggaggcggcggccaaggcgacggcggttcctctttggcctccggctctacccagcgacagcctccaccgcccgcgccacagcacccgcagccggggtcccaggcgctcccagcccccgcgctggctccggaccagctgcctcaaaacaacacgcttgtggcgctgcccatcgtagccatcgagaacatcctcagctttatgtcctacgacgaaattagccagctccgcctggtttgtaaaagaatggacttggtctgccagagaatgttgaatcagggatttctgaaagtggagaggtaccataatctatgtcagaaacaagttaaagcacaactcccaaggagagagtcagaaaggagaaaccattcattagctcgtcatgcagacattcttgctgctgttgaaacaaggctgtcactattaaatatgactttcatgaaatatgtggattccaatctctgttgcttcatcccaggaaaggtgattgatgagatttatcgtgtgttgagatatgtcaattctaccagagcccctcaacgagctcatgaagtacttcaagaattaagggatatatcctctatggcaatggagtactttgatgaaaagattgttccaattttaaagaggaaattaccaggatcagatgtttctggaagactcatgggctctcctccagttccaggaccgtctgcagccctaacaacaatgcagctcttctccaagcaaaatccttcaagacaagaggttaccaaactccagcagcaggttaaaacaaatggtgctggcgtgactgttctcaggcgtgaaatttctgagcttcgcaccaaagtgcaagaacagcaaaaacagcttcaagaccaggaccagaaactgctagagcagacccagatcataggtgaacaaaatgcacggttggcagagctagaacgcaaactacgagaagtaatggaaagtgctgtaggaaattcctcagggtccgggcagaatgaggagtctcctcggaaacgaaaaaaggccacggaagccatagactctcttaggaaatctaaacgtcttcggaatagaaagtaaattggaatgtggttctagttccagaggaagacacagcttagtagcttaagcagttatgcatatcaggatactgtgagcaacatggtgtcccttaagcttctaggctttcagaacacaacttaaacttgaactcttatggttgggacattcttttcctgcttctcctgattgaactgatgcacagaatctttttactttgcaatagatttgtactaaccagacctgttctatcatgttttgaggagttaacttttttctgtgcagataatgttgaaagtaagttaatttgtttctgcatatatgcacatacatacgtaaggatcttaaacccagtcttgacagactagaagttaagtttaatacagaaaatgtcctgttcacttgaaagaaaagacctactttttaaatggacactatcttggttcttttttttttaagtcatctttttgttataagtgacctttgtctggaatgtctgaaaagtagttaatgctttttggtattgaagtaatgggtaactaaaatggacttccatagtattgactgtagaaggagcctctacaatattgactatatatttttataaactactggcaaggaacttacccagctgttatacatgttttcagttctctttgggggccatgtcctacatttgcatggatggatgcatgcattgcctagtcaactcacttaaaaagctcttgcactggtattgatcttgaacctctatacttctccactttttagagcggcgtcttagtttatttaaacgcttaacatcttccaccgcaacagcttgcctctagagggggaattgttcatccatttgtcctccagttttataggaacaagagactattaaagcccattgctttatctgctctctgtagggttcaggtacactggctaaggcagaaccccaaatttcaaggctctttctatcaatattggacctctgggagctaatactcctctttgctcaccaccatgtgatcattgatcagatgtggtgagtgagtaggggactcgacttgcgggatgcagttttgccattgcagcaaagttcattgaggaaaattgtaccatgaaaaagcattttgattatttcatttctggaggatgaccttgagggaagctttttaatattagtttcaagctttccttaccctacaactttaaacaaaagctttaattttgtttgcactcctattttgagcttgtaactggaaaagcatgtcttgcactgttcaacctcctgagtggtcgctttaacaacctccaaattgtgtacagtggttattttccccagttgtatagttttgagacattcaattatcactgtcttagttgtattttaatttactaaattatgtagctatttgactgttaagttcttttaaacaactgtttccttgggcttcagttatttaaagtaaatttaggtgtaatatagaaaactgtccctttccaggtgggagcttaacacctgtataaaacctaaggttttggtaagtaccttagttgaataaaagcacaaggttatcaccttttttatccgtccaccgtgacatggttatgcatcctttagattaacctcaccaaatgaagctttttctatccatttttaatattgtccttacataatattgtccttagattttgatcaattctatgtctgactttgaaattccatttacaatgtagtatgttttcaatgaaaaaccataaagtaacatccaagtgtttcatggtttgttgggaaggtaattttaaaataaaacaatttccaaaaaacatttgtcagccaaggtcatccataaaagtccccgtctggaactcgttttctcagcacttctcatttttataatcatagtatttagccatattagcatatctttagaggaggcctggtggaatacccggggcctctactagtctgcttttccggtcataggaagacttttttttttacgtatcaaagcatgtgtttacagatttacagagtgtgatccgtatgcatcaaagggatacagccccagactgtttctttaatggtcattcatgaactattaaaaatttcctgaatttctttttaaactacatctagatagcctaaacatctatgtagtcttccattagttaacatgtgtatagggctttcataataagtagtcacactgttacaaggtaaattttctattacaaaatccaaatttctattgcatacacttataatcatctattcataaagctaattcattgtacttgttaatgcatgaatgttccatgcagtaggagaataaagcactacagttcggttgttcaaatcttaaatcttaggctatttagctaaaacatgttaggatattgccttcaccacttgttaggacagttatttgatagccattatgcttacctatggatagcataatggtatttaaggttcaacaaaccgcagattattatgatcagctagaactgacatatgttacaagaaaactgtaaattaacctcctgagagaaccattctgccctgcattttaagtcaggtatttaaatactgcgtgttgttaatattgcgttgtcttagtgcaacatttcttaaagtattcccgttatcttccttggctgtttttcagaggagacgtctccatgttaatgggtccttcccacatagaaatgtattctggtacagcgctgcacacatggatagcaatgtgaaaaggcatgcctaagagacagaaacggctgaccttaccccaccccagccggatcctctgcttatctcccacatgcacttggcttaactggttttcacagattctgaggttatagaacctgttgtttttcaaactcctgtacagagcctggaaataatggagcaaacgcaaatgtattgagagtcattatactttaaaatagttttaaagactattggggtaccatcaggtcaaaagccactgatttgggaagcaatttttttgcaaaacactttttttggagtactgaactttacaggggcttgccttaatctctatttagtagtttcaagatatatgcgcaattattctacgtgttaaaaatgttaaaatattctatgtagccccaaaggtgggtaaaacagtataagtaatgcctaaattaataagctaaaaggtgtcactacagctggatttttgagagaaaatggacataaaactaggctatgtgtaataaaaataatggcaccttaagattgcactattttatgcattattttatatgccatttcatagcctgcactttaatctccaaagaaacgatgtatgatgtcccacttgttccttattcttaataaactttttcctgagacagggcacttaattctattttactatactgaattagtttcttggaggtagattcatttcttgagttctctgtttccttagccataatattttctaggatccgggaactccctatattgtctatttccaacattatataattttaatttaatgtaatgtaaatctcatacttggtgatcagcacattcttatatcctgctctagcaatgagtacccatttgttacacttaccaaactctctaaaaacatatactgtgagtaagatttgaagccaggaataaaaggcagtctgaaagaaaacgtcctatacgatgcagttgtttggaaatggctgatttctgatatgaaacccaacttgatacactgtttggttctttgacttgggatctatctgaattgctttcactagtacacaaaaggttaagttaaaactactttaaacttgtatagcctgccatctgaggtgaattattttcaaaaaatactaaatctatgaactgagactagcaattagttggctgctccctaccatgattttacttttaatagcaatacagttatattggtgataaatatgacaggcttaagtactgctgtccttttgcatcttcctaagcatcttggttaaatttctgaagtttaaaaattagatccagatttcttctgttgtgtctgaagagaaccatgacatttagaagtatattggtaatctattaggtccattggcaaagtatattggtccatattcaaacctattccaaaaggttagaagtgtttaagattcctttattgtggtaccatgtctgtttacctatgcttatgagcaacaataaattactagtttaccttctggaattttaattgttataaccgaatcaattattggaaagtgaaaaacacctcccggtcacacaacagggtacgtaaataaatgtgttgttaccagtg

SEQ ID NO: 10572 - DNA, 1334 bp, Homo sapiens
  source 1..1334: mol_type = unassigned DNA
aaggaatcaagcccccaagatggcggcagcggcggaggagcggatggcagaggaaggaggcggcggccaaggcgacggcggttcctctttggcctccggctctacccagcgacagcctccaccgcccgcgccacagcacccgcagccggggtcccaggcgctcccagcccccgcgctggctccggaccagctgcctcaaaacaacacgcttgtggcgctgcccatcgtagccatcgagaacatcctcagctttatgtcctacgacgaaattagccagctccgcctggtttgtaaaagaatggacttggtctgccagagaatgttgaatcagggatttctgaaagtggagaggtaccataatctatgtcagaaacaagttaaagcacaactcccaaggagagagtcagaaaggagaaaccattcattagctcgtcatgcagacattcttgctgctgttgaaacaaggctgtcactattaaatatgactttcatgaaatatgtggattccaatctctgttgcttcatcccaggaaagttccaggaccgtctgcagccctaacaacaatgcagctcttctccaagcaaaatccttcaagacaagaggttaccaaactccagcagcaggttaaaacaaatggtgctggcgtgactgttctcaggcgtgaaatttctgagcttcgcaccaaagtgcaagaacagcaaaaacagcttcaagaccaggaccagaaactgctagagcagacccagatcataggtgaacaaaatgcacggttggcagagctagaacgcaaactacgagaagtaatggaaagtgctgtaggaaattcctcagggtccgggcagaatgaggagtctcctcggaaacgaaaaaaggccacggaagccatagactctcttaggaaatctaaacgtcttcggaatagaaagtaaattggaatgtggttctagttccagaggaagacacagcttagtagcttaagcagttatgcatatcaggatactgtgagcaacatggtgtcccttaagcttctaggctttcagaacacaacttaaacttgaactcttatggttgggacattcttttcctgcttctcctgattgaactgatgcacagaatctttttactttgcaatagatttgtactaaccagacctgttctatcatgttttgaggagttaacttttttctgtgcagataatgttgaaagtaagttaatttgtttctgcatatatgcacatacatacgtaaggatcttaaacccagtcttgacagactagaagttaagtttaatacagaaaatgtcctgttcacttgaaagaaaagacctacttttt

SEQ ID NO: 10573 - DNA, 2397 bp, Homo sapiens
  source 1..2397: mol_type = unassigned DNA
ctgcaccgggccaggcaagatggcggccatggagaccgagacggcgccgctgaccctagagtcgctgcccaccgatcccctgctcctcatcttatcctttttggactatcgggatctaatcaactgttgttatgtcagtcgaagacttagccagctatcaagtcatgatccgctgtggagaagacattgcaaaaaatactggctgatatctgaggaagagaaaacacagaagaatcagtgttggaaatctctcttcatagatacttactctgatgtaggaagatacattgaccattatgctgctattaaaaaggcctgggatgatctcaagaaatatttggagcccaggtgtcctcggatggttttatctctgaaagagggtgctcgagaggaagacctcgatgctgtggaagcgcagattggctgcaagcttcctgacgattatcgatgttcataccgaattcacaatggacagaagttagtggttcctgggttattgggaagcatggcactgtctaatcactatcgttctgaagatttgttagacgtcgatacagctgccggaggattccagcagagacagggactgaaatactgtctccctttaactttttgcatacatactggtttgagtcagtacatagcagtggaagctgcagagggccgaaacaaaaatgaagttttctaccaatgtccagaccaaatggctcgaaatccagctgctattgacatgtttattataggtgctacttttactgactggtttacctcttatgtcaaaaatgttgtatcaggtggcttccccatcatcagagaccaaattttcagatatgttcacgatccagaatgtgtagcaacaactggggatattactgtgtcagtttccacatcgtttctgccagaacttagctctgtacatccaccccactatttcttcacataccgaatcaggattgaaatgtcaaaagatgcacttcctgagaaggcctgtcagttggacagtcgctattggagaataacaaatgctaagggtgacgtggaagaagttcaaggacctggagtagttggtgaatttccaatcatcagcccaggtcgggtatatgaatacacaagctgtaccacattctctacaacatcaggatacatggaaggatattataccttccattttctttactttaaagacaagatctttaatgttgccattccccgattccatatggcatgtccaacattcagggtgtctatagcccgattggaaatgggtcctgatgaatatgaagagatggaagaagaggaggaggaggaagaggaggaagacgaggatgatgattcagcagatatggatgaatcagatgaagatgatgaagaggagagacggaggagagtctttgatgttcccattcgcagacgccgctgctcacgccttttttagcaagccttctgctgatggaagcactaggatgattctaggctgttaaatagatttctcaataatgtaaataactaaattgttctctgcatatagcaggaaaactagcatgaaatattgtttcaggccctgggttctatgtgacactacattaggaattggattgtttgggtttgctttgtgtttttgaggtagaggaagaaatgggaatcttttttttctcttccaggagtcagtggaagaatagttctctagctaaggaatggacatacctttgttttaaaatattttatacttacaaaaatctagaaatggagagggaactgttttgaataaggatttaaaatacctgcacaaggatagagagaaactatgtgactcattctgtgaaaagacttcttgcagttgtgagttatttagaaatgatcaaaatttgtaattaggctaatccatttagtgattcctaatattttgtactcacagagaactaattgactaaacaacttgaacgctagtggtttgtccttagacaatctgtctttgaatttaaagtctttatcgctaagaccttgactttaaatttttcatcactacaaccttgaatttaatttcaggtcttcaacatgatgaccttggatttaatttaaagtcttcaacactatgcgctttatcatattattcacagatgcatttttgaaatgtagtatgtaaaagtatgtaacgtgctgtttattaacaaaagattgttcacaacatctcatgtagtttaaatttgtaaatactgcttctgttttgtttctcctttatacacttgactgtctttgtgataagtgacatgaattttatgttaggattaagtatgttttcctgaaacttggattttttttgtaattatataattgagagttaagaatgaaatccttcaagtgttaaaaactcacattttaaaagcaaattttggttcc

SEQ ID NO: 10574 - DNA, 2394 bp, Homo sapiens
  source 1..2394: mol_type = unassigned DNA
ccgggccaggcaagatggcggccatggagaccgagacggcgccgctgaccctagagtcgctgcccaccgatcccctgctcctcatcttatcctttttggactatcgggatctaatcaactgttgttatgtcagtcgaagacttagccagctatcaagtcatgatccgctgtggagaagacattgcaaaaaatactggctgatatctgaggaagagaaaacacagaagaatcagtgttggaaatctctcttcatagatacttactctgatgtaggaagatacattgaccattatgctgctattaaaaaggccgggatgatctcaagaaatatttggagcccaggtgtcctcggatggtttgttagtataaatagagggtgctcgagaggaagacctcgatgctgtggaagcgcagattggtgcaagcttcctgacgattatcgatgttcataccgaattcacaatggacagaagttagtggttcctggaagttattgggaagcatggcactgtctaatcactatcgttctgaagatttgttagacgtcgatacagctgccggaggattccagcagagacagggactgaaatactgtctccctttaactttttgcatacatactggtttgagtcagtacatagcagtggaagctgcagagggccgaaacaaaaatgaagttttctaccaatgtccagaccaaatggctcgaaatccagctgctattgacatgtttattataggtgctacttttactgactggtttacctcttatgtcaaaaatgttgtatcaggtggcttccccatcatcagagaccaaattttcagatatgttcacgatccagaatgtgtagcaacaactggggatattactgtgtcagtttccacatcgtttctgccagaacttagctctgtacatccaccccactatttcttcacataccgaatcaggattgaaatgtcaaaagatgcacttcctgagaaggcctgtcagttggacagtcgctattggagaataacaaatgctaagggtgacgtggaagaagttcaaggacctggagtagttggtgaatttccaatcatcagcccaggtcgggtatatgaatacacaagctgtaccacattctctacaacatcaggatacatggaaggatattataccttccattttctttactttaaagacaagatctttaatgttgccattccccgattccatatggcatgtccaacattcagggtgtctatagcccgattggaaatgggtcctgatgaatatgaagagatggaagaagaggaggaggaggaagaggaggaagacgaggatgatgattcagcagatatggatgaatcagatgaagatgatgaagaggagagacggaggagagtctttgatgttcccattcgcagacgccgctgctcacgccttttttagcaagccttctgctgatggaagcactaggatgattctaggctgttaaatagatttctcaataatgtaaataactaaattgttctctgcatatagcaggaaaactagcatgaaatattgtttcaggccctgggttctatgtgacactacattaggaattggattgtttgggtttgctttgtgtttttgaggtagaggaagaaatgggaatcttttttttctcttccaggagtcagtggaagaatagttctctagctaaggaatggacatacctttgttttaaaatattttatacttacaaaaatctagaaatggagagggaactgttttgaataaggatttaaaatacctgcacaaggatagagagaaactatgtgactcattctgtgaaaagacttcttgcagttgtgagttatttagaaatgatcaaaatttgtaattaggctaatccatttagtgattcctaatattttgtactcacagagaactaattgactaaacaacttgaacgctagtggtttgtccttagacaatctgtctttgaatttaaagtctttatcgctaagaccttgactttaaatttttcatcactacaaccttgaatttaatttcaggtcttcaacatgatgaccttggatttaatttaaagtcttcaacactatgcgctttatcatattattcacagatgcatttttgaaatgtagtatgtaaaagtatgtaacgtgctgtttattaacaaaagattgttcacaacatctcatgtagtttaaatttgtaaatactgcttctgttttgtttctcctttatacacttgactgtctttgtgataagtgacatgaattttatgttaggattaagtatgttttcctgaaacttggattttttttgtaattatataattgagagttaagaatgaaatccttcaagtgttaaaaactcacattttaaaagcaaattttggttcc

SEQ ID NO: 10575 - DNA, 1672 bp, Homo sapiens
  source 1..1672: mol_type = unassigned DNA
aggggcggggccagggcggggccagacctgcaccgggccaggcaagatggcggccatggagaccgagacggcgccgctgaccctagagtcgctgcccaccgatcccctgctcctcatcttatcctttttggactatcgggatctaatcaactgttgttatgtcagtcgaagacttagccagctatcaagtcatgatccgctgtggagaagacattgcaaaaaatactggctgatatctgaggaagagaaaacacagaagaatcagtgttggaaatctctcttcatagatacttactctgatgtaggaagatacattgaccattatgctgctattaaaaaggcctgggatgatctcaagaaatatttggagcccaggtgtcctcggatggttttatctctgaaagagggtgctcgagaggaagacctcgatgctgtggaagcgcagattggctgcaagcttcctgacgattatcgatgttcataccgaattcacaatggacagaagttagtggttcctgggttattgggaagcatggcactgtctaatcactatcgttctgaagatttgttagacgtcgatacagctgccggaggattccagcagagacagggactgaaatactgtctccctttaactttttgcatacatactggtttgagtcagtacatagcagtggaagctgcagagggccgaaacaaaaatgaagttttctaccaatgtccagaccaaatggctcgaaatccagctgctattgacatgtttattataggtgctacttttactgactggtttacctcttatgtcaaaaatgttgtatcaggtggcttccccatcatcagagaccaaattttcagatatgttcacgatccagaatgtgtagcaacaactggggatattactgtgtcagtttccacatcgtttctgccagaacttagctctgtacatccaccccactatttcttcacataccgaatcaggattgaaatgtcaaaagatgcacttcctgagaaggcctgtcagttggacagtcgctattggagaataacaaatgctaagggtgacgtggaagaagttcaaggacctggagtagttggtgaatttccaatcatcagcccaggtcgggtatatgaatacacaagctgtaccacattctctacaacatcaggatacatggaaggatattataccttccattttctttactttaaagacaagatctttaatgttgccattccccgattccatatggcatgtccaacattcagggtgtctatagcccgattggtaagttaaattttcctctagtgctgatttacatgactttgtagggttaacactgcagataagccaggcaaatagttagtttataaatagtgttccagagaaccctagagattttgagaaagtatcttgggggtcatgtgaatttgttgagagaaatggacaagtaaatgaggctccatagtctctaaccagagaatttctgctgttttaaagattcaacttgtttttcactgttcagtggcctaaatgtagattatgagaaataccacattagaccagtagaatcagctttaagactgggaaaacaacttcttacagtgtttttgctcaaacttccaatttaatgtcaaataaacaaatattccataaagatcattataaagaaaa

SEQ ID NO: 10576 - DNA, 4376 bp, Homo sapiens
  source 1..4376: mol_type = unassigned DNA
gaaaaggcggcggcccggctggggaagaggggcggaggaggcggttcggacggctgtgtggggtacggagcgtcgccgggacagagcggagcagctgggcacggcgtccagggcagctagggcctgggccgcggttcggccgcgccggccgagctggactggccattatggaggaggagctgcagcattcccattgtgtgaattgtgtcagtagacggtgcatgaccaggccagagccagggatttcctgtgatttgattggttgtccattggtttgtggtgcagttttccattcttgtaaagctgatgagcatcgacttttatgtccatttgaacgagtgccttgcttaaatagtgactttggatgtccatttaccatggcccgaaataaagttgctgaacatctagaaatgtgtcctgcaagtgtggtgtgctgtactatggaatggaatcgatggccagttagttatgcagaccggaaatcatatgaaaatctaagcagagatgtcgatgaagtggcacaattggatatggccttggctcttcaagaccaaaggatgctcttagaatccctcaaagtagccaccatgatgtcaaaagcaactgataaagtatccaaacctagagaacaaatctcagttaaatcaagtgtcccagaaataccacatgctaatggtttagtgtctgttgatgaagaatcttatggtgcactttatcaagctactgtagaaacaaccagaagtttggctgctgctttggatatcctgaatactgctacaagagacattggcatgttaaatacaagtgtcccaaatgacatggatgaacagcaaaatgcgagagaaagcttagaggatcaaaacttgaaagaccaagatcatctttatgaggaggaaataggagcagtaggtggaattgactacaatgacacaaatcagaatgcccagtctgaacaaaatggttcaagtgatttattatgtgacttgaatacaagttcttatgacacttctgctctttgtaatggctttcctttggaaaatatatgtacccaggtcatagaccagaatcagaatttacatggtgattcaaaacaaagtaacttaacaaatggagactgtgtggcatcatcagatggcacttcaaaaccttccagctcacttgcggtggcagcacaacttagggaaataataccatccagtgctttgcctaatggcacagttcagcatatcctcatgccagatgatgaaggtgaaggtgaattgtgttggaaaaaagtagacttaggggacgtgaagaatgtggatgtcttatctttcagtcatgctccttcattcaattttctttctaattcatgttggtctaaaccaaaggaagataaagcagtagatacatcagatttggaagttgcagaagatcctatgggcctccaaggaatagatctgatcacagcagcattgcttttttgtctaggagattctccaggagggaggggtatatctgatagccgcatggctgatatttatcacattgacgttgggactcagactttttcacttccatctgcaatattagctacaagtacaatggttggggagatagcttcagcttcagcttgtgatcatgccaatccacagctttcaaatccaagtccgtttcagacacttgggctggatttagtattggaatgtgtcgctaggtaccaacccaagcagcgttcaatgtttacctttgtgtgtggacagttatttagaaggaaagaattttcttcccactttaagaatgtgcatggtgacattcatgctggactcaatggctggatggaacagaggtgccctttagcttactatggttgtacctattctcagcgtagattttgtccatcaatacaaggagcaaagattatacatgaccgccatttgaggtcatttggagttcagccatgtgtatctacagtattagtggagcctgctagaaactgtgtgttgggattacataatgaccatctaagtagtcttccttttgaggtcctgcagcatattgcaggctttctcgatggcttcagcttatgtcagctctcatgtgtatccaagttaatgagggatgtgtgtggcagcctgcttcagtctcgtggcatggtcatactgcagtgggggaaaaggaagtatccagaaggaaattcatcatggcagataaaagaaaaggtatggcgatttagtactgcattttgttctgttaatgaatggaaatttgctgacatcctaagcatggcagaccacttgaagaaatgcagttacaatgttgtcgagaaacgggaggaagcaatccctttgccatgtatgtgtgtgacacgagaactcactaaagaaggacgttcactacgctcagttttaaaacctgtactttaaaagttgtaatattactagcacatatatgcaagcacctagtataatttctttgtaatatgtgaaactttattaatgtattaaatattacaactagctaaatttattgtcactgtgtatataatgttttgaagtgacatctatttttataaagtactgtttagttggaaaaagttgccttaatgtttgaaatgtgtgaaatttttggaacttgctggacagggtgatttaatttttagctacataattttaagaattagtattttcagtggtgtgcatattttggttcttaaatttttgcttcttaaactaaaaaaatcctgaccaatttatttgttgttttctgtgggttgcgacccatgcaatcaaaaagcaaaattttgattgagattttttacagcataggtttttcatataaaaatattctgaatttgttaagcactgccataatatcattataatgtttttgtcttttagtgcttccctatacaattgttaatgcacaaatgatctctaatatatacttacatacgtaaaatcataaagtttggtaatgcagtttatcgttttaaaaataatccacaaagatgtttttatctcacatacttacaactcaacacacagagtgaccatgtgcagctttcttttttgttagatgccacatccgaagactcatcgcagtgtgttatatgacaggacaaagcaaaaacaaacaaaaagcaagcctgtgaatataatttaatttgaaactgctcctggtattatatatttgctagttatctaatgttttaaaagaaaatatacctcatttaggtttgaattgggcgtattgtgtaaatttcaaatattcagaatgcaaagggcttgactattaaatgtttgcctttgatgtttataaacattacaactatgttgttttaagacatttaaaaacgtgaaatttgttatctttgtaaaatgacaatcatgtagaaacctgtcttggttgacaatctctttgaaacatttccgagttaatttcccataggcttcaccaccaagaaagtaagaattgcatctttacataatgatcaaggtataatggaaaaatatacctattcttgaagtagtttattatagttttcaaattgatttataccattattaacctgatgtggtctgcttaaaaaatgaatatatcagtatttagaaataaattgcaaaggtgggaatatatacttaaataatttgtcttaagtaaattagcatttggtagtctgaaatggtgacagattacttgttaaaattgtgaaaactctgttgtgtcctctcttcctacatttgtccctgagagtactccacgattactaggttcttgattcccttatatggcaatcaggcagaggcgttccttaagcattagagagttctgaagcttaagatttgttttggttggatgaagtccttagtacagttgaaaaacagagcattaaagactaatcaattgttttgcctcaccagtcattttaaatagtagaatacttatttctcagtgcttaaaatttctttttcaactgtgagattgaataaacagtctctatttctgtggaaaaaacaacagaaaagagatattaaataccataaaatgtaactctgccttttaaagttttgctgaagaatgtgtctgtggttaggatagcacaagcattaacttttgttttatagttatgctttttaaaattcattgtttttaaatttagacttcttatttccacactggattatgagatacttaacaatttttccaccttatatttcttttacacattttgctgttctcttttttgttattgttatgccaccataccattttgttaaaatgttttctttgtgaaacatttgttcaagttctaataaaattaatgttttcccttaacatggctcaataacttaaaaacgttcatttaaataaaattttaatacttgtttgacaaa

SEQ ID NO: 10577 - DNA, 3614 bp, Homo sapiens
  source 1..3614: mol_type = unassigned DNA
tggagcgtgcgcacaggcggcagcagtggccgtcactgggcggcatggcggtgtgtgctcgcctttgcggcgtgggcccgtcgcgcggatgtcggcgccgccagcagcgccggggcccggccgagacggcggcggccgacagcgagccggacacagaccccgaggaggagcgcatcgaggctagcgccggggtcgggggcggcttgtgcgcgggcccctcgccgccgcccccgcgctgctcgctgctggagctgccgcccgagctgctggtggagatcttcgcgtcgctgccgggcacggacctacccagcttggcccaggtctgcacgaagttccggcgcatcctccacaccgacaccatctggaggaggcgttgccgtgaggagtatggtgtttgcgaaaacttgcggaagctggagatcacaggcgtgtcttgtcgggacgtctatgcgaagctgcttcaccgatatagacacattttgggattgtggcagccagatatcgggccatacggaggactgctgaacgtggtggtggacggcctgttcatcatcgggtggatgtacctgcctccccatgacccccacgtcgatgaccctatgagattcaagcctctgttcaggatccacctgatggagaggaaggctgccacagtggagtgcatgtacggccacaaagggccccaccacggccacatccagattgtgaagaaggatgagttctccaccaagtgcaaccagacggaccaccacaggatgtccggcgggaggcaggaggagtttcggacgtggctgagggaggaatgggggcgcacgctggaggacatcttccacgagcacatgcaggagctcatcctgatgaagttcatctacaccagtcagtacgacaactgcctgacctaccgccgcatctacctgccgcccagccgccccgacgacctcatcaagcctggcctcttcaaaggtacctatggcagccacggcctggagattgtgatgctcagcttccacggccggcgtgccaggggcaccaagatcacgggcgaccccaacatccccgctgggcagcagacagtggagatcgacctgaggcatcggatccagctgcccgacctcgagaaccagcgcaacttcaatgagctctcccgcatcgtcctggaggtgcgcgagagggtgcgccaggagcagcaggaaggcgggcacgaggcgggcgagggtcgtggccggcagggcccccgggagtcccagccaagccctgcccagcccagggcagaggcgcccagcaagggcccagatgggacacctggtgaggatggtggcgagcctggggatgccgtagctgcggccgagcagcctgcccagtgtgggcaggggcagccgttcgtgctgcccgtgggcgtgagctccaggaatgaggactacccccgaacctgcaggatgtgtttttatggcacaggcctcatcgcgggccacggcttcaccagccctgaacgcacccccggggtcttcatcctcttcgatgaggaccgcttcgggttcgtctggctggagctgaaatccttcagcctgtacagccgggtccaggccaccttccggaacgcagatgcgccgtccccacaggccttcgatgagatgctcaagaacattcagtccctcacctcctgaccggccacatccttgccgccacatcccgggtggctctggggctctgaactctgacctgtgaatagaagcagcatgcactttggaaatccggccttttgaccagaacgcacacctcgtcggggggcccagtccagccaccccccagcactttatgtagagagtgtgacatagacctgcatatttgtcagtgccatgatggaagaagctgagcatgtcttaccaaaaacagagagaacgagcctgaatacagcagatgtaggggacagccgtgggaccgcgtgagaattgaagcggtggggttcccgcaccctgggctggctggtggttttctcgggaagcaggaccctcctgactggtgctcttcctgtgagcggatagagtgatagactgggtcgtgtgtgagacgcatgtgctccaccccactccttttgggggaagccaggcaacagtggcctctgggagggggtcaggaagaggcgaacagctcaggcagcgcaggtgtgatgggcacagtacgcagagcaagctcgggaagttggtaggatctcaggcttggggccgggactctggagtgaatccccatttctctaccggcttgcttggagtttggacagaagcatttcacctctgatctcagcttccccacctgtggagtgggtttagtgacctgagtcactagggaatgtcacctgaatgcacagcccagcccatgcacctgccccagcccctccagctttggagccaaggccatcgttccagccacttgactgtcctcgacggcctgttccagacagggcgtttgttttgtccatgccttcctccctgcacgcacacggcgtcaaaaccaagctgccggccactgtctccagaacgcaaggctccaggcccgtgtgtctgaagcagtgagtggtccacacaggtgccaggagtgcccatatgagatgacgaggaaacccctttgcaggtgaggggacagctttctagaaaagccacacctgcatctggggacacactttggaaagtgggaccctccagcctggagaccccatggactgatgcctccactgctgtgtgccccatgttgtgttaacacctgcgtgtggggaccccatctgaggtcttggctgaggttggcatctcctgaagaacagagagcacggtgtccagagctggcccttcccccagcccacagccagctccgtgcccgagtgggcgtccccagcgagccttccctctctgccgcttgtccttgtgtctgggctgctccaagtccttgtgctgggcaccctggacacgtcctgctggtgagggacctcgggaaggtgacagtctgtgtgccttggtgtggagaccaacctgaggatgtcctgggaaatgttttcctgatgaatttctccttgactggcctttaaagaacataagaattcccattgcccagcctcagtgcatttggcaaatgcttactttgcttcccagagtcagagaattggcaaaggttcctaaatggtaatctggccggcctgggagaaagactcacgagaaaagccagtggagaaagcgcccttccagggcggcagcagcgggagccacgcagaccccgaggcgcacctgctggctcttgtgtgtggccccagtttctagcggcttttgcagcattagcctacaagctttgtcactccctgccctctgtggtggtcactgtttttctctcttgccaaatgaggcagtctctgagtgacggtgactgtggccttgaagcctggaggactgttgggcatgtagactggcaccttgaagattcaccattgtttaaataaaatcaagcaaatgcttttttaccaagagcccgagcctcgctctaagggacgcagtcctagaggcgtgccctttggggcttgaagagcacactgtgggacgcacgtgcttctgattaaaggaatctcagatctc

SEQ ID NO: 10578 - DNA, 6744 bp, Homo sapiens
  source 1..6744: mol_type = unassigned DNA
agcactcccggagcctgcaacgcttgagatcctctccgcgcccgccaccccgcagggtgccccgcgccgttcccgccgccccgccgcccccgtcgcgggcccctgcaccccgagcatccgccccgggtggcacgtccccgagcccaccaggccggccccgtctccccatccgtctagtccgctcgcggtgccatgccattcctcgggcaggactggcggtcccccgggcagaactgggtgaagacggccgacggctggaagcgcttcctggatgagaagagcggcagtttcgtgagcgacctcagcagttactgcaacaaggaggtatacaataaggagaatcttttcaacagcctgaactatgatgttgcagccaagaagagaaagaaggacatgctgaatagcaaaaccaaaactcagtatttccaccaagaaaaatggatctatgttcacaaaggaagtactaaagagcgccatggatattgcaccctgggggaagctttcaacagactggacttctcaactgccattctggattccagaagatttaactacgtggtccggctgttggagctgatagcaaagtcacagctcacatccctgagtggcatcgcccaaaagaacttcatgaatattttggaaaaagtggtactgaaagtccttgaagaccagcaaaacattagactaataagggaactactccagaccctctacacatccttatgtacactggtccaaagagtcggcaagtctgtgctggtcgggaacattaacatgtgggtgtatcggatggagacgattctccactggcagcagcagctgaacaacattcagatcaccaggcctgccttcaaaggcctcaccttcactgacctgcctttgtgcctacaactgaacatcatgcagaggctgagcgacgggcgggacctggtcagcctgggccaggctgcccccgacctgcacgtgctcagcgaagaccggctgctgtggaagaaactctgccagtaccacttctccgagcggcagatccgcaaacgattaattctgtcagacaaagggcagctggattggaagaagatgtatttcaaacttgtccgatgttacccaaggaaagagcagtatggagatacccttcagctctgcaaacactgtcacatcctttcctggaagggcactgaccatccgtgcactgccaataacccagagagctgctccgtttcactttcaccccaggactttatcaacttgttcaagttctgaatcccagcacatgacaacacttcagaagggtccccctgctgactggagagctgggaatatggcatttggacacttcatttgtaaatagtgtacattttaaacattggctcgaaacttcagagataagtcatggagaggacattggaggggagaaatgcagttgctgactgggaatttaagaatgtgaacttctcactagaattggtatggaaaagcaaaatactgtaaataaactttttttctaacaatttgccagcaagactataagggcaataattctatttcagcggtgaaaatggagtcctcttaatggtcacagaaactctcttatagttccctaggaagaaaaaggcaaaactcaaatacaaaataggacgctttgtttacaatgtgaaaatttgtttagaaaagaaaaaatgaagaaggaaaactatataggagaaattcctgggctttggggtttgatctggtgtttgttttgagaaggcgaaggaagcgccacccatcctaaacctgcatgggcacagagccttaccctacagagataccacacaatggtctacctctaaaagcgtagagtgccctctctgacaacgcatgtgatccagtaggcagtgtctgtttttctcgtaagtgttttcatcactataaaaagtgatttaaaatggaaagggatattggaggcaatcctctggtttcacacttccttttcaggcaaacagggccctccttagagttatctgttcaccagaacaacccaaaagcacatgttccttttttcctgtcatgttgtagctcatttgggggaaaagaaggccaacttaaaacagtcccaggggaggattgcttgagcccaggagtctgaggtttgcagtgagctatgattgtgccactgcactccagcctgtctccaaaacaaaacaaaacaaaacaaaagccgtcccagaggaagtcctgctgcagaaaagatgatagaattggtcacccaatcaatagctgtgaagacttccttattcctgctgaacttccttccttggatatcttcatggataagcctgtgtctgtggacagagtggggcccaagtgctgaggctcgaaagacaggttttacaatcagccaattaaacatcttaccagttgctgtaccccttgccaaggggatgagctgaggagcttcttttctttaggtccaacatcaaaatgagtccatctgagctagggctttttgcaaaggtgattaaaaatcaaggctggagttccagccaaatagggaggagaggtaccacaagttcatcttaaacttgcttccgggctgggtagttaaaacaggaagatcccaaggggatcttacgaggcaaatatcagcaggtaactgtggaagaaaggaaatctcaggacctaatgagttcgttgtaaaatattcctgggaatagatgggggatctactcccagttttttactttttacagaatattgttgctttcctacaacaatgtacatatatttgcagttgtatatgctttttttttttccaaataaacttgtcaccctgcatgcccttggcaaataagtgaagcagaaataggaacacagtccacattcaagttgaggaacagtgtatctttaagagctgagctttgggtgacctggaaagggggaaagatggctaagcatggagagaaacgaggcaagagacaagctatgatacaacaccgcttcagcccctgccctcaatagcacacaacccacatatcagctttctgaagagaaggaacctactgtttagtgctcctcactttgcaatgtttgtgctacgccagaatttctccagtttttttcattatcatccccctgagaaaaaaattacattgaatttaaattttccctaataagagaaattaaatatgaaagaataggattttgttgggtaagattgagctttggaaggtcacgaaccattattctatctaaggtgtgtgttttgttttgtttttttttgttttttttttgcaatccctctccccctgaaccaatttcacattgggaatgcaggacctagactgctgaataaaaagctacttcttctataattgtcaggttctctccaatttctcagcttcctcaaagacatggggtggagttgggtgtgccatcactgagagagctctggaacttttgactcttagtgacatttttagatttaggggttcatggccttccacatgttgccaccaactggtgatctctgccccttcatgctgatcaagaaagtagaaactcctcgtcgccttcaggtttgcagtcgcagaaacattgcctgctgtggactgtcagcacaaaactgggacactggtgtcatttagactgtcagcagtgcacatgattgtacgatagactccaggcaaccatgtgcatctgtgcaagatgacctctgccccaagagaagggttacggtctaattaaatgtttaccaagatggtaccagtgggctctccccgtgtcctttggtgttattggagctggtgtatgacagactcaaggaaattttttaaggaaaatgaagaagaaatcaacctttatggttctctttcattggaagaggagaataaggaaagaaatggcaggtagagagggagggggaaaggaatagaaatggcatgtctttgatgctgtggcttgtgtggggacaatgggaagagcacagcaggcacaacatatctgtgttagtgccacgtggtatctgttaagtatggccagagcctcacatataagtgaagagagttaagacaattcttgctctttgaacaataatagtctatagaatttctattggcaaaccatcccagacaacctgacctatcaaacaaaagcaaataatccctgtctcagaactgctggtctaaaagctagaaggggcatgataatggaaattgctagaaaagagagaatgctctactctctttcctgtgcctacctacccccatcctaaaccctgtaaaacagaatttcaaaatagatgtcaaatatgaagtaattcagacttccaaagaaggaaagagttctgcccagggcagtatgagcaaatccacagggatgttaagatttggtccaactcaaaggtttatgggcagtgagcctagagtctcttgagagtaaacccttgcatttgggacaaggagaatatgtgaagttcaggagtgctcacactagagcaagatccagaaaaaaaaaaatccaatggcattttaaactagattgcattatcactcaatgctgttactttgagcagacaaatcagttgaatgggagggcaaatggcagaaatgaacaaaagctattaggtgaaagcatccccaatgtatcagttgtgagatgatttttgtttaatgatgatcaggtttacattgaagtggcttggaagacgtatttcagagggactgggtttgtactgcaaaactctgaacactagagcaggttctactagcacttgggcagtaaggtagcgggtgtgtattatgctattgccatagttctcgtctttgtggattcacataccctttcccatgaggagcttgctactaacagcctcctgtttctgttgtttttatatgggagaagagaaagagcttggaatttcaattgtctaaacaattggtatgatttacaagaaggcaaaccattcaggagatgttcaacagtgtatcattcttagcattcaatacaatgtttattataaaatatacacctgagtttatgtttttctgccaggctgaagggcaataatgtcttgctatgcaaacactctattttatgtgtgaatttttttaactgtaattttatgtgtgaatttttttaactaaactctatcatcattttctatgttgacatcttttttttttttttaatctgtttccaactctgagtctgtgaactatctcttctgactggatgctggcctaaaatcctattagtgcttaaacagacctcaaaacactctgaacctgtaggccaatacagagatgttgttctttgatatatcttgggtccttgatggcttcaacaaacaaggtcataatttgtttaaattcagtgttttctgtagataccttcttctcagtttcattaagaagagtaaccatctttggttttccaaagaatggaaactcctaccctagactttagacttagagcgtctgcctttcacgatgagtaagagatccagaatgtttaggggatgtgcgtcagcccacctggtacagtggcaaagctgaatgcgaacttgaggcctcctgaggcctgaccttctatgcccccagccctccaccccaagcaccttttggtgtggctggaaacacatgacattggatgtgatttttctcaagcccttcactgtggaaggcatgggagactgcccagcattgggcatgtggctgttaacgtttccatttcaagtccctgattcttactggagaagttaaggagccacttaatgttttcacagacctctgattctgttgtgaatgtggcattccagtgagtacaacctgcttgctataaagaaagcagcatattttgacaattttatttcttccttgggtacttacatttttattacaaaaatggccgttataaaaaaagacagaagggctgggcagtggcttgctccctagaaactgagattccgaagcaggtgtttcctctcccctagactcagaggtacatttaatccatcttctccatttcctccttcaggaccagctatgagattcagtgcatttctagcccagcggatgttcattctccactaaacttcatcttttactaagcaaagggggattattccatgaggcagccaggagcaaggggccatgatattcatgactttgtctgctgggcatttttcaaagtgtccttgaattcactcagcaaacaaagctttctggagaatctctcaaaacttaggccctgctccatttggccaaaaatgatggctgctccaaaactctgaacttcttaaaactccatctgctacattatttctggagtttaaacatgactttttctgtctttgagtatagatgtgtttgtttaattaacgaagcacaagtctgttaagcagaaggctccaagctgtattctatacttgggaatccttggtgccatctttattctaccaagtgccaatcaccatggctaaagtgggcgtatattacagcctgtgtcctaagcttagaagctttaatgtacttttttaaatgaaaagtattagagggggttgaacattgtaactaaagcataaagttagaccaattacatgcagagatgtttatttaatattgtgtgagctgagtccttctgtataaattatttgcacacttttcttgcatgatgaactgattttttatagttgtttgtaccagacggtggcatatttttgtaaaaaacttttgacactgaattgcaataaatgtttttccaacaaca

SEQ ID NO: 10579 - DNA, 1227 bp, Homo sapiens
  source 1..1227: mol_type = unassigned DNA
agcactcccggagcctgcaacgcttgagatcctctccgcgcccgccaccccgcagggtgccccgcgccgttcccgccgccccgccgcccccgtcgcgggcccctgcaccccgagcatccgccccgggtggcacgtccccgagcccaccaggccggccccgtctccccatccgtctagtccgctcgcggtgccatgccattcctcgggcaggactggcggtcccccgggcagaactgggtgaagacggccgacggctggaagcgcttcctggatgagaagagcggcagtttcgtgagcgacctcagcagttactgcaacaaggaggtatacaataaggagaatcttttcaacagcctgaactatgatgttgcagccaagaagagaaagaaggacatgctgaatagcaaaaccaaaactcagtatttccaccaagaaaaatggatctatgttcacaaaggaagtactaaagagcgccatggatattgcaccctgggggaagctttcaacagactggacttctcaactgccattctggattccagaagatttaactacgtggtccggcctgccttcaaaggcctcaccttcactgacctgcctttgtgcctacaactgaacatcatgcagaggctgagcgacgggcgggacctggtcagcctgggccaggctgcccccgacctgcacgtgctcagcgaagaccggctgctgtggaagaaactctgccagtaccacttctccgagcggcagatccgcaaacgattaattctgtcagacaaagggcagctggattggaagaagatgtatttcaaacttgtccgatgttacccaaggaaagagcagtatggagatacccttcagctctgcaaacactgtcacatcctttcctggaagggcactgaccatccgtgcactgccaataacccagagagctgctccgtttcactttcaccccaggactttatcaacttgttcaagttctgaatcccagcacatgacaacacttcagaagggtccccctgctgactggagagctgggaatatggcatttggacacttcatttgtaaatagtgtacattttaaacattggctcgaaacttcagagataagtcatggagaggacattggaggggagaaatgcagttgctgactgggaatttaagaatgtgaacttctcactagaattggtatggaaaagcaaaatactgtaaataaactttttttctaac

SEQ ID NO: 10580 - DNA, 3853 bp, Homo sapiens
  source 1..3853: mol_type = unassigned DNA
tcttccggaagtcgcgccggtgcgcgccggactcctcccaccagcggcgacgtcaaactcagctcctaccacttctctgtctctgccgaccggcgcagggagggctgccttttccttacagtacgccttgaggcttccgggccgctgaagtttacgagcgagggcagtgcagttactcagtgtgccggcctcggacgcacgtgagtagagtttgagaagacagaggctggctcccggcaggccacgcccgcagaggcctttccccctctccacaacttgtgttctacttggttccgccgagacccacgacggttccgcccccttcttcctagtcattgatgttgttgttcttgtcagtgccgcagccccgaccgccgggagctcgaacccgagccggggccgcccgggtggcgcggtggcggcggctgcggctgcagcagctgcgacggctgcgggggctgctccgggtactgcgggggcggccgggagccggcagccggcggcggggccggatggctctgtgcgggcaggcggcgggcgctgcgtcgctgcccagcgagctgatcgtgcacatcttctcttttctgccggcgcccgaccggctgcgggcctcggcctcctgctcgcactggcgtgagtgcctcttctatccggccctgtggccccagctccgcatctgcctccgcgtctcgcccgcggagcagcctcggctggaattcctcatgcgcaagtgcggctggttcgtgcgagagctgcgtgttgaattcgccgccgagaactatctgagcggcggtggcccaggggacggaggtggcgcggacaccgggactggaggggaggaagtcgaggccctgcagctctcagctcgttggctggaagtgctgcgcacctacttggagctggtgctttgcgtgctggtcagcatccggaacaacaggaaccttcagaagtttagtctttttggagacataagtgttctacaacagcaaggaagtttgtcaaatacatacctcagcaaggtggaccctgatggcaaaaaaattaaacaaattcagcaactgtttgaagaaatcctgagtaatagtaggcaactgaaatggctgtcctgtgggtttatgctggaaatagtaaccccaacatcactgtcatctctctctaatgctgttgccaacaccatggagcacctcagtttactggacaataatattcctggtaacagcactcttattactgcagttgaactggagcgatttgtgaatctgcactcacttgccttggatttttgtgactttacagctgagatggcaagagtcttaactgatagcaaccatgtgcctttgcaacgactgtctcttctggttcacaatgtttctgtaatgcacaagtctctggacaacatgccaaatgatgagcattggaaagccctgtcacgaaagagcaccagctttcgggtctatataatggcttttgatatcaagagtgaagatatgttaaagattctgaaacccagtataccactagagaggattcattttgatagctatatcacttgtgtttcaggggctattgttgatcttatatccaggcaatatgacaagttcctcactcattttattttaatgaatgatgtgattgacacatctggttttccagatcttagtgacaaccgaaatgaagatccgttggttttattagcatggaggtgcacaaagctctctcttctggcaattcatggttacacggtgtgggcacacaacctcattgccattgctcgtcttcggggctctgatctgaaagtgcttgaagtcaccgaagaaagcattgattttgaccaaggtgaactggccgaccaggatgtagatccagtgcataaccttattgagcaggtatccctgggcctgggtcaaccttggcatgcagtcatggacatcgaatcactcagtgtcttcactgaaccaaatcgtcatttttacagagagatgcaaagcttcagtgaagacatttagcttttttttaatgtagaattcctgtggttacatatgcaagtagggtcctattatgtttttttttcagtagtgtgaattaatccttttgtgctgtgtttaatcagtattagctttatagaattatatatgtatattctacttcttgatcaaagaacgtagtcgggtattggtttagaagttcaaagtgacaatgtatagggctttcacggttaatggacttgttaccaaaccttaaggatatacagccgaagattgtctgaggttgctggctaactttatttttcactgagttactctgcctttttgacgtttttattctttgtgtgtcagagttcagagctcaggagccaaaatatttttatacatatatagatatatatccatagcctggtagatttatatgcaatgcactgcatccatgcattctgatagcatttcattaattttgatttcaaatggaagataaataatatcccaaatgaattatctgtaacagaaaagccaagactttaactttcattacatatctaatagttgatatcaccagttaccattttgaattttgtatagtactaggttagaacattgcttaatccttttaaaaaaaatgcatttacgtaaacacgaatactgaaattgttggattttttaactatatctgacataattttattcatcaattacattacacattcatttagcccagatttcaaatagtgggggaagaaagaaactgtatttcagagtaaaatctcctaaaggaaataaaaacacagagttgtaaatacacatgcttgcaaaaacattagtcgtgaaatccctagcaacaagtcactggatttttctctgtcagcacgcgtgtcagctgccaaagaatagacttaatgaagaagtgcccacatgctggcaggggccggcccactctggccagccagatactgctagattgtaatatttaaggtcgaatttcgacctgtggtacacagctgtgctgtggctcagtcagcaacctcagaactctgaaaaaacaaaacaaaaaaaaaaaaaaaagaaaaaaaaaacatgcacctgtttcactgtgaatagtgaatgtaaaggaaagaaaggaaaaactgaaagcttgttctatcacaggtatgagctgctatgatacatgaagaacattccatgaagtatgttttaaaaccttgttatatctgagaggctttaaaagcctattaactgtttcagggcaaccgcggtacagacgtggtctctgtgagacttccacctgaccccagttttaagtggtacgaatgttgtgcatttaatgttaaaggacagtctgcaataataaagtaagtagccaacctgggtgcccagcagtgctgagacctggctgctctattgtaagctttggaaacacaatttatgcaacagatgtccagatatgattctatttatggaaaaaagtttatatgtgttttacaaatggttttaccatcttatattaaaatgaccttttgacaggtgtgcactgttttgtctccagtgagcacataccatgcggattttatatgtacatcagtagtgtgaatccactggcacagtgtgtgtaaatgccagatgtggtgagattttatcttataaatgtgatcagataaaataactcctgacagaaactgtaaggaaaccagctgaatgtttgacctgatgactgatgttgtatggtttatgttaaatgtatattcttttaatcaatgaataaagcattaaaaatgatcattgtaatatattttattgtatatgaagcatgactacttttagtgttaaataaactgcaataatccttatattgtgtataataa

SEQ ID NO: 10581 - DNA, 405 bp, Homo sapiens
  source 1..405: mol_type = unassigned DNA
ctcccaccagcggcgacgtcaaactcagctcctaccacttctctgtctctgccgaccggcgcagggagggctgccttttccttacagtacgccttgaggcttccgggccgctgaagtttacgagcgagggcagtgcagttactcagtgtgccggcctcggacgcacgtgagtagagtttgagaagacagaggctggctcccggcaggcggcgggcgctgcgtcgctgcccagcgagctgatcgtgcacatcttctcttttctgccggcgcccgaccggctgcgggcctcggcctcctgctcgcactggcgtgagtgcctcttctatccggccctgtggccccagctccgcatctgcctccgcgtctcgcccgcggagcagcctcggctggaattcctcatgcgca

SEQ ID NO: 10582 - DNA, 3464 bp, Homo sapiens
  source 1..3464: mol_type = unassigned DNA
ggatccgtggcccctcccccggccaaccgtcgattgggccggcgcgtgacgtcactccgttttagccaaacaaatgggtttcggggcgagcgttgggcgccgccgcgccgcgctgggtgctcggtccgactcagcggtggggagtgagccaggcctcccgccaccgctgctgccgccaccactgcgtcgggctggtgcagccccgggccaggccgcggccggggcaggagcgcaggggctttgttatgcacctaaagccatattggaagctccagaagaaagagcaccccccggaagtcagcagggaaacgcagagaactcctatgaaccaccaaaaggctgtaaatgatgaaacatgcaaagctagccacataacatcaagtgtctttccttcagcctctctcggtaaagcatcatctcgaaagccatttgggatcctttctccaaatgttctgtgcagtatgagtgggaagagtcctgtagagagcagcttgaatgttaaaaccaaaaagaatgcaccatctgcaacgatccaccagggcgaagaagaaggaccacttgatatctgggctgttgtgaaacctggaaataccaaggaaaaaattgcattctttgcatcccaccagtgtagtaacaggataggatctatgaaaataaaaagttcctgggatattgatgggagagctactaagagaaggaaaaaatcaggggatcttaaaaaagccaaggtacaggtggaaaggatgagggaggttaacagcaggtgctaccaacctgagccttttgcatgtggcattgagcactgttctgtgcactatgtgagtgacagtggggatggagtctatgctgggaggcctctgtcagttatacagatggttgccttcttggagcaaagagccagtgctctgctagctagctgttcaaaaaactgcacaaactcacctgcaattgtgaggttttctggccaatccagaggtgtgcctgcagtgtctgagtcctattctgccccaggagcttgtgaagaacccacagaaaggggaaatcttgaggttggtgaaccacagagcgaaccagtccgtgtccttgacatggtagccaagttggagtctgagtgcctgaagcggcagggccagcgtgagcctgggagcctctcaaggaataacagcttccgtcgaaatgtgggcagagtattgcttgcaaatagcactcaggctgatgaaggcaaaacaaagaaaggcgtcttggaggcacctgacactcaggtgaatcctgtggggtctgtatctgtggattgtggcccttcaagagctgatcgttgttctcctaaggaggaccaggcctgggacggtgcttctcaggactgccccccattgccagcaggagtgagtttccacatagacagtgcagagttagagccgggttcgcaaactgccgtgaaaaacagcaacagatatgatgtggaaatgacagatgaactcgttgggttacctttttcctctcatacctattcccaagcctctgaattgcccacagatgctgttgattgtatgagcagagagcttgtgtcccttactagccgaaatcctgatcaaagaaaagaatctttgtgcattagtatcactgtgtccaaggtagacaaagaccagccttccattttaaactcctgtgaagacccagttccagggatgttgttttttttgccacctggtcagcacttgtcagactattcccagttgaatgaaagcacaacaaaagagtcttcagaggccagccagcttgaagatgctgctgggggtgacagtgcatctgaggaaaaaagtgggtctgctgagccatttgtactgccagcctcttctgtggaaagtacattaccagtgcttgaggcatccagttggaagaagcaggtgtcgcatgacttcctggagaccaggtttaaaatccagcagcttttggagcctcagcagtacatggcttttctgccccaccacattatggtaaaaatcttcaggttacttcccaccaagagtttagtggcccttaaatgtacctgctgctatttcaagtttatcattgagtactacaatatcaggccagcagattctcgctgggttcgagatccacgctatagagaggatccttgcaaacagtgcaagaaaaagtatgtgaaaggggatgtgtccctgtgccgatggcaccccaagccctattgccaggcattgccctatgggccagggtattggatgtgctgccaccggtctcagaaaggattccctggctgtaagctggggcttcatgacaatcactgggttcctgcctgccacagctttaatcgggcaatccataagaaagcaaaagggactgaagctgaagaggaatactaaagtccatgtgagaggcaacaaaaggaccggtttctaaagctgcaaaacacctagatacaccgttcaaatgagcgtagccccctgagtcatcactctagaagaatctgtacatcatcaggactgcattgctcaggcattttctaaactctaaatttacgagctgtacaaaaaaattggtcttgttgtttatagtggcatctcatgtttgaacccgggtggtatcccacagttggattcagttggctgtgaataactgcctgttttcctaaatcaaacccatcctcaaaggatgaagactcaccaccatccaggacattcagaagagttcactgcagatgctgcaggtagtcctcaaaaatgggttccagaaatgttttgagcactggcaacatatttgaaataagtgaatattgtcctgtgaaaagaatagcaggacttttagatgaaaagtattcttaaaaagaaaagtcaggcaccccaccttagacctcgtatgcttgatcctgtgagattgatgtttgtggctggaggtggatttcatgccctgtggtgtttacagtgtatataatggttgtgttttcatggggctatgaaagtgcacgttaaacctgagcgcctttacctttagatgagtgctttggcccctctgtgaatagcacgattaaaatccagttgtatataatggacagctaacggaacaatataatcaccacaatgcagctaggatagtgttgcggctataattttgtgttttttttttttaattgtctagtcttaaatttgtacatcttgtataaaatatgaatgtttcccaaataaactatgaatgtttcctgtataatatatgaatgtttctgagaagaaactctaaatagttgaaaggctaacctgctcaaaggataccaaataatggtttaactggacaacctgaaaattagcatagaaaacaatcctttgttatattttagtgatccacaagattgagaaaatattatatagttagataataacattcttgtctactttatcctgtctggttacaaaattttttaaaacttaaataaaaacatgcatcttaaatgg

SEQ ID NO: 10583 - DNA, 2831 bp, Homo sapiens
  source 1..2831: mol_type = unassigned DNA
gatgtcactgcaggcccgggcggggacctgggctcacggaagggccggggggacccgcagggtagaaaaaggaagttgtcttccacgaacgcttggaatcgcagtggatttgaatcgaaagttgttcggggctttgttatgcacctaaagccatattggaagctccagaagaaagagcaccccccggaagtcagcagggaaacgcagagaactcctatgaaccaccaaaaggctgtaaatgatgaaacatgcaaagctagccacataacatcaagtgtctttccttcagcctctctcggtaaagcatcatctcgaaagccatttgggatcctttctccaaatgttctgtgcagtatgagtgggaagagtcctgtagagagcagcttgaatgttaaaaccaaaaagaatgcaccatctgcaacgatccaccagggcgaagaagaaggaccacttgatatctgggctgttgtgaaacctggaaataccaaggaaaaaattgcattctttgcatcccaccagtgtagtaacaggataggatctatgaaaataaaaagttcctgggatattgatgggagagctactaagagaaggaaaaaatcaggggatcttaaaaaagccaaggtacaggtggaaaggatgagggaggttaacagcaggtgctaccaacctgagccttttgcatgtggcattgagcactgttctgtgcactatgtgagtgacagtggggatggagtctatgctgggaggcctctgtcagttatacagatggttgccttcttggagcaaagagccagtgctctgctagctagctgttcaaaaaactgcacaaactcacctgcaattgtgaggttttctggccaatccagaggtgtgcctgcagtgtctgagtcctattctgccccaggagcttgtgaagaacccacagaaaggggaaatcttgaggttggtgaaccacagagcgaaccagtccgtgtccttgacatggtagccaagttggagtctgagtgcctgaagcggcagggccagcgtgagcctgggagcctctcaaggaataacagcttccgtcgaaatgtgggcagagtattgcttgcaaatagcactcaggctgatgaaggcaaaacaaagaaaggcgtcttggaggcacctgacactcaggtgaatcctgtggggtctgtatctgtggattgtggcccttcaagagctgatcgttgttctcctaaggaggaccaggcctgggacggtgcttctcaggactgccccccattgccagcaggagtgagtttccacatagacagtgcagagttagagccgggttcgcaaactgccgtgaaaaacagcaacagatatgatgtggaaatgacagatgaactcgttgggttacctttttcctctcatacctattcccaagcctctgaattgcccacagatgctgttgattgtatgagcagagagcttgtgtcccttactagccgaaatcctgatcaaagaaaagaatctttgtgcattagtatcactgtgtccaaggtagacaaagaccagccttccattttaaactcctgtgaagacccagttccagggatgttgttttttttgccacctggtcagcacttgtcagactattcccagttgaatgaaagcacaacaaaagagtcttcagaggccagccagcttgaagatgctgctgggggtgacagtgcatctgaggaaaaaagtgggtctgctgagccatttgtactgccagcctcttctgtggaaagtacattaccagtgcttgaggcatccagttggaagaagcaggtgtcgcatgacttcctggagaccaggtttaaaatccagcagcttttggagcctcagcagtacatggcttttctgccccaccacattatggtaaaaatcttcaggttacttcccaccaagagtttagtggcccttaaatgtacctgctgctatttcaagtttatcattgagtactacaatatcaggccagcagattctcgctgggttcgagatccacgctatagagaggatccttgcaaacagtgcaagaaaaagtatgtgaaaggggatgtgtccctgtgccgatggcaccccaagccctattgccaggcattgccctatgggccagggtattggatgtgctgccaccggtctcagaaaggattccctggctgtaagctggggcttcatgacaatcactgggttcctgcctgccacagctttaatcgggcaatccataagaaagcaaaagggactgaagctgaagaggaatactaaagtccatgtgagaggcaacaaaaggaccggtttctaaagctgcaaaacacctagatacaccgttcaaatgagcgtagccccctgagtcatcactctagaagaatctgtacatcatcaggactgcattgctcaggcattttctaaactctaaatttacgagctgtacaaaaaaattggtcttgttgtttatagtggcatctcatgtttgaacccgggtggtatcccacagttggattcagttggctgtgaataactgcctgttttcctaaatcaaacccatcctcaaaggatgaagactcaccaccatccaggacattcagaagagttcactgcagatgctgcaggtagtcctcaaaaatgggttccagaaatgttttgagcactggcaacatatttgaaataagtgaatattgtcctgtgaaaagaatagcaggacttttagatgaaaagtattcttaaaaagaaaagtcaggcaccccaccttagacctcgtatgcttgatcctgtgagattgatgtttgtggctggaggtggatttcatgccctgtggtgtttac

SEQ ID NO: 10584 - DNA, 2810 bp, Homo sapiens
  source 1..2810: mol_type = unassigned DNA
cggcggtggcgtcccaagatggcgtcgtggctgccggagactctctttgaaactgtaggacaaggcccgccgcctagcaaagactattaccagttactggtcacccggtctcaggtaatctttagatggtggaagatctctctaaggagtgagtatcgatcaacaaaacctggagaagcaaaagaaacccatgaagacttcctagagaattcacatcttcaaggtcaaactgccttaatatttggtgcaagaatattagactatgtcatcaatttgtgcaaaggtaaatttgacttccttgaacggctctcagacgatttgctcctgactatcatttcttatctggatcttgaagatattgccaggctttgtcaaacatcacacagatttgcaaagctgtgcatgtctgataaactgtgggaacagatagtccagtcgacctgcgacaccatcactcctgacgtgagggccctggcggaggacacaggctggagacagctgttcttcaccaacaagctccagctccagcggcagctccgcaagaggaaacaaaaatatggaaacctgagagaaaagcaaccttaggcacacattttcctaccagcagggagctcaggcatggctgtgtttctcttcagtgtccaaatctcttctgtctccttttcttaagaactaagaggttttgttgatgcgtggagccatttgaaactcgtaggggatttgcacacaaatgcagcagagtctggctccccagtgccttgctagagtcaccgtcattctgaggtcaaatcatggcccgaggacaagggctgtaagacagggagccccataggccatcatcatccttatcccacacccattataaaagaggtttctattgtatataaacaaacaataaatgattattagcaggtttttattagacatctattttatctaggcattagaaagggtaatggggcttttgaattttttcctggcattgtgtcgtctgcgtccagccatgaagctggtggctgagtgtccccaccaggaactgtgaagggcacgtaccacgggaggcactcagggtgggtgcagctgccttcccaactttgttctgctaagtccatattcagggccctatccttgtgagcccaggatgccagggtccatccccgcatgtagacagcttccgacctggtgctggagcatgactggagaagtgcaggcatcctgcttgcggaccttgctcaaagtacaacttcccaggactacttcacattgttaaataaacctataaacatttcttttcttttctttttttttttttttttgtattttctttttagtagaggtggagtttcgccatgtaggccaggctggtcttgaactcctgacctcaagtgatctacctgctctggcttccaaagtgctgggattacaggcatgagccactatgtctggctaaaacctataaacatttcttagagaaatgctgttccccaaaggaatgtgaacagctaccacttttaacaaggatatttaagaaaacagactatgagttaactaagtaaaaatgtaaatatggtttgcatgctgttaacatggcagaggggtaaaaagaatacagtcctggggagaaaggtcacttcactgagaaggcttacttaaaaatgtttttctccctgcactttcatgattattaagtacccctagaaaatgaactcatagcagcaaataatctaatgactccttttaggttacagagcaaagtagctttctacttccacatcacattataatatagccttataatttcttctttcctgcaaccttcactttcctacctaggaaaactcacctccggtgccagagaaacttcccaggatgcactagggccctgtgaacaatacagaagttgtggactctggctctttgtcccacctaagtccttccagaagggctctacagcatggcttagtgacattaaaaaaaaaaactgaacccatgttaatatcaaacaagattttaatcttcattcacacacccttaaaacccagtcacggggctccccggtgccagtttgagaccgtcaacctagccctctctgcttctcattgctggaggtacacacagtcaaaagttttccgtgactgtgaaatccagtgcaatctgcttcccagcagatgaggagcctgacgtggttatgtctggatttagtccaagaacagagcaaagctttaattgtcaagagacccaggcctcattctccacttaggagagtttgctagggcaggtacaggtaaaggtaaccagcaggcagctgagagcaagaaggcacgtgctctgcagagctctagctgccttggctctccctgagctcccagacttcactcatggcctaattttcaatgacagaacgtaggttttatcgtgaggatgcagacacaaccacaattacgtatgtcaacataacttcataaatatgtaactgtaacttattggtaacatcagtgcaagatgattaaagcttcatgtgtagtattttatcaacaaacagattctgaaagcttatggacatgcgcaatagttgattcagcttcaatcaataagaacataaatatggcaatttgaaaacactatgtatatacctactcacatatatattatacttacgatatatacttatatgtagtatataataatattacatataaaaatgttataaaaataaatgctaaagtaaataaaaaaagagccattaatatgttaactattgttaaataatagctaaaataatacagattattaaattattttaatactta

SEQ ID NO: 10585 - DNA, 3632 bp, Homo sapiens
  source 1..3632: mol_type = unassigned DNA
aagtgtctgtagcgtccctccctctcaaccacaataacaggcggagggtcggcgtaggtactttgaactcaagtaaacaaaagggaagattttctcgttgatactggagactgcacaacaatggggccacgaaagaaaagtgtgaaaacatgtatcatgaataatgaaattccagaagaaatgacagcagatgaaacaaaggactatatgaatcaactttcacatgaagtactttgccatatttttaggtacctccctctgcaggatatcatgtgtatggaatgtctttcccggaagctaaaggaagcagtgaccctatatctgcgagttgtgagagttgtagatctctgtgcagggcggtggtgggaatacatgccaagtggctttacagatgccagttttctaacactattaaagaagatgccagatgttgaacagctatatggccttcaccctcgataccttgagaggcgaagagtaaggggccatgaggcttttagcattccaggagtcctagaagctttgcaggcatgcccaaacttagtgggtgtggaaacttctcatttggagttggtagaatccatttggacatatatgccccatgttcatattttggggaaatttcgtaatcgtaatggagcttttccaattcctcctgaaaataaactgaaaattcctataggagccaaaattcaaactttacatttagttggggtgaatgttcctgaaattccttgtatcccaatgctaaggcacctttatatgaagtgggtaagactcactaaaccacagccatttaaagacttcctttgtatcagcttaagaactttcgtcatgaggaactgtgcaggacccacaaattccttgaaatatgtccctttagtaacaggcttagcctctgcccgaaacttggaacacttagaaatggttcgagttcctttccttggaggtcttatccaacatgttgttgaagacagttggagatcaggtggttttagaaatttgcacactattgttctgggagcttgcaaaaatgctcttgaagtagatcttggttacctcatcattactgctgcccgtaggttacatgaagttcggatccagccttccctaaccaaagatggtgtcttttctgccctaaagatggcagagttggagtttccccagtttgaaacccttcatctaggatatgtagatgagtttttgctacagagcagaatggctaatgcggatctggtgaagtatggtttggctgatgtggtagaaaatcctggtatcatcactgatatagggatgaaagcagtcaatgaagttttttcctgtatcaaatatctggcaatttacaattgccctcatctacacaacccatacaattggatctcagaccactcaagatggactcgattggttgatatcaacctagtacggtgccatgctttgaagctggactcttttggccagtttattgaattattacccagcctagagtttatttcactggatcagatgtttcgtgaaccacccaagggttgtgctcgagttggtctgagtgcaggcacaggaattggtgtttcatcagctcttgttagcaaccagaactccaacaatgacgataataatgcccagaataacaatgccaacatccacgacaacaatcaccatcatccagatgactcagacgaggagaatgactttcggcaagatctgcagccaggagagcagcagtttgcagctgacgcattaaatgagatggaagacatcgtccaagaagatggagaggtggtggccgagagtggaaataatactccagctcacagccaggcaattattcctgtggatgttgatgaggaacaagcaggacccagtggtcttcagcgtgtagtaaaaccaacctcaattactgttcatgattcagagagtgatgatgaagaagatagtctagaactccaagaagtctggattcctaagaacggtactcggcgttactctgaacgtgaagaaaaaactggagagtcagtgcagtccagagaattgtcagaagtagccaaaacaaagccacgtcacgccatgaaacggaagcggacagcagataaatccactagtacaagtgatcctgtgatcgaggatgaccatgtgcaggttcttgtattaaaatccaagaatcttgttggagtcactatgaccaattgtggaatcacagatctagtgctaaaagactgtccaaagatgatgttcatccatgctaccaggtgcagggtactaaaacatttaaaggtagaaaatgcaccaattgtaaaccgatttgactatgcacagtgcaagaaactgaacatggatcaggtactagaccagatactaagaatgccacccgagagaaaccgcatcatatacctacgcccaatgcagcaggtggacactctaactttggagcagaagctatttagtggtccctacccctatcacatctgtattatccatgaattcagtaaccctcccaatgtccggaataaggtgcgcattcgcagctggatggacactatagcaaacatcaatcaagagctcattaaatatgaattcttccctgaagccactcgaagtgaagaagacttaaagaaataccccaagtacccctgggggagagaaatctatactttagaaggtgttgtggatggagctccatattccatgatttctgacttcccttggctgaggtcattacgagctgcagagcccaacagcttcgctcgatacgactttgaagacgatgaagaaagcactatctatgctcctagaaggaaaggacagctgtctgcagacatctgtatggaaacaataggagaggaaatttcagagatgcgtcagatgaagaagggtgtatttcagcgagtagtggcaatttttatccactattgtgatgtcaatggagagccagttgaagatgactacatttaattggtccctcctcctttccagctattttgtcagaaagcaagtagggccatccagctgccagagtgctccacagggacttgaggcatgcagttgggaggtcctggctcggtttgctatatagggaatatataaggaacatcgaaattgtatacaaagatttgtacataaaaaatatacaaagacgcttcctaaagtaccaactttatatcatatgtttatacaatttaatttaaaaattcattttaaggaagacagataatttgaaagacttttgtttttcttgacttaattcatgaagtatcattttttgactgagtctccatttacttcattcttaatgattattgtcatccctttaaatctgtgcctttttcttcttgagcgaagctgtttgagtaaacctgttgaagagtgtttgtgtcttttgtgcttttttgttgttattaaaacaccaactaaaccttatagtcaagacaaggctctatgtttctgtacaaagctgtagttctttcttagtattatagttgccatgtttcttaaaatcaagtaaaaagacttatgagcttaaaaaaaagtgagtttgagagggaaatggaaaagtttccagagtatttctagtaatttatttccacattgaattgtgtatatgctttatcttgaatataaaataaaagtttatt

SEQ ID NO: 10586 - DNA, 4424 bp, Homo sapiens
  source 1..4424: mol_type = unassigned DNA
atgcgagcggcggcggaagcggaagtgcctcagcggtaggggccggggaagtgtctgtagcgtccctccctctcaaccacaataacaggcggagggtcggcgtaggtactttgaactcaagtaaacaaaagggaagattttctcgttgatactggagactgcacaacaatggggccacgaaagaaaagtgtgaaaacatgtatcatgaataatgaaattccagaagaaatgacagcagatgaaacaaaggactatatgaatcaactttcacatgaagtactttgccatatttttaggtacctccctctgcaggatatcatgtgtatggaatgtctttcccggaagctaaaggaagcagtgaccctatatctgcgagttgtgagagttgtagatctctgtgcagggcggtggtgggaatacatgccaagtggctttacagatgccagttttctaacactattaaagaagatgccagatgttgaacagctatatggccttcaccctcgataccttgagaggcgaagagtaaggggccatgaggcttttagcattccaggagtcctagaagctttgcaggcatgcccaaacttagtgggtgtggaaacttctcatttggagttggtagaatccatttggacatatatgccccatgttcatattttggggaaatttcgtaatcgtaatggagcttttccaattcctcctgaaaataaactgaaaattcctataggagccaaaattcaaactttacatttagttggggtgaatgttcctgaaattccttgtatcccaatgctaaggcacctttatatgaagtgggtaagactcactaaaccacagccatttaaagacttcctttgtatcagcttaagaactttcgtcatgaggaactgtgcaggacccacaaattccttgaaatatgtccctttagtaacaggcttagcctctgcccgaaacttggaacacttagaaatggttcgagttcctttccttggaggtcttatccaacatgttgttgaagacagttggagatcaggtggttttagaaatttgcacactattgttctgggagcttgcaaaaatgctcttgaagtagatcttggttacctcatcattactgctgcccgtaggttacatgaagttcggatccagccttccctaaccaaagatggtgtcttttctgccctaaagatggcagagttggagtttccccagtttgaaacccttcatctaggatatgtagatgagtttttgctacagagcagaatggctaatgcggatctggtgaagtatggtttggctgatgtggtagaaaatcctggtatcatcactgatatagggatgaaagcagtcaatgaagttttttcctgtatcaaatatctggcaatttacaattgccctcatctacacaacccatacaattggatctcagaccactcaagatggactcgattggttgatatcaacctagtacggtgccatgctttgaagctggactcttttggccagtttattgaattattacccagcctagagtttatttcactggatcagatgtttcgtgaaccacccaagggttgtgctcgagttggtctgagtgcaggcacaggaattggtgtttcatcagctcttgttagcaaccagaactccaacaatgacgataataatgcccagaataacaatgccaacatccacgacaacaatcaccatcatccagatgactcagacgaggagaatgactttcggcaagatctgcagccaggagagcagcagtttgcagctgacgcattaaatgagatggaagacatcgtccaagaagatggagaggtggtggccgagagtggaaataatactccagctcacagccaggcaattattcctgtggatgttgatgaggaacaagcaggacccagtggtcttcagcgtgtagtaaaaccaacctcaattactgttcatgattcagagagtgatgatgaagaagatagtctagaactccaagaagtctggattcctaagaacggtactcggcgttactctgaacgtgaagaaaaaactggagagtcagtgcagtccagagaattgtcagtaagtggaaaaggcaagactccacttcgaaagaggtacaactcccatcagatgggccagtcgaagcagtttcccctcgaggaaagcagctgtgagaaaggctgtcaggtcaccagtgagcagatcaaagccgatatgaaagcagctagggatattcctgaaaagaaaaaaaacaaggatgtttatcccagctgcagcagcaccaccgccagcacagtgggaaactccagctcacacaacactgcttctcaaagccccgactttgtaaggacggtgaacagcggcggctcttccgagcctagccctacagaagtggatgtgtccaggcagtgtgcctgctcccccggtgggtcagaggactctgaggccatggaggagggagatgcagagagttctgtctgccccagatgctgctgtcacaggccccaggaatcccaaaggagaactagcaggtgttctgatgaggaacgtccttcaaccagccgagcctgtgttgtgaatggcccggatggtacgagatccgccttttcctttaggactctgccacaaggggggtcttcaggcccagcacatgatgagaggactaatgggagtggctctggggctacaggtgaggacaggagggggagctcccagcctgagagttgtgacgtgcagtctaatgaagactaccctcggaggcccctaaccagggccaggagcagactgtcccatgtactgctggtatctgagtcagaagtagccaaaacaaagccacgtcacgccatgaaacggaagcggacagcagataaatccactagtacaagtgatcctgtgatcgaggatgaccatgtgcaggttcttgtattaaaatccaagaatcttgttggagtcactatgaccaattgtggaatcacagatctagtgctaaaagactgtccaaagatgatgttcatccatgctaccaggtgcagggtactaaaacatttaaaggtagaaaatgcaccaattgtaaaccgatttgactatgcacagtgcaagaaactgaacatggatcaggtactagaccagatactaagaatgccacccgagagaaaccgcatcatatacctacgcccaatgcagcaggtggacactctaactttggagcagaagctatttagtggtccctacccctatcacatctgtattatccatgaattcagtaaccctcccaatgtccggaataaggtgcgcattcgcagctggatggacactatagcaaacatcaatcaagagctcattaaatatgaattcttccctgaagccactcgaagtgaagaagacttaaagaaataccccaagtacccctgggggagagaaatctatactttagaaggtgttgtggatggagctccatattccatgatttctgacttcccttggctgaggtcattacgagctgcagagcccaacagcttcgctcgatacgactttgaagacgatgaagaaagcactatctatgctcctagaaggaaaggacagctgtctgcagacatctgtatggaaacaataggagaggaaatttcagagatgcgtcagatgaagaagggtgtatttcagcgagtagtggcaatttttatccactattgtgatgtcaatggagagccagttgaagatgactacatttaattggtccctcctcctttccagctattttgtcagaaagcaagtagggccatccagctgccagagtgctccacagggacttgaggcatgcagttgggaggtcctggctcggtttgctatatagggaatatataaggaacatcgaaattgtatacaaagatttgtacataaaaaatatacaaagacgcttcctaaagtaccaactttatatcatatgtttatacaatttaatttaaaaattcattttaaggaagacagataatttgaaagacttttgtttttcttgacttaattcatgaagtatcattttttgactgagtctccatttacttcattcttaatgattattgtcatccctttaaatctgtgcctttttcttcttgagcgaagctgtttgagtaaacctgttgaagagtgtttgtgtcttttgtgcttttttgttgttattaaaacaccaactaaaccttatagtcaagacaaggctctatgtttctgtacaaagctgtagttctttcttagtattatagttgccatgtttcttaaaatcaagtaaaaagacttatgagcttaaaaaaaagtgagtttgagagggaaatggaaaagtttccagagtatttctagtaatttatttccacattgaattgtgtatatgctttatcttgaatataaaataaaagtttattaaaaacttt

SEQ ID NO: 10587 - DNA, 4132 bp, Homo sapiens
  source 1..4132: mol_type = unassigned DNA
ccctctcaaccacaataacaggcggagggtcggcgtaggtactttgaactcaagtaaacaaaagggaagattttctcgttgatactggagactgcacaacaatggggccacgaaagaaaagtgtgaaaacatgtatcatgaataatgaaattccagaagaaatgacagcagatgaaacaaaggactatatgaatcaactttcacatgaagtactttgccatatttttaggtacctccctctgcaggatatcatgtgtatggaatgtctttcccggaagctaaaggaagcagtgaccctatatctgcgagttgtgagagttgtagatctctgtgcagggcggtggtgggaatacatgccaagtggctttacagatgccagttttctaacactattaaagaagatgccagatgttgaacagctatatggccttcaccctcgataccttgagaggcgaagagtaaggggccatgaggcttttagcattccaggagtcctagaagctttgcaggcatgcccaaacttagtgggtgtggaaacttctcatttggagttggtagaatccatttggacatatatgccccatgttcatattttggggaaatttcgtaatcgtaatggagcttttccaattcctcctgaaaataaactgaaaattcctataggagccaaaattcaaactttacatttagttggggtgaatgttcctgaaattccttgtatcccaatgctaaggcacctttatatgaagtgggtaagactcactaaaccacagccatttaaagacttcctttgtatcagcttaagaactttcgtcatgaggaactgtgcaggacccacaaattccttgaaatatgtccctttagtaacaggcttagcctctgcccgaaacttggaacacttagaaatggttcgagttcctttccttggaggtcttatccaacatgttgttgaagacagttggagatcaggtggttttagaaatttgcacactattgttctgggagcttgcaaaaatgctcttgaagtagatcttggttacctcatcattactgctgcccgtaggttacatgaagttcggatccagccttccctaaccaaagatggtgtcttttctgccctaaagatggcagagttggagtttccccagtttgaaacccttcatctaggatatgtagatgagtttttgctacagagcagaatggctaatgcggatctggtgaagtatggtttggctgatgtggtagaaaatcctggtatcatcactgatatagggatgaaagcagtcaatgaagttttttcctgtatcaaatatctggcaatttacaattgccctcatctacacaacccatacaattggatctcagaccactcaagatggactcgattggttgatatcaacctagtacggtgccatgctttgaagctggactcttttggccagtttattgaattattacccagcctagagtttatttcactggatcagatgtttcgtgaaccacccaagggttgtgctcgagttggtctgagtgcaggcacaggaattggtgtttcatcagctcttgttagcaaccagaactccaacaatgacgataataatgcccagaataacaatgccaacatccacgacaacaatcaccatcatccagatgactcagacgaggagaatgactttcggcaagatctgcagccaggagagcagcagtttgcagctgacgcattaaatgagatggaagacatcgtccaagaagatggagaggtggtggccgagagtggaaataatactccagctcacagccaggcaattattcctgtggatgttgatgaggaacaagcaggacccagtggtcttcagcgtgtagtaaaaccaacctcaattactgttcatgattcagagagtgatgatgaagaagatagtctagaactccaagaagtctggattcctaagaacggtactcggcgttactctgaacgtgaagaaaaaactggagagtcagtgcagtccagagaattgtcagtaagtggaaaaggcaagactccacttcgaaagaggtacaactcccatcagatgggccagtcgaagcagtttcccctcgaggaaagcagctgtgagaaaggctgtcaggtcaccagtgagcagatcaaagccgatatgaaagcagctagggatattcctgaaaagaaaaaaaacaaggatgtttatcccagctgcagcagcaccaccgccagcacagtgggaaactccagctcacacaacactgcttctcaaagccccgactttgtaaggacggtgaacagcggcggctcttccgagcctagccctacagaagtggatgtgtccaggcagtgtgcctgctcccccggtgggtcagaggactctgaggccatggaggagggagatgcagagagttctgtctgccccagatgctgctgtcacaggccccaggaatcccaaaggagaactagcaggtgttctgatgaggaacgtccttcaaccagccgagcctgtgttgtgaatggcccggatgaagtagccaaaacaaagccacgtcacgccatgaaacggaagcggacagcagataaatccactagtacaagtgatcctgtgatcgaggatgaccatgtgcaggttcttgtattaaaatccaagaatcttgttggagtcactatgaccaattgtggaatcacagatctagtgctaaaagactgtccaaagatgatgttcatccatgctaccaggtgcagggtactaaaacatttaaaggtagaaaatgcaccaattgtaaaccgatttgactatgcacagtgcaagaaactgaacatggatcaggtactagaccagatactaagaatgccacccgagagaaaccgcatcatatacctacgcccaatgcagcaggtggacactctaactttggagcagaagctatttagtggtccctacccctatcacatctgtattatccatgaattcagtaaccctcccaatgtccggaataaggtgcgcattcgcagctggatggacactatagcaaacatcaatcaagagctcattaaatatgaattcttccctgaagccactcgaagtgaagaagacttaaagaaataccccaagtacccctgggggagagaaatctatactttagaaggtgttgtggatggagctccatattccatgatttctgacttcccttggctgaggtcattacgagctgcagagcccaacagcttcgctcgatacgactttgaagacgatgaagaaagcactatctatgctcctagaaggaaaggacagctgtctgcagacatctgtatggaaacaataggagaggaaatttcagagatgcgtcagatgaagaagggtgtatttcagcgagtagtggcaatttttatccactattgtgatgtcaatggagagccagttgaagatgactacatttaattggtccctcctcctttccagctattttgtcagaaagcaagtagggccatccagctgccagagtgctccacagggacttgaggcatgcagttgggaggtcctggctcggtttgctatatagggaatatataaggaacatcgaaattgtatacaaagatttgtacataaaaaatatacaaagacgcttcctaaagtaccaactttatatcatatgtttatacaatttaatttaaaaattcattttaaggaagacagataatttgaaagacttttgtttttcttgacttaattcatgaagtatcattttttgactgagtctccatttacttcattcttaatgattattgtcatccctttaaatctgtgcctttttcttcttgagcgaagctgtttgagtaaacctgttgaagagtgtttgtgtcttttgtgcttttttgttgttattaaaacaccaactaaaccttatagtcaagacaaggctctatgtttctgtacaaagctgtagttctttcttagtattatagttgccatgtttcttaaaatcaagtaaaaagacttatgagcttaaaaaaaagtgagtttgagagggaaatggaaaagtttccagagtatttctagtaatttatttccacattgaattgtgtatatgctttatcttgaatataaaataaaagtttattaaaaacttt

SEQ ID NO: 10588 - DNA, 3585 bp, Homo sapiens
  source 1..3585: mol_type = unassigned DNA
aggtactttgaactcaagtaaacaaaagggaagattttctcgttgatactggagactgcacaacaatggggccacgaaagaaaagtgtgaaaacatgtatcatgaataatgaaattccagaagaaatgacagcagatgaaacaaaggactatatgaatcaactttcacatgaagtactttgccatatttttaggtacctccctctgcaggatatcatgtgtatggaatgtctttcccggaagctaaaggaagcagtgaccctatatctgcgagttgtgagagttgtagatctctgtgcagggcggtggtgggaatacatgccaagtggctttacagatgccagttttctaacactattaaagaagatgccagatgttgaacagctatatggccttcaccctcgataccttgagaggcgaagagtaaggggccatgaggcttttagcattccaggagtcctagaagctttgcaggcatgcccaaacttagtgggtgtggaaacttctcatttggagttggtagaatccatttggacatatatgccccatgttcatattttggggaaatttcgtaatcgtaatggagcttttccaattcctcctgaaaataaactgaaaattcctataggagccaaaattcaaactttacatttagttggggtgaatgttcctgaaattccttgtatcccaatgctaaggcacctttatatgaagtgggtaagactcactaaaccacagccatttaaagacttcctttgtatcagcttaagaactttcgtcatgaggaactgtgcaggacccacaaattccttgaaatatgtccctttagtaacaggcttagcctctgcccgaaacttggaacacttagaaatggttcgagttcctttccttggaggtcttatccaacatgttgttgaagacagttggagatcaggtggttttagaaatttgcacactattgttctgggagcttgcaaaaatgctcttgaagtagatcttggttacctcatcattactgctgcccgtaggttacatgaagttcggatccagccttccctaaccaaagatggtgtcttttctgccctaaagatggcagagttggagtttccccagtttgaaacccttcatctaggatatgtagatgagtttttgctacagagcagaatggctaatgcggatctggtgaagtatggtttggctgatgtggtagaaaatcctggtatcatcactgatatagggatgaaagcagtcaatgaagttttttcctgtatcaaatatctggcaatttacaattgccctcatctacacaacccatacaattggatctcagaccactcaagatggactcgattggttgatatcaacctagtacggtgccatgctttgaagctggactcttttggccagtttattgaattattacccagcctagagtttatttcactggatcagatgtttcgtgaaccacccaagggttgtgctcgagttggtctgagtgcaggcacaggaattggtgtttcatcagctcttgttagcaaccagaactccaacaatgacgataataatgcccagaataacaatgccaacatccacgacaacaatcaccatcatccagatgactcagacgaggagaatgactttcggcaagatctgcagccaggagagcagcagtttgcagctgacgcattaaatgagatggaagacatcgtccaagaagatggagaggtggtggccgagagtggaaataatactccagctcacagccaggcaattattcctgtggatgttgatgaggaacaagcaggacccagtggtcttcagcgtgtagtaaaaccaacctcaattactgttcatgattcagagagtgatgatgaagaagatagtctagaactccaagaagtctggattcctaagaacggtactcggcgttactctgaacgtgaagaaaaaactggagagtcagtgcagtccagagaattgtcagaagtagccaaaacaaagccacgtcacgccatgaaacggaagcggacagcagataaatccactagtacaagtgatcctgtgatcgaggatgaccatgtgcaggttcttgtattaaaatccaagaatcttgttggagtcactatgaccaattgtggaatcacagatctagtgctaaaagactgtccaaagatgatgttcatccatgctaccaggtgcagggtactaaaacatttaaaggtagaaaatgcaccaattgtaaaccgatttgactatgcacagtgcaagaaactgaacatggatcaggtactagaccagatactaagaatgccacccgagagaaaccgcatcatatacctacgcccaatgcagcaggtggacactctaactttggagcagaagctatttagtggtccctacccctatcacatctgtattatccatgaattcagtaaccctcccaatgtccggaataaggtgcgcattcgcagctggatggacactatagcaaacatcaatcaagagctcattaaatatgaattcttccctgaagccactcgaagtgaagaagacttaaagaaataccccaagtacccctgggggagagaaatctatactttagaaggtgttgtggatggagctccatattccatgatttctgacttcccttggctgaggtcattacgagctgcagagcccaacagcttcgctcgatacgactttgaagacgatgaagaaagcactatctatgctcctagaaggaaaggacagctgtctgcagacatctgtatggaaacaataggagaggaaatttcagagatgcgtcagatgaagaagggtgtatttcagcgagtagtggcaatttttatccactattgtgatgtcaatggagagccagttgaagatgactacatttaattggtccctcctcctttccagctattttgtcagaaagcaagtagggccatccagctgccagagtgctccacagggacttgaggcatgcagttgggaggtcctggctcggtttgctatatagggaatatataaggaacatcgaaattgtatacaaagatttgtacataaaaaatatacaaagacgcttcctaaagtaccaactttatatcatatgtttatacaatttaatttaaaaattcattttaaggaagacagataatttgaaagacttttgtttttcttgacttaattcatgaagtatcattttttgactgagtctccatttacttcattcttaatgattattgtcatccctttaaatctgtgcctttttcttcttgagcgaagctgtttgagtaaacctgttgaagagtgtttgtgtcttttgtgcttttttgttgttattaaaacaccaactaaaccttatagtcaagacaaggctctatgtttctgtacaaagctgtagttctttcttagtattatagttgccatgtttcttaaaatcaagtaaaaagacttatgagcttaaaaaaaagtgagtttgagagggaaatggaaaagtttccagagtatttctagtaatttatttccacattgaattgtgtatatgctttatcttgaatataaaataaaagtttattaaaaactt

SEQ ID NO: 10589 - DNA, 1668 bp, Homo sapiens
  source 1..1668: mol_type = unassigned DNA
atggagttggcgtcggagcaacagctgcgcgggcggagcagaaagcaagtgattgctttcctttcctcatttttggaagccctgcctaacacacagctgcactgtacatcccagttcctggatggacgaagaaagtgaactgatccagccccaagaccagagctgctgggcctttctgcccgatttgtgtctgtgccgtgttttctggtggctaggagacagggacaggtccagggctgctcttgtctgcagaaagtggaaccagatgatgtattctgctgagctctggcggtacagaaccatcaccttcagcgggagaccttccagggtacatgcatctgaagttgagtcagctgtttggtatgttaagaagtttggtcgttatctggagcacctggaggtcaaattcatgaatccttacaatgctgtcttgaccaagaagttccaggtcaccatgcggggcctcctgtcttgtctgagtaagagcaacaaccgtctgaaatctctttccatccaatacctggagctggaccgcctggtatggaggaacagcatcaggagctcattcatcagcagcttgagcttcttcttaaagaagatgggcaaacgcctggattatctcaacctaaaaggggccaggctgaccgtggagcaaggctgccaaattctcgactccctcagctacatgaggaatgagaatgtgatctcagagctcaacatcgaggactatttcagccatcaccttgctgtctacaacagcccccagttcaaaaagaccatgtccacattccacaatcttgtgtccctgaacctcaactacaactgtatctccgacgagctgcttgagaacttgtgtgagaatgccagcaccctccggaccatcaacatcaaatgccacgttcatgacccccacggacaggtcatctggggtatgtcctgggccaagctggccaggcaggccaccaatctgaaggtgaacttcttctttgaacggatcatgaagtacgaacgcttggcccgaatcctcttgcaggagatcccgatcaggagcatcagtctgagaagctgctatttcagtgacccagactgttcaatgagacccactctgatagatctcctgcccaccttccggcacactctgcagaaattaacttgtgaattcaacaacaaccatgagtcactcgacgaggagctgcacctcctcatcatatcctgcaggaagttgttttacttcaaaatctgggctttccttgatgttagttttgtggagcggatcctgaagagtcagaaagaacggcagtgtgccctgcgtgtattcaaggcgagaatttatacaaacagatatgagacgaatgaagaggacaagaccctgcaggaaatttacaggaagtacagaaagctgatcgaatcagagcttagctattttgtcatcgtttactctgtgatgtaatgagcactctacagatgaagaaagctgggagcactttgaacttgaaaatcatttctcttagaactacacttgggcactgccggcccttttgctcctctctctcccctccactttttttttttgtcagctccatgacaacatgaccagctcagcaaaggctgagactgcccatgacctgaaggctccaggtggctttaaagcgctatgtttaccaacta

SEQ ID NO: 10590 - DNA, 1682 bp, Homo sapiens
  source 1..1682: mol_type = unassigned DNA
ggaggctgacgcgctagcgtggctctaagacgcgtcacccacgctgcgggcaagccatggcgggaagcgagccgcgcagcggaacaaactcgccgccgccgcccttcagcgactggggccgcctggaggcggccatcctcagcggctggaagaccttctggcagtcagtgagcaaggagagggtggcgcgtacgacctcacgggaggaggtggatgaggcggccagcaccctgacgcggctgccgattgatgtacagctatatattttgtcctttctttcacctcatgatctgtgtcagttgggaagtacaaatcattattggaatgaaactgtaagagatccaattctgtggagatactttttgttgagggatcttccttcttggtcttctgttgactggaagtctcttccagatctagaaatcttaaaaaagcctatatctgaggtcactgatggtgcattttttgactacatggcagtctatagaatgtgctgtccatacacaagaagagcttcaaaatccagccgtcctatgtatggagctgtcacttcttttttacactccctgatcattcagaatgaaccacgatttgctatgtttggaccaggtttggaagaattgaatacctctttggtgttgagcttgatgtcttcagaggaactttgcccaacagctggtttgcctcagaggcagattgatggtattggatcaggagtcaattttcagttgaacaaccaacataaattcaacattctaatcttatattcaactaccagaaaggaaagagatagagcaagggaagagcatacaagtgcagttaacaagatgttcagtcgacacaatgaaggtgatgatcaacaaggaagccggtacagtgtgattccacagattcaaaaagtgtgtgaagttgtagatgggttcatctatgttgcaaatgctgaagctcataaaagacatgaatggcaagatgaattttctcatattatggcaatgacagatccagcctttgggtcttcgggaagaccattgttggttttatcttgtatttctcaaggggatgtaaaaagaatgccctgtttttatttggctcatgagctgcatctgaatcttctaaatcacccatggctggtccaggatacagaggctgaaactctgactggttttttgaatggcattgagtggattcttgaagaagtggaatctaagcgtgcaagatgattctcttttcagatcttgggaactgaaaccatttgaaatttattactaaggtcgtgatgtgaatatttgctcagtcagcccaccttgtcctgcctttttgcagataggctttcatttggacagctataactgctgtgttttttatattatttttactctttaccataaatcaattacaagaaaagagtttcagtcctagtatttagccccaaaatgaacctttaaacatttttttggtaatttttatattttctgtctttttaaaaatattaaattctggaaaaaacaagtttgtgcctctcattccctgagtttctattcttttgggtataaagattgccttagtgagaaatagcaaatttgctaaactttctattcagtcttttcaagggttcataagtggttatcagaaaagaaatttttatctattcttaataaatacactgcttaaagactgaaaaa

SEQ ID NO: 10591 - DNA, 1731 bp, Homo sapiens
  source 1..1731: mol_type = unassigned DNA
ggaggctgacgcgctagcgtggctctaagacgcgtcacccacgctgcgggcaagccatggcgggaagcgagccgcgcagcggaacaaactcgccgccgccgcccttcagcgactggggccgcctggaggcggccatcctcagcggctggaagaccttctggcagtcagtgagcaaggagagggtggcgcgtacgacctcacgggaggaggtggatgaggcggccagcaccctgacgcggctgccgattgatgtacagctatatattttgtcctttctttcacctcatgatctgtgtcagttgggaagtacaaatcattattggaatgaaactgtaagagatccaattctgtggagatactttttgttgagggatcttccttcttggtcttctgttgactggaagtctcttccagatctagaaatcttaaaaaagcctatatctgaggtcactgatggtgcattttttgactacatggcagtctatagaatgtgctgtccatacacaagaagagcttcaaaatccagccgtcctatgtatggagctgtcacttcttttttacactccctgatcattcagaatgaaccacgatttgctatgtttggaccaggtttggaagaattgaatacctctttggtgttgagcttgatgtcttcagaggaactttgcccaacagctggtttgcctcagaggcagattgatggtattggatcaggagtcaattttcagttgaacaaccaacataaattcaacattctaatcttatattcaactaccagaaaggaaagagatagagcaagggaagagcatacaagtgcagttaacaagatgttcagtcgacacaatgaaggtgatgatcaacaaggaagccggtacagtgtgattccacagattcaaaaagtgtgtgaagttgtagatgggttcatctatgttgcaaatgctgaagctcataaaagtaagtactcatatgtacatttttaagcacattgttcttttcaaagcaaatggaaaatacctttttagactttactgtggcttcttaagaatatgatggcttattttatcaatgtgattttctgacccttactattaatagtgtgttctcacacttttgtgtgtattaggatcacctgggaagcttgttaaacatgttaacaagctgattcctaccctggtggattttattcctagatttgggttgtgtgaatcagatttgggcatctgttttttccaagcacccagggaattctgatgcattccaaagtttggtactagagctatacaatatttttttgctttatgcttctgcatttttttgatactgacattttgtctgcttctggctttattcaaataatctatgcaaataactatgaaaaattttatctttgttttatccaaatagtaaagagatgtgatggtagggtgttaagtagattagttgagaacactattcatatattctgaataattgccattcagaatgctatttttgtgtgaaatcaaaatatcattgggccatgagctagtattataatatctttcccaaatcctttgtgaacaaggtagaatataaatacataatatattgtatatatattatagttctctaatacactggtttgaatttctattcaatttattttccctgtgatctgttaggcatgaaagcagttgcaattactttctgttattacagggctatctataaaaagaaaacttagaagcaaaa

SEQ ID NO: 10592 - DNA, 5926 bp, Homo sapiens
  source 1..5926: mol_type = unassigned DNA
ctgttctggccttgaaaatgatccttcttaaaaggattttcctccttcctcaagggaaagaaaacctattgatataaaacttcacttcccattcagtttcccctgctaaatgccactccagtagagactgagtgttgataaatacaggggaaggaaaaagtcgtaagctgagcctggtcacattgccccttgtgatatcgttttatttttaacttcgcaacacttggactatttctgttgaagttttctctcctttccctgccttcccaacagaacgctgtcctctactgcagctgatgcaacccagccacctcccggcaatccgcttacttgcaatcaagggttcaggtgcaagcagatgctgactcagcctgttccattaagagctaagaagcaagaagaaattggggcgccatggggaaagcccgcagatccccgccagggcaccacaggcattgtgagggatgcttcaaccgccactgccacattcctgtggaacccaacacctcctgcctggtaataagctgccacctgctctgtggtgccaccttccacatgtgcaaagaggcagagcaccagctcctctgccctttagagcaggttccgtgcctcaactccgaatatggctgccctctgtccatgtcccgccacaaactggccaagcacctgcaggtgtgccccgccagcgtggtctgctgctccatggagtggaaccgctggccaaatgtggactctgaaaccacccttcatgaaaacatcatgaaagagacccccagtgaggagtgtttggacacagccctggccctgcaggatcagaaggtcctcttcagatccttgaaaatggtggaacttttcccagaaactagagaggctactgaggaggaaccaactatgaatggtgaaaccagtgtggaggaaatgggaggagcagtgggtggagtggatatcggtttggtaccacatggtctgtcagcaactaatggggagatggcagagctaagtcaagaagaacgggaggtgctagccaaaaccaaagaagggatggacctggtcaagtttggccagtgggaaaatattttcagcaaagagcacgcagcctctgctttaacaaattcatcagcgagctgtgagagcaagaacaagaatgactccgagaaagaacagatttccagtggccataacatggtagaaggagagggcgctcccaaaaagaaagaaccacaggaaaatcagaagcagcaggacgttcgtacagccatggaaaccacagggcttgccccttggcaggatggtgttctggaaagactgaaaacagctgtggatgcaaaggactataacatgtatctagtgcacaatgggcggatgctgatacactttggtcagatgcctgcttgtacacccaaggagagagactttgtttatggcaagctggaggctcaggaagttaagactgtttacaccttcaaagttcctgtgagctactgtggaaagcgagctcgacttggagatgccatgttgagttgtaagccaagtgaacacaaggcagtggatacttcagatttggggatcactgtggaggacctgcccaaatcagatctcatcaagaccaccctccagtgtgctttggaaagagaactcaaaggccacgtcatctctgaatccagaagcattgatggactgttcatggattttgccacacaaacatacaactttgagccagaacagttttcctctgggacagtgctggctgacctaaccgctgccaccccagggggactccacgtggagctccacagcgagtgtgtgaccaggagacacaacaaaagcagctctgccttcactttcacttgcaacaaattcttcaggagggatgagttccccctgcacttcaagaatgtccacacagacattcagtcatgtctcaatggctggttccagcatcgatgccccctcgcctacttgggatgtacatttgttcaaaaccatttccgtcccccagggcaaaaggcaaaagtaatctatagccaggagctcaagacctttgccattaagccggaggttgctccagagctgagcgagggaaggaagaacaaccatcttttgggtcatggaggaaaaagccagaattctttaaccagcctgcccctggagattttgaagtacattgctgggttcttggacagcgtcagcctggcccagctctcccaggtgtctgtgctgatgaggaatatctgtgccactttgttacaagagagaggaatggtccttttgcaatggaagaaaaagaggtattcccatggaggcacctcctggagagtccacagagagatctggcagttcagcagcctcttctccaaaatcaagagctgggagtttaatgaagtcacctccatgtctgagcacctgaagtcctgtcctttcaacattgtagagcacaaaactgacccgattcttttgactagcatgtgtcagccccgtgagcaggcccgagagagcttagtctccacctttagaatcagaccacgaggaagatacgtctcctaaaaattcagatgccactcgatgcacccttcttggatttcttctcggagttcctgaagtaggacagagtgtgtggttttgaggactcccttctgtaaactgcctatttgcttatcggggtgtattggaacacgcaatgtccttcgaaacctcaacacgaggcctaagaatttcctaagccatgtcttgtaccatagtgccacattgatgacttgtttccttttttcttttcttttcttttcttttttctttctttctaaaatagattggtctgagaagaaaataagtaatttgaggccatttggaagatgggcccaatttcttaagtgatgagagagcacgaaattccataaccagtacaggcctgtgcttttacatgggctttttagttcacaaagcactttcaaatttatgggacaggaaatgcaggatgggactccccagggaacgcagggtgaagggaacaaagctggaggctctggagctgggtctgttttgacggtcaagtccagggctcattttggttattctactgcctctaggccagggtagtcctaacacagcctgacataggagagcccctggctgagcatggcagccttgaagacaccacaggccaaaacatgaggggcagaaatgggatcacagagtctgttgctagaatcttggcaacatacagcaggaaagccttgataaatcgggagtccaaaggagacaccatatttatggagaacattaggacaaaaagtcaccaacttactttgtaacattttaataatgacttaagggtcaagatttttttcttctgaaaattatgttctgagttaggcagaacatagccatggccctgggccaccctgtgctatctgaaatgacctcaatacactaatgccaacctcagcgtcatgccagaatgcacagggcagcccagggagatcacacctttggcaaagtccagacaaggcccactgcagttcctatggcgccagtcaccagctcctagacagcacttgggtaccccattggggtcttggagaggaagacatgtgaacataacggctccctgaaattgctcctacccatccatatttctggtcatgctttcagtctgacaaaaatggatgatactgctgtttttggtaacaaacagtgaatattcataagaacaaaagtaaaagaaaaaaagacacagtagaaactggcatcccctaaagcagggcttcttagccttggaactattgacatttttaaatggataattctttttttttttttctaggtggggaggggatggagttcactcttgttgcccaggctggagcgcaatgacatgatctcggctcaccgcaacctccgcctcctgggttcaagcgattctcctgcctcagcctcccgagtagctgggattactcgcctggctaattttgtatttttagtagagacgggctttctccatgttgttcaggctggtctcaaactcccgacctcaggtgactcgcccgccttggccttccaaagtgctgggtttacaggtgtgagccactgcgccctgcctgaactggataattctttgttgcaagggactgttctgtgtactacaggatacttggcagcatccttggcctatccattaaatgtcagtagcacccccacagtggcaacaatcaaaaatgtcaccagacattgctaaatattggggagcaaaatggctccccgttgaaaatccctaaaggatgtcatactagtgacaataagttaggatatgcttattttttagtacagcaaaatcttatcgcacatagctatccacaatagttatgatttaatgcagctctttatttatgaaataggttttagacatgtggtgattttaagttgggaaccagaaggaaatgattcgtttggtatggcttcatgtccttcagccacccccaagaatgtatcctttcagctctctttggttatacctgaagccaggagcgttgagttattagccttgtgtttatattcctctcactgtaattggtgtcattttcccagcagtcctagcagtcctcaagcaagtgggaaatcggaaaagaaaaggacaggcattgtagggaagcagaggataaagaatttagccaacaaaagaaacaatctagtcaatctgggtgcttttatttcctgggttctctctaaacatggctcagagctggtgtagatgaagtaggtgaaacctctgaaaagagtctagaaggcagtagagcaagtcccagaccagaaacatgctcatcttttcatcgtaatgtgccactcggtactatttggtaatgtcactctatttttcctaatcccatcctttggtttgtatttcatatttgtatataaggcaccattttctaaaaatatgactagggtgtgacctaaggttttattctgtgaagatgagtaactggaaagaagctaacactgcagtgggaaggaaggaagagagttgtccaggtggtagttcgacgtgttttgaatctagtccttcctacatggaggataaaagctcctaaagtccactctgggtttgtgattttaatagaaatagaaagggaaactatagaccaatggagatgaaaatcaggggctatcgacagatggaggagaaataaggtgctacatagagaaaggaagagggcagaaggctttcccttcccaaactgggtgagctggggaagccttggttcaggagagtggcactgcccacaactgctttgtgggttgtgcacttccagccgcactctccccctccagttgctgccttcagagccgtactgaagcacgagcttcaataagacaagcacacttcatagtgagagggcagcggtaccaaagcctttcagagagactatggattagacagaaatgatttgtgagaggaagctggagtgaacagcatgaacagcgagtgttacctgacagaggcaagacagctagaagtggcttcagatttagaaacagctgaggggagcaaagacggactgtgtacacagggagggaggatgtctatgggcagagcccttggtgagtatcatcaccaagaaaggcagtccagagtagagatcagccgaatatggaggctgaggtctgtagaactgggccagagaggaccttactgccttagtagcataagggtctggaaaagaagtttctatctcacaacaaaggaaaaagtgaaaagcaaggtggaacttgaagatacgtcacgaaaatcactataaaagtctgatttatgtgtgatgtcaaatcaaactgaaatgaagaatgagattgagtatatctgtggtgactgacctctgtatactagaaacctcaacatctctagaagaggaaataaaagctgctttgcactctg

SEQ ID NO: 10593 - DNA, 7111 bp, Homo sapiens
  source 1..7111: mol_type = unassigned DNA
atgacaactggcttgtctgatcagcaggtggtctgtgaccttgatcacagggcagtggaagccctattgcaggcagttaggaagaggatggcaggggcctcgcccgcggtcccccatgagcgcgcccggctgaccggcggggcggccgcggtggagcccgcgtgccgcgggggcggcggggccatggcctcgctggacctgccgtaccgctgcccccgctgcggggagcacaagcgcttccggagcctgtcgtcgctgcgcgcgcacctggagtacagccacacctacgagacgctctacatcctctccaagaccaacagcatctgcgacggcgccgccgccgccgcggccgccgccgccgctgcctcggggttcccgctggctcccgagcccgccgccctgctggccgtgcccggcgcccggcgagaggtcttcgagagcacttccttccagggcaaggagcaggcggccgggccgtcgcccgcggcgccgcacctgctgcaccaccaccatcaccacgctcccctcgcccacttccccggcgacctggtgcccgctagcctgccctgtgaggagttggccgagccgggccttgtgcccgccgcagcagcgcgctatgcgctgcgcgagatcgagatcccgctgggggagctgttcgcccgcaagtccgtggcgtcctcggcgtgctcgacgccgccgcctggccccggccccggcccttgccccgggcctgcctccgcttcgcccgcgtccccctcacccgctgatgtggcctacgaagagggcctggcgcgcctcaagatccgcgcgctggagaagctggaggtggaccggcggctggagcggctgagcgaggaggtggagcagaagatcgcgggccaggtgggccggctgcaggccgagctggagcgcaaggcggccgaactggagactgcgcggcaggagagtgcgaggctcgggcgcgagaaggaggagctggaggagcgcgcgtctgagctctcccgccaggtggacgtgagcgtagagctgctggcctcactcaagcaggacctggtgcacaaggaacaggagctgagccgcaagcagcaggaggtggtgcagatcgaccagttcctgaaggagacggcggcgcgggaggccagcgccaagctgcggctgcagcagttcattgaggagctccttgagcgggctgaccgtgccgagcggcagctgcaggtcatcagcagcagctgtggcagcacgcccagcgccagcctgggccgtggaggtgggggcggtggtgctggacccaatgcccggggcccaggcagaatgcgagaacaccacgtgggcccggccgtgcctaacacatatgcagtgtcacggcatggctcctctccgagcacaggggcctccagccgtgtgccagccgcatcccagagctcaggctgctatgacagtgacagtctggagctgcccaggccagaggagggggcccctgaggacagtggccctgggggcttgggcacacgggcccaggctgccaacgggggctcagagcggtcccagccccctcgcagctcaggcctgcggcgccaggccatccagaactggcagcgcagaccccgccgacacagcactgagggggaagagggtgatgtctccgacgttggctcccgaaccactgagtcagaggctgagggcccgttggatgcgccccgccccgggcctgctatggctgggccattgagcagctgccggctctcagcccgccccgagggaggcagtgggcggggtcggcgagcagagagggtcagcccctcacgctccaatgaggtcatcagcccagagatcctgaagatgcgagctgccctcttctgcatcttcacctacctggacacgcgcacactgctgcatgctgccgaggtctgccgggactggcgcttcgtggcccgccaccccgcagtctggacaagggtgctgcttgagaatgcccgtgtctgctccaagttcctggcaatgctggctcagtggtgcacccaggcccactctctgacgctgcagaacttgaagccccggcagcggggaaagaaggagagcaaggaggagtatgcccggagcacccggggctgcctggaagctgggctggagtccctgctgaaggcagctggggggaacctgctgatcctgcgcatctcccactgtccaaacatcctcaccgaccgctcgctctggctggccagctgctactgccgtgccctgcaggctgtcacgtacaggagtgccacagaccccgtgggccatgaggtcatttgggccctgggcgcaggctgcagagagatcgtctccctccaagtggcaccacttcacccctgccagcagcccacacgcttcagtaaccgctgcctgcagatgattggtcgctgttggccccacctgcgggccctgggggtcgggggtgccggctgtggggtgcagggcctggcatcactcgcgagaaactgcatgcggctgcaggtcctggagcttgaccacgtgtcagagatcacccaggaggtggcagcagaggtctgccgggaaggcctgaagggactggagatgctggtgctcacggcgactcccgtcacccctaaggccctactgcacttcaacagcatctgccggaacctcaagtccattgtggtccagattgggattgcggattatttcaaagagcccagcagccctgaggcccagaagctgtttgaggacatggtgacaaaactccaggctctgcgacggaggcccggcttctctaagattctgcacatcaaggtggaaggcggctgctaacccgggtagggggcggcagggcccctgccagccccacaccagggcactctctttggacctcagagggaccctggtttggactagacctttggaggccgagtgttatccctggcttctggagggggactgtcaagtctcctgtcctcctcctggagcagcagagcaacaggcctgacccagggcactgcctccccagtacaggggcttggacagaagctgccctccgacccccaccctaccccggctggagtagcctctggcacagccagtgaggagctgtcaccaccagcgcctggtgtcatcacctggaggatctgcaataaccacccagtggctcctcagctgttctggctggcctctccttcctgaggcccagcctcctggtcaggagcatctggggccccaagccaatgggggctccacaaggcagctcagacttggcaaggagggctcttctcctcaaccttgctgcagccttctgggggcaccccttcagacagcctgcccaggctgtggatccacatttcctgggggtaccacagccagacctaggggcctgggcacgtggtcagccaaaagctgggggcagcagtacagtggggtagtgggggtgggtttggaaaggaaacagtcacccagaacttctccccaggatgagaccacccttccaaggtgggggattgccagggggagaaaacttatttattgctgtaagacaggacccctcctcccaacctcataccccaccgcacaccagagctaaattcaaagctgaaaggcgcacgtttctatacctacattcattcctgagggaccctccagagggtcaaggtcccagccccaggcagccctgtcacagtgagaagtagttcctgtccttaaggaatttccttctaatccaggtgcttgggcaggaacccgatggccttcgggtcaccaaggctgtctgggagggaggcacagggccgccctctgtgctgaggccgtggaggaagccaggaggagggtggcttgctttgcttccttgtctaattagcttgcttgaagatgtggccttggcagggagccagacccatggggccaaggaagaggaagagcatcctcaatagactcactcccccttccttggtctccacgggccccgtggactgagggctgcattggggtcttctgcctaggggaagtgctggacctgagctggagccacttggcttagaagccacaggattcacttttcactggcctttgcagtccccaaaggatcaggtctcagaaccaaggctccaaaggctgaggtctccccagttcctcctctcagaactcccacagtagctcagaggccgggggtcctgccaactttcatttggaaagttctttcgaacatctaaactagatctatcttagggtttctttctctcctagataggatcagctcccagccctagccattaggctgctggtcctggcgggggatggggtcccctcgttacccagtccttcccagggacccaacttcctaacacaacctggcttggacatgaagaccctcccccaggttaccttgtaaagagtcctccagagctgggatcccatgggcgcagcagcacacccagctcccatggcgtcactccctagctctgtcccagcttttgctatcattgctgacttttcctcctgtggctcattctgtccctgccctttgaaaacctaaaataccaagggtgtcatgctggcaactccctgcccagtcctgcacaaagccttggctgtgtgtggcaccccttgcctcctaccccagagcagctggctccattggcttctccctgcaccagccctgtcctcaggggtcaggaaaaagcagcacagctttctttcctctcctccagaggcctggaagggaggtggaggtccagtaagggcctggctgccttggatttcttggtcctgccttgccaactgcaccctgtagctcctgctccctgtgaccccagaaccagaggtgctgccttccctgtctcctagacaaagcacaaagggatgccctgcttggcttgagcctgcccaactgaaggattttctctgccccagggaccttccatccctgaatacaaggctctaggcaacttctctctgggtggtacacactagaatgcctggcattagccctagaaaggaggttggggtgtatgggtagtgagctagggtgggagaaaggtggtgctgaaaggacagatgctagttgtagtttcactcactcattcattcattagtgcaacagtactgagcaccacctgcactagaggcagaggggtgaacaagatacccttctgcctggggggacgtccacttcccatgggtttggctatttccaggaaagcccctcagtcctccaccctgttctggctgtgtgtgaaggatgtgtgtgagcaggcccaatcctttgcagcaagaatgagaggtcagagtattccattgcacacgcaccctggggctgacagacttgtgccccctagccttcatgcatgcccaagcactggcagctttgcagcccctgccccaccagccccttgacgctcttcttttgttctctcctcggggatgagctctgctgctgagtagggagcttttgcttgctgggaggctctatgcatggatttttttggtgaccatacagctagggctgaggatgggaacagggacagagggcctggctatccctagaagcacttcatccatctttacccacccaaacgggatcccttcacatctcatacccagtaagatgcaagaaaggaatatctgagagcaagcagccctgctccaggggccccaggtatgtgtagaggcccagtgggggtggccacttggtgtttctaccaccccctgccatccagtctggccccagtacctacctgggaggttggtgtacttggcttaagtacttcatgctttattcaggctgcttccccacagcaccggcaggaaatgaaggtgcacttatatgcatccctgcaggaataaagagtgggtggcctgcccagcccagcaccacagcctttccccagccaggagagaccacctaaggatcaaggcagctcctgttttcttggttctgtgacactcgagtctgagccagcccctcaggaattgcctcaaaagagaaaaacaaaaaaaagtcctccttcccaaggcctgctactccaaggtttggctccatcccttgcctttgggtcctgcctatttccccactcctggtctcttatctttggggccaccagtggggagtcacccgggccccaatccctctaaggcgctaagttgaaggaggccttcccagagtgactattggtgccaaagtcccagttcctgttggacttggggtaaaaacaggagatggtgagtgggtgtaaggcccaaatgcccagagaagttaactcgaacccatgggacctgtcccagcctgtcagtccctgatgagtgtaacttccttcccctgggggcctggcccttctctccaacccagtggccatgctttctcacccagccttgtgcccggcctgcatttctgtatatattgctgtgtattgtgtgtatgtatgtattcctggacaagtgtgttcatctgcagcccttgcctgaggataaggtttaggattgggtaaagatcagaataccagggccagctaaggcaacgactccctccccaaacccttgggacctcagccagtcccaaggctgccctgacaatcaggcaggctccccaccgtgaggccaagcctcctctgccactgccagcatggcccaagggaggcttggccttgggcttgccagcctcagctctgccctgacaagggtcttgtatccagggcagaggcctgaggtgacccaggcttgctttgtggctgatgccagcaggcttggttctagtgggcaccactggtgggcaacctccataactggcccttaggccctaccttcctacacagctaggctataatgggcctgagtgagagggtagcttccccagccccaagcacaggcagaggggtggagagcaatttttggttttatttttgtttctgaagtggtgcctgtacctccagcccccagggggccttccctggccacacttctctgccccacccaggcatcgccatcccagcactttgctccatgtcacccgtaagatgccctttgctgaatgtacctgagtgtatgtatttaaaaggactcacatgggcatcagagaatttatggctctgtatccaataaaaaagatggtgaaactggtctatctgcc

SEQ ID NO: 10594 - DNA, 7336 bp, Homo sapiens
  source 1..7336: mol_type = unassigned DNA
gcgccccctcctccccctcctcctcctcctcctcctccatccttcctcccgccgggttcgtgcgcccctcccgctgcgactggctgggaggttcggccgcccccgccccgagagggaggcgggggcgctagccgcggcggccacccaaggctgcggaggggaacgagatccgaggccccaaggcggccctgcgtctggaccgggcacgcgggggctcttctgcgtccccagccctgggccgctgggcctggcctcgccgcggggtggaggaggtaaggcctcctcgccccaggccgcgggcgccctgagccttcctgaccccgcagggggcctcgcccgcggtcccccatgagcgcgcccggctgaccggcggggcggccgcggtggagcccgcgtgccgcgggggcggcggggccatggcctcgctggacctgccgtaccgctgcccccgctgcggggagcacaagcgcttccggagcctgtcgtcgctgcgcgcgcacctggagtacagccacacctacgagacgctctacatcctctccaagaccaacagcatctgcgacggcgccgccgccgccgcggccgccgccgccgctgcctcggggttcccgctggctcccgagcccgccgccctgctggccgtgcccggcgcccggcgagaggtcttcgagagcacttccttccagggcaaggagcaggcggccgggccgtcgcccgcggcgccgcacctgctgcaccaccaccatcaccacgctcccctcgcccacttccccggcgacctggtgcccgctagcctgccctgtgaggagttggccgagccgggccttgtgcccgccgcagcagcgcgctatgcgctgcgcgagatcgagatcccgctgggggagctgttcgcccgcaagtccgtggcgtcctcggcgtgctcgacgccgccgcctggccccggccccggcccttgccccgggcctgcctccgcttcgcccgcgtccccctcacccgctgatgtggcctacgaagagggcctggcgcgcctcaagatccgcgcgctggagaagctggaggtggaccggcggctggagcggctgagcgaggaggtggagcagaagatcgcgggccaggtgggccggctgcaggccgagctggagcgcaaggcggccgaactggagactgcgcggcaggagagtgcgaggctcgggcgcgagaaggaggagctggaggagcgcgcgtctgagctctcccgccaggtggacgtgagcgtagagctgctggcctcactcaagcaggacctggtgcacaaggaacaggagctgagccgcaagcagcaggaggtggtgcagatcgaccagttcctgaaggagacggcggcgcgggaggccagcgccaagctgcggctgcagcagttcattgaggagctccttgagcgggctgaccgtgccgagcggcagctgcaggtcatcagcagcagctgtggcagcacgcccagcgccagcctgggccgtggaggtgggggcggtggtgctggacccaatgcccggggcccaggcagaatgcgagaacaccacgtgggcccggccgtgcctaacacatatgcagtgtcacggcatggctcctctccgagcacaggggcctccagccgtgtgccagccgcatcccagagctcaggctgctatgacagtgacagtctggagctgcccaggccagaggagggggcccctgaggacagtggccctgggggcttgggcacacgggcccaggctgccaacgggggctcagagcggtcccagccccctcgcagctcaggcctgcggcgccaggccatccagaactggcagcgcagaccccgccgacacagcactgagggggaagagggtgatgtctccgacgttggctcccgaaccactgagtcagaggctgagggcccgttggatgcgccccgccccgggcctgctatggctgggccattgagcagctgccggctctcagcccgccccgagggaggcagtgggcggggtcggcgagcagagagggtcagcccctcacgctccaatgaggtcatcagcccagagatcctgaagatgcgagctgccctcttctgcatcttcacctacctggacacgcgcacactgctgcatgctgccgaggtctgccgggactggcgcttcgtggcccgccaccccgcagtctggacaagggtgctgcttgagaatgcccgtgtctgctccaagttcctggcaatgctggctcagtggtgcacccaggcccactctctgacgctgcagaacttgaagccccggcagcggggaaagaaggagagcaaggaggagtatgcccggagcacccggggctgcctggaagctgggctggagtccctgctgaaggcagctggggggaacctgctgatcctgcgcatctcccactgtccaaacatcctcaccgaccgctcgctctggctggccagctgctactgccgtgccctgcaggctgtcacgtacaggagtgccacagaccccgtgggccatgaggtcatttgggccctgggcgcaggctgcagagagatcgtctccctccaagtggcaccacttcacccctgccagcagcccacacgcttcagtaaccgctgcctgcagatgattggtcgctgttggccccacctgcgggccctgggggtcgggggtgccggctgtggggtgcagggcctggcatcactcgcgagaaactgcatgcggctgcaggtcctggagcttgaccacgtgtcagagatcacccaggaggtggcagcagaggtctgccgggaaggcctgaagggactggagatgctggtgctcacggcgactcccgtcacccctaaggccctactgcacttcaacagcatctgccggaacctcaagtccattgtggtccagattgggattgcggattatttcaaagagcccagcagccctgaggcccagaagctgtttgaggacatggtgacaaaactccaggctctgcgacggaggcccggcttctctaagattctgcacatcaaggtggaaggcggctgctaacccgggtagggggcggcagggcccctgccagccccacaccagggcactctctttggacctcagagggaccctggtttggactagacctttggaggccgagtgttatccctggcttctggagggggactgtcaagtctcctgtcctcctcctggagcagcagagcaacaggcctgacccagggcactgcctccccagtacaggggcttggacagaagctgccctccgacccccaccctaccccggctggagtagcctctggcacagccagtgaggagctgtcaccaccagcgcctggtgtcatcacctggaggatctgcaataaccacccagtggctcctcagctgttctggctggcctctccttcctgaggcccagcctcctggtcaggagcatctggggccccaagccaatgggggctccacaaggcagctcagacttggcaaggagggctcttctcctcaaccttgctgcagccttctgggggcaccccttcagacagcctgcccaggctgtggatccacatttcctgggggtaccacagccagacctaggggcctgggcacgtggtcagccaaaagctgggggcagcagtacagtggggtagtgggggtgggtttggaaaggaaacagtcacccagaacttctccccaggatgagaccacccttccaaggtgggggattgccagggggagaaaacttatttattgctgtaagacaggacccctcctcccaacctcataccccaccgcacaccagagctaaattcaaagctgaaaggcgcacgtttctatacctacattcattcctgagggaccctccagagggtcaaggtcccagccccaggcagccctgtcacagtgagaagtagttcctgtccttaaggaatttccttctaatccaggtgcttgggcaggaacccgatggccttcgggtcaccaaggctgtctgggagggaggcacagggccgccctctgtgctgaggccgtggaggaagccaggaggagggtggcttgctttgcttccttgtctaattagcttgcttgaagatgtggccttggcagggagccagacccatggggccaaggaagaggaagagcatcctcaatagactcactcccccttccttggtctccacgggccccgtggactgagggctgcattggggtcttctgcctaggggaagtgctggacctgagctggagccacttggcttagaagccacaggattcacttttcactggcctttgcagtccccaaaggatcaggtctcagaaccaaggctccaaaggctgaggtctccccagttcctcctctcagaactcccacagtagctcagaggccgggggtcctgccaactttcatttggaaagttctttcgaacatctaaactagatctatcttagggtttctttctctcctagataggatcagctcccagccctagccattaggctgctggtcctggcgggggatggggtcccctcgttacccagtccttcccagggacccaacttcctaacacaacctggcttggacatgaagaccctcccccaggttaccttgtaaagagtcctccagagctgggatcccatgggcgcagcagcacacccagctcccatggcgtcactccctagctctgtcccagcttttgctatcattgctgacttttcctcctgtggctcattctgtccctgccctttgaaaacctaaaataccaagggtgtcatgctggcaactccctgcccagtcctgcacaaagccttggctgtgtgtggcaccccttgcctcctaccccagagcagctggctccattggcttctccctgcaccagccctgtcctcaggggtcaggaaaaagcagcacagctttctttcctctcctccagaggcctggaagggaggtggaggtccagtaagggcctggctgccttggatttcttggtcctgccttgccaactgcaccctgtagctcctgctccctgtgaccccagaaccagaggtgctgccttccctgtctcctagacaaagcacaaagggatgccctgcttggcttgagcctgcccaactgaaggattttctctgccccagggaccttccatccctgaatacaaggctctaggcaacttctctctgggtggtacacactagaatgcctggcattagccctagaaaggaggttggggtgtatgggtagtgagctagggtgggagaaaggtggtgctgaaaggacagatgctagttgtagtttcactcactcattcattcattagtgcaacagtactgagcaccacctgcactagaggcagaggggtgaacaagatacccttctgcctggggggacgtccacttcccatgggtttggctatttccaggaaagcccctcagtcctccaccctgttctggctgtgtgtgaaggatgtgtgtgagcaggcccaatcctttgcagcaagaatgagaggtcagagtattccattgcacacgcaccctggggctgacagacttgtgccccctagccttcatgcatgcccaagcactggcagctttgcagcccctgccccaccagccccttgacgctcttcttttgttctctcctcggggatgagctctgctgctgagtagggagcttttgcttgctgggaggctctatgcatggatttttttggtgaccatacagctagggctgaggatgggaacagggacagagggcctggctatccctagaagcacttcatccatctttacccacccaaacgggatcccttcacatctcatacccagtaagatgcaagaaaggaatatctgagagcaagcagccctgctccaggggccccaggtatgtgtagaggcccagtgggggtggccacttggtgtttctaccaccccctgccatccagtctggccccagtacctacctgggaggttggtgtacttggcttaagtacttcatgctttattcaggctgcttccccacagcaccggcaggaaatgaaggtgcacttatatgcatccctgcaggaataaagagtgggtggcctgcccagcccagcaccacagcctttccccagccaggagagaccacctaaggatcaaggcagctcctgttttcttggttctgtgacactcgagtctgagccagcccctcaggaattgcctcaaaagagaaaaacaaaaaaaagtcctccttcccaaggcctgctactccaaggtttggctccatcccttgcctttgggtcctgcctatttccccactcctggtctcttatctttggggccaccagtggggagtcacccgggccccaatccctctaaggcgctaagttgaaggaggccttcccagagtgactattggtgccaaagtcccagttcctgttggacttggggtaaaaacaggagatggtgagtgggtgtaaggcccaaatgcccagagaagttaactcgaacccatgggacctgtcccagcctgtcagtccctgatgagtgtaacttccttcccctgggggcctggcccttctctccaacccagtggccatgctttctcacccagccttgtgcccggcctgcatttctgtatatattgctgtgtattgtgtgtatgtatgtattcctggacaagtgtgttcatctgcagcccttgcctgaggataaggtttaggattgggtaaagatcagaataccagggccagctaaggcaacgactccctccccaaacccttgggacctcagccagtcccaaggctgccctgacaatcaggcaggctccccaccgtgaggccaagcctcctctgccactgccagcatggcccaagggaggcttggccttgggcttgccagcctcagctctgccctgacaagggtcttgtatccagggcagaggcctgaggtgacccaggcttgctttgtggctgatgccagcaggcttggttctagtgggcaccactggtgggcaacctccataactggcccttaggccctaccttcctacacagctaggctataatgggcctgagtgagagggtagcttccccagccccaagcacaggcagaggggtggagagcaatttttggttttatttttgtttctgaagtggtgcctgtacctccagcccccagggggccttccctggccacacttctctgccccacccaggcatcgccatcccagcactttgctccatgtcacccgtaagatgccctttgctgaatgtacctgagtgtatgtatttaaaaggactcacatgggcatcagagaatttatggctctgtatccaataaaaaagatggtgaaactggtc

SEQ ID NO: 10595 - DNA, 6202 bp, Homo sapiens
  source 1..6202: mol_type = unassigned DNA
agcagcagctgcggcggcggcggcgtttgagtggaggaagatggcggctccgggcggctcggggtcccgccagctgtgaggagccccgagcacggctgtcgcggcctgaggcagagcgcctctgctctggccctgtccctggctccctcattaccgtcgccagcggagcgaacccgagagcgtggagcgggctgggccagctgttgagtggaatgtcatggccagctcctcggacagtgaagatgacagtttcatggctgtggaccaggaagaaactgtgctggaagggacaatggatcaagatgaggagccccacccagtattggaggctgaggagactagacataataggtccatgtcggagctgccagaagaggttttggagtatatcctgtcctttctctcaccgtatcaggaacacaaaactgcggcccttgtctgcaaacagtggtatcgacttatcaaaggtgtagcccatcagtgttatcatggtttcatgaaggctgtccaggaaggaaacattcagtgggagagccgtacctatccttatcctggaaccccaatcactcagcgcttctcgcacagtgcatgctattatgatgctaatcagtctatgtatgtgtttggaggctgtacccagagcagctgcaatgctgctttcaatgacctctggagacttgacctaaacagcaaagagtggatccgacctttggcttcagggtcctatccttcccccaaagctggagcaactctggtcgtgtacaaggacttgctagtgctgtttggtggctggacgcggccaagcccttatcccctacaccagccagagagattctttgatgaaatacacacttactcaccctctaaaaattggtggaactgcattgtgacaacccatgggccacctcccatggctggccactcctcctgtgtgatagatgataaaatgattgtctttggtggctctttaggatcccggcaaatgagcaatgatgtctgggtccttgaccttgagcagtgggcgtggtccaagccgaacatctctggccccagtcctcatcctcgaggtggccaatctcagattgtcatagatgatgcaactatcttaatcctcggagggtgtggcggtcccaatgctctattcaaggatgcttggttgttgcacatgcattctggtccttgggcctggcagccactcaaggtagaaaatgaagagcatggggccccagaactgtggtgccatccagcttgccgggtgggacagtgtgtggtggtcttcagccaggctcctagtgggagagccccactcagccccagtttgaactctcgcccatcacctatcagtgccactcctccagctctcgttcctgaaacccgagagtaccgctctcagtctccagtaagaagcatggatgaagctccttgtgttaacggccgctggggaacactgagacccagggctcaaaggcagactccttcaggttcccgggaagggagcctttccccagccagaggagacggctctcctatcctcaatggtgggagtttgtctccaggaacggcagctgtgggtggctcttctttggacagtcctgtacaggccatatctccaagtactccatctgctcctgaaggatacgacctgaaaataggactttctttggccccccgacgaggatcactaccagatcagaaagatctgagattaggatccatagatctgaattgggatctgaaacccgcttccagtagtaatcccatggatggcatggacaataggacagttgggggaagtatgagacaccctcctgaacagacaaatggtgtgcataccccacctcacgtggccagtgcccttgcaggggccgtctccccaggtgccctgcgtcggagtctggaagccatcaaagcgatgtcctccaaaggcccctcggcctctgcagcactaagtcctcctcttgggtcttctccaggctctcctgggagccagagtttgagcagtggagaaacagtgcccatccctcgcccagggcctgcccaaggagatggacattccttacctcccattgctcgccgcctgggccaccaccctccacagtccctaaatgttggcaaacccctataccagagtatgaactgcaagcccatgcagatgtacgtgctggacattaaagacaccaaggagaaggggcgggtcaaatggaaagtatttaatagcagttctgtggttggacctcctgaaaccagcctgcataccgtggtacaaggcaggggtgaactcatcatatttggaggactcatggacaagaaacagaatgtgaagtactatccaaaaacaaacgccttgtactttgtacgagcaaagagataatgtgttctaaacccctttccttttctgtggcttttaatttggaattttccagtgtgtaagcatttggactgagaattgggaaaacaaaattactcccagaagccaaaactctttaattcccaaccgaagtcactccaggctgggatcaaatctccattaagaaaaaaaattatatataaatatatatatatatattatatagccaactctgttgacaaaaaaagggagagatttccatcctggttcagataaagttgttgctgtgttttaacaggggctgggctgcctttttctaccttgctggtaactagaccaagaagttagagaatagactaacatcagtaacttcccaaaagaaactgaagagccccctgtaaatctttatgtggccttcttggagttaaaaaatgaaagggcatatgtaagttgcaaaggtggagggttttagactctcatgcttcaggtgctgtcggggtaaaagtaactgtttttccccttctcttaaaaccacagaggacctgtgacagctctgcagaaatgccagtgcctggccccctcttgccttttatggctgaggaaagttacccaacaaaggattttattccacatttgtgtgccgggtcattgtgaaataatgtttatgcagccaacatctgaccgcctagtagtgtccattggtctttggagtgcttcttgtgtgtctcagaaaacattttgtgtctgattgtggaaatttctgacaatcaatcatatttggtggcaagttgccaaaaaacatatttattctcctctttcttcccttagaacatggtacttggaaactgccttttccattcacttacaggctgcttttttcttctaccttttttcttttcttttttttttttcatatgtggtgaagtcctaaaacctgtctgactttctgtttcttttacaaagctcaggtgcctacagaaatcagaagctgcttagaaatacttgtggaaccctttccctggtgtcactagggggccagtagggaattctaagatgccaatattgtgagaaatctttgaagcaagcatcaaaagatactgttttttccctatgggcttctttttacttccaaagcacattgagcacactcatcccatatttgtagaatgtggaaattgattctggaagggaattccaataacagttctttttagaaatgtttttttccttgtggtgacatatattcctcttcctggctattggcaggtgatggagttgagaatcatgtacttgacttcttgacgcatggctgacctcagaaacagctccatcctttgcacttgtcttcttcatgtgtcacccaaatagggcttgggtttttactttcacttcatttctgagattaaggtgtaaccaagtagagcatttctttgcttgatacagaaagttactagtctcaaccatggcctgggcataggagatgtcaaaataagtttatttcaaatggcaccatttaaatagggatttttggtgatttctcatcagtggaaagaggatttttgttttgcctttgttttgttttgaaatttaaatcctaatttcaaaacatcaccttgccaccctgacactcctctttttattattagcgtttctcaggcacaaagcctgctgcagctggccctgggtcctggctttcagccagcatctggcagcctaagtgtactgataagtgtgttttctcctgttacatcatgctgaatcctttcccttagccattagcttttatgatgtggtcttcgtaggaaagccaccctggtgccaagcctagcttgtggggaggggtatgtgttccagaaactgctctttgtgttcccttcaatgaggaaacaacatgtgtctacttatgtggcatccaactgcttggagctccacacttccctttcgcgactcaggctctggtgctgttgccaatccttgcttggcaaagactgttcgatcatgtggggtccttatttacaagggaaagctgggccagaaggctagcaattcaggtgttaccgctattgctgtaccttgtgttaggacattgtgtttgtgcatggactgtgcctccaaactcagtagttcctatctaaatataaagtatattagaaacctgaaagtacagaatctcaaccttacagtctttcccttagtcctgtggccttcctaagccagctgttaacgtgttgattccttccacttcccccaagtaggcaggcaacagatatgttgattgtcttagaaagtaatctggttcctctgaactccattgaattccagtttgacgcatactgcctggaaccagactgtttgcttacagctttttaagaaaaatctgccttgtctgcccccattatggttggtcttggtagctcctgggcactgtgggcgtgtaccatgggaaagtgattcaacacagtgaaggtgattgtctcctcaggcctcctgaagccacctgtgcggtgggacttcacgtgtctcggccaaggcgagcatttccacaatgccgtggatgctgcagtcaggccagattgaaccatgaccccatttttcacatgataccaattttgtcttaaaattcactgagaaaaatgagactaaattttttttaaccctcaggagcacctgaagcaaatatttatccgtatttattgaaaattcattttgtttctacttgaagctttaaccccttccattcctgcaagtgtgccttttgagagctcccatggcctagtgacttcactggtcaccttgtccatcttacttaagaattttagtctctccctaccctcttggacagagcttcctgttctcttatttcacaggttatacagcagagcgggttttgtgttttcattcctatttccacccttcatttggttggtggactccacaacctcaccctaccctacactttgggagcacaaatttggtgttgaaacaagcttaaatttcattttagggcatactgggcttactctcctcccagctgtctgtggattgatttgattttaatgttcgagttttacagcaacagctgaaaaccatgaactattctaggaactgtgttggaactctttaaaataaagaaaagaggaggaggaggaggaagaaagaaaaccaacttaagaagccttgactttggaggacagaaagccaccagccaatggagaacaaagagatgtttccctttcctttctttcaccttgtcattctgggtttccttctgcttcactctttccttcccccttaaaagtggtattcctggttggtctgtctgtctgtccttgtccttgtggtgatcctggcatggtgatatgctccactttgcattatccatggtctcttaccagcgcacaagtcagtggggaggatctaaccacgcctggtggtgaggaagctgaatttccaggcctgcgtcccatgtagcctctccatgaactgcagaaggcatgttctgcatggttaccagtaagtggctccctctcaccgtgttcattgtcaaatgagagcaaactttaggtgttggctccattgtacactctacttgctctgctcccctccctccaaccagggttcatgtcagtgcacaccccatgtgccctggcgaagctggtgctgtgagtgatgtttcccatacaactcagggatgccaggtggcttaccctgagatagtcattttgggcacataacagtgtaggaatgaaacatggatttcattgatatttaaatctgtcaatttcattttttgttaatgttttcccctgatgactttttagcaatttaacaaataaaatggacaattgtcttaac

SEQ ID NO: 10596 - DNA, 945 bp, Homo sapiens
  source 1..945: mol_type = unassigned DNA
gtctttcagttaggacgggagagggaggagggagtcaggtttattttcaatgtcttcccctcctcagattgtcatagatgatgcaactatcttaatcctcggagggtgtggcggtcccaatgctctattcaaggatgcttggttgttgcacatgcattctggtccttgggcctggcagccactcaaggtagaaaatgaagagcatggggccccagaactgtggtgccatccagcttgccgggtgggacagtgtgtggtggtcttcagccaggctcctagtgggagagccccactcagccccagtttgaactctcgcccatcacctatcagtgccactcctccagctctcgttcctgaaacccgagagtaccgctctcagtctccagtaagaagcatggatgaagctccttgtgttaacggccgctggggaacactgagacccagggctcaaaggcagactccttcaggttcccgggaagggagcctttccccagccagaggagacggctctcctatcctcaatggtgggagtttgtctccaggaacggcagctgtgggtggctcttctttggacagtcctgtacaggccatatctccaagtactccatctgctcctgaaggatacgacctgaaaataggactttctttggccccccgacgaggatcactaccagatcagaaagatctgagattaggatccatagatctgaattgggatctgaaacccgcttccagtagtaatcccatggatggcatggacaataggacagttgggggaagtatgagacaccctcctgaacagacaaatggtgtgcataccccacctcacgtggccagtgcccttgcaggggccgtctccccaggtgccctgcgtcggagtctggaagccatcaaagcgatgtcctccaaaggcccctcggcctctgcagcactaagtcctcctct

SEQ ID NO: 10597 - DNA, 1153 bp, Homo sapiens
  source 1..1153: mol_type = unassigned DNA
ctttgctgtgtcatttctcaagagaatcctgcattttatgtggttgacattcatgttaatatttgatcaacaaagaatgtatcctttcaggtgaattatcagtaatttattcacagggatcagaattgatatgtttttaggagaatggagaggttatggtaactagaatattcccatttgggagctaggtaggctattctcatataccagtgaagcatagaaagtcagaaacctgtgtctttgtaggtttattttcaatgtcttcccctcctcagattgtcatagatgatgcaactatcttaatcctcggagggtgtggcggtcccaatgctctattcaaggatgcttggttgttgcacatgcattctggtccttgggcctggcagccactcaaggtagaaaatgaagagcatggggccccagaactgtggtgccatccagcttgccgggtgggacagtgtgtggtggtcttcagccaggctcctagtgggagagccccactcagccccagtttgaactctcgcccatcacctatcagtgccactcctccagctctcgttcctgaaacccgagagtaccgctctcagtctccagtaagaagcatggatgaagctccttgtgttaacggccgctggggaacactgagacccagggctcaaaggcagactccttcaggttcccgggaagggagcctttccccagccagaggagacggctctcctatcctcaatggtgggagtttgtctccaggaacggcagctgtgggtggctcttctttggacagtcctgtacaggccatatctccaagtactccatctgctcctgaaggatacgacctgaaaataggactttctttggccccccgacgaggatcactaccagatcagaaagatctgagattaggatccatagatctgaattgggatctgaaacccgcttccagtagtaatcccatggatggcatggacaataggacagttgggggaagtatgagacaccctcctgaacagacaaatggtgtgcataccccacctcacgtggccagtgcccttgcaggggccgtctccccaggtgccctgcgtcggagtctggaagccatcaaagcgatgtcctccaaaggcccctcggcctctgcagcactaagtcctcctct

SEQ ID NO: 10598 - DNA, 2886 bp, Homo sapiens
  source 1..2886: mol_type = unassigned DNA
gaccgttacccacccgcccgccatagctcctcgggggagtcagtgccaggctgcagcacacgctgccttttcaggaacccgaatttgggaagtttactcatgtctaagtccagctggagaaaacaaggatattaagataactattttctggagggctgaaggaaattcaaaatgatttagaccttctcaagtgttaggaataatccctgcggcatgcaccctgtgtacccttcgactttgagcaatcatgatgctgctgcacctttcaattaattgtgcaaactaaagttttcctctttaagtggcattattttggcatgagttttaaagacaaagatgagagaatttcttgtttggaagcctacgtaactttgacatctaagagctcaagatttactgatgaaacagagattttgaagatgtcgcaaaggcactcaggtcaagctggcactgaagcaggaaatggggcggactctcctccaattgtcaactccaagtactccaccttcagagatttttgttccacatcttcatttcaagatagtggctacaatgagttaaaatcttgtagctttgataatatagataaagaatatcttggaaagaaagaaaaaggcccaacattactctatgagcaccctgaaacttcaggcctgggcttaacacatcctttagaatctcccactcaaaaaaagaaatgtatcttgcctagaaaggaaaaggataaaaccccagaactttgtgaaacacctaaaatcagtgggaaaaaatgtttacctcgcagaaggttgaatgtatctttcgctcttctaaaaggggactttgaatcacaaaatagttctttagaaagtagtataagccaagttatcaacttagaaaaaaatattccaagcagtgcttcaggtttttccagggcaaataattttagccctttagttactagcactttaaaaacagaagaagtgacttcatgcagtcaaaaattgaggcttaatttttctcagcaaaagacttccacaattgatgattccaaagatgattgtagcctatttgaagttgaatgtatatctccaattcagggcaataattttaaagactctatcacacatgactttagtgatagcagtttatgcattaatgatgagaatgcatgtccagagctcctgggctcctctgttagtggaacaacttgtggaacagatgaggacatatttgtgactccgataagtaatcttgtggcaaacattagatttaacgcaagtcaaatactttctccttcacctgaagtgagaggcagtatttcaacgcctgaagacagtggttttaactcacttagcttggagaaatcagaagattccctgtctgaccaggagggttcttttcaagaactactgcagaaacataaggggactcccaaagttggggacaccataagaaagacaagacatcttggaaggtcgagaagactgtccacccttcgggaacaaagctcgcagtcagagacagaagaggaaaagcagattgtccaccctgactctgaaaaaagagcagcagctgcttctgccatctcagagggtcagctgagtagtgatgagagtggggatttgacctttagcttaaagaatttatcaaagaccccagccttgcaattggtacatgagctgttcatgaaaagcaagaggaaaagattacaggaaaatagtggacatgaattcttagagcaaggggatggggagaaaatagctgtactgcagtgtatacttgcaggactgatcggcaagaaaatgggtatagaaaaactggacatcttaacagaattaaaatatagaaatttaaagcatattcttgctatggttttagagtccttgaccgcagagagcctatgcagtgtttggaaagtaagcagaaattggcgtgaaattgttgttcaagataaaaatgcaaatcggaggaggaaattttatatcacacaactgaaaacagattctgagggggctgtattaaatgtcgaggatgctgccactcggctccagcttttaaatcgctcagctttaagatctgtgcaggcacaggctaggatacctggttctcagagagagcaagggtcaacattatctccctggggagaagttttgacacctctagcaagctcttctgttactcacttaagtagtaaacaggaagaatatgttaaggttgccaaaacactttttactgatgaagcattaaaaccttgcccaaggtgccagtcccctgctaagtaccagccatataagaaaaggggactgtgtagccgaacagcctgtggttttgacttttgtgtgttatgtctgtgtgcttatcatgggtctgaagaatgtagtagaggagcagcaaagccaagaaatagaaaagatgctctcccaggaagtgcccagagtaagcggaatttaaaacgcctctgaagagactaaatatagaactcccccatgcagtgttctatttatctgacttaaaattatgaatattttgaatacatgcaaatcttcccattaatgacaggtgatgattaatttcctattttgtatatattataatcgatgtcattgtatgttttctttaaagttgttttgaaaaaattttattttactatgtcattttacccattttaataacttggtattttaaataaagaattttcattgttgttatatgtatgtactttattgttttatgtaacattttaaatttgtgcatttcatcactcttgacatgttcttcaatcattttttaaaaaatagtttttcagataatattaaagattttgaactctagacagatggccttatagatttggaaaatgagtacttgactgaaatgaaatataaataaaatattttcagaagt

SEQ ID NO: 10599 - DNA, 1896 bp, Homo sapiens
  source 1..1896: mol_type = unassigned DNA
agcgctgcgggctgcgcgagtcccggggcggcgagtcccggcgctgtccgcgtctgtgtcggtcccggcgaccgcgcctcttaaaggcccccgacccgacccgccccgccccgcctctggccccgcgcccggccgccccgcagtcccagcagtctgctcgaggcccggggctgcgggttcctcagcggaccgaggaggctgggaaagctacaggagggtgtccagaagccacaagccatggctgtggggaacatcaacgagctgcccgagaacatcctgctggagctgttcacgcacgtgcccgcccgccagctgctgctgaactgccgcctggtctgcagcctctggcgggacctcatcgacctcgtgaccctctggaaacgcaagtgcctgcgagagggcttcatcactgaggactgggaccagcccgtggccgactggaagatcttctacttcttacggagcctgcacaggaacctcctgcacaacccgtgcgctgaagaggggttcgagttctggagcctggatgtgaatggaggcgatgagtggaaggtggaggatctctctcgagaccagaggaaggaattccccaatgaccaggttcgcagccaggccagattgcgggtccaagtaccagctgtgcgttcagctcctgtcgtccgcgcacgcgcctctggggaccttccagccagacccggcgaccatccagcagaagagcgatgccaagtggagggaggtctcccacacattctccaactacccgcccggcgtccgctacatctggtttcagcacggcggcgtggacactcattactgggccggctggtacggcccgagggtcaccaacagcagcatcaccatcgggcccccgctgccctgacaccccctgagcccccatctgctgaaccctgactggtaaacaactgctgtcagaaaagggctgggcttgggaaggggaggtggaggccaggtgtccccagacctctaacccttgcccctagcagcctcttctttgtggagcctctcagtgtgggcagccctcgcatgctggggtcgggccagctctccccgaaaggtcttgacctgaatgatggccggggaagcctgcgtgtgcccctttcagagacggagcacctgagatgtgggaggtgcagcatgttcccctgggcccctcagaaagtcgagcttggaggccagcctggatctgtctctcccttcccctcctgggaccattctacctgtgttctttgaccctcggagcagggacaggcaagacaactggcaagcttgcagctgccctgatggtgcaggtgcagggaggtgaccatgtaactctgaccaatctgggaagtggagggtgggctcatgggccgtgctctgcccctgtctgctgctcccagtctctcgctctgcctgcctgctcagaagaggtggctttggcccagaggctcaggccgggactgagatggacagacccagggtggggtggggtccaggtcgggtgtggactgtcctcactgtcagtggagccccagaagctagatgggtaccaggtggggttaggttcccagaggactgagggaatcctgtacaggatgtcccagggtagatggggagcaggattgggacctgctctgacagctggacacatgagccctggatgagtatggtagggggtttgaagaatcccctgtccacctcccaaatccaggcccggccccctctggcttggagagcattccaagcccccaccccacccctagaactgccattcccaagacctctgtctcccagccaaccacccttggaacttgcctcttgtcctgctggaaagatagcagtgttctcctgacttcgccctactgcatgcagccaaataaaaggtgtgcccagtct

SEQ ID NO: 10600 - DNA, 2903 bp, Homo sapiens
  source 1..2903: mol_type = unassigned DNA
ggcggtgcagcttgggcggcccaacggatcgtgccgcggcggccgagcgcagctacaggagggtgtccagaagccacaagccatggctgtggggaacatcaacgagctgcccgagaacatcctgctggagctgttcacgcacgtgcccgcccgccagctgctgctgaactgccgcctggtctgcagcctctggcgggacctcatcgacctcgtgaccctctggaaacgcaagtgcctgcgagagggcttcatcactgaggactgggaccagcccgtggccgactggaagatcttctacttcttacggagcctgcacaggaacctcctgcacaacccgtgcgctgaagaggggttcgagttctggagcctggatgtgaatggaggcgatgagtggaaggtggaggatctctctcgagaccagaggaaggaattccccaatgaccaggtcaagaaatacttcgttacttcatattacacctgcctcaagtcccaggtggtggacctcaaggccgaagggtattgggaggagctgatggataccacacggccggacatcgaggtcaaggactggttcgcagccaggccagattgcgggtccaagtaccagctgtgcgttcagctcctgtcgtccgcgcacgcgcctctggggaccttccagccagacccggcgaccatccagcagaagagcgatgccaagtggagggaggtctcccacacattctccaactacccgcccggcgtccgctacatctggtttcagcacggcggcgtggacactcattactgggccggctggtacggcccgagggtcaccaacagcagcatcaccatcgggcccccgctgccctgacaccccctgagcccccatctgctgaaccctgactggtaaacaactgctgtcagaaaagggctgggcttgggaaggggaggtggaggccaggtgtccccagacctctaacccttgcccctagcagcctcttctttgtggagcctctcagtgtgggcagccctcgcatgctggggtcgggccagctctccccgaaaggtcttgacctgaatgatggccggggaagcctgcgtgtgcccctttcagagacggagcacctgagatgtgggaggtgcagcatgttcccctgggcccctcagaaagtcgagcttggaggccagcctggatctgtctctcccttcccctcctgggaccattctacctgtgttctttgaccctcggagcagggacaggcaagacaactggcaagcttgcagctgccctgatggtgcaggtgcagggaggtgaccatgtaactctgaccaatctgggaagtggagggtgggctcatgggccgtgctctgcccctgtctgctgctcccagtctctcgctctgcctgcctgctcagaagaggtggctttggcccagaggctcaggccgggactgagatggacagacccagggtggggtggggtccaggtcgggtgtggactgtcctcactgtcagtggagccccagaagctagatgggtaccaggtggggttaggttcccagaggactgagggaatcctgtacaggatgtcccagggtagatggggagcaggattgggacctgctctgacagctggacacatgagccctggatgagtatggtagggggtttgaagaatcccctgtccacctcccaaatccaggcccggccccctctggcttggagagcattccaagcccccaccccacccctagaactgccattcccaagacctctgtctcccagccaaccacccttggaacttgcctcttgtcctgctggaaagatagcagtgttctcctgacttcgccctactgcatgcagccaaataaaaggtgtgcccagtctaacctgtgccctgtggtttctggaaggaaaggcagactttaggtggtcctgcctggacctgcagatggtacaatggcatggcttctgtctaaggtacagaggggttggcatttcaggaaccaggccatcacagaaacaggttcatgggcagacccctcagtgagctgcaggtatctcacctggcagccgtccagtactgctggcttcctctggaggcccagccacaggctggggttggggtgtgtggacatctctgggcagctcttgagtccaccttgtgccagatcagcagtgccacccaggctctgcctcctggtgttactctttgccaacagctttacggacattggatgaagccgaagcatttagaatggtgcctggcacacagttggtgcgtgatatggttaagctttgtgtccccacccacatctcatcttgaatggtaatcctgggtgtttagggagagacctggtgggaagtgattggattatgggagcggttttcccccatgctgttctcatgatagtgagtgagttctcacgagatctgatggttttacaagtgacggtttccccggctccctcctgccgccatgtgaagaaggtcgttgcttccccttcaccttccaccaccatgattgtaagttccttttttcttttcttttcttttttttttttttttttttgagatggagtctcgctctgtcgcccaggctggagtgcagtggcgcaatctcagctcactgcaagctctgcctcccaggttcgcgccattcacctgcctcagcctctggagtagctgagactacaggcgcccaccaccatgcccggctaattttgtttgtatttttagtagagatggagtttcaccatgttggccagggtggtctcaatctcctgacctcgtgatccacccacctcgacctcccaaagtgctgagattacaggcgtgagccaccgcgcccagcgattgtttcttgaggcttccccagccatatggaactataagtcaattaaacctctttccttttataaatc

SEQ ID NO: 10601 - DNA, 822 bp, Homo sapiens
  source 1..822: mol_type = unassigned DNA
gcttgggcggcccaacggatcgtgccgcggcggccgagcgcagctccttggaccgccccagtgacccctggagctacaggagggtgtccagaagccacaagccatggctgtggggaacatcaacgagctgcccgagaacatcctgctggagctgttcacgcacgtgcccgcccgccagctgctgctgaactgccgcctggtctgcagcctctggcgggacctcatcgacctcgtgaccctctggaaacgcaagtgcctgcgagagggcttcatcactgaggactgggaccagcccgtggccgactggaagatcttctacttcttacggagcctgcacaggaacctcctgcacaacccgtgcgctgaagaggggttcgagttctggagcctggatgtgaatggaggcgatgagtggaaggtggaggatctctctcgagaccagaggaaggaattccccaatgaccaggttcgcagccaggccagattgcgggtccaagtaccagctgtgcgttcagctcctgtcgtccgcgcacgcgcctctggggaccttccagccagacccggcgaccatccagcagaagagcgatgccaagtggagggaggtctcccacacattctccaactacccgcccggcgtccgctacatctggtttcagcacggcggcgtggacactcattactgggccggctggtacggcccgagggtcaccaacagcagcatcaccatcgggcccccgctgccctgacaccccctgagcccccatctgctgaaccctgactggtaaacaactgctgtcagaaaagggctgggcttgggaaggg

SEQ ID NO: 10602 - DNA, 1734 bp, Homo sapiens
  source 1..1734: mol_type = unassigned DNA
gcttgggcggcccaacggatcgtgccgcggcggccgagcgcagctacaggagggtgtccagaagccacaagccatggctgtggggaacatcaacgagctgcccgagaacatcctgctggagctgttcacgcacgtgcccgcccgccagctgctgctgaactgccgcctggtctgcagcctctggcgggacctcatcgacctcgtgaccctctggaaacgcaagtgcctgcgagagggcttcatcactgaggactgggaccagcccgtggccgactggaagatcttctacttcttacggagcctgcacaggaacctcctgcacaacccgtgcgctgaagaggggttcgagttctggagcctggatgtgaatggaggcgatgagtggaaggtggaggatctctctcgagaccagaggaaggaattccccaatgaccaggttcgcagccaggccagattgcgggtccaagtaccagctgtgcgttcagctcctgtcgtccgcgcacgcgcctctggggaccttccagccagacccggcgaccatccagcagaagagcgatgccaagtggagggaggtctcccacacattctccaactacccgcccggcgtccgctacatctggtttcagcacggcggcgtggacactcattactgggccggctggtacggcccgagggtcaccaacagcagcatcaccatcgggcccccgctgccctgacaccccctgagcccccatctgctgaaccctgactggtaaacaactgctgtcagaaaagggctgggcttgggaaggggaggtggaggccaggtgtccccagacctctaacccttgcccctagcagcctcttctttgtggagcctctcagtgtgggcagccctcgcatgctggggtcgggccagctctccccgaaaggtcttgacctgaatgatggccggggaagcctgcgtgtgcccctttcagagacggagcacctgagatgtgggaggtgcagcatgttcccctgggcccctcagaaagtcgagcttggaggccagcctggatctgtctctcccttcccctcctgggaccattctacctgtgttctttgaccctcggagcagggacaggcaagacaactggcaagcttgcagctgccctgatggtgcaggtgcagggaggtgaccatgtaactctgaccaatctgggaagtggagggtgggctcatgggccgtgctctgcccctgtctgctgctcccagtctctcgctctgcctgcctgctcagaagaggtggctttggcccagaggctcaggccgggactgagatggacagacccagggtggggtggggtccaggtcgggtgtggactgtcctcactgtcagtggagccccagaagctagatgggtaccaggtggggttaggttcccagaggactgagggaatcctgtacaggatgtcccagggtagatggggagcaggattgggacctgctctgacagctggacacatgagccctggatgagtatggtagggggtttgaagaatcccctgtccacctcccaaatccaggcccggccccctctggcttggagagcattccaagcccccaccccacccctagaactgccattcccaagacctctgtctcccagccaaccacccttggaacttgcctcttgtcctgctggaaagatagcagtgttctcctgacttcgccctactgcatgcagccaaataaaaggtgtgcccagtctaa

SEQ ID NO: 10603 - DNA, 959 bp, Homo sapiens
  source 1..959: mol_type = unassigned DNA
tccaggcaagcgcaggtccaggcggtgcagcttgggcggcccaacggatcgtgccgcggcggccgagcgcagctacaggagggtgtccagaagccacaagccatggctgtggggaacatcaacgagctgcccgagaacatcctgctggagctgttcacgcacgtgcccgcccgccagctgctgctgaactgccgcctggtctgcagcctctggcgggacctcatcgacctcgtgaccctctggaaacgcaagtgcctgcgagagggcttcatcactgaggactgggaccagcccgtggccgactggaagatcttctacttcttacggagcctgcacaggaacctcctgcacaacccgtgcgctgaagaggggttcgagttctggagcctggatgtgaatggaggcgatgagtggaaggtggaggatctctctcgagaccagaggaaggaattccccaatgaccagcacctgcctcaagtcccaggtggtggacctcaaggccgaagggtattgggaggagctgatggataccacacggccggacatcgaggtcaaggactggttcgcagccaggccagattgcgggtccaagtaccagctgtgcgttcagctcctgtcgtccgcgcacgcgcctctggggaccttccagccagacccggcgaccatccagcagaagagcgatgccaagtggagggaggtctcccacacattctccaactacccgcccggcgtccgctacatctggtttcagcacggcggcgtggacactcattactgggccggctggtacggcccgagggtcaccaacagcagcatcaccatcgggcccccgctgccctgacaccccctgagcccccatctgctgaaccctgactggtaaacaactgctgtcagaaaagggctgggcttgggaaggggaggtggaggccaggtgtccccagacctctaacccttgcccc

SEQ ID NO: 10604 - DNA, 3320 bp, Homo sapiens
  source 1..3320: mol_type = unassigned DNA
gcgggccggggcggggcctcgctttccaggcaagcgcaggtccaggcggtgcagcttgggcggcccaacggatcgtgccgcggcggccgagcgcaggcaggagatcatgtcctctgagatcttgagaaggtggctggagccctttggacctccgcgggaggcagtgataattagcctcctcctcccatcatgttctgaggatgggagagaggatggtgacggcaccggaggcctggggtgctctgcccggctgcgcattatatccccattaaagactggcctactgaaaaaggctggccctggaatcaaagaagatccgggcttcttccccctctgcccttatttttgaccttgggcagtgccttccacctctattgtgagaggccagagaaaaaaatcagagctcaccttttattaaagtacctgatgtgtcccaagctccttggaccgccccagtgacccctggagctacaggagggtgtccagaagccacaagccatggctgtggggaacatcaacgagctgcccgagaacatcctgctggagctgttcacgcacgtgcccgcccgccagctgctgctgaactgccgcctggtctgcagcctctggcgggacctcatcgacctcgtgaccctctggaaacgcaagtgcctgcgagagggcttcatcactgaggactgggaccagcccgtggccgactggaagatcttctacttcttacggagcctgcacaggaacctcctgcacaacccgtgcgctgaagaggggttcgagttctggagcctggatgtgaatggaggcgatgagtggaaggtggaggatctctctcgagaccagaggaaggaattccccaatgaccaggtcaagaaatacttcgttacttcatattacacctgcctcaagtcccaggtggtggacctcaaggccgaagggtattgggaggagctgatggataccacacggccggacatcgaggtcaaggactggttcgcagccaggccagattgcgggtccaagtaccagctgtgcgttcagctcctgtcgtccgcgcacgcgcctctggggaccttccagccagacccggcgaccatccagcagaagagcgatgccaagtggagggaggtctcccacacattctccaactacccgcccggcgtccgctacatctggtttcagcacggcggcgtggacactcattactgggccggctggtacggcccgagggtcaccaacagcagcatcaccatcgggcccccgctgccctgacaccccctgagcccccatctgctgaaccctgactggtaaacaactgctgtcagaaaagggctgggcttgggaaggggaggtggaggccaggtgtccccagacctctaacccttgcccctagcagcctcttctttgtggagcctctcagtgtgggcagccctcgcatgctggggtcgggccagctctccccgaaaggtcttgacctgaatgatggccggggaagcctgcgtgtgcccctttcagagacggagcacctgagatgtgggaggtgcagcatgttcccctgggcccctcagaaagtcgagcttggaggccagcctggatctgtctctcccttcccctcctgggaccattctacctgtgttctttgaccctcggagcagggacaggcaagacaactggcaagcttgcagctgccctgatggtgcaggtgcagggaggtgaccatgtaactctgaccaatctgggaagtggagggtgggctcatgggccgtgctctgcccctgtctgctgctcccagtctctcgctctgcctgcctgctcagaagaggtggctttggcccagaggctcaggccgggactgagatggacagacccagggtggggtggggtccaggtcgggtgtggactgtcctcactgtcagtggagccccagaagctagatgggtaccaggtggggttaggttcccagaggactgagggaatcctgtacaggatgtcccagggtagatggggagcaggattgggacctgctctgacagctggacacatgagccctggatgagtatggtagggggtttgaagaatcccctgtccacctcccaaatccaggcccggccccctctggcttggagagcattccaagcccccaccccacccctagaactgccattcccaagacctctgtctcccagccaaccacccttggaacttgcctcttgtcctgctggaaagatagcagtgttctcctgacttcgccctactgcatgcagccaaataaaaggtgtgcccagtctaacctgtgccctgtggtttctggaaggaaaggcagactttaggtggtcctgcctggacctgcagatggtacaatggcatggcttctgtctaaggtacagaggggttggcatttcaggaaccaggccatcacagaaacaggttcatgggcagacccctcagtgagctgcaggtatctcacctggcagccgtccagtactgctggcttcctctggaggcccagccacaggctggggttggggtgtgtggacatctctgggcagctcttgagtccaccttgtgccagatcagcagtgccacccaggctctgcctcctggtgttactctttgccaacagctttacggacattggatgaagccgaagcatttagaatggtgcctggcacacagttggtgcgtgatatggttaagctttgtgtccccacccacatctcatcttgaatggtaatcctgggtgtttagggagagacctggtgggaagtgattggattatgggagcggttttcccccatgctgttctcatgatagtgagtgagttctcacgagatctgatggttttacaagtgacggtttccccggctccctcctgccgccatgtgaagaaggtcgttgcttccccttcaccttccaccaccatgattgtaagttccttttttcttttcttttcttttttttttttttttttttgagatggagtctcgctctgtcgcccaggctggagtgcagtggcgcaatctcagctcactgcaagctctgcctcccaggttcgcgccattcacctgcctcagcctctggagtagctgagactacaggcgcccaccaccatgcccggctaattttgtttgtatttttagtagagatggagtttcaccatgttggccagggtggtctcaatctcctgacctcgtgatccacccacctcgacctcccaaagtgctgagattacaggcgtgagccaccgcgcccagcgattgtttcttgaggcttccccagccatatggaactataagtcaattaaacctctttccttttataaatca

SEQ ID NO: 10605 - DNA, 994 bp, Homo sapiens
  source 1..994: mol_type = unassigned DNA
gcgggccggggcggggcctcgctttccaggcaagcgcaggtccaggcggtgcagcttgggcggcccaacggatcgtgccgcggcggccgagcgcaggcaggagatcatgtcctctgagatcttgagaaggtggctggagccctttggacctccgcgggaggcagtgataattagcctcctcctcccatcatgttctgaggatgggagagaggatggtgacggcaccggaggcctggggtgctctgcccggctgcgcattatatccccattaaagactggcctactgaaaaaggctggccctggaatcaaagaagatccgggcttcttccccctctgcccttatttttgaccttgggcagtgccttccacctctattgtgagaggccagagaaaaaaatcagagctcaccttttattaaagtacctgatgtgtcccaagctccttggaccgccccagtgacccctggagctacaggagggtgtccagaagccacaagccatggctgtggggaacatcaacgagctgcccgagaacatcctgctggagctgttcacgcacgtgcccgcccgccagctgctgctgaactgccgcctggtctgcagcctctggcgggacctcatcgacctcgtgaccctctggaaacgcaagtgcctgcgagagggcttcatcactgaggactgggaccagcccgtggccgactggaagatcttctacttcttacggagcctgcacaggaacctcctgcacaacccgtgcgctgaagaggggttcgagttctggagcctggatgtgaatggaggcgatgagtggaaggtggaggatctctctcgagaccagaggaaggaattccccaatgaccaggttcgcagccaggccagattgcgggtccaagtaccagctgtgcgttcagctcctgtcgtccgcgcacgcgcctctggggaccttccagccagacccggcgaccatccagcagaagagcgatgccaagtggagg

SEQ ID NO: 10606 - DNA, 5899 bp, Homo sapiens
  source 1..5899: mol_type = unassigned DNA
ggcggagccgctggcgcgccgcggagaggccgggcgagtcgggcggtttcggcgcccgcgctgagccgcggaggaggggcggaggacgcccctgcagccggtgcgtctgccctcagtgaggcggggcgcgcggcggacgcccccgggcaggggcgggagtggtggaggcgccggcggttggcactgacaggggcggtgagcgagccgctccggtctccgggcgaggcttggccttccgagcagagacggcgggaagcggcggcggcagcggcggccctagggccggctggtgaggcgatggcggcgccggccccgggggctggggcagcctcgggcggcgctggctgtagcggcggcggcgcgggcgcgggcgcgggctcgggctctggggccgcgggggccgggggccggctgcccagccgggtgctggagttggtgttctcttacctggagctgtccgagctgcggagctgcgccctggtgtgcaagcactggtaccgctgcctgcacggcgatgagaacagcgaggtgtggcggagcctgtgcgcccgcagcctggcagaagaggctctgcgcacggacatcctgtgcaacctgcccagctacaaggccaagatacgtgcttttcaacatgccttcagcactaatgactgctccaggaatgtctacattaagaagaatggctttactttacatcgaaaccccattgctcagagcactgatggtgcaaggaccaagattggtttcagtgagggccgccatgcatgggaagtgtggtgggagggccctctgggcactgtggcagtgattggaattgccacaaaacgggcccccatgcagtgccaaggttatgtggcattgctgggcagtgatgaccagagctggggctggaatctggtggacaataatctactacataatggagaagtcaatggcagttttccacagtgcaacaacgcaccaaaatatcagataggagaaagaattcgagtcatcttggacatggaagataagactttagcttttgaacgtggatatgagttcctgggggttgcttttagaggacttccaaaggtctgcttatacccagcagtttctgctgtatatggcaacacagaagtgactttggtttaccttggaaaacctttggacggatgacagtggctttcttgtgatgacagacagaatggaggagagatctgcttatgggaagtagaaccatgaagtgactgtcacacatgcatgtccaagaaacatcctgaaaacacatgaagtcgtaaactggagaagcagctctacagcagagattatcttcgtgtttcctctttctactgggccagaaaaatcctcagggttgcagttggttgagtgggcagttgacatatgcatgttgcacccgatgttgtctctaagttagcaatgtgttatttccagctttaaaggtgagattgtagagatgctgtcaaagggataaggaaatagcaagatttttaagtagtgtgtttgtgaagactgatcccattttacaactgcctgttctttctccagtccttttttttccagccagcttgactattagaaaagtatgaaactggttgggttttatttaatatttttaatatattgagaagcatggtctgcctggactgcacttctctaaaagtgagatataaaattgtgcagctattttaaaagttgtatataatatgtgtgtaaaaaaaaaaaactgtaaaaaagaaaggacaaacaggttgttttgttctagttctaatttcttaaaaaccactacatggttacaaaattggaataacatttggggacaactgggttaactacaaagaagaggattttaagaggagatgtgttgtattgactcattttgtattatttttggcttacagttcccatagctgttagagtctggtttgtttttgtttttactctcaaaatcatagtaaagatctctcagtctcctggctaaagattgaaggaaggcaaatctatttctaattatacatatatcagtaaggatgatctcaacataatagtaatgtgtatcttttggtatccagttttatttttggccttctaagaaagtgtctcataacacagaacattgccatttgctcttgtaggcctcaaatatgaaagctattagtcatagagcctaggaaaaaaagaattgattaatggtccttttattttgtaaccttataaatgctgtagatattatcaaaaaaattttaatttcatattgtttacatcatgcaactaatctaagcctcaaactcgttattggggctataaagaaaacgtttacttacccagctgaaacaggttaagaatattcttaatctcattatagataattgcccccatgggacttgaaatacaacaccttgtgctgaaaacttcaggttggcaatatttgaaggtttcgttgtagaagagtttaacattaactcctattttgacttacaaatcttgtttctcatcactaaaatgcttttgaattaataatccaacccacatgagctgagagtttttcttttgttagaaaagaaacagacatctttctgtatgaaagtataaattgtatggttttagatacataagaattgacaaaagcgagcgaaatctttgtacttctgagttcttgctgtatgtatgttttgttttaaatctgattagggacacccagcagctggccgggattcttggattgctccttgggagttaagattgtcaatactcctgtgaagcaagggatttcagccatagaacaaagatttattgttgccacctgaaaagtttacaagtatttattgtgtatttgatacattgcttgaaaagatgaaatctgttaaagattcttttcgatgtccaggttaagaagaaacctccttgtattgagtgaaattatatgttaaatgtattagagaatgtaggtggtatagaaattgatttttcttggtgtagaacaactcagttcggcaaagtttaaaatttgattaaacaagagaagtggttcaggttgaagatggacttgttaggaagtgatcaagtcctttaagtacttgtttctttttcaggttgtgatgtggccattccgaattttgttgagagtttggtttataattgtctcttttgtcttgttagtaaacattcatttgcaacagttttgaaggtgctgagtggaaaaccgaaacacatggttattgcgtattggacctagaatgaaataattgcctcaatatttaacaacaagccattcttatctcaaagatttaaattcccgaatgtcccattcgcaaatcatatgcaattgaagtgagcagcatgagcatctgggtcatgagggccttcatttacgtaaatttgtcactaaaacccagtagtagctctacaaaatcttaaactgctgcagtgctcaaggagatggaatatctttgtcattggtgctgaggagagcatttcggtagaagacagttgcgcctgaagattgagtgtaaatcattcaaaccagtggttctcagtgttggctgtatacactttgtagtcactttggaatgttggaagacacatcgatgcttgggttccgtatgccaagattctgatgttggtctggaatatgagctggtcataaggatttttaaaaactttctggtcatttcaatatgctgccaaggttgagaaccactgttgtaaaattcaccttgagttttctcatctgcaaaatagaaaaaaaaaaatccttgctccctcccttcactacctcacaaggatattgagggtaaaggagaaaataatgggaaagtgcttgtgccgtggatgaaaagtgctattaaaagtcaaaggagtgttctgtttcaattcatagtatgatcagggaaagtgtaactgagtatactttgttgacttgggaaacctggagcactttctttggttggttaacgaagcatgcagatgtggaagcagacgttactattatccctactatggtcttctgtcatactgagacaggctgttttaattacctggttttacataggaaagaagaaatattaaggcttaaagtttgtaatgatcaatggctcataattcattaaatcttttcatacaaggaatttgtggttaatgtcatttcatagttgccattattttctcattatttgacttaaatgttaagccatttatttcatctccctcattcacataaagtgtagatatggattcaataagacaccaaaagaaagtaagatttacccagttaatatttaaaatcattgttcagtgattaggcattttctgccttttagaattatttgactggagaaagagtttcaaaaatagcagagccctaaaccataaagaaactactactgtataatgaacttttgtttgtttttggagacagggtttcactctactgcctaggcaggtcttgaactcctgggctcaagcagtcttcctgcctcagcctcccaagtagctgggattacaggtgtatgccactatacccagctttaacttttaaatccccaaactatgtagattgtcatattaatattaatttttttttgttattttgaagaagtgagtaatttgaagagatagaaacttagggagtggtgtgtgtgtttcttttttggagacagagtcacgcaggctggagtgcacgatcttgactcactgcaacctttgccacccaggttcaagcaattctcgtgcctcagcctcccgagtagcatgtgccaccacacctggctaatttttttcttttttcttttagacggagtcttgctctgttgcccaggctggagtgcggtggtgtgatctcagttcactgcaacctttgcctcccgggttcaagtgattctcctgcctcagtctcccgagtagctgggattacaggcacctgccaccatgcctggctaatttttgtatttttaatagagacggggtttcaccatgttggccaggctggtctcgaactcctgaccttgtgatccacccacctcagcctcccaaagtgctgggattacaggcatgagccactgttcccgggcctaatctttgtatttttagtagagggggtttatgccatgttggccaggctggtcttgaactcctggccaacaccacccacctcgcctcccaaagtgctggggttacaggcgcgagccaccgtgccaggccagaaatttaaggagttttaaaggttagcattgaaaagattactttccagaaattgagaccaccacagttccacaattgggactgtggtagataatcaggaccacttggaagcctttattaggaacagcccacacccagcccaaatgctgtcctcaaaaacattcctcagtttctctagctgaatgtaatctctccttgaaatttccctagttttatatatctatagttgactcatgctgtatttatttataccttgtttaaaattatttattgattatttattggtgtcatatcgcccctaaactgggacaggatctctaacggactcatctttgtgccacaacatgtaagcccaataggcaggtgctcacatatttgctgaaggaacagagaaagaactgcggagaaagacaaaagctcctctgaagttttagactatagaagcaaaaattatagtagcaaaagatgaatgagaaattctgttctagtcccagtgaagcaggaaggaaagggttgcaaacttgaggctggtaaggaagaaataattactgtgaatgcatttagccactcccctctactcaaaaatactggtaaactctgatttttatatttgtttagaatttaaattagaattctgtatctttattttttggaattctgttgttttgccttagtttcttaataaaaagttaaacattaa

SEQ ID NO: 10607 - DNA, 2990 bp, Homo sapiens
  source 1..2990: mol_type = unassigned DNA
tgggggaaacccgcgtagccgagggagatgcagcgcgcggcgatggtggcatgtggagcctcccaccaccacctaggtcctgagatgcgctgaagcccagcctgtctgccatcatcccccagcatggaccgtgggagcctcctgcccttccagctatggtgcccccggccctttggcacctactcacagaaccagccacgcccgccttctgcggccctcaagccatcagcctgccctgagcctggtggcggggccgagccagaccatgggcctgcccactcagagaacacaccacccgccttggccactgaggtccctgcctcccagccggctccgctcctctcagcagcagctgctggtgatgagggtcgagtcctcctggacacgtggtatgtcatcaagcccgggaatacaaaggagaaggtggccttctttgtggcccaccagtgtggtgggggcagccgggccagctccatgaaggtcaaggggcactggggcagcgatagctccaaggccaagcggcggaggcgctgtcttgaccccaccaaggctcctcctgacccagggggccgggagggcccccctgctgctgaggagggccccgcctcagccggtgaggacgtggacctgctctctgtggccgagatggtggccctggtggaacagcgggcagccctggccctgcagagctacccacgaccgaccaccccagcgcctgtagtctttgtgtccgccgagcaaggtggaccggccaagggggtgggatctgaacggcggtccggtggtggggactgcagccgtgtagccgaggccgtggcccactttgaagcgcagagggacagccctcccaccaagggcctccgcaaggaagagcggcccgggccaggccctggggaggtgcgcatcgccttccgcatctccaacggccgggagccccgtgcaccagacagcggcctgcccagtgggggcgggggcaggcctggttgtgcctaccctggcagcccaggtcctggggcccgagccaaggacaagatcacatgtgacttataccagctcatcagcccctcgcgggatgccctccccagcaacgtggagttcctgctggccagggcggatgaggccagtgagggtgacagcccggcacccgccaggcctgaggacactcccccggcgccccctccgccccctgcccgggactgcggagcgtcaggcttccacgtggacgtggtggtgacgggcgtggtagatgagtgcatcttctttggcaaggacggcaccaagaacgtgaaggaggagactgtgtgcctgacggtcagcccggaggaaccgccgcctccgggccagctcttctttctccagaaccgcgggccggacgggcccccggagccacccccggccgactccccggccactgcgcccggcccagacgatgccgagggcacggcggacacctccctgtgccgcttgtaccggcacgtgtcgcacgacttcctagagatccgcttcaagattcagcggctgctggagccgcgacagtacatgctgctgctgcccgagcacgtgctggtcaagatcttcagcttcctgcccacgcgcgcgctggccgccctcaagtgcacctgccaccacttcaagggcatcatcgaggcgtttggcgtgcgggccacagactcgcgctggagccgagacccgctctaccgcgatgatccgtgcaaacagtgccgcaagagatacgagaagggcgacgtgtcgctctgccgctggcaccccaagccctaccaccatgacctgccttacggacgttcctactggatgtgctgccgtcgagccgaccgcgagactcccggctgccgcctgggcctccacgataacaactgggtgctgccctgcaatgggccaggcgggggccgggccggccgggaggaggggaggtgaagccgggggaggggaggggagagcccaccacgcccacccctcccctctccccccgggagccgagggtccggactgggccgcctgcccattcccctactccaggcagcattgatccctcaccggaactgagctggggttcagcaggggtgacccaggaaagccctctgcttgatcctgttgattttctactcttcagaaccagggccgtggaccctctgagaagggtgttttttttttttttatcagcatctcactttcttctccattcagccccaaccccctccctgccatgctttccaccccaaggacccaccagcagggagcagacggcagctaattttggtaccacttaagggtccccccattctggcccccatcctctccctcaccccaattctttctcgctggagctgttatttcccaagaagccgcatcgcccaaggttggcacctctcctaacctgccacacgacagctctcacctctctaggaattgggggctgtcaggtcacaggtgggatctggcatttttttatgacagtccatttctagatggtttgcctattaaagaagtgggggggaaatactgttttctccttaacctcaagctaccagtctctcctcttccgcgtagaggaagaggggggcagacaaaaaaaaagctgaagtataaaaaccctcctcctcccgttattatttaagctactgccatcaaccccacccccataaagctgtgaagccctttgcctcgcttttgacagcgtgggggggccccgtgggcagggacttcggatttgcatttctgggttgtttttccttccactctggggtctcgttcaggcattggggtctcctcaccccagccacatgtttctttaagaatcctttggtcaaccaggaccttgatttttcaggcattttggtctggggtatttttgtttgttctctctgttttttgttttcttttttttctttccatcgtggttctggaagcttctagcgtgtggcatctgaccaattttgaattggtcctttctataaaatcaatatttataa

SEQ ID NO: 10608 - DNA, 1531 bp, Homo sapiens
  source 1..1531: mol_type = unassigned DNA
tccctgtgccgcttgtaccggcacgtgtcgcacgacttcctagagatccgcttcaagattcagcggctgctggagccgcgacagtacatgctgctgctgcccgagcacgtgctggtcaagatcttcagcttcctgcccacgcgcgcgctggccgccctcaagtgcacctgccaccacttcaagggcatcatcgaggcgtttggcgtgcgggccacagactcgcgctggagccgagacccgctctaccgcgatgatccgtgcaaacagtgccgcaagagatacgagaagggcgacgtgtcgctctgccgctggcaccccaagccctaccaccatgacctgccttacggacgttcctactggatgtgctgccgtcgagccgaccgcgagactcccggctgccgcctgggcctccacgataacaactgggtgctgccctgcaatgggccaggcgggggccgggccggccgggaggaggggaggtgaagccgggggaggggaggggagagcccaccacgcccacccctcccctctcccccgggagccgagggtccggactgggccgcctgcccattcccctactccaggcagcattgatccctcaccggaactgagctggggttcagcaggggtgacccaggaaagccctctgcttgatcctgttgattttctactcttcagaaccagggccgtggaccctctgagaagggtgtttttttttttttatcagcatctcactttcttctccattcagccccaaccccctccctgccatgctttccaccccaaggacccaccagcagggagcagacggcagctaattttggtaccacttaagggtccccccattctggcccccatcctctccctcaccccaattctttctcgctggagctgttatttcccaagaagccgcatcgcccaaggttggcacctctcctaacctgccacacgacagctctcacctctctaggaattgggggctgtcaggtcacaggtgggatctggcatttttttatgacagtccatttctagatggtttgcctattaaagaagtgggggggaaatactgttttctccttaacctcaagctaccagtctctcctcttccgcgtagaggaagaggggggcagacaaaaaaaaagctgaagtataaaaaccctcctcctcccgttattatttaagctactgccatcaaccccacccccataaagctgtgaagccctttgcctcgcttttgacagcgtgggggggccccgtgggcagggacttcggatttgcatttctgggttgtttttccttccactctggggtctcgttcaggcattggggtctcctcaccccagccacatgtttctttaagaatcctttggtcaaccaggaccttgatttttcaggcattttggtctggggtatttttgtttgttctctctgttttttgttttcttttttttctttccatcgtggttctggaagcttctagcgtgtggcatctgaccaattttgaattggtcctttctataaaatcaatatt

SEQ ID NO: 10609 - DNA, 2302 bp, Homo sapiens
  source 1..2302: mol_type = unassigned DNA
ggtagggctgcagctccggagcctacgggagtgtgaccctctcgcctcctggcgggaagctcttgaggagatattttcttttctaaacactaagaaatttgaggatggtggggcaaaacgactaactcccactttcctgtgactctgtagccggaaaaactgtcaaaatctgtggataaatttgtgagacaagaagaagaatggcatccagaataaatacaaatttcactttgattcccaaccagaaacttagacgtagtaatcgtcaaaccagctgttattccaagacccttggctcaggctttcaacccatatcaacatttggaaattttaaagccttaccattggaaatattccagataattttaaaatatttgtcagtgaaggatatcagcatgctaagcatggtgtccaaaacagtcagccaacacattattaattatatctcaacctcatcaggaagcaaaagacttttactacaggactttcataaccttgagctgcctgacaggagacaagactctgctatactggagcactacagatctctaggtctactgtttaaaagatgcacattgctgctacccaccaaggaaaggctaaaatacattcacaagatactcacagaagtttcctgctttaaattcaatggctgtgcagctcctatgcagtgtttaggattaacatgttatggcatgtttttacagaccttaacagcaggttgggatgaacttgagtgccatcgcgtttataatttcttatgcgaactgactaatctctgccgcaagatacaaatggctgtctgcagcaaaccaggaagtgcccaaaaactggagttaagaatcagactcttctgtaggaatgtcctccttgatcattggacacatcgaagtgattctgctttttggttgacgcgaatattaaaaccatggccaatggtgaatcaggcaagattactgtatatcatctttgggccaatatctcctcaagatggacaggtggtttggcaggaaatgatagaagaacctacagatgaattcagtctgaaaggtttggctgatgccattaagttactatatgacgctagcactaaagagtggacagcagatgatgttatcagtcttgtagatgaactatcagtggttccccgtgagtggcttctagagaataatgcacgtctcctaatgctaagtggaaacaacatctgtttcagtttcatggctagtaaagctgtgaatggacgcaccattgaactggcaaggctcgtagtctttttggctttggtgtgtgagaaagaactgtactgcatggattggacagttaaaatgatgcaaaaagtctgcaaagtctttagcactccagtggaaagaaagaacttcctgcagaatgtggcaaatgcatttgcatgtgttataatggaaatgctgcaatcaattatgtctggagaccgtgatgaagatgacagaagctttttgaatttgttccatcttgtacatgctcaggctaacttccataaggaggtcctgtatttgaccatgaatactcctctgtctacctaaatcctcagaaagccttgcctttagagaacgtcactgaacgaatgattagaggagtgctactttttcactcaaaaaatagcatccatgggactttttatcatctaagtaacctaagaattcaaaagctggatagaattttagaagcaactacgtacatcattattaatataaaaataacaggcagcctcaagaatgtgctgagatttctctggaaaacaagctctgcctctccgggttttagtcaacctaacaccaaaccaaaatagaatgttagctgttcaagaatctgggaccagccaacctgtatgtatgcatttttgaagcaagagaaaattccattttatagttagacccaaattcactaaatagtgtgtatgttcactttgtttaagttgtatagacatagcccagaatgttttgtgaagatttgcaatatggtgttttggaatgtgtagaatacaaatcacagtttttactaccttcttggcatatgcttacaaagaacattatattttgttcatgttttacatgaactaatggataaaaaacaaagtatacatatatgtctatatatatatatagacacacacacacagacatatatttccttctttaaggtaatcatacaaaaggtctatacatacaggaaggtatatattgtctcaatgcaatcaaatcatcttttactggggattcaaataaaatgtagcaaataagagaaaaataaaatgaaagaaaatagc

SEQ ID NO: 10610 - DNA, 2037 bp, Homo sapiens
  source 1..2037: mol_type = unassigned DNA
gttgctcagctgcccccggagcggttcctccacctgaggcagactccacgtcggctggcatgagccggcgcccctgcagctgcgccctacggccaccccgctgctcctgcagcgccagccccagcgcagtgacagccgccgggcgccctcgaccctcggatagttgtaaagaagaaagttctaccctttctgtcaaaatgaagtgtgattttaattgtaaccatgttcattccggacttaaactggtaaaacctgatgacattggaagactagtttcctacacccctgcatatttggaaggttcctgtaaagactgcattaaagactatgaaaggctgtcatgtattgggtcaccgattgtgagccctaggattgtacaacttgaaactgaaagcaagcgcttgcataacaaggaaaatcaacatgtgcaacagacacttaatagtacaaatgaaatagaagcactagagaccagtagactttatgaagacagtggctattcctcattttctctacaaagtggcctcagtgaacatgaagaaggtagcctcctggaggagaatttcggtgacagtctacaatcctgcctgctacaaatacaaagcccagaccaatatcccaacaaaaacttgctgccagttcttcattttgaaaaagtggtttgttcaacattaaaaaagaatgcaaaacgaaatcctaaagtagatcgggagatgctgaaggaaattatagccagaggaaattttagactgcagaatataattggcagaaaaatgggcctagaatgtgtagatattctcagcgaactctttcgaaggggactcagacatgtcttagcaactattttagcacaactcagtgacatggacttaatcaatgtgtctaaagtgagcacaacttggaagaagatcctagaagatgataagggggcattccagttgtacagtaaagcaatacaaagagttaccgaaaacaacaataaattttcacctcatgcttcaaccagagaatatgttatgttcagaaccccactggcttctgttcagaaatcagcagcccagacttctctcaaaaaagatgctcaaaccaagttatccaatcaaggtgatcagaaaggttctacttatagtcgacacaatgaattctctgaggttgccaagacattgaaaaagaacgaaagcctcaaagcctgtattcgctgtaattcacctgcaaaatatgattgctatttacaacgggcaacctgcaaacgagaaggctgtggatttgattattgtacgaagtgtctctgtaattatcatactactaaagactgttcagatggcaagctcctcaaagccagttgtaaaataggtcccctgcctggtacaaagaaaagcaaaaagaatttacgaagattgtgatctcttattaaatcaattgttactgatcatgaatgttagttagaaaatgttaggttttaacttaaaaaaaattgtattgtgattttcaattttatgttgaaatcggtgtagtatcctgaggtttttttccccccagaagataaagaggatagacaacctcttaaaatatttttacaatttaatgagaaaaagtttaaaattctcaatacaaatcaaacaatttaaatattttaagaaaaaaggaaaagtagatagtgatactgagggtaaaaaaaaattgattcaattttatggtaaaggaaacccatgcaattttacctagacagtcttaaatatgtctggttttccatctgttagcatttcagacattttatgttcctcttactcaattgataccaacagaaatatcaacttctggagtctattaaatgtgttgtcacctttctaaagctttttttcattgtgtgtatttcccaagaaagtatcctttgtaaaaacttgcttgttttccttatttctgaaatctgttttaatatttttgtatacatgtaaatatttctgtattttttatatgtcaaagaatatgtctcttgtatgtacatataaaaataaattttgctcaataaaattgtaa

SEQ ID NO: 10611 - DNA, 2221 bp, Homo sapiens
  source 1..2221: mol_type = unassigned DNA
gtaaatcctagagaggcgggctaagctggactggggggagggtccgtcttccggaaagtctggattcccggacgagccgagttgctgctcaccgaactcccgttcgagagatgatcgaagaaagtcggctaccatttgtacccatcaaagatctccagatggaagccagcgctgaatttgggctgagattaggacttgcaggaggccggtccagaagacggcggaaggaatcttggcgggcgcacgcatgcgtgatagaccctccacacgtgtggccgggccgcggcctccccgtgctcggaggtcccgcccccggccgtagcatctttccggacgtggggagccggttgtaaagaagaaagttctaccctttctgtcaaaatgaagtgtgattttaattgtaaccatgttcattccggacttaaactggtaaaacctgatgacattggaagactagtttcctacacccctgcatatttggaaggttcctgtaaagactgcattaaagactatgaaaggctgtcatgtattgggtcaccgattgtgagccctaggattgtacaacttgaaactgaaagcaagcgcttgcataacaaggaaaatcaacatgtgcaacagacacttaatagtacaaatgaaatagaagcactagagaccagtagactttatgaagacagtggctattcctcattttctctacaaagtggcctcagtgaacatgaagaaggtagcctcctggaggagaatttcggtgacagtctacaatcctgcctgctacaaatacaaagcccagaccaatatcccaacaaaaacttgctgccagttcttcattttgaaaaagtggtttgttcaacattaaaaaagaatgcaaaacgaaatcctaaagtagatcgggagatgctgaaggaaattatagccagaggaaattttagactgcagaatataattggcagaaaaatgggcctagaatgtgtagatattctcagcgaactctttcgaaggggactcagacatgtcttagcaactattttagcacaactcagtgacatggacttaatcaatgtgtctaaagtgagcacaacttggaagaagatcctagaagatgataagggggcattccagttgtacagtaaagcaatacaaagagttaccgaaaacaacaataaattttcacctcatgcttcaaccagagaatatgttatgttcagaaccccactggcttctgttcagaaatcagcagcccagacttctctcaaaaaagatgctcaaaccaagttatccaatcaaggtgatcagaaaggttctacttatagtcgacacaatgaattctctgaggttgccaagacattgaaaaagaacgaaagcctcaaagcctgtattcgctgtaattcacctgcaaaatatgattgctatttacaacgggcaacctgcaaacgagaaggctgtggatttgattattgtacgaagtgtctctgtaattatcatactactaaagactgttcagatggcaagctcctcaaagccagttgtaaaataggtcccctgcctggtacaaagaaaagcaaaaagaatttacgaagattgtgatctcttattaaatcaattgttactgatcatgaatgttagttagaaaatgttaggttttaacttaaaaaaaattgtattgtgattttcaattttatgttgaaatcggtgtagtatcctgaggtttttttccccccagaagataaagaggatagacaacctcttaaaatatttttacaatttaatgagaaaaagtttaaaattctcaatacaaatcaaacaatttaaatattttaagaaaaaaggaaaagtagatagtgatactgagggtaaaaaaaaattgattcaattttatggtaaaggaaacccatgcaattttacctagacagtcttaaatatgtctggttttccatctgttagcatttcagacattttatgttcctcttactcaattgataccaacagaaatatcaacttctggagtctattaaatgtgttgtcacctttctaaagctttttttcattgtgtgtatttcccaagaaagtatcctttgtaaaaacttgcttgttttccttatttctgaaatctgttttaatatttttgtatacatgtaaatatttctgtattttttatatgtcaaagaatatgtctcttgtatgtacatataaaaataaattttgctcaataaaattgtaa

SEQ ID NO: 10612 - DNA, 1520 bp, Homo sapiens
  source 1..1520: mol_type = unassigned DNA
gcgcgttcgggagcttcggccctgcgtaggaggcgggtgcaggtgtgggtgctgagccgcccgccgcctggagggggagacagcttcaggacacgcaggccgcagcgagggcccgggccctggggatcccaggccatggatgctccccactccaaagcagccctggacagcattaacgagctgcccgagaacatcctgctggagctgttcacgcacgtgcccgcccgccagctgctgctgaactgccgcctggtctgcagcctctggcgggacctcatcgacctcatgaccctctggaaacgcaagtgcctgcgagagggcttcatcaccaaggactgggaccagcccgtggccgactggaaaatcttctacttcctacggagcctgcataggaacctcctgcgcaacccgtgtgctgaagaggatatgtttgcatggcaaattgatttcaatggtggggaccgctggaaggtggagagcctccctggagcccacgggacagattttcctgaccccaaagtcaagaagtattttgtcacatcctacgaaatgtgcctcaagtcccagctggtggaccttgtagccgagggctactgggaggagctactagacacattccggccggacatcgtggttaaggactggtttgctgccagagccgactgtggctgcacctaccaactcaaagtgcagctggcctcggctgactacttcgtgttggcctccttcgagcccccacctgtgaccatccaacagtggaacaatgccacatggacagaggtctcctacaccttctcagactacccccggggtgtccgctacatcctcttccagcatgggggcagggacacccagtactgggcaggctggtatgggccccgagtcaccaacagcagcattgtcgtcagccccaagatgaccaggaaccaggcctcctccgaggctcagcctgggcagaagcatggacaggaggaggctgcccaatcgccctaccgagctgttgtccagattttctgacagctgtccatcctgtgtctgggtcagccagaggttcctccaggcaggagctgagcatggggtgggcagtgaggtccctgtaccagcgactcctgccccggttcaaccctaccagcttgtggtaacttactgtcacatagctctgacgttttgttgtaataaatgttttcaggccgggcactgtggctcacgcctgtaatcccagcactttgggagaccgaggcaggtggatcacgaggtcaggagatagagaccatcctggccaacacggtgaaaccctgtctctactaaaaatacaaaaaattagccgggcgtggtggcgggcgcctgtagtcccagctactcgggaggctgatgcagaagaatggcgtgaacccggaaggcagagcttgcagtgagccgagatcacgccactgcactccagcctgggtgacagagcgagactctggctcataaaataataataataataaataaataaaaaataaatgttttcagtaaaa

SEQ ID NO: 10613 - DNA, 928 bp, Homo sapiens
  source 1..928: mol_type = unassigned DNA
ttaacgagctgcccgagaacatcctgctggagctgttcacgcacgtgcccgcccgccagctgctgctgaactgccgcctggtctgcagcctctggcgggacctcatcgacctcatgaccctctggaaacgcaagtgcctgcgagagggcttcatcaccaaggactgggaccagcccgtggccgactggaaaatcttctacttcctacggagcctgcataggaacctcctgcgcaacccgtgtgctgaagaggatatgtttgcatggcaaattgatttcaatggtggggaccgctggaaggtggagagcctccctggagcccacgggacagattttcctgaccccaaagtcaagaagtattttgtcacatcctacgagtttgctgccagagccgactgtggctgcacctaccaactcaaagtgcagctggcctcggctgactacttcgtgttggcctccttcgagcccccacctgtgaccatccaacagtggaacaatgccacatggacagaggtctcctacaccttctcagactacccccggggtgtccgctacatcctcttccagcatgggggcagggacacccagtactgggcaggctggtatgggccccgagtcaccaacagcagcattgtcgtcagccccaagatgaccaggaaccaggcctcctccgaggctcagcctgggcagaagcatggacaggaggaggctgcccaatcgccctaccgagctgttgtccagattttctgacagctgtccatcctgtgtctgggtcagccagaggttcctccaggcaggagctgagcatggggtgggcagtgaggtccctgtaccagcgactcctgccccggttcaaccctaccagcttgtggtaacttactgtcacatagctctgacgttttgttgtaataaatgttttcaggccgggc

SEQ ID NO: 10614 - DNA, 2195 bp, Homo sapiens
  source 1..2195: mol_type = unassigned DNA
cgcgctctcaggcagcgccgttgcgcgcggagtcatcgatcggccgaccccgagaggcccggttcctttaggccgcctgcccgcctccagctctcggggtcggctccaggaggcgccctcaggagaggggcgggcgctctattccagagaccgagtggcagggcggccactgtggcggggctctttccccgtttcgcctcagctacccctcagctccggtagtcgccagtccggggtcgtcgccgtttggggcgggagctgctcggccccgccgccgtccccgtcgccgcttccgggtccaggcccctcgggccgcctgccgccgtcatgaggctgcgggtgcggcttctgaagcggacctggccgctggaggtgcccgagacggagccgacgctggggcatttgcgctcgcacctgaggcagtccctgctgtgcacctgggggtacagttctaatacccgatttacaattacattgaactacaaggatcccctcactggagatgaagagaccttggcttcatatgggattgtttctggggacttgatatgtttgattcttcaagatgacattccagcgcctaatataccttcatccacagattcagagcattcttcactccagaataatgagcaaccctctttggccaccagctccaatcagactagcatgcaggatgaacaaccaagtgattcattccaaggacaggcagcccagtctggtgtttggaatgacgacagtatgttagggcctagtcaaaattttgaagctgagtcaattcaagataatgcgcatatggcagagggcacaggtttctatccctcagaacccatgctctgtagtgaatcggtggaagggcaagtgccacattcattagagaccttgtatcaatcagctgactgttctgatgccaatgatgccttgatagtgttgatacatcttctcatgttggagtcaggttacatacctcagggcaccgaagccaaagcactgtccatgccggagaagtggaagttgagcggggtgtataagctgcagtacatgcatcctctctgcgagggcagctccgctactctcacctgtgtgcctttgggaaacctgattgttgtaaatgctacactaaaaatcaacaatgagattagaagtgtgaaaagattgcagctgctaccagaatcttttatttgcaaagagaaactaggggaaaatgtagccaacatatacaaagatcttcagaaactctctcgcctctttaaagaccagctggtgtatcctcttctggcttttacccgacaagcactgaacctaccagatgtatttgggttggtcgtcctcccattggaactgaaactacggatcttccgacttctggatgttcgttccgtcttgtctttgtctgcggtttgtcgtgacctctttactgcttcaaatgacccactcctgtggaggtttttatatctgcgtgattttcgagacaatactgtcagagttcaagacacagattggaaagaactgtacaggaagaggcacatacaaagaaaagaatccccgaaagggcggtttgtgatgctcctgccatcgtcaactcacaccattccattctatcccaaccccttgcaccctaggccatttcctagctcccgccttcctccaggaattatcgggggtgaatatgaccaaagaccaacacttccctatgttggagacccaatcagttcactcattcctggtcctggggagacgcccagccagtttcctccactgagaccacgctttgatccagttggcccacttccaggacctaaccccatcttgccagggcgaggcggccccaatgacagatttccctttagacccagcaggggtcggccaactgatggccggctgtcattcatgtgattgatttgtaatttcatttctggagctccatttgtttttgtttctaaactacagatgtcaactccttggggtgctgatctcgagtgttattttctgattgtggtgttgagagttgcactcccagaaaccttttaagagatacatttatagccctaggggtggtatgacccaaaggttcctctgtgacaaggttggccttgggaatagttggctgccaatctccctgctcttggttctcctctagattgaagtttgttttctgatgctgttcttaccagattaaaaaaaagtgtaaatta

SEQ ID NO: 10615 - DNA, 1758 bp, Homo sapiens
  source 1..1758: mol_type = unassigned DNA
ggccaagtgcggggacgccgggggggccttcacgggaggcccgggctcttccgggcgtcgcggagccggagggtgcaggcgacgggaagcgcgggtggtcggctggggtccggctcctggagaacatggcccggcctcccgggggctctggtcccctcctcgattcagagcattcttcactccagaataatgagcaaccctctttggccaccagctccaatcagactagcatgcaggatgaacaaccaagtgattcattccaaggacaggcagcccagtctggtgtttggaatgacgacagtatgttagggcctagtcaaaattttgaagctgagtcaattcaagataatgcgcatatggcagagggcacaggtttctatccctcagaacccatgctctgtagtgaatcggtggaagggcaagtgccacattcattagagaccttgtatcaatcagctgactgttctgatgccaatgatgccttgatagtgttgatacatcttctcatgttggagtcaggttacatacctcagggcaccgaagccaaagcactgtccatgccggagaagtggaagttgagcggggtgtataagctgcagtacatgcatcctctctgcgagggcagctccgctactctcacctgtgtgcctttgggaaacctgattgttgtaaatgctacactaaaaatcaacaatgagattagaagtgtgaaaagattgcagctgctaccagaatcttttatttgcaaagagaaactaggggaaaatgtagccaacatatacaaagatcttcagaaactctctcgcctctttaaagaccagctggtgtatcctcttctggcttttacccgacaagcactgaacctaccagatgtatttgggttggtcgtcctcccattggaactgaaactacggatcttccgacttctggatgttcgttccgtcttgtctttgtctgcggtttgtcgtgacctctttactgcttcaaatgacccactcctgtggaggtttttatatctgcgtgattttcgagacaatactgtcagagttcaagacacagattggaaagaactgtacaggaagaggcacatacaaagaaaagaatccccgaaagggcggtttgtgatgctcctgccatcgtcaactcacaccattccattctatcccaaccccttgcaccctaggccatttcctagctcccgccttcctccaggaattatcgggggtgaatatgaccaaagaccaacacttccctatgttggagacccaatcagttcactcattcctggtcctggggagacgcccagccagtttcctccactgagaccacgctttgatccagttggcccacttccaggacctaaccccatcttgccagggcgaggcggccccaatgacagatttccctttagacccagcaggggtcggccaactgatggccggctgtcattcatgtgattgatttgtaatttcatttctggagctccatttgtttttgtttctaaactacagatgtcaactccttggggtgctgatctcgagtgttattttctgattgtggtgttgagagttgcactcccagaaaccttttaagagatacatttatagccctaggggtggtatgacccaaaggttcctctgtgacaaggttggccttgggaatagttggctgccaatctccctgctcttggttctcctctagattgaagtttgttttctgatgctgttcttaccagattaaaaaaaagtgtaaattaca

SEQ ID NO: 10616 - DNA, 1888 bp, Homo sapiens
  source 1..1888: mol_type = unassigned DNA
ggggggccttcacgggaggcccgggctcttccgggcgtcgcggagccggagggtgcaggcgacgggaagcgcgggtggtcggctggggtccggctcctggagaacatggcccggcctcccgggggctctggtcccctcctcgttctaatacccgatttacaattacattgaactacaaggatcccctcactggagatgaagagaccttggcttcatatgggattgtttctggggacttgatatgtttgattcttcaagatgacattccagcgcctaatataccttcatccacagattcagagcattcttcactccagaataatgagcaaccctctttggccaccagctccaatcagactagcatgcaggatgaacaaccaagtgattcattccaaggacaggcagcccagtctggtgtttggaatgacgacagtatgttagggcctagtcaaaattttgaagctgagtcaattcaagataatgcgcatatggcagagggcacaggtttctatccctcagaacccatgctctgtagtgaatcggtggaagggcaagtgccacattcattagagaccttgtatcaatcagctgactgttctgatgccaatgatgccttgatagtgttgatacatcttctcatgttggagtcaggttacatacctcagggcaccgaagccaaagcactgtccatgccggagaagtggaagttgagcggggtgtataagctgcagtacatgcatcctctctgcgagggcagctccgctactctcacctgtgtgcctttgggaaacctgattgttgtaaatgctacactaaaaatcaacaatgagattagaagtgtgaaaagattgcagctgctaccagaatcttttatttgcaaagagaaactaggggaaaatgtagccaacatatacaaagatcttcagaaactctctcgcctctttaaagaccagctggtgtatcctcttctggcttttacccgacaagcactgaacctaccagatgtatttgggttggtcgtcctcccattggaactgaaactacggatcttccgacttctggatgttcgttccgtcttgtctttgtctgcggtttgtcgtgacctctttactgcttcaaatgacccactcctgtggaggtttttatatctgcgtgattttcgagacaatactgtcagagttcaagacacagattggaaagaactgtacaggaagaggcacatacaaagaaaagaatccccgaaagggcggtttgtgatgctcctgccatcgtcaactcacaccattccattctatcccaaccccttgcaccctaggccatttcctagctcccgccttcctccaggaattatcgggggtgaatatgaccaaagaccaacacttccctatgttggagacccaatcagttcactcattcctggtcctggggagacgcccagccagtttcctccactgagaccacgctttgatccagttggcccacttccaggacctaaccccatcttgccagggcgaggcggccccaatgacagatttccctttagacccagcaggggtcggccaactgatggccggctgtcattcatgtgattgatttgtaatttcatttctggagctccatttgtttttgtttctaaactacagatgtcaactccttggggtgctgatctcgagtgttattttctgattgtggtgttgagagttgcactcccagaaaccttttaagagatacatttatagccctaggggtggtatgacccaaaggttcctctgtgacaaggttggccttgggaatagttggctgccaatctccctgctcttggttctcctctagattgaagtttgttttctgatgctgttcttaccagattaaaaaaaagtgtaaatta

SEQ ID NO: 10617 - DNA, 1650 bp, Homo sapiens
  source 1..1650: mol_type = unassigned DNA
tcaaaattgggatagtcggcagttctggcccctgcagctggaggtaccctgagttctgagggtcgtagtgctgtttctggtattctcatcgcggtcacctctaccggtgtggacaagtaaagtttgaatcagcttctccatggcctgggcaccagttcccggctgagccattttccttttggctaaaagtccccgcccagaggccaattcgtcgcggcggcggtggagatcgcaggtcgctcaggcttgcagatgggtcaagggttgtggagagtggtcagaaaccagcagctgcaacaagaaggctacagtgagcaaggctacctcaccagagagcagagcaggagaatggctgcgagcaacatttctaacaccaatcatcgtaaacaagtccaaggaggcattgacatatatcatcttttgaaggcaaggaaatcgaaagaacaggaaggattcattaatttggaaatgttgcctcctgagctaagctttaccatcttgtcctacctgaatgcaactgacctttgcttggcttcatgtgtttggcaggaccttgcgaatgatgaacttctctggcaagggttgtgcaaatccatggggtcactgttccatatacaataagaacccacctttaggattttcttttagaaaattgtatatgcagctggatgaaggcagcctcacctttaatgccaacccagatgagggagtgaactactttatgtccaagggtatcctggatgattcgccaaaggaaatagcaaagtttatcttctgtacaagaacactaaattggaaaaaactgagaatctatcttgatgaaaggagagatgtcttggatgaccttgtaacattgcataattttagaaatcagttcttgccaaatgcactgagagaattttttcgtcatatccatgcccctgaagagcgtggagagtatcttgaaactcttataacaaagttctcacatagattctgtgcttgcaaccctgatttaatgcgagaacttggccttagtcctgatgctgtctatgtactgtgctactctttgattctactttccattgacctcactagccctcatgtgaagaataaaatgtcaaaaagggaatttattcgaaatacccgtcgcgctgctcaaaatattagtgaagattttgtagggcatctttatgacaatatctaccttattggccatgtggctgcataaaaagcacaattgctaggacttcagtttttacttcagactaaagctacccaaggacttagcagatatgggggttacatcagtgctggtcattgtagcctgagtatacaatcaagcttcagtgtgcaacctttttttcttttgccattttctattttagtaatttccttggggaactaaataattttgcagaatttttcctaattttgtttatcacgttttgcacaaagcagagccactgtctaacacagctgttaacgaatgataaactgacattatactctaaaagatggtgtatttgtgcattagatttgcctgaaaaactttatccatttccattctttatacaaataccatgtaatgtgtacatatttaactaaagagatttatagtcataattattttattgtaaagattttaactaaagtttttccttttctctc

SEQ ID NO: 10618 - DNA, 2577 bp, Homo sapiens
  source 1..2577: mol_type = unassigned DNA
gatttaaaagaatgaaaaggcggatctggtcattcgtctccgcccggggtctctgtaaggacggcggagagaggcgacctccgcccaataccaggcgcagccttgccgtctcctcggggctcaccaagcagccaccagcaaagaagccggtttcaaaggcccagcacgacagggagaggaaaacggagcatatgcaaccatacacagtcaccagagtccagcctcccgcaaccagtcgctacagccaggcgcctgcgcccagaagcgcttctcgcgccgaccgtttgtatttggaattgtgggttcctgcccgccacgcaccaccgcaagaccttcaaagctgggagcttctctgtgctccaggattcctcgctgccgattccacaccgcgttcaagactcctgtgaagagcgactccgctgagagcctcctcaatggccagtccacttctaacttgcagctgagaagtttttctgatcttgatggtcagagtggctcgtgctacgaagtgagaaacaaggaatctatagcgaatcgtaaacaacagaaataaaaatgcgtctccgttaagagtcggagcctaacgtcacttccggcaacaataggaaacgtcaaaattgggatagtcggcagttctggcccctgcagctggaggtaccctgagttctgagggtcgtagtgctgtttctggtattctcatcgcggtcacctctaccggtgtggacaagtaaagtttgaatcagcttctccatggcctgggcaccagttcccggctgagccattttccttttggctaaaagtccccgcccagaggccaattcgtcgcggcggcggtggagatcgcaggtcgctcaggcttgcagatgggtcaagggttgtggagagtggtcagaaaccagcagctgcaacaagaaggctacagtgagcaaggctacctcaccagagagcagagcaggagaatggctgcgagcaacatttctaacaccaatcatcgtaaacaagtccaaggaggcattgacatatatcatcttttgaaggcaaggaaatcgaaagaacaggaaggattcattaatttggaaatgttgcctcctgagctaagctttaccatcttgtcctacctgaatgcaactgacctttgcttggcttcatgtgtttggcaggaccttgcgaatgatgaacttctctggcaagggttgtgcaaatccacttggggtcactgttccatatacaataagaacccacctttaggattttcttttagaaaattgtatatgcagctggatgaaggcagcctcacctttaatgccaacccagatgagggagtgaactactttatgtccaagggtatcctggatgattcgccaaaggaaatagcaaagtttatcttctgtacaagaacactaaattggaaaaaactgagaatctatcttgatgaaaggagagatgtcttggatgaccttgtaacattgcataattttagaaatcagttcttgccaaatgcactgagagaattttttcgtcatatccatgcccctgaagagcgtggagagtatcttgaaactcttataacaaagttctcacatagattctgtgcttgcaaccctgatttaatgcgagaacttggccttagtcctgatgctgtctatgtactgtgctactctttgattctactttccattgacctcactagccctcatgtgaagaataaaatgtcaaaaagggaatttattcgaaatacccgtcgcgctgctcaaaatattagtgaagattttgtagggcatctttatgacaatatctaccttattggccatgtggctgcataaaaagcacaattgctaggacttcagtttttacttcagactaaagctacccaaggacttagcagatatgggggttacatcagtgctggtcattgtagcctgagtatacaatcaagcttcagtgtgcaacctttttttcttttgccattttctattttagtaatttccttggggaactaaataattttgcagaatttttcctaattttgtttatcacgttttgcacaaagcagagccactgtctaacacagctgttaacgaatgataaactgacattatactctaaaagatggtgtatttgtgcattagatttgcctgaaaaactttatccatttccattctttatacaaataccatgtaatgtgtacatatttaactaaagagatttatagtcataattattttattgtaaagattttaactaaagtttttccttttctctcaaactgagttctgaaatttatttgattctgatctgaaactattgtcttcgtaaaagttagatctgacttcagacagaaaccaataccagcttccttttcctttaaactttgaagagtgttgatttgttactatattactatgcaaaactggcagttatttttataatataaatttataatttgattttttattttaaaaactgggttaatcaagtctcggtaagtcctttaaaccatttaggatttttaaaacatcaaaatttatgatttacattcataggaataaaataaaatattattagaactctggtaaa

SEQ ID NO: 10619 - DNA, 928 bp, Homo sapiens
  source 1..928: mol_type = unassigned DNA
ataggaaacgtcaaaattgggatagtcggcagttctggcccctgcagctggaggtaccctgagttctgagggtcgtagtgctgtttctggtattctcatcgcggtcacctctaccggtgtggacaagtaaagtttgaatcagcttctccatggcctgggcaccagttcccggctgagccattttccttttggctaaaagtccccgcccagaggccaattcgtcgcggcggcggtggagatcgcaggtcgctcagaccaagaaaaaacatgtttggtttcatttcgaagctccttagaaagaattctatagatcctctcaacatgataaagaagctttgaacaaaataaattcaaatttggaagaaaaggcttgcagatgggtcaagggttgtggagagtggtcagaaaccagcagctgcaacaagaaggctacagtgagcaaggctacctcaccagagagcagagcaggagaatggctgcgagcaacatttctaacaccaatcatcgtaaacaagtccaaggaggcattgacatatatcatcttttgaaggcaaggaaatcgaaagaacaggaaggattcattaatttggaaatgttgcctcctgagctaagctttaccatcttgtcctacctgaatgcaactgacctttgcttggcttcatgtgtttggcaggaccttgcgaatgatgaacttctctggcaagggttgtgcaaatccacttggggtcactgttccatatacaataagaacccacctttaggattttcttttagaaaattgtatatgcagctggatgaaggcagcctcacctttaatgccaacccagatgagggagtgaactactttatgtccaagggtatcctggatgattcgccaaaggaaatagcaaagtttatcttctgtacaagaacactaaattggaaaaaa

SEQ ID NO: 10620 - DNA, 4559 bp, Homo sapiens
  source 1..4559: mol_type = unassigned DNA
agagaatatgcttttcagactcattttcctttggaaattaatagtaaggtctcaagtgccccctacagccttgctactcaaagtgggttccacaaagtgttgacagtatggtactaaatagaaagtggctgaatgagaaatgtagattgcagagggcaactggtgtgtttatatgcctgacattatttgggttttcccccctcaggcagaagctgaggaagattgtcattctgatactgtcagagcagatgatgatgaagaaaatgaaagtcctgctgaaacagatctgcaggcacaactccagatgttccgagctcagtggatgtttgaacttgctccaggtgtaagctctagcaatttagaaaatcgaccttgcagagcagcaagaggctctctccagaaaacatcggcagataccaaaggaaaacaagaacaggcaaaagaagaaaaggctcgagaactcttcctaaaagcagtagaagaagaacaaaatggagctctctatgaagccatcaagttttatcgtagggctatgcaacttgtacctgatatagagttcaagattacttatacccggtctccagatggtgatggcgttggaaacagctacattgaagataatgatgatgacagcaaaatggcagatctcttgtcctacttccagcagcaactcacatttcaggagtctgtgcttaaactgtgtcagcctgagcttgagagcagtcagattcacatatcagtgctgccaatggaggtcctgatgtacatcttccgatgggtggtgtctagtgacttggacctcagatcattggagcagttgtcgctggtgtgcagaggattctacatctgtgccagagaccctgaaatatggcgtctggcctgcttgaaagtttggggcagaagctgtattaaacttgttccgtacacgtcctggagagagatgtttttagaacggcctcgtgttcggtttgatggcgtgtatatcagtaaaaccacatatattcgtcaaggggaacagtctcttgatggtttctatagagcctggcaccaagtggaatattacaggtacataagattctttcctgatggccatgtgatgatgttgacaacccctgaagagcctcagtccattgttccacgtttaagaactaggaataccaggactgatgcaattctactgggtcactatcgcttgtcacaagacacagacaatcagaccaaagtatttgctgtaataactaagaaaaaagaagaaaaaccacttgactataaatacagatattttcgtcgtgtccctgtacaagaagcagatcagagttttcatgtggggctacagctatgttccagtggtcaccagaggttcaacaaactcatctggatacatcattcttgtcacattacttacaaatcaactggtgagactgcagtcagtgcttttgagattgacaagatgtacacccccttgttcttcgccagagtaaggagctacacagctttctcagaaaggcctctgtagagcctcaagtccagtcctctatcacttttgcatgaattaaagtatatagcgcaaaagagcacctaagttataaatgtgtgtgtgtgcgtgtgtgtgtatatatatatatatatatatatatatatatatatatatatatatatatggaattggaacttattttaaattgttggagttcttttaagaagaatataaattgattattttttttatttaaagggatagttgattcctggggtgttttgaaattaagttggaattaagttgcttaagcatatttatgttgtgagaaaccttaatatgaggtttatcatgccctttttcaagcagatttatgagcagatttctgtcacataagtcgtcttctgcttgagtatcctaatatttcaatgcatcaggggagcgctccactggataagcattttatttcccgcatggcataatgtttttgcactaaaggctcaaagtgtgagaacctgttctggatttgtttgaaattatttcaccaataaagatcataaataaatgtttctttcaagaaaatatatttggatggcctttttaaagtaacaggatatttaataagagtcctagatagccagcggagactttaagaatcattgcctctagctgggtgtggtggcatgcacctgtagtcccagctatttgggaggctgatgcaggagaatagcttaagcccaggaatttgagtctgggagtttgagtccagcatgggcaacataacaagaccccatcccttattaaaagaaaaaaaaataattcctcatttcatcattggtctttatatgtagccacaaacactgacctcatgtaggcaccttaccaatatatgacattaagtgagagtgaatcccttaggactggaacacttcaagctcaaccaactgactcagttgtcattcttcacaaaagaatagtagaggatcatgtaaacctgagcctaactcttgttccagtatgaaagttgggggagagcaccagccacctaggaaaactgtatgttacctttttactcaaaggagtcccccctgcccagtaacagtcctattagtgtttaatttcagagtttgtgtctggtagacctctacctgattcagatttggttttgttgtttcaaccatagttagagacaaattctcatgtactttcagaaatcaatatctgcagccactgttacttttaattgacattaagagacacttcataggttcccacaattcagtatgggataggctttttaaaaagcacatacagaccaggcgtggtggctcatgcctataatcccagcactttgggaggctaagacaggcagatcacctgagctcaggagtccaagaccagcctgggcaacatggcaaaacaccgtctctacaaaaaaaaaaaaaaaaaaaattagccaagtacagtggggcacacctatagtcgcagctacttgggaggctggggcaggagaattgcctgagcctgggaagtggaagttgcagtgagccaagatcgtgccattccactccagcctgagcaacacagtgagaccctatctcaaaaaaataatgatgatagtacacgttatgttaaaggtgaaatgtgcatacagaaggaagagagttggccaggtgtggtgactcacacctataatcccaatactttgggaggccaaggcaggaggattgcttgaggtcaggagttttagaccagcctggacaacatagcaagacctcatctcttctaaaaattaaaaaaaaaaaaaataggcatggtggtacacacctgtggtcccagctagttgggaggctaaggcaggaggatcacttagccaggaggctgaggctacagtgagccaagattgcaccactgtgctccagcctgggtgagaaagcgagaccctgtctcaaaaaagaaaaaaaagagaggttggccttttgtagcaatctgagaagtgtgtttttcaagttggaaaggaaggagaaaagcaacttgcctaagataaggtagctcttcatgatatgactgttatttctgatatacaaataaatagaacatgattaggacatagtcaaatatagctagaaaaatatattcctaaggaaagtgagatttgaggagtccctgttgttctgcaacatccctagattgaatgatctgttgcagatggtggataccaagttcaaatttaaagatttctttgtaagcagtaaagtgactttcacttatttaacttagaactggaaaaagtaacttttttccagattacattttctgtatatttgtaaaatgcaaaagcaatatatatttgttgtgagaaaattagaatatacagataaaataaaatttaaaaaaacacccaaagataaccagaagaaaatttttgctatgtaacctttttcttctggtctttgcaaatcctgccgtagaaactttttaacttcaggagtgtccttcctttgctctattaggacattacagaaaccaatactatgaaaagctgacagcagtatctggattaactttttaaaaacaatgaaagcattttacagaaattacatttcagatcgtgctggaactgtgttcagaagatatcctcagagggaatctggcctgagcaccatcatgtttaattgcctcctcctgtcttgcattttcctcccagcccccttcctaccccttagcagagggccaggtgagggtgcttggggcccatgggggctgggagtgtagacttcagttacacccccagcccccaggggaaagcattagccttgaatcctcaatcccaggccctctactaaccactctcaacctatggtatttatcttttgattattctgtgcatctataaaaatgggattatattgtacagaatgctttgtaagctttctctccccacataagaatgccctgtaagcattttgttaaatatttttaatgactttagagtccaactttatactcctctttacgcattttggttttctaatttaatggtagtgtaaacgtttttggaataaacattcctgtggctaaa

SEQ ID NO: 10621 - DNA, 3418 bp, Homo sapiens
  source 1..3418: mol_type = unassigned DNA
gtccggggtctccagtagggctgacgctccggtgctcgcacaatcccccgcctcggctggcaacgggcgtccctccactccccgagtccccggcagccgccgccaccccagcgcgccccgatctggccccctgccccgcgaagatggctgccgtacgccgggcccgcagttattgccgctgcctggtgcgcttctccgaccgagaactctgctaagctccgctgcagagacaggcaggagtagacacccggacacccagcacccctcctccggggggcggtgcagagggggcacggagagcccctcgagcgcagcaggccgccccgccagcatggcagaagctgaggaagattgtcattctgatactgtcagagcagatgatgatgaagaaaatgaaagtcctgctgaaacagatctgcaggcacaactccagatgttccgagctcagtggatgtttgaacttgctccaggtgtaagctctagcaatttagaaaatcgaccttgcagagcagcaagaggctctctccagaaaacatcggcagataccaaaggaaaacaagaacaggcaaaagaagaaaaggctcgagaactcttcctaaaagcagtagaagaagaacaaaatggagctctctatgaagccatcaagttttatcgtagggctatgcaacttgtacctgatatagagttcaagattacttatacccggtctccagatggtgatggcgttggaaacagctacattgaagataatgatgatgacagcaaaatggcagatctcttgtcctacttccagcagcaactcacatttcaggagtctgtgcttaaactgtgtcagcctgagcttgagagcagtcagattcacatatcagtgctgccaatggaggtcctgatgtacatcttccgatgggtggtgtctagtgacttggacctcagatcattggagcagttgtcgctggtgtgcagaggattctacatctgtgccagagaccctgaaatatggcgtctggcctgcttgaaagtttggggcagaagctgtattaaacttgttccgtacacgtcctggagagagatgtttttagaacggcctcgtgttcggtttgatggcgtgtatatcagtaaaaccacatatattcgtcaaggggaacagtctcttgatggtttctatagagcctggcaccaagtggaatattacaggtacataagattctttcctgatggccatgtgatgatgttgacaacccctgaagagcctcagtccattgttccacgtttaagaactaggaataccaggactgatgcaattctactgggtcactatcgcttgtcacaagacacagacaatcagaccaaagtatttgctgtaataactaagaaaaaagaagaaaaaccacttgactataaatacagatattttcgtcgtgtccctgtacaagaagcagatcagagttttcatgtggggctacagctatgttccagtggtcaccagaggttcaacaaactcatctggatacatcattcttgtcacattacttacaaatcaactggtgagactgcagtcagtgcttttgagattgacaagatgtacacccccttgttcttcgccagagtaaggagctacacagctttctcagaaaggcctctgtagagcctcaagtccagtcctctatcacttttgcatgaattaaagtatatagcgcaaaagagcacctaagttataaatgtgtgtgtgtgcgtgtgtgtgtatatatatatatatatatatatatatatatatatatatatatatatatggaattggaacttattttaaattgttggagttcttttaagaagaatataaattgattattttttttatttaaagggatagttgattcctggggtgttttgaaattaagttggaattaagttgcttaagcatatttatgttgtgagaaaccttaatatgaggtttatcatgccctttttcaagcagatttatgagcagatttctgtcacataagtcgtcttctgcttgagtatcctaatatttcaatgcatcaggggagcgctccactggataagcattttatttcccgcatggcataatgtttttgcactaaaggctcaaagtgtgagaacctgttctggatttgtttgaaattatttcaccaataaagatcataaataaatgtttctttcaagaaaatatatttggatggcctttttaaagtaacaggatatttaataagagtcctagatagccagcggagactttaagaatcattgcctctagctgggtgtggtggcatgcacctgtagtcccagctatttgggaggctgatgcaggagaatagcttaagcccaggaatttgagtctgggagtttgagtccagcatgggcaacataacaagaccccatcccttattaaaagaaaaaaaaataattcctcatttcatcattggtctttatatgtagccacaaacactgacctcatgtaggcaccttaccaatatatgacattaagtgagagtgaatcccttaggactggaacacttcaagctcaaccaactgactcagttgtcattcttcacaaaagaatagtagaggatcatgtaaacctgagcctaactcttgttccagtatgaaagttgggggagagcaccagccacctaggaaaactgtatgttacctttttactcaaaggagtcccccctgcccagtaacagtcctattagtgtttaatttcagagtttgtgtctggtagacctctacctgattcagatttggttttgttgtttcaaccatagttagagacaaattctcatgtactttcagaaatcaatatctgcagccactgttacttttaattgacattaagagacacttcataggttcccacaattcagtatgggataggctttttaaaaagcacatacagaccaggcgtggtggctcatgcctataatcccagcactttgggaggctaagacaggcagatcacctgagctcaggagtccaagaccagcctgggcaacatggcaaaacaccgtctctacaaaaaaaaaaaaaaaaaaaattagccaagtacagtggggcacacctatagtcgcagctacttgggaggctggggcaggagaattgcctgagcctgggaagtggaagttgcagtgagccaagatcgtgccattccactccagcctgagcaacacagtgagaccctatctcaaaaaaataatgatgatagtacacgttatgttaaaggtgaaatgtgcatacagaaggaagagagttggccaggtgtggtgactcacacctataatcccaatactttgggaggccaaggcaggaggattgcttgaggtcaggagttttagaccagcctggacaacatagcaagacctcatctcttctaaaaattaaaaaaaaaaaaaatagg

SEQ ID NO: 10622 - DNA, 1580 bp, Homo sapiens
  source 1..1580: mol_type = unassigned DNA
ctccagtctgtctgtgctctcaaaaactttagtcgttataacaactgtgactgttgagaaatttcactgttttcctgcattcctggcgcgggactctagccagaggctccgaggactttgtagcgactgtcccaagcgtccagttcgatgcttctcagggcggcttgctttaagggcccacccctaaatttgggttgtaaaaatttttgaggcagaagctgaggaagattgtcattctgatactgtcagagcagatgatgatgaagaaaatgaaagtcctgctgaaacagatctgcaggcacaactccagatgttccgagctcagtggatgtttgaacttgctccaggtgtaagctctagcaatttagaaaatcgaccttgcagagcagcaagaggctctctccagaaaacatcggcagataccaaaggaaaacaagaacaggcaaaagaagaaaaggctcgagaactcttcctaaaagcagtagaagaagaacaaaatggagctctctatgaagccatcaagttttatcgtagggctatgcaacttgtacctgatatagagttcaagattacttatacccggtctccagatggtgatggcgttggaaacagctacattgaagataatgatgatgacagcaaaatggcagatctcttgtcctacttccagcagcaactcacatttcaggagtctgtgcttaaactgtgtcagcctgagcttgagagcagtcagattcacatatcagtgctgccaatggaggtcctgatgtacatcttccgatgggtggtgtctagtgacttggacctcagatcattggagcagttgtcgctggtgtgcagaggattctacatctgtgccagagaccctgaaatatggcgtctggcctgcttgaaagtttggggcagaagctgtattaaacttgttccgtacacgtcctggagagagatgtttttagaacggcctcgtgttcggtttgatggcgtgtatatcagtaaaaccacatatattcgtcaaggggaacagtctcttgatggtttctatagagcctggcaccaagtggaatattacaggtacataagattctttcctgatggccatgtgatgatgttgacaacccctgaagagcctcagtccattgttccacgtttaagaactaggaataccaggactgatgcaattctactgggtcactatcgcttgtcacaagacacagacaatcagaccaaagtatttgctgtaataactaagaaaaaagaagaaaaaccacttgactataaatacagatattttcgtcgtgtccctgtacaagaagcagatcagagttttcatgtggggctacagctatgttccagtggtcaccagaggttcaacaaactcatctggatacatcattcttgtcacattacttacaaatcaactggtgagactgcagtcagtgcttttgagattgacaagatgtacacccccttgttcttcgccagagtaaggagctacacagctttctcagaaaggcctctgtagagcctcaagtccagtcctctatcacttttgcatgaattaaagtatatagcgcaaaaga

SEQ ID NO: 10623 - DNA, 451 bp, Homo sapiens
  source 1..451: mol_type = unassigned DNA
atacgtatgccatggaggtttgctgcacctattgacccgtcctatgagatccaactaagaagaacagaatacttgctatcttcagagtagaatattttgaaatgtatgtgtgctttacagtgtgcccagcattttaccatatactaactggttcaagtctgaaaggcacctctgctttgagtctgcttgccagagataagataggaggcaaggctaatttatattgtcattctgatactgtcagagcagatgatgatgaagaaaatgaaagtcctgctgaaacagatctgcaggcataactccagatgttccgagctcagtggatgtttgaacttgctccaggtgtaagctctagcaatttagaaaatcgaccttgcagagcagcaagaggctctctccagaaaacatcggcagataccaaaggaaaacaagaacaggcaaaagaagaaaa

SEQ ID NO: 10624 - DNA, 569 bp, Homo sapiens
  source 1..569: mol_type = unassigned DNA
gaggagggtttgcaggacagccggggaaaatgtcccttctcggctcactgagtatattgaaccagtctcggtcctctcaagggattttatcagaagcattgagcatagattgaggcagaagctgaggaagattgtcattctgatactgtcagagcagatgatgatgaagaaaatgaaagtcctgctgaaacagatctgcaggcataactccagatgttccgagctcagtggatgtttgaacttgctccaggtgtaagctctagcaatttagaaaatcgaccttgcagagcagcaagaggctctctccagaaaacatcggcagataccaaaggaaaacaagaacaggcaaaagaagaaaaggctcgagaactcttcctaaaagcagtagaagaagaacaaaatggagctctctatgaagccatcaagttttatcgtagggctatgcaacttgtacctgatatagagttcaagattacttatacccggtctccagatggtgatggcgttggaaacagctacattgaagataatgatgatgacagcaaaatggcagatctcttgtcctactt

SEQ ID NO: 10625 - DNA, 728 bp, Homo sapiens
  source 1..728: mol_type = unassigned DNA
agtgaataccacagaatagctggggcaggcaggcagcctgggccctcccacaacaatgccaagatgactgagtctcagaggatcacagaaagtccccctccatgcggtcagatcaggcctttggcctttggatgagatccaactaagaagaacagaatacttgctatcttcagagtagaatattttgaaatgtgcagaagctgaggaagattgtcattctgatactgtcagagcagatgatgatgaagaaaatgaaagtcctgctgaaacagatctgcaggcacaactccagatgttccgagctcagtggatgtttgaacttgctccaggtgtaagctctagcaatttagaaaatcgaccttgcagagcagcaagaggctctctccagaaaacatcggcagataccaaaggaaaacaagaacaggcaaaagaagaaaaggctcgagaactcttcctaaaagcagtagaagaagaacaaaatggagctctctatgaagccatcaagttttatcgtagggctatgcaacttgtacctgatatagagttcaagattacttatacccggtctccagatggtgatggcgttggaaacagctacattgaagataatgatgatgacagcaaaatggcagatctcttgtcctacttccagcagcaactcacatttcaggagtctgtgcttaaactgtgtcagcctgagcttgagagcagtcagattcacatatcag

SEQ ID NO: 10626 - DNA, 3560 bp, Homo sapiens
  source 1..3560: mol_type = unassigned DNA
ctcgggctccaggtcccggccagaggaggagctcgctgccgggggacgctgggctgagcggccggcggcgcgggcccggcggcggcggcagcggggtccgggtccggagcgccacatgagacggtttaagcggaagcatcttactgccattgactgccagcatttggctcggagtcacttggctgtgacccagcccttcggtcaaagatggacaaacagagatccgaaccatggtctctatcctaaaccgagaacaaaaagagggagtaggggtcagggaagtcaaagatgcatccctgagttcttcctagcaggcaagcagccgtgcaccaatgacatggccaaaagcaattctgttggccaggacagctgtcaggactctgagggtgacatgatctttcctgcagagagcagctgtgcactgcctcaggaaggcagtgcagggccgggctcaccagggtctgccccgccctccaggaagcggtcttggtcctctgaggaagagagtaaccaggctaccgggaccagccggtgggatggagtttctaagaaagctccacggcaccatttgtctgtgccatgcacaaggcctagggaggccaggcaagaagcagaggacagtacgtctcggctctctgcggagtctggtgaaaccgaccaagatgctggggacgtgggtcctgatcccattcctgactcatactatgggcttcttgggaccttgccctgccaggaagcactgagccacatttgcagcctgcctagtgaggtcctgaggcacgtgtttgccttcctcccggtggaagacctctattggaacctgagcttggtgtgccacttgtggagggagatcatcagtgacccgctgttcattccttggaagaagctgtaccatcgatacctgatgaatgaagagcaagctgtcagcaaagtggacggcatcctgtctaactgtggcatagaaaaggagtcagacctgtgtgtgctgaacctcatacgatacacagccaccactaagtgctctccgagtgtggatcccgagagggtgctgtggagtctgagggaccaccccctcctccccgaggctgaggcgtgtgtgcggcaacacctccccgacctctacgctgctgccgggggtgtcaacatctgggccctggtggcggctgtggtgctcctctccagcagtgtgaatgacatccagcgactgctcttctgcctccggagacccagctccacggtgaccatgccagatgtcaccgagaccctgtactgcatagccgtgcttctctacgccatgagggagaaggggattaacatcagcaataggattcactacaacattttctattgcctatatcttcaggagaattcctgcactcaggccacaaaagttaaagaggagccatctgtctggccaggcaagaaaaccatccaacttacacatgaacaacagctgattctgaatcacaagatggaacctctccaggtggtgaaaattatggcctttgccggcactgggaagacctcaacgctggtcaagtatgcagagaagtggtctcagagcaggtttctgtatgtgacattcaacaagagcatcgcaaagcaggccgaacgcgtcttccccagcaacgtcatctgcaaaaccttccactccatggcctacgggcacatagggcggaagtaccagtcaaagaagaagttgaatctcttcaagttaacacccttcatggtcaactccgtccttgctgaagggaagggtggattcataagagccaagcttgtgtgtaagactctagaaaacttctttgcctcggctgacgaagagctgaccattgatcacgtgcctatttggtgtaagaacagccaaggacagagagtcatggttgagcagagtgaaaaactgaatggtgtccttgaagcgagccgcctctgggataacatgcggaagctgggggagtgcacagaagaggcgcaccagatgactcatgacggctacttgaaactctggcagctgagcaagccttcgctggcctcttttgacgccatctttgtggatgaggcccaggactgcacaccagctatcatgaacatagttctgtctcagccatgtgggaaaatctttgtaggggacccgcaccagcagatctataccttccggggtgcggtcaacgccctgttcacagtgccccacacccacgtcttctatctcacgcagagttttcggtttggtgtggaaatagcttatgtgggagctactatcttggatgtttgcaagagagtcaggaaaaagactttggttggaggaaaccatcagagtggcattagaggtgacgcaaaggggcaagtggccttgttgtcccggaccaacgccaacgtgtttgatgaggccgtacgggtgacggaaggggaattcccttcaaggatacatttgattggggggattaaatcatttggattggacagaatcattgatatttggatccttcttcagccagaggaagaacggaggaaacaaaacctcgtcattaaagacaaatttatcagaagatgggtgcacaaagaaggctttagtggcttcaagaggtatgtgaccgctgccgaggacaaggagcttgaagccaagatcgcagttgttgaaaagtataacatcaggattccagagctggtgcaaaggatagaaaaatgccatatagaagatttggactttgcagagtacattctgggcactgtgcacaaagccaaaggcctggagtttgacactgtgcatgttttggatgattttgtgaaagtgccttgtgcccggcataacctgccccagcttccgcacttcagagttgagtcattttctgaggatgaatggaatttactgtatgttgcagtaactcgagccaagaagcgtctcatcatgaccaaatcattggaaaacattttgactttggctggggagtacttcttgcaagcagagctgacaagcaacgtcttaaaaacaggcgtggtgcgctgctgcgtgggacagtgcaacaatgccatccctgttgacaccgtccttaccatgaagaagctgcccatcacctatagcaacaggaaggaaaacaaggggggctacctctgccactcctgtgcggagcagcgcatcgggcccctggcgttcctgacagcctccccggagcaggtgcgcgccatggagcgcactgtggagaacatcgtactgccccggcatgaggccctgctcttcctcgtcttctgaggacaaggcgcacgttctccgcagtgcagagcagcttgccgaggaccccgcgtgaagaaagccagcgaggggggcttctgctccctgagactctgggttcacccacagcactttctgaggaagaggacaccagcccaagctggacctgccatttctccactccctacagacagccagtctccacttgcctcccctctggatgtatctggtcagggaagtgggggatgttcttttgataaaaaaaaaaaaaaaaatttatgtatttaaacttttattacaagatttcaattaaacaggcaccatagcactggca

SEQ ID NO: 10627 - DNA, 1635 bp, Homo sapiens
  source 1..1635: mol_type = unassigned DNA
gagcttggtgtgccacttgtggagggagatcatcagtgacccgctgttcattccttggaagaagctgtaccatcgatacctgatgaatgaagagcaagctgtcagcaaagtggacggcatcctgtctaactgtggcatagaaaaggagtcagacctgtgtgtgctgaacctcatacgatacacagccaccactaagtgctctccgagtgtggatcccgagagggtgctgtggagtctgagggaccaccccctcctccccgaggctgaggcgtgtgtgcggcaacacctccccgacctctacgctgctgccgggggtgtcaacatctgggccctggtggcggctgtggtgctcctctccagcagtgtgaatgacatccagcgactgctcttctgcctccggagacccagctccacggtgaccatgccagatgtcaccgagaccctgtactgcatagccgtgcttctctacgccatgagggagaaggggattaacatcagcaataggattcactacaacattttctattgcctatatcttcaggagaattcctgcactcaggccacaaaagttaaagaggagccatctgtctggccaggcaagaaaaccatccaacttacacatgaacaacagctgattctgaatcacaagatggaacctctccaggtggtgaaaattatggcctttgccggcactgggaagacctcaacgctggtcaagtatgcagagaagtggtctcagagcaggtttctgtatgtgacattcaacaagagcatcgcaaagcaggccgaacgcgtcttccccagcaacgtcatctgcaaaaccttccactccatggcctacgggcacatagggcggaagtaccagtcaaagaagaagttgaatctcttcaagttaacacccttcatggtcaactccgtccttgctgaagggaagggtggattcataagagccaagcttgtgtgtaagactctagaaaacttctttgcctcggctgacgaagagctgaccattgatcacgtgcctatttggtgtaagaacagccaaggacagagagtcatggttgagcagagtgaaaaactgaatggtgtccttgaagcgagccgcctctgggataacatgcggaagctgggggagtgcacagaagaggcgcaccagatgactcatgacggctacttgaaactctggcagctgagcaagccttcgctggcctcttttgacgccatctttgtggatgaggcccaggcaggtgcgcgccatggagcgcactgtggagaacatcgtactgccccggcatgaggccctgctcttcctcgtcttctgaggacaaggcgcacgttctccgcagtgcagagcagcttgccgaggaccccgcgtgaagaaagccagcgaggggggcttctgctccctgagactctgggttcacccacagcactttctgaggaagaggacaccagcccaagctggacctgccatttctccactccctacagacagccagtctccacttgcctcccctctggatgtatctggtcagggaagtgggggatgttcttttgataaaaaaaaaaaaaaaaatttatgtatttaaacttttattacaagatttcaattaaacaggcaccatagcactggca

SEQ ID NO: 10628 - DNA, 3702 bp, Homo sapiens
  source 1..3702: mol_type = unassigned DNA
ctgctttcaaggtgtctagatacagagtgaagaatgtcacagtaggaagtgcactggactaggggagtcaggagacccgggttcttgtgttggcaccatcactcatgagctacgaggtgacttcaggctgccattggacctgtcaagtgcctgagtcatgtgataatgggctacattgcgcagggcccctgggccatctccacaggagatgccagaggacgagtgcccacttgctggtcttcacagagcacgctgaaatgagacggtttaagcggaagcatcttactgccattgactgccagcatttggctcggagtcacttggctgtgacccagcccttcggtcaaagatggacaaacagagatccgaaccatggtctctatcctaaaccgagaacaaaaagagggagtaggggtcagggaagtcaaagatgcatccctgagttcttcctagcaggcaagcagccgtgcaccaatgacatggccaaaagcaattctgttggccaggacagctgtcaggactctgagggtgacatgatctttcctgcagagagcagctgtgcactgcctcaggaaggcagtgcagggccgggctcaccagggtctgccccgccctccaggaagcggtcttggtcctctgaggaagagagtaaccaggctaccgggaccagccggtgggatggagtttctaagaaagctccacggcaccatttgtctgtgccatgcacaaggcctagggaggccaggcaagaagcagaggacagtacgtctcggctctctgcggagtctggtgaaaccgaccaagatgctggggacgtgggtcctgatcccattcctgactcatactatgggcttcttgggaccttgccctgccaggaagcactgagccacatttgcagcctgcctagtgaggtcctgaggcacgtgtttgccttcctcccggtggaagacctctattggaacctgagcttggtgtgccacttgtggagggagatcatcagtgacccgctgttcattccttggaagaagctgtaccatcgatacctgatgaatgaagagcaagctgtcagcaaagtggacggcatcctgtctaactgtggcatagaaaaggagtcagacctgtgtgtgctgaacctcatacgatacacagccaccactaagtgctctccgagtgtggatcccgagagggtgctgtggagtctgagggaccaccccctcctccccgaggctgaggcgtgtgtgcggcaacacctccccgacctctacgctgctgccgggggtgtcaacatctgggccctggtggcggctgtggtgctcctctccagcagtgtgaatgacatccagcgactgctcttctgcctccggagacccagctccacggtgaccatgccagatgtcaccgagaccctgtactgcatagccgtgcttctctacgccatgagggagaaggggattaacatcagcaataggattcactacaacattttctattgcctatatcttcaggagaattcctgcactcaggccacaaaagttaaagaggagccatctgtctggccaggcaagaaaaccatccaacttacacatgaacaacagctgattctgaatcacaagatggaacctctccaggtggtgaaaattatggcctttgccggcactgggaagacctcaacgctggtcaagtatgcagagaagtggtctcagagcaggtttctgtatgtgacattcaacaagagcatcgcaaagcaggccgaacgcgtcttccccagcaacgtcatctgcaaaaccttccactccatggcctacgggcacatagggcggaagtaccagtcaaagaagaagttgaatctcttcaagttaacacccttcatggtcaactccgtccttgctgaagggaagggtggattcataagagccaagcttgtgtgtaagactctagaaaacttctttgcctcggctgacgaagagctgaccattgatcacgtgcctatttggtgtaagaacagccaaggacagagagtcatggttgagcagagtgaaaaactgaatggtgtccttgaagcgagccgcctctgggataacatgcggaagctgggggagtgcacagaagaggcgcaccagatgactcatgacggctacttgaaactctggcagctgagcaagccttcgctggcctcttttgacgccatctttgtggatgaggcccaggactgcacaccagctatcatgaacatagttctgtctcagccatgtgggaaaatctttgtaggggacccgcaccagcagatctataccttccggggtgcggtcaacgccctgttcacagtgccccacacccacgtcttctatctcacgcagagttttcggtttggtgtggaaatagcttatgtgggagctactatcttggatgtttgcaagagagtcaggaaaaagactttggttggaggaaaccatcagagtggcattagaggtgacgcaaaggggcaagtggccttgttgtcccggaccaacgccaacgtgtttgatgaggccgtacgggtgacggaaggggaattcccttcaaggatacatttgattggggggattaaatcatttggattggacagaatcattgatatttggatccttcttcagccagaggaagaacggaggaaacaaaacctcgtcattaaagacaaatttatcagaagatgggtgcacaaagaaggctttagtggcttcaagaggtatgtgaccgctgccgaggacaaggagcttgaagccaagatcgcagttgttgaaaagtataacatcaggattccagagctggtgcaaaggatagaaaaatgccatatagaagatttggactttgcagagtacattctgggcactgtgcacaaagccaaaggcctggagtttgacactgtgcatgttttggatgattttgtgaaagtgccttgtgcccggcataacctgccccagcttccgcacttcagagttgagtcattttctgaggatgaatggaatttactgtatgttgcagtaactcgagccaagaagcgtctcatcatgaccaaatcattggaaaacattttgactttggctggggagtacttcttgcaagcagagctgacaagcaacgtcttaaaaacaggcgtggtgcgctgctgcgtgggacagtgcaacaatgccatccctgttgacaccgtccttaccatgaagaagctgcccatcacctatagcaacaggaaggaaaacaaggggggctacctctgccactcctgtgcggagcagcgcatcgggcccctggcgttcctgacagcctccccggagcaggtgcgcgccatggagcgcactgtggagaacatcgtactgccccggcatgaggccctgctcttcctcgtcttctgaggacaaggcgcacgttctccgcagtgcagagcagcttgccgaggaccccgcgtgaagaaagccagcgaggggggcttctgctccctgagactctgggttcacccacagcactttctgaggaagaggacaccagcccaagctggacctgccatttctccactccctacagacagccagtctccacttgcctcccctctggatgtatctggtcagggaagtgggggatgttcttttgataaaaaaaaaaaaaaaaatttatgtatttaaacttttattacaagatttcaattaaacaggcaccatagcactggca

SEQ ID NO: 10629 - DNA, 3658 bp, Homo sapiens
  source 1..3658: mol_type = unassigned DNA
acagccccggcctgccccgcgtgggagaagccgcggttccgggcacggggcggtttttcctcagggacggagcggtccgggatgagcacggaggggcctggggatccgagagcgctggcgtccgccgtcctggagctgcagcggcccgtacgtgattcgggactgaacactgagacggtttaagcggaagcatcttactgccattgactgccagcatttggctcggagtcacttggctgtgacccagcccttcggtcaaagatggacaaacagagatccgaaccatggtctctatcctaaaccgagaacaaaaagagggagtaggggtcagggaagtcaaagatgcatccctgagttcttcctagcaggcaagcagccgtgcaccaatgacatggccaaaagcaattctgttggccaggacagctgtcaggactctgagggtgacatgatctttcctgcagagagcagctgtgcactgcctcaggaaggcagtgcagggccgggctcaccagggtctgccccgccctccaggaagcggtcttggtcctctgaggaagagagtaaccaggctaccgggaccagccggtgggatggagtttctaagaaagctccacggcaccatttgtctgtgccatgcacaaggcctagggaggccaggcaagaagcagaggacagtacgtctcggctctctgcggagtctggtgaaaccgaccaagatgctggggacgtgggtcctgatcccattcctgactcatactatgggcttcttgggaccttgccctgccaggaagcactgagccacatttgcagcctgcctagtgaggtcctgaggcacgtgtttgccttcctcccggtggaagacctctattggaacctgagcttggtgtgccacttgtggagggagatcatcagtgacccgctgttcattccttggaagaagctgtaccatcgatacctgatgaatgaagagcaagctgtcagcaaagtggacggcatcctgtctaactgtggcatagaaaaggagtcagacctgtgtgtgctgaacctcatacgatacacagccaccactaagtgctctccgagtgtggatcccgagagggtgctgtggagtctgagggaccaccccctcctccccgaggctgaggcgtgtgtgcggcaacacctccccgacctctacgctgctgccgggggtgtcaacatctgggccctggtggcggctgtggtgctcctctccagcagtgtgaatgacatccagcgactgctcttctgcctccggagacccagctccacggtgaccatgccagatgtcaccgagaccctgtactgcatagccgtgcttctctacgccatgagggagaaggggattaacatcagcaataggattcactacaacattttctattgcctatatcttcaggagaattcctgcactcaggccacaaaagttaaagaggagccatctgtctggccaggcaagaaaaccatccaacttacacatgaacaacagctgattctgaatcacaagatggaacctctccaggtggtgaaaattatggcctttgccggcactgggaagacctcaacgctggtcaagtatgcagagaagtggtctcagagcaggtttctgtatgtgacattcaacaagagcatcgcaaagcaggccgaacgcgtcttccccagcaacgtcatctgcaaaaccttccactccatggcctacgggcacatagggcggaagtaccagtcaaagaagaagttgaatctcttcaagttaacacccttcatggtcaactccgtccttgctgaagggaagggtggattcataagagccaagcttgtgtgtaagactctagaaaacttctttgcctcggctgacgaagagctgaccattgatcacgtgcctatttggtgtaagaacagccaaggacagagagtcatggttgagcagagtgaaaaactgaatggtgtccttgaagcgagccgcctctgggataacatgcggaagctgggggagtgcacagaagaggcgcaccagatgactcatgacggctacttgaaactctggcagctgagcaagccttcgctggcctcttttgacgccatctttgtggatgaggcccaggactgcacaccagctatcatgaacatagttctgtctcagccatgtgggaaaatctttgtaggggacccgcaccagcagatctataccttccggggtgcggtcaacgccctgttcacagtgccccacacccacgtcttctatctcacgcagagttttcggtttggtgtggaaatagcttatgtgggagctactatcttggatgtttgcaagagagtcaggaaaaagactttggttggaggaaaccatcagagtggcattagaggtgacgcaaaggggcaagtggccttgttgtcccggaccaacgccaacgtgtttgatgaggccgtacgggtgacggaaggggaattcccttcaaggatacatttgattggggggattaaatcatttggattggacagaatcattgatatttggatccttcttcagccagaggaagaacggaggaaacaaaacctcgtcattaaagacaaatttatcagaagatgggtgcacaaagaaggctttagtggcttcaagaggtatgtgaccgctgccgaggacaaggagcttgaagccaagatcgcagttgttgaaaagtataacatcaggattccagagctggtgcaaaggatagaaaaatgccatatagaagatttggactttgcagagatggagtctcaccatgttggccaggctggtctcgaactcccaacctcagagtacattctgggcactgtgcacaaagccaaaggcctggagtttgacactgtgcatgttttggatgattttgtgaaagtgccttgtgcccggcataacctgccccagcttccgcacttcagagttgagtcattttctgaggatgaatggaatttactgtatgttgcagtaactcgagccaagaagcgtctcatcatgaccaaatcattggaaaacattttgactttggctggggagtacttcttgcaagcagagctgacaagcaacgtcttaaaaacaggcgtggtgcgctgctgcgtgggacagtgcaacaatgccatccctgttgacaccgtccttaccatgaagaagctgcccatcacctatagcaacaggaaggaaaacaaggggggctacctctgccactcctgtgcggagcagcgcatcgggcccctggcgttcctgacagcctccccggagcaggtgcgcgccatggagcgcactgtggagaacatcgtactgccccggcatgaggccctgctcttcctcgtcttctgaggacaaggcgcacgttctccgcagtgcagagcagcttgccgaggaccccgcgtgaagaaagccagcgaggggggcttctgctccctgagactctgggttcacccacagcactttctgaggaagaggacaccagcccaagctggacctgccatttctccactccctacagacagccagtctccacttgcctcccctctggatgtatctggtcagggaagtgggggatgttcttttgataaaaaaaaaaaaaaaaatttatgtatttaaacttttattacaagatttcaattaaacaggcaccatagc

SEQ ID NO: 10630 - DNA, 2119 bp, Homo sapiens
  source 1..2119: mol_type = unassigned DNA
ctcgggctccaggtcccggccagaggaggagctcgctgccgggggacgctgggctgagcggccggcggcgcgggcccggcggcggcggcagcggggtccgggtccggagcgccacatgagacggtttaagcggaagcatcttactgccattgactgccagcatttggctcggagtcacttggctgtgacccagcccttcggtcaaagatggacaaacagagatccgaaccatggtctctatcctaaaccgagaacaaaaagagggagtaggggtcagggaagtcaaagatgcatccctgagttcttcctagcaggcaagcagccgtgcaccaatgacatggccaaaagcaattctgttggccaggacagctgtcaggactctgagggtgacatgatctttcctgcagagagcagctgtgcactgcctcaggaaggcagtgcagggccgggctcaccagggtctgccccgccctccaggaagcggtcttggtcctctgaggaagagagtaaccaggctaccgggaccagccggtgggatggagtttctaagaaagctccacggcaccatttgtctgtgccatgcacaaggcctagggaggccaggcaagaagcagaggacagtacgtctcggctctctgcggagtctggtgaaaccgaccaagatgctggggacgtgggtcctgatcccattcctgactcatactatgggcttcttgggaccttgccctgccaggaagcactgagccacatttgcagcctgcctagtgaggtcctgaggcacgtgtttgccttcctcccggtggaagacctctattggaacctgagcttggtgtgccacttgtggagggagatcatcagtgacccgctgttcattccttggaagaagctgtaccatcgatacctgatgaatgaagagcaagctgtcagcaaagtggacggcatcctgtctaactgtggcatagaaaaggagtcagacctgtgtgtgctgaacctcatacgatacacagccaccactaagtgctctccgagtgtggatcccgagagggtgctgtggagtctgagggaccaccccctcctccccgaggctgaggcgtgtgtgcggcaacacctccccgacctctacgctgctgccgggggtgtcaacatctgggccctggtggcggctgtggtgctcctctccagcagtgtgaatgacatccagcgactgctcttctgcctccggagacccagctccacggtgaccatgccagatgtcaccgagaccctgtactgcatagccgtgcttctctacgccatgagggagaaggggattaacatcagcaataggattcactacaacattttctattgcctatatcttcaggagaattcctgcactcaggccacaaaagttaaagaggagccatctgtctggccaggcaagaaaaccatccaacttacacatgaacaacagctgattctgaatcacaagatggaacctctccaggtggtgaaaattatggcctttgccggcactgggaagacctcaacgctggtcaagtatgcagagaagtggtctcagagcaggtttctgtatgtgacattcaacaagagcatcgcaaagcaggccgaacgcgtcttccccagcaacgtcatctgcaaaaccttccactccatggcctacgggcacatagggcggaagtaccagtcaaagaagaagttgaatctcttcaagttaacacccttcatggtcaactccgtccttgctgaagggaagggtggattcataagagccaagcttgtgtgtaagactctagaaaacttctttgcctcggctgacgaagagctgaccattgatcacgtgcctatttggtgtaagaacagccaaggacagagagtcatggttgagcagagtgaaaaactgaatggtgtccttgaagcgagccgcctctgggataacatgcggaagctgggggagtgcacagaagaggcgcaccagatgactcatgacggctacttgaaactctggcagctgagcaagccttcgctggcctcttttgacgccatctttgtggatgaggcccaggcaggtgcgcgccatggagcgcactgtggagaacatcgtactgccccggcatga

SEQ ID NO: 10631 - DNA, 608 bp, Homo sapiens
  source 1..608: mol_type = unassigned DNA
gcacgatggaccccaaacagaccaccctcctgtgtcttgtgctctgtctgggccagaggattcaggcacaggaaggggactttcccatgcctttcatatctgccaaatcgagtcctgtgattcccttggatggatctgtgaaaatccagtgccaggccattcgtgaagcttacctgacccagctgatgatcataaaaaactccacgtaccgagagataggcagaagactgaagttttggaatgagactgatcctgagttcgtcattgaccacatggacgcaaacaaggcagggcgctatcagtgccaatataggatagggcactacagattccggtacagtgacaccctggagctggtagtgacagactccatccaccaagattacacgacgcagaacttgatccgcatggccgtggcaggactggtcctcgtggctctcttggccatactggttgaaaattggcacagccatacggcactgaacaaggaagcctcggcagatgtggctgaaccgagctggagccaacagatgtgtcagccaggattgacctttgcacgaacaccaagtgtctgcaagtaaacacctggaggtgaaggcagagaggag

SEQ ID NO: 10632 - DNA, 537 bp, Homo sapiens
  source 1..537: mol_type = unassigned DNA
atggaccccaaacagaccaccctcctgtgtcttggcttgtatggcaaacccttcctctctgcagatcggggtctggtgttgatgccaggagagaatatttccctcacgtgcagctcagcacacatcccatttgatagattttcactggccaaggagggagaactttctctgccacagcaccaaagtggggaacacccggccaacttctctttgggtcctgtggacctcaatgtctcagggatctacaggtgctacggttggtacaacaggagcccctacctgtggtccttccccagtaatgccttggagcttgtggtcacagactccatccaccaagattacacgacgcagaacttgatccgcatggccgtggcaggactggtcctcgtggctctcttggccatactggttgaaaattggcacagccatacggcactgaacaaggaagcctcggcagatgtggctgaaccgagctggagccaacagatgtgtcagccaggattgacctttgcacgaacaccaagtgtctgcaagtaa

SEQ ID NO: 10633 - DNA, 1483 bp, Homo sapiens
  source 1..1483: mol_type = unassigned DNA
tgtcagcacgatggaccccaaacagaccaccctcctgtgtcttgtgctctgtctgggccagaggattcaggcacaggaaggggactttcccatgcctttcatatctgccaaatcgagtcctgtgattcccttggatggatctgtgaaaatccagtgccaggccattcgtgaagcttacctgacccagctgatgatcataaaaaactccacgtaccgagagataggcagaagactgaagttttggaatgagactgatcctgagttcgtcattgaccacatggacgcaaacaaggcagggcgctatcagtgccaatataggatagggcactacagattccggtacagtgacaccctggagctggtagtgacaggcttgtatggcaaacccttcctctctgcagatcggggtctggtgttgatgccaggagagaatatttccctcacgtgcagctcagcacacatcccatttgatagattttcactggccaaggagggagaactttctctgccacagcaccaaagtggggaacacccggccaacttctctttgggtcctgtggacctcaatgtctcagggatctacaggtgctacggttggtacaacaggagcccctacctgtggtccttccccagtaatgccttggagcttgtggtcacagactccatccaccaagattacacgacgcagaacttgatccgcatggccgtggcaggactggtcctcgtggctctcttggccatactggttgaaaattggcacagccatacggcactgaacaaggaagcctcggcagatgtggctgaaccgagctggagccaacagatgtgtcagccaggattgacctttgcacgaacaccaagtgtctgcaagtaaacacctggaggtgaaggcagagaggagccaggactgtggagtccgacaaagctacttgaaggacacaagagagaaaagctcactaagaagcttgaatctacttttttttttttttgagacagagtctggctctgtcacccaggctggagtgcagtggagcaatctcggctcattgaacctcttgggttcaagtgattcttgtgcctcagcctcccaagtagctggaattacaggcacataccactgcacccagctaatttttgtatttttagtagagatggggtttcactgtgttggccaggctggtctcgaactcctgacctcaggtgatccacccaccttggcctcccaaagtgctgagattataggcatgagccaccacgcctggccagatgcatgttcaaaccaatcaaatggtgttttcttatgcaggactgatcgatttgcacccacctttctgcacataagttatggttttccatcttatctgtcttctgattttttatatcctgtttaatttcttccttcattgttcttctctttttttatttattttatttatttttatttttatttttatttgagacagagtctcactctgttgcccag

SEQ ID NO: 10634 - DNA, 828 bp, Homo sapiens
  source 1..828: mol_type = unassigned DNA
atggaccccaaacagaccaccctcctgtgtcttggggactttcccatgcctttcatatctgccaaatcgagtcctgtgattcccttggatggatctgtgaaaatccagtgccaggccattcgtgaagcttacctgacccagctgatgatcataaaaaactccacgtaccgagagataggcagaagactgaagttttggaatgagactgatcctgagttcgtcattgaccacatggacgcaaacaaggcagggcgctatcagtgccaatataggatagggcactacagattccggtacagtgacaccctggagctggtagtgacaggcttgtatggcaaacccttcctctctgcagatcggggtctggtgttgatgccaggagagaatatttccctcacgtgcagctcagcacacatcccatttgatagattttcactggccaaggagggagaactttctctgccacagcaccaaagtggggaacacccggccaacttctctttgggtcctgtggacctcaatgtctcagggatctacaggtgctacggttggtacaacaggagcccctacctgtggtccttccccagtaatgccttggagcttgtggtcacagactccatccaccaagattacacgacgcagaacttgatccgcatggccgtggcaggactggtcctcgtggctctcttggccatactggttgaaaattggcacagccatacggcactgaacaaggaagcctcggcagatgtggctgaaccgagctggagccaacagatgtgtcagccaggattgacctttgcacgaacaccaagtgtctgcaagtaa

SEQ ID NO: 10635 - DNA, 754 bp, Homo sapiens
  source 1..754: mol_type = unassigned DNA
atggaccccaaacagaccaccctcctgtgtcttggggactttcccatgcctttcatatctgccaaatcgagtcctgtgattcccttggatggatctgtgaaaatccagtgccaggccattcgtgaagcttacctgacccagctgatgatcataaaaaactccacgtaccgagagataggcagaagactgaagttttggaatgagactgatcctgagttcgtcattgaccacatggacgcaaacaaggcagggcgctatcagtgccaatataggatagggcactacagattccggtacagtgacaccctggagctggtagtgacaggcttgtatggcaaacccttcctctctgcagatcggggtctggtgttgatgccaggagagaatatttccctcacgtgcagctcagcacacatcccatttgatagattttcactggccaaggagggagaactttctctgccacagcaccaaagtggggaacacccggccaacttctctttgggtcctgtggacctcaatgtctcagggatctacagactccatccaccaagattacacgacgcagaacttgatccgcatggccgtggcaggactggtcctcgtggctctcttggccatactggttgaaaattggcacagccatacggcactgaacaaggaagcctcggcagatgtggctgaaccgagctggagccaacagatgtgtcagccaggattgacctttgcacgaacaccaagtgtctgcaagtaa

SEQ ID NO: 10636 - DNA, 762 bp, Homo sapiens
  source 1..762: mol_type = unassigned DNA
atggaccccaaacagaccaccctcctgtgtcttggggactttcccatgcctttcatatctgccaaatcgagtcctgtgattcccttggatggatctgtgaaaatccagtgccaggccattcgtgaagcttacctgacccagctgatgatcataaaaaactccacgtaccgagagataggcagaagactgaagttttggaatgagactgatcctgagttcgtcattgaccacatggacgcaaacaaggcagggcgctatcagtgccaatataggatagggcactacagattccggtacagtgacaccctggagctggtagtgacaggcttgtatggcaaacccttcctctctgcagatcggggtctggtgttgatgccaggagagaatatttccctcacgtgcagctcagcacacatcccatttgatagattttcactggccaaggagggagaactttctctgccacagcaccaaagtggggaacacccggccaacttctctttgggtcctgtggacctcaatgtctcagggatctacaggtgctacgactccatccaccaagattacacgacgcagaacttgatccgcatggccgtggcaggactggtcctcgtggctctcttggccatactggttgaaaattggcacagccatacggcactgaacaaggaagcctcggcagatgtggctgaaccgagctggagccaacagatgtgtcagccaggattgacctttgcacgaacaccaagtgtctgcaagtaa

SEQ ID NO: 10637 - DNA, 830 bp, Homo sapiens
  source 1..830: mol_type = unassigned DNA
gcacgatggaccccaaacagaccaccctcctgtgtcttgtgctctgtctgggccagaggattcaggcacaggaaggggactttcccatgcctttcatatctgccaaatcgagtcctgtgattcccttggatggatctgtgaaaatccagtgccaggccattcgtgaagcttacctgacccagctgatgatcataaaaaactccacgtaccgagagataggcagaagactgaagttttggaatgagactgatcctgagttcgtcattgaccacatggacgcaaacaaggcagggcgctatcagtgccaatataggatagggcactacagattccggtacagtgacaccctggagctggtagtgacaggcttgtatggcaaacccttcctctctgcagatcggggtctggtgttgatgccaggagagaatatttccctcacgtgcagctcagcacacatcccatttgatagattttcactggccaaggagggagaactttctctgccacagcaccaaagtggggaacacccggccaacttctctttgggtcctgtggacctcaatgtctcagggatctacaggtgctacgactccatccaccaagattacacgacgcagaacttgatccgcatggccgtggcaggactggtcctcgtggctctcttggccatactggttgaaaattggcacagccatacggcactgaacaaggaagcctcggcagatgtggctgaaccgagctggagccaacagatgtgtcagccaggattgacctttgcacgaacaccaagtgtctgcaagtaaacacctggaggtgaaggcagagaggag

SEQ ID NO: 10638 - DNA, 609 bp, Homo sapiens
  source 1..609: mol_type = unassigned DNA
gcattgaaaggagagcaacggggctgaggccgtgtcagcacgatggaccccaaacagaccaccctcctgtgtcttggggactttcccatgcctttcatatctgccaaatcgagtcctgtgattcccttggatggatctgtgaaaatccagtgccaggccattcgtgaagcttacctgacccagctgatgatcataaaaaactccacgtaccgagagataggcagaagactgaagttttggaatgagactgatcctgagttcgtcattgaccacatggacgcaaacaaggcagggcgctatcagtgccaatataggatagggcactacagattccggtacagtgacaccctggagctggtagtgacagactccatccaccaagattacacgacgcagaacttgatccgcatggccgtggcaggactggtcctcgtggctctcttggccatactggttgaaaattggcacagccatacggcactgaacaaggaagcctcggcagatgtggctgaaccgagctggagccaacagatgtgtcagccaggattgacctttgcacgaacaccaagtgtctgcaagtaaacacctggaggtgaaggcagagaggag

SEQ ID NO: 10639 - DNA, 1619 bp, Homo sapiens
  source 1..1619: mol_type = unassigned DNA
tccacccaagagcaacctggaactaagttattcggcaacgaactgttccactttgttgtgaggcaatagatgtggaaattccctgacgaggggctctgtcctcatacttcctgcggagcttattgtcgtaagaatatctgtcatcctgctaatgtgcattgaaaggagagcaacggggctgaggccgtgtcagcacgatggaccccaaacagaccaccctcctgtgtcttgtgctctgtctgggccagaggattcaggcacaggaaggggactttcccatgcctttcatatctgccaaatcgagtcctgtgattcccttggatggatctgtgaaaatccagtgccaggccattcgtgaagcttacctgacccagctgatgatcataaaaaactccacgtaccgagagataggcagaagactgaagttttggaatgagactgatcctgagttcgtcattgaccacatggacgcaaacaaggcagggcgctatcagtgccaatataggatagggcactacagattccggtacagtgacaccctggagctggtagtgacaggcttgtatggcaaacccttcctctctgcagatcggggtctggtgttgatgccaggagagaatatttccctcacgtgcagctcagcacacatcccatttgatagattttcactggccaaggagggagaactttctctgccacagcaccaaagtggggaacacccggccaacttctctttgggtcctgtggacctcaatgtctcagggatctacaggtgctacggttggtacaacaggagcccctacctgtggtccttccccagtaatgccttggagcttgtggtcacaggtaggtaccgcccagtccagccctgtgtctgggttggctgtccagggccttgccaccgggcaggaatatgaagacgtgcactgagagtgaagtgaagagaggcaaaggctctcactccaggacagtggagagagaaaggcttccccaccacactttccgctttcacttcctcgctagagttctccagacagggttcattgaaaacttagtctgtggagaacagaagggctaactcagtttgtttcattttatttatttcattttattttccgggatagagtcttgctctttcgccaaggctggagtgcagtggcacgatctcgactcactgcaaccttcgcctcccaggttcaagcaattctcctgcctcagcctcctgagtagctgggaccacacagacagggtttcaccatgttggccaggctggtctcgaactcccgacctcaggtgatccacctgcctcggcctcccaaagtgctgggattacaggcgtgagccaccgcgcctggccaggctgcacacattcttattaggattccaccttgttctggtgttgtagagatgtgattaggtatttagtgaattcaccaagtgaggagagaatgaaaagaaaacacaacctgcctggccgggcgtggtggcgtgagcctgtcgtcccagctactcaggaggctgaggcaggagaatcacttgaacccaggaggcagctgttgcagtgagccaagatcacgccattgcactccagcctgggtgacagaacgagactccacctc

SEQ ID NO: 10640 - DNA, 1165 bp, Homo sapiens
  source 1..1165: mol_type = unassigned DNA
agtctccagcatcctccacctgtctaccaccgagcatgggcctatatttgaagccttagatctctccagcacagtaagcaccaggagtccatgaagaagatggctcctgccatggaatcccctactctactgtgtgtagccttactgttcttcgctccagatggcgtgttagcagtccctcagaaacctaaggtctccttgaaccctccatggaatagaatatttaaaggagagaatgtgactcttacatgtaatgggaacaatttctttgaagtcagttccaccaaatggttccacaatggcagcctttcagaagagacaaattcaagtttgaatattgtgaatgccaaatttgaagacagtggagaatacaaatgtcagcaccaacaagttaatgagagtgaacctgtgtacctggaagtcttcagtgactggctgctccttcaggcctctgctgaggtggtgatggagggccagcccctcttcctcaggtgccatggttggaggaactgggatgtgtacaaggtgatctattataaggatggtgaagctctcaagtactggtatgagaaccacaacatctccattacaaatgccacagttgaagacagtggaacctactactgtacgggcaaagtgtggcagctggactatgagtctgagcccctcaacattactgtaataaaagctccgcgtgagaagtactggctacaattttttatcccattgttggtggtgattctgtttgctgtggacacaggattatttatctcaactcagcagcaggtcacatttctcttgaagattaagagaaccaggaaaggcttcagacttctgaacccacatcctaagccaaaccccaaaaacaactgatataattactcaagaaatatttgcaacattagtttttttccagcatcagcaattgctactcaattgtcaaacacagcttgcaatatacatagaaacgtctgtgctcaaggatttatagaaatgcttcattaaactgagtgaaactggttaagtggcatgtaatagtaagtgctcaattaacattggttgaataaatgagagaatgaatagattcatttattagcatttgtaaaagagatgttcaatttcaataaaataaatataaaaccatgtaacagaatgcttctgagta

SEQ ID NO: 10641 - DNA, 591 bp, Homo sapiens
  source 1..591: mol_type = unassigned DNA
cagaacggccgatctccagcccaagatgattccagcagtggtcttgctcttactccttttggttgaacaagcagcggccctgggagagcctcagctctgctatatcctggatgccatcctgtttctgtatggaattgtcctcaccctcctctactgtcgactgaagatccaagtgcgaaaggcagctataaccagctatgagaaatcagatggtgtttacacgggcctgagcaccaggaaccaggagacttacgagactctgaagcatgagaaaccaccacagtagctttagaatagatgcggtcatattcttctttggcttctggttcttccagccctcatggttggcatcacatatgcctgcatgccattaacaccagctggccctacccctataatgatcctgtgtcctaaattaatatacaccagtggttcctcctccctgttaaagactaatgctcagatgctgtttacggatatttatattctagtctcactctcttgtcccacccttcttctcttccccattcccaactccagctaaaatatgggaagggagaacccccaataaaactgccatggactggactc

SEQ ID NO: 10642 - DNA, 551 bp, Homo sapiens
  source 1..551: mol_type = unassigned DNA
acagctgcacagtgctgtcagaacggccgatctccagcccaagatgattccagcagtggtcttgctcttactccttttggttgaacaagcagcggccctgggagagcctcagctctgctatatcctggatgccatcctgtttctgtatggaattgtcctcaccctcctctactgtcgactgaagatccaagtgcgaaaggcagctataaccagctatgagaaatcagatggtgtttacacgatggagtctccctctatcaccaggctggagtgcagtggcatgatctgggctcactgcaacctctgcctcctgggttcaagagattctcgtgcttcaccctcccgagtagctaagactacaggcaccaccatgcccagctaattttttttgtatttttagtagagacagggtttcactatgttggtcttgatctcttgacctcgtgatctgctcgcctcagcctcctaaagtgctgggattacaggtgtgagccaccgagcctgacctggaagtaactcttttaaagataaagtgggaataaacttttatt

SEQ ID NO: 10643 - DNA, 787 bp, Homo sapiens
  source 1..787: mol_type = unassigned DNA
ctgctcctttggggtccagttgatgggcaagtgggttccatgggtcagcgtgttccaagaggaaaccgtaaccttgcactgtgaggtgctccatctgcctgggagcagctccacacagtggtttctcaatggcacagccactcagacctcgacccccagctacagaatcacctctgccagtgtcaatgacagtggtgaatacaggtgccagagaggtctctcagggcgaagtgaccccatacagctggaaatccacagaggttggctactactgcaggtctccagcagagtcttcatggaaggagaacctctggccttgaggtgtcatgcgtggaaggataagctggtgtacaatgtgctttactatcgaaatggcaaagcctttaagtttttccactggaattctaacctcaccattctgaaaaccaacataagtcacaatggcacctaccattgctcaggcatgggaaagcatcgctacacatcagcaggaatatcacaatacactgtgaaaggtctccagttaccaactcctgtctggtttcatgtccttttctatctggcagtgggaataatgtttttagtgaacactgttctctgggtgacaatacgtaaagaactgaaaagaaagaaaaagtggaatttagaaatctctttggattctggtcatgagaagaaggtaatttccagccttcaagaagacagacatttagaagaagagctgaaatgtcaggaacaaaaagaagaacagctgcaggaaggggtgcaccggaaggagccccagggg

SEQ ID NO: 10644 - DNA, 570 bp, Homo sapiens
  source 1..570: mol_type = unassigned DNA
atgtggttcttgacaactctgctcctttggggctggctactactgcaggtctccagcagagtcttcatggaaggagaacctctggccttgaggtgtcatgcgtggaaggataagctggtgtacaatgtgctttactatcgaaatggcaaagcctttaagtttttccactggaattctaacctcaccattctgaaaaccaacataagtcacaatggcacctaccattgctcaggcatgggaaagcatcgctacacatcagcaggaatatcacaatacactgtgaaaggcctccagttaccaactcctgtctggtttcatgtccttttctatctggcagtgggaataatgtttttagtgaacactgttctctgggtgacaatacgtaaagaactgaaaagaaagaaaaagtggaatttagaaatctctttggattctggtcatgagaagaaggtaatttccagccttcaagaagacagacatttagaagaagagctgaaatgtcaggaacaaaaagaagaacagctgcaggaaggggtgcaccggaaggagccccagggggccacgtagcag

SEQ ID NO: 10645 - DNA, 1044 bp, Homo sapiens
  source 1..1044: mol_type = unassigned DNA
tgcatgttacagatttcactactcccaccagcttggagacaacatgtggttcttgacaactctgctcctttgggttccagttgatgggcaagtggacaccacaaaggcagtgatcactttgcagcctccatgggtcagcgtgttccaagaggaaaccgtaaccttgcactgtgaggtgctccatctgcctgggagcagctccacacagtggtttctcaatggcacagccactcagacctcgacccccagctacagaatcacctctgccagtgtcaatgacagtggtgaatacaggtgccagagaggtctctcagggcgaagtgaccccatacagctggaaatccacagaggctggctactactgcaggtctccagcagagtcttcatggaaggagaacctctggccttgaggtgtcatgcgtggaaggataagctggtgtacaatgtgctttactatcgaaatggcaaagcctttaagtttttccactggaattctaacctcaccattctgaaaaccaacataagtcacaatggcacctaccattgctcaggcatgggaaagcatcgctacacatcagcaggaatatcacaatacactgtgaaaggcctccagttaccaactcctgtctggtttcatgtccttttctatctggcagtgggaataatgtttttagtgaacactgttctctgggtgacaatacgtaaagaactgaaaagaaagaaaaagtggaatttagaaatctctttggattctggtcatgagaagaaggtaatttccagccttcaagaagacagacatttagaagaagagctgaaatgtcaggaacaaaaagaagaacagctgcaggaaggggtgcaccggaaggagccccagggggccacgtagcagcggctcagttggtggccatcgatctggaccgtcccctgcccacttgctccccgtgagcactgcgtacaaacatccaaaagttcaacaacaccagaactgtgtgtctcatggtatataactcttaaagcaaataaatgaactgacttcaactggga

SEQ ID NO: 10646 - DNA, 2412 bp, Homo sapiens
  source 1..2412: mol_type = unassigned DNA
gtctcttaaaacccactggacgttggcacagtgctgggatgactatggagacccaaatgtctcagaatgtatgtcccagaaacctgtggctgcttcaaccattgacagttttgctgctgctggcttctgcagacagtcaagctgcagctcccccaaaggctgtgctgaaacttgagcccccgtggatcaacgtgctccaggaggactctgtgactctgacatgccagggggctcgcagccctgagagcgactccattcagtggttccacaatgggaatctcattcccacccacacgcagcccagctacaggttcaaggccaacaacaatgacagcggggagtacacgtgccagactggccagaccagcctcagcgaccctgtgcatctgactgtgctttccgaatggctggtgctccagacccctcacctggagttccaggagggagaaaccatcatgctgaggtgccacagctggaaggacaagcctctggtcaaggtcacattcttccagaatggaaaatcccagaaattctcccatttggatcccaccttctccatcccacaagcaaaccacagtcacagtggtgattaccactgcacaggaaacataggctacacgctgttctcatccaagcctgtgaccatcactgtccaagtgcccagcatgggcagctcttcaccaatggggatcattgtggctgtggtcattgcgactgctgtagcagccattgttgctgctgtagtggccttgatctactgcaggaaaaagcggatttcagccaattccactgatcctgtgaaggctgcccaatttgagccacctggacgtcaaatgattgccatcagaaagagacaacttgaagaaaccaacaatgactatgaaacagctgacggcggctacatgactctgaaccccagggcacctactgacgatgataaaaacatctacctgactcttcctcccaacgaccatgtcaacagtaataactaaagagtaacgttatgccatgtggtcatactctcagcttgctgagtggatgacaaaaagaggggaattgttaaaggaaaatttaaatggagactggaaaaatcctgagcaaacaaaaccacctggcccttagaaatagctttaactttgcttaaactacaaacacaagcaaaacttcacggggtcatactacatacaagcataagcaaaacttaacttggatcatttctggtaaatgcttatgttagaaataagacaaccccagccaatcacaagcagcctactaacatataattaggtgactagggactttctaagaagatacctacccccaaaaaacaattatgtaattgaaaaccaaccgattgcctttattttgcttccacattttcccaataaatacttgcctgtgacattttgccactggaacactaaacttcatgaattgcgcctcagatttttcctttaacatcttttttttttttgacagagtctcaatctgttacccaggctggagtgcagtggtgctatcttggctcactgcaaacccgcctcccaggtttaagcgattctcatgcctcagcctcccagtagctgggattagaggcatgtgccatcatacccagctaatttttgtattttttattttttttttttagtagagacagggtttcgcaatgttggccaggccgatctcgaacttctggcctctagcgatctgcccgcctcggcctcccaaagtgctgggatgaccagcatcagccccaatgtccagcctctttaacatcttctttcctatgccctctctgtggatccctactgctggtttctgccttctccatgctgagaacaaaatcacctattcactgcttatgcagtcggaagctccagaagaacaaagagcccaattaccagaaccacattaagtctccattgttttgccttgggatttgagaagagaattagagaggtgaggatctggtatttcctggactaaattccccttggggaagacgaagggatgctgcagttccaaaagagaaggactcttccagagtcatctacctgagtcccaaagctccctgtcctgaaagccacagacaatatggtcccaaatgactgactgcaccttctgtgcctcagccgttcttgacatcaagaatcttctgttccacatccacacagccaatacaattagtcaaaccactgttattaacagatgtagcaacatgagaaacgcttatgttacaggttacatgagagcaatcatgtaagtctatatgacttcagaaatgttaaaatagactaacctctaacaacaaattaaaagtgattgtttcaaggtgatgcaattattgatgacctattttatttttctataatgatcatatattacctttgtaataaaacattataaccaaaa

SEQ ID NO: 10647 - DNA, 1399 bp, Homo sapiens
  source 1..1399: mol_type = unassigned DNA
gtctcttaaaacccactggacgttggcacagtgctgggatgactatggagacccaaatgtctcagaatgtatgtcccagaaacctgtggctgcttcaaccattgacagttttgctgctgctggcttctgcagacagtcaagctgctcccccaaaggctgtgctgaaacttgagcccccgtggatcaacgtgctccaggaggactctgtgactctgacatgccagggggctcgcagccctgagagcgactccattcagtggttccacaatgggaatctcattcccacccacacgcagcccagctacaggttcaaggccaacaacaatgacagcggggagtacacgtgccagactggccagaccagcctcagcgaccctgtgcatctgactgtgctttccgaatggctggtgctccagacccctcacctggagttccaggagggagaaaccatcatgctgaggtgccacagctggaaggacaagcctctggtcaaggtcacattcttccagaatggaaaatcccagaaattctcccatttggatcccaccttctccatcccacaagcaaaccacagtcacagtggtgattaccactgcacaggaaacataggctacacgctgttctcatccaagcctgtgaccatcactgtccaagtgcccagcatgggcagctcttcaccaatggggatcattgtggctgtggtcattgcgactgctgtagcagccattgttgctgctgtagtggccttgatctactgcaggaaaaagcggatttcagccaattccactgatcctgtgaaggctgcccaatttgagccacctggacgtcaaatgattgccatcagaaagagacaacttgaagaaaccaacaatgactatgaaacagctgacggcggctacatgactctgaaccccagggcacctactgacgatgataaaaacatctacctgactcttcctcccaacgaccatgtcaacagtaataactaaagagtaacgttatgccatgtggtcatactctcagcttgctgagtggatgacaaaaagaggggaattgttaaaggaaaatttaaatggagactggaaaaatcctgagcaaacaaaaccacctggcccttagaaatagctttaactttgcttaaactacaaacacaagcaaaacttcacggggtcatactacatacaagcataagcaaaacttaacttggatcatttctggtaaatgcttatgttagaaataagacaaccccagccaatcacaagcagcctactaacatataattaggtgactagggactttctaagaagatacctacccccaaaaaacaattatgtaattgaaaaccaaccgattgcctttattttgcttccacattttcccaataaatacttgcctgtga

SEQ ID NO: 10648 - DNA, 1440 bp, Homo sapiens
  source 1..1440: mol_type = unassigned DNA
tccagaatttgtttgccctctagggtagaatccgccaagctttgagagaaggctgtgactgctgtgctctgggcgccagctcgctccagggagtgatgggaatcctgtcattcttacctgtccttgccactgagagtgactgggctgactgcaagtccccccagccttggggtcatatgcttctgtggacagctgtgctattcctggctcctgttgctgggacacctgcagctcccccaaaggctgtgctgaaactcgagccccagtggatcaacgtgctccaggaggactctgtgactctgacatgccgggggactcacagccctgagagcgactccattcagtggttccacaatgggaatctcattcccacccacacgcagcccagctacaggttcaaggccaacaacaatgacagcggggagtacacgtgccagactggccagaccagcctcagcgaccctgtgcatctgactgtgctttctgagtggctggtgctccagacccctcacctggagttccaggagggagaaaccatcgtgctgaggtgccacagctggaaggacaagcctctggtcaaggtcacattcttccagaatggaaaatccaagaaattttcccgttcggatcccaacttctccatcccacaagcaaaccacagtcacagtggtgattaccactgcacaggaaacataggctacacgctgtactcatccaagcctgtgaccatcactgtccaagctcccagctcttcaccgatggggatcattgtggctgtggtcactgggattgctgtagcggccattgttgctgctgtagtggccttgatctactgcaggaaaaagcggatttcagccaatcccactaatcctgatgaggctgacaaagttggggctgagaacacaatcacctattcacttctcatgcacccggatgctctggaagagcctgatgaccagaaccgtatttagtctccattgtcttgcattgggatttgagaagaaaatcagagagggaagatctggtatttcctggcctaaattccccttggggaggacagggagatgctgcagttccaaaagagaaggtttcttccagagtcatctacctgagtcctgaagctccctgtcctgaaagccacagacaatatggtcccaaataaccgactgcaccttctgtgcttcagctcttcttgacatcaaggctcttccgttccacatccacacagccaatccaattaatcaaaccactgttattaacagataatagcaacttgggaaatgcttatgttacaggttacgtgagaacaatcatgtaaatctatatgatttcagaaatgttaaaatagactaacctctaccagcacattaaaagtgattgtttctgggtgataaaattattgatgatttttattttctttatttttctataaagatcata

SEQ ID NO: 10649 - DNA, 2115 bp, Homo sapiens
  source 1..2115: mol_type = unassigned DNA
gccctctagggtagaatccgccaagctttgagagaaggctgtgactgctgtgctctgggcgccagctcgctccagggagtgatgggaatcctgtcattcttacctgtccttgccactgagagtgactgggctgactgcaagtccccccagccttggggtcatatgcttctgtggacagctgtgctattcctggctcctgttgctgggacacctgcagctcccccaaaggctgtgctgaaactcgagccccagtggatcaacgtgctccaggaggactctgtgactctgacatgccgggggactcacagccctgagagcgactccattcagtggttccacaatgggaatctcattcccacccacacgcagcccagctacaggttcaaggccaacaacaatgacagcggggagtacacgtgccagactggccagaccagcctcagcgaccctgtgcatctgactgtgctttctgagtggctggtgctccagacccctcacctggagttccaggagggagaaaccatcgtgctgaggtgccacagctggaaggacaagcctctggtcaaggtcacattcttccagaatggaaaatccaagaaattttcccgttcggatcccaacttctccatcccacaagcaaaccacagtcacagtggtgattaccactgcacaggaaacataggctacacgctgtactcatccaagcctgtgaccatcactgtccaagctcccagctcttcaccgatggggatcattgtggctgtggtcactgggattgctgtagcggccattgttgctgctgtagtggccttgatctactgcaggaaaaagcggatttcagctctcccaggataccctgagtgcagggaaatgggagagaccctccctgagaaaccagccaatcccactaatcctgatgaggctgacaaagttggggctgagaacacaatcacctattcacttctcatgcacccggatgctctggaagagcctgatgaccagaaccgtatttagtctccattgtcttgcattgggatttgagaagaaaatcagagagggaagatctggtatttcctggcctaaattccccttggggaggacagggagatgctgcagttccaaaagagaaggtttcttccagagtcatctacctgagtcctgaagctccctgtcctgaaagccacagacaatatggtcccaaataaccgactgcaccttctgtgcttcagctcttcttgacatcaaggctcttccgttccacatccacacagccaatccaattaatcaaaccactgttattaacagataatagcaacttgggaaatgcttatgttacaggttacgtgagaacaatcatgtaaatctatatgatttcagaaatgttaaaatagactaacctctaccagcacattaaaagtgattgtttctgggtgataaaattattgatgatttttattttctttatttttctataaagatcatatattacttttataataaaacattataaaaacaacattctgtttaccttttcaaggctgtattggttggagtgtagactgaactgcctggggtctgtttctcttcagtgatgagactcttaggaaggcaggaatggataggatagggggaggagaggagagatggggatttagaatgtagagtgagtgccccttttcttaaaactgaatacagtcacgcaccacataatgatgtttagttcaacaacagactgcatatatgatggtgatcccataaaattataataccatatttctattgtaccttttctattcctatgtttagatatatgagtacttaccattgtgttacaattgcctaaagtattcagtacagtagcatgctgtacaggtttgtagcctaggggcaataggctatacgctacagcctaggtgtgtagtaggccacaccatttaggtttgtataagtacctgctatgatgttcacacaacaaaattgcctgcatttctcaaaatgtatccccatatttcaacaatgcatgactgtactcttctgccaatgaccttgtattcttgtttccatgtcttcttctctttcctcctatggcaaataaaacactgttttgcaacacaa

SEQ ID NO: 10650 - DNA, 2136 bp, Homo sapiens
  source 1..2136: mol_type = unassigned DNA
agaacatttctttttcacttcccctttcagactccagaatttgtttgccctctagggtagaatccgccaagctttgagagaaggctgtgactgctgtgctctgggcgccagctcgctccagggagtgatgggaatcctgtcattcttacctgtccttgccactgagagtgactgggctgactgcaagtccccccagccttggggtcatatgcttctgtggacagctgtgctattcctggcagctcccccaaaggctgtgctgaaactcgagccccagtggatcaacgtgctccaggaggactctgtgactctgacatgccgggggactcacagccctgagagcgactccattcagtggttccacaatgggaatctcattcccacccacacgcagcccagctacaggttcaaggccaacaacaatgacagcggggagtacacgtgccagactggccagaccagcctcagcgaccctgtgcatctgactgtgctttctgagtggctggtgctccagacccctcacctggagttccaggagggagaaaccatcgtgctgaggtgccacagctggaaggacaagcctctggtcaaggtcacattcttccagaatggaaaatccaagaaattttcccgttcggatcccaacttctccatcccacaagcaaaccacagtcacagtggtgattaccactgcacaggaaacataggctacacgctgtactcatccaagcctgtgaccatcactgtccaagctcccagctcttcaccgatggggatcattgtggctgtggtcactgggattgctgtagcggccattgttgctgctgtagtggccttgatctactgcaggaaaaagcggatttcagctctcccaggataccctgagtgcagggaaatgggagagaccctccctgagaaaccagccaatcccactaatcctgatgaggctgacaaagttggggctgagaacacaatcacctattcacttctcatgcacccggatgctctggaagagcctgatgaccagaaccgtatttagtctccattgtcttgcattgggatttgagaagaaaatcagagagggaagatctggtatttcctggcctaaattccccttggggaggacagggagatgctgcagttccaaaagagaaggtttcttccagagtcatctacctgagtcctgaagctccctgtcctgaaagccacagacaatatggtcccaaataaccgactgcaccttctgtgcttcagctcttcttgacatcaaggctcttccgttccacatccacacagccaatccaattaatcaaaccactgttattaacagataatagcaacttgggaaatgcttatgttacaggttacgtgagaacaatcatgtaaatctatatgatttcagaaatgttaaaatagactaacctctaccagcacattaaaagtgattgtttctgggtgataaaattattgatgatttttattttctttatttttctataaagatcatatattacttttataataaaacattataaaaacaacattctgtttaccttttcaaggctgtattggttggagtgtagactgaactgcctggggtctgtttctcttcagtgatgagactcttaggaaggcaggaatggataggatagggggaggagaggagagatggggatttagaatgtagagtgagtgccccttttcttaaaactgaatacagtcacgcaccacataatgatgtttagttcaacaacagactgcatatatgatggtgatcccataaaattataataccatatttctattgtaccttttctattcctatgtttagatatatgagtacttaccattgtgttacaattgcctaaagtattcagtacagtagcatgctgtacaggtttgtagcctaggggcaataggctatacgctacagcctaggtgtgtagtaggccacaccatttaggtttgtataagtacctgctatgatgttcacacaacaaaattgcctgcatttctcaaaatgtatccccatatttcaacaatgcatgactgtactcttctgccaatgaccttgtattcttgtttccatgtcttcttctctttcctcctatggcaaataaaacactgttttgcaac

SEQ ID NO: 10651 - DNA, 1472 bp, Homo sapiens
  source 1..1472: mol_type = unassigned DNA
gccctctagggtagaatccgccaagctttgagagaaggctgtgactgctgtgctctgggcgccagctcgctccagggagtgatgggaatcctgtcattcttacctgtccttgccactgagagtgactgggctgactgcaagtccccccagccttggggtcatatgcttctgtggacagctgtgctattcctggcagctcccccaaaggctgtgctgaaactcgagccccagtggatcaacgtgctccaggaggactctgtgactctgacatgccgggggactcacagccctgagagcgactccattcagtggttccacaatgggaatctcattcccacccacacgcagcccagctacaggttcaaggccaacaacaatgacagcggggagtacacgtgccagactggccagaccagcctcagcgaccctgtgcatctgactgtgctttctgagtggctggtgctccagacccctcacctggagttccaggagggagaaaccatcgtgctgaggtgccacagctggaaggacaagcctctggtcaaggtcacattcttccagaatggaaaatccaagaaattttcccgttcggatcccaacttctccatcccacaagcaaaccacagtcacagtggtgattaccactgcacaggaaacataggctacacgctgtactcatccaagcctgtgaccatcactgtccaagctcccagctcttcaccgatggggatcattgtggctgtggtcactgggattgctgtagcggccattgttgctgctgtagtggccttgatctactgcaggaaaaagcggatttcagctctcccaggataccctgagtgcagggaaatgggagagaccctccctgagaaaccagccaatcccactaatcctgatgaggctgacaaagttggggctgagaacacaatcacctattcacttctcatgcacccggatgctctggaagagcctgatgaccagaaccgtatttagtctccattgtcttgcattgggatttgagaagaaaatcagagagggaagatctggtatttcctggcctaaattccccttggggaggacagggagatgctgcagttccaaaagagaaggtttcttccagagtcatctacctgagtcctgaagctccctgtcctgaaagccacagacaatatggtcccaaataaccgactgcaccttctgtgcttcagctcttcttgacatcaaggctcttccgttccacatccacacagccaatccaattaatcaaaccactgttattaacagataatagcaacttgggaaatgcttatgttacaggttacgtgagaacaatcatgtaaatctatatgatttcagaaatgttaaaatagactaacctctaccagcacattaaaagtgattgtttctgggtgataaaattattgatgatttttattttctttatttttctataaagatcatatattactttt

SEQ ID NO: 10652 - DNA, 2157 bp, Homo sapiens
  source 1..2157: mol_type = unassigned DNA
agaacatttctttttcacttcccctttcagactccagaatttgtttgccctctagggtagaatccgccaagctttgagagaaggctgtgactgctgtgctctgggcgccagctcgctccagggagtgatgggaatcctgtcattcttacctgtccttgccactgagagtgactgggctgactgcaagtccccccagccttggggtcatatgcttctgtggacagctgtgctattcctggctcctgttgctgggacacctgcagctcccccaaaggctgtgctgaaactcgagccccagtggatcaacgtgctccaggaggactctgtgactctgacatgccgggggactcacagccctgagagcgactccattcagtggttccacaatgggaatctcattcccacccacacgcagcccagctacaggttcaaggccaacaacaatgacagcggggagtacacgtgccagactggccagaccagcctcagcgaccctgtgcatctgactgtgctttctgagtggctggtgctccagacccctcacctggagttccaggagggagaaaccatcgtgctgaggtgccacagctggaaggacaagcctctggtcaaggtcacattcttccagaatggaaaatccaagaaattttcccgttcggatcccaacttctccatcccacaagcaaaccacagtcacagtggtgattaccactgcacaggaaacataggctacacgctgtactcatccaagcctgtgaccatcactgtccaagctcccagctcttcaccgatggggatcattgtggctgtggtcactgggattgctgtagcggccattgttgctgctgtagtggccttgatctactgcaggaaaaagcggatttcagctctcccaggataccctgagtgcagggaaatgggagagaccctccctgagaaaccagccaatcccactaatcctgatgaggctgacaaagttggggctgagaacacaatcacctattcacttctcatgcacccggatgctctggaagagcctgatgaccagaaccgtatttagtctccattgtcttgcattgggatttgagaagaaaatcagagagggaagatctggtatttcctggcctaaattccccttggggaggacagggagatgctgcagttccaaaagagaaggtttcttccagagtcatctacctgagtcctgaagctccctgtcctgaaagccacagacaatatggtcccaaataaccgactgcaccttctgtgcttcagctcttcttgacatcaaggctcttccgttccacatccacacagccaatccaattaatcaaaccactgttattaacagataatagcaacttgggaaatgcttatgttacaggttacgtgagaacaatcatgtaaatctatatgatttcagaaatgttaaaatagactaacctctaccagcacattaaaagtgattgtttctgggtgataaaattattgatgatttttattttctttatttttctataaagatcatatattacttttataataaaacattataaaaacaacattctgtttaccttttcaaggctgtattggttggagtgtagactgaactgcctggggtctgtttctcttcagtgatgagactcttaggaaggcaggaatggataggatagggggaggagaggagagatggggatttagaatgtagagtgagtgccccttttcttaaaactgaatacagtcacgcaccacataatgatgtttagttcaacaacagactgcatatatgatggtgatcccataaaattataataccatatttctattgtaccttttctattcctatgtttagatatatgagtacttaccattgtgttacaattgcctaaagtattcagtacagtagcatgctgtacaggtttgtagcctaggggcaataggctatacgctacagcctaggtgtgtagtaggccacaccatttaggtttgtataagtacctgctatgatgttcacacaacaaaattgcctgcatttctcaaaatgtatccccatatttcaacaatgcatgactgtactcttctgccaatgaccttgtattcttgtttccatgtcttcttctctttcctcctatggcaaataaaacactgttttgcaac

SEQ ID NO: 10653 - DNA, 2100 bp, Homo sapiens
  source 1..2100: mol_type = unassigned DNA
agaacatttctttttcacttcccctttcagactccagaatttgtttgccctctagggtagaatccgccaagctttgagagaaggctgtgactgctgtgctctgggcgccagctcgctccagggagtgatgggaatcctgtcattcttacctgtccttgccactgagagtgactgggctgactgcaagtccccccagccttggggtcatatgcttctgtggacagctgtgctattcctggctcctgttgctgggacacctgcagctcccccaaaggctgtgctgaaactcgagccccagtggatcaacgtgctccaggaggactctgtgactctgacatgccgggggactcacagccctgagagcgactccattcagtggttccacaatgggaatctcattcccacccacacgcagcccagctacaggttcaaggccaacaacaatgacagcggggagtacacgtgccagactggccagaccagcctcagcgaccctgtgcatctgactgtgctttctgagtggctggtgctccagacccctcacctggagttccaggagggagaaaccatcgtgctgaggtgccacagctggaaggacaagcctctggtcaaggtcacattcttccagaatggaaaatccaagaaattttcccgttcggatcccaacttctccatcccacaagcaaaccacagtcacagtggtgattaccactgcacaggaaacataggctacacgctgtactcatccaagcctgtgaccatcactgtccaagctcccagctcttcaccgatggggatcattgtggctgtggtcactgggattgctgtagcggccattgttgctgctgtagtggccttgatctactgcaggaaaaagcggatttcagccaatcccactaatcctgatgaggctgacaaagttggggctgagaacacaatcacctattcacttctcatgcacccggatgctctggaagagcctgatgaccagaaccgtatttagtctccattgtcttgcattgggatttgagaagaaaatcagagagggaagatctggtatttcctggcctaaattccccttggggaggacagggagatgctgcagttccaaaagagaaggtttcttccagagtcatctacctgagtcctgaagctccctgtcctgaaagccacagacaatatggtcccaaataaccgactgcaccttctgtgcttcagctcttcttgacatcaaggctcttccgttccacatccacacagccaatccaattaatcaaaccactgttattaacagataatagcaacttgggaaatgcttatgttacaggttacgtgagaacaatcatgtaaatctatatgatttcagaaatgttaaaatagactaacctctaccagcacattaaaagtgattgtttctgggtgataaaattattgatgatttttattttctttatttttctataaagatcatatattacttttataataaaacattataaaaacaacattctgtttaccttttcaaggctgtattggttggagtgtagactgaactgcctggggtctgtttctcttcagtgatgagactcttaggaaggcaggaatggataggatagggggaggagaggagagatggggatttagaatgtagagtgagtgccccttttcttaaaactgaatacagtcacgcaccacataatgatgtttagttcaacaacagactgcatatatgatggtgatcccataaaattataataccatatttctattgtaccttttctattcctatgtttagatatatgagtacttaccattgtgttacaattgcctaaagtattcagtacagtagcatgctgtacaggtttgtagcctaggggcaataggctatacgctacagcctaggtgtgtagtaggccacaccatttaggtttgtataagtacctgctatgatgttcacacaacaaaattgcctgcatttctcaaaatgtatccccatatttcaacaatgcatgactgtactcttctgccaatgaccttgtattcttgtttccatgtcttcttctctttcctcctatggcaaataaaacactgttttgcaac

SEQ ID NO: 10654 - DNA, 847 bp, Homo sapiens
  source 1..847: mol_type = unassigned DNA
tgatgggaatcctgtcattcttacctgtccttgccactgagagtgactgggctgactgcaagtccccccagccttggggtcatatgcttctgtggacagctgtgctattcctggctcctgttgctgggacacctgcagctcccccaaaggctgtgctgaaactcgagccccagtggatcaacgtgctccaggaggactctgtgactctgacatgccgggggactcacagccctgagagcgactccattcagtggttccacaatgggaatctcattcccacccacacgcagcccagctacaggttcaaggccaacaacaatgacagcggggagtacacgtgccagactggccagaccagcctcagcgaccctgtgcatctgactgtgctttctgagtggctggtgctccagacccctcacctggagttccaggagggagaaaccatcgtgctgaggtgccacagctggaaggacaagcctctggtcaaggtcacattcttccagaatggaaaatccaagaaattttcccgttcggatcccaacttctccatcccacaagcaaaccacagtcacagtggtgattaccactgcacaggaaacataggctacacgctgtactcatccaagcctgtgaccatcactgtccaaggccccagactaaggacggcagcgaagcagagctccctcgttggtgcagaggttccctaagctcctgggcattcctaagaactgagctcccagctcttcaccgatggggatcattgtggctgtggtcactgggattgctgtagcggccattgttgctgctgtagtggccttgatctactgcaggaaaaagcggatttcag

SEQ ID NO: 10655 - DNA, 768 bp, Homo sapiens
  source 1..768: mol_type = unassigned DNA
atgggaatcctgtcattcttacctgtccttgccactgagagtgactgggctgactgcaagtccccccagccttggggtcatatgcttctgtggacagctgtgctattcctgggtgagtcagggcccccagcagctcccccaaaggctgtgctgaaactcgagccccagtggatcaacgtgctccaggaggactctgtgactctgacatgccgggggactcacagccctgagagcgactccattcagtggttccacaatgggaatctcattcccacccacacgcagcccagctacaggttcaaggccaacaacaatgacagcggggagtacacgtgccagactggccagaccagcctcagcgaccctgtgcatctgactgtgctttctgagtggctggtgctccagacccctcacctggagttccaggagggagaaaccatcgtgctgaggtgccacagctggaaggacaagcctctggtcaaggtcacattcttccagaatggaaaatccaagaaattttcccgttcggatcccaacttctccatcccacaagcaaaccacagtcacagtggtgattaccactgcacaggaaacataggctacacgctgtactcatccaagcctgtgaccatcactgtccaagctcccagctcttcaccgatggggatcattgtggctgtggtcactgggattgctgtagcggccattgttgctgctgtagtggccttgatctactgcaggaaaaagcggatttcagtttccacttgg

SEQ ID NO: 10656 - DNA, 2086 bp, Homo sapiens
  source 1..2086: mol_type = unassigned DNA
cagatccagtggcccggaggggcctgagctaaatccgcaggacctgggtaacacgaggaagggctccggatatctttggtgacttgtccactccagtgtggcatcatgtggcagctgctcctcccaactgctctgctacttctagtttcagctggcatgcggactgaagatctcccaaaggctgtggtgttcctggagcctcaatggtacagggtgctcgagaaggacagtgtgactctgaagtgccagggagcctactcccctgaggacaattccacacagtggtttcacaatgagagcctcatctcaagccaggcctcgagctacttcattgacgctgccacagtcgacgacagtggagagtacaggtgccagacaaacctctccaccctcagtgacccggtgcagctagaagtccatatcggctggctgttgctccaggcccctcggtgggtgttcaaggaggaagaccctattcacctgaggtgtcacagctggaagaacactgctctgcataaggtcacatatttacagaatggcaaaggcaggaagtattttcatcataattctgacttctacattccaaaagccacactcaaagacagcggctcctacttctgcagggggctttttgggagtaaaaatgtgtcttcagagactgtgaacatcaccatcactcaaggtttggcagtgtcaaccatctcatcattctttccacctgggtaccaagtctctttctgcttggtgatggtactcctttttgcagtggacacaggactatatttctctgtgaagacaaacattcgaagctcaacaagagactggaaggaccataaatttaaatggagaaaggaccctcaagacaaatgacccccatcccatgggggtaataagagcagtagcagcagcatctctgaacatttctctggatttgcaaccccatcatcctcaggcctctctacaagcagcaggaaacatagaactcagagccagatcccttatccaactctcgacttttccttggtctccagtggaagggaaaagcccatgatcttcaagcagggaagccccagtgagtagctgcattcctagaaattgaagtttcagagctacacaaacactttttctgtcccaaccgttccctcacagcaaagcaacaatacaggctagggatggtaatcctttaaacatacaaaaattgctcgtgttataaattacccagtttagaggggaaaaaaaaacaattattcctaaataaatggataagtagaattaatggttgaggcaggaccatacagagtgtgggaactgctggggatctagggaattcagtgggaccaatgaaagcatggctgagaaatagcaggtagtccaggatagtctaagggaggtgttcccatctgagcccagagataagggtgtcttcctagaacattagccgtagtggaattaacaggaaatcatgagggtgacgtagaattgagtcttccaggggactctatcagaactggaccatctccaagtatataacgatgagtcctcttaatgctaggagtagaaaatggtcctaggaaggggactgaggattgcggtggggggtggggtggaaaagaaagtacagaacaaaccctgtgtcactgtcccaagttgctaagtgaacagaactatctcagcatcagaatgagaaagcctgagaagaaagaaccaaccacaagcacacaggaaggaaagcgcaggaggtgaaaatgctttcttggccagggtagtaagaattagaggttaatgcagggactgtaaaaccaccttttctgcttcaatatctaattcctgtgtagctttgttcattgcatttattaaacaaatgttgtataaccaatactaaatgtactactgagcttcgctgagttaagttatgaaactttcaaatccttcatcatgtcagttccaatgaggtggggatggagaagacaattgttgcttatgaaagaaagctttagctgtctctgttttgtaagctttaagcgcaacatttcttggttccaataaagcattttacaagatcttgcatgctactcttagatagaag

SEQ ID NO: 10657 - DNA, 2310 bp, Homo sapiens
  source 1..2310: mol_type = unassigned DNA
gattctgtgtgtgtcctcagatgctcagccacagacctttgagggagtaaagggggcagacccacccaccttgcctccaggctctttccttcctggtcctgttctatggtggggctcccttgccagacttcagactgagaagtcagatgaagtttcaagaaaaggaaattggtgggtgacagagatgggtggaggggctggggaaaggctgtttacttcctcctgtctagtcggtttggtccctttagggctccggatatctttggtgacttgtccactccagtgtggcatcatgtggcagctgctcctcccaactgctctgctacttctagtttcagctggcatgcggactgaagatctcccaaaggctgtggtgttcctggagcctcaatggtacagggtgctcgagaaggacagtgtgactctgaagtgccagggagcctactcccctgaggacaattccacacagtggtttcacaatgagagcctcatctcaagccaggcctcgagctacttcattgacgctgccacagtcgacgacagtggagagtacaggtgccagacaaacctctccaccctcagtgacccggtgcagctagaagtccatatcggctggctgttgctccaggcccctcggtgggtgttcaaggaggaagaccctattcacctgaggtgtcacagctggaagaacactgctctgcataaggtcacatatttacagaatggcaaaggcaggaagtattttcatcataattctgacttctacattccaaaagccacactcaaagacagcggctcctacttctgcagggggctttttgggagtaaaaatgtgtcttcagagactgtgaacatcaccatcactcaaggtttggcagtgtcaaccatctcatcattctttccacctgggtaccaagtctctttctgcttggtgatggtactcctttttgcagtggacacaggactatatttctctgtgaagacaaacattcgaagctcaacaagagactggaaggaccataaatttaaatggagaaaggaccctcaagacaaatgacccccatcccatgggggtaataagagcagtagcagcagcatctctgaacatttctctggatttgcaaccccatcatcctcaggcctctctacaagcagcaggaaacatagaactcagagccagatcccttatccaactctcgacttttccttggtctccagtggaagggaaaagcccatgatcttcaagcagggaagccccagtgagtagctgcattcctagaaattgaagtttcagagctacacaaacactttttctgtcccaaccgttccctcacagcaaagcaacaatacaggctagggatggtaatcctttaaacatacaaaaattgctcgtgttataaattacccagtttagaggggaaaaaaaaacaattattcctaaataaatggataagtagaattaatggttgaggcaggaccatacagagtgtgggaactgctggggatctagggaattcagtgggaccaatgaaagcatggctgagaaatagcaggtagtccaggatagtctaagggaggtgttcccatctgagcccagagataagggtgtcttcctagaacattagccgtagtggaattaacaggaaatcatgagggtgacgtagaattgagtcttccaggggactctatcagaactggaccatctccaagtatataacgatgagtcctcttaatgctaggagtagaaaatggtcctaggaaggggactgaggattgcggtggggggtggggtggaaaagaaagtacagaacaaaccctgtgtcactgtcccaagttgctaagtgaacagaactatctcagcatcagaatgagaaagcctgagaagaaagaaccaaccacaagcacacaggaaggaaagcgcaggaggtgaaaatgctttcttggccagggtagtaagaattagaggttaatgcagggactgtaaaaccaccttttctgcttcaatatctaattcctgtgtagctttgttcattgcatttattaaacaaatgttgtataaccaatactaaatgtactactgagcttcgctgagttaagttatgaaactttcaaatccttcatcatgtcagttccaatgaggtggggatggagaagacaattgttgcttatgaaagaaagctttagctgtctctgttttgtaagctttaagcgcaacatttcttggttccaataaagcattttacaagatcttgcatgctactcttagatagaagatgggaaaaccatggtaataaaatatgaatgataaaa

SEQ ID NO: 10658 - DNA, 1972 bp, Homo sapiens
  source 1..1972: mol_type = unassigned DNA
tccctttagggctccggatatctttggtgacttgtccactccagtgtggcatcatgtggcagctgctcctcccaactgctctgctacttctagtttcagctggcatgcggactgatctcccaaaggctgtggtgttcctggagcctcaatggtacagggtgctcgagaaggacagtgtgactctgaagtgccagggagcctactcccctgaggacaattccacacagtggtttcacaatgagagcctcatctcaagccaggcctcgagctacttcattgacgctgccacagtcgacgacagtggagagtacaggtgccagacaaacctctccaccctcagtgacccggtgcagctagaagtccatatcggctggctgttgctccaggcccctcggtgggtgttcaaggaggaagaccctattcacctgaggtgtcacagctggaagaacactgctctgcataaggtcacatatttacagaatggcaaaggcaggaagtattttcatcataattctgacttctacattccaaaagccacactcaaagacagcggctcctacttctgcagggggctttttgggagtaaaaatgtgtcttcagagactgtgaacatcaccatcactcaaggtttggcagtgtcaaccatctcatcattctttccacctgggtaccaagtctctttctgcttggtgatggtactcctttttgcagtggacacaggactatatttctctgtgaagacaaacattcgaagctcaacaagagactggaaggaccataaatttaaatggagaaaggaccctcaagacaaatgacccccatcccatgggggtaataagagcagtagcagcagcatctctgaacatttctctggatttgcaaccccatcatcctcaggcctctctacaagcagcaggaaacatagaactcagagccagatcccttatccaactctcgacttttccttggtctccagtggaagggaaaagcccatgatcttcaagcagggaagccccagtgagtagctgcattcctagaaattgaagtttcagagctacacaaacactttttctgtcccaaccgttccctcacagcaaagcaacaatacaggctagggatggtaatcctttaaacatacaaaaattgctcgtgttataaattacccagtttagaggggaaaaaaaaacaattattcctaaataaatggataagtagaattaatggttgaggcaggaccatacagagtgtgggaactgctggggatctagggaattcagtgggaccaatgaaagcatggctgagaaatagcaggtagtccaggatagtctaagggaggtgttcccatctgagcccagagataagggtgtcttcctagaacattagccgtagtggaattaacaggaaatcatgagggtgacgtagaattgagtcttccaggggactctatcagaactggaccatctccaagtatataacgatgagtcctcttaatgctaggagtagaaaatggtcctaggaaggggactgaggattgcggtggggggtggggtggaaaagaaagtacagaacaaaccctgtgtcactgtcccaagttgctaagtgaacagaactatctcagcatcagaatgagaaagcctgagaagaaagaaccaaccacaagcacacaggaaggaaagcgcaggaggtgaaaatgctttcttggccagggtagtaagaattagaggttaatgcagggactgtaaaaccaccttttctgcttcaatatctaattcctgtgtagctttgttcattgcatttattaaacaaatgttgtataaccaatactaaatgtactactgagcttcgctgagttaagttatgaaactttcaaatccttcatcatgtcagttccaatgaggtggggatggagaagacaattgttgcttatgaaagaaagctttagctgtctctgttttgtaagctttaagcgcaa

SEQ ID NO: 10659 - DNA, 2167 bp, Homo sapiens
  source 1..2167: mol_type = unassigned DNA
ggagccccggctcctaggctgacagaccagcccagatccagtggcccggaggggcctgagctaaatccgcaggacctgggtaacacgaggaagtcggtttggtccctttagggctccggatatctttggtgacttgtccactccagtgtggcatcatgtggcagctgctcctcccaactgctctgctacttctagtttcagctggcatgcggactgaagatctcccaaaggctgtggtgttcctggagcctcaatggtacagggtgctcgagaaggacagtgtgactctgaagtgccagggagcctactcccctgaggacaattccacacagtggtttcacaatgagagcctcatctcaagccaggcctcgagctacttcattgacgctgccacagtcgacgacagtggagagtacaggtgccagacaaacctctccaccctcagtgacccggtgcagctagaagtccatatcggctggctgttgctccaggcccctcggtgggtgttcaaggaggaagaccctattcacctgaggtgtcacagctggaagaacactgctctgcataaggtcacatatttacagaatggcaaaggcaggaagtattttcatcataattctgacttctacattccaaaagccacactcaaagacagcggctcctacttctgcagggggctttttgggagtaaaaatgtgtcttcagagactgtgaacatcaccatcactcaaggtttggcagtgtcaaccatctcatcattctttccacctgggtaccaagtctctttctgcttggtgatggtactcctttttgcagtggacacaggactatatttctctgtgaagacaaacattcgaagctcaacaagagactggaaggaccataaatttaaatggagaaaggaccctcaagacaaatgacccccatcccatgggggtaataagagcagtagcagcagcatctctgaacatttctctggatttgcaaccccatcatcctcaggcctctctacaagcagcaggaaacatagaactcagagccagatcccttatccaactctcgacttttccttggtctccagtggaagggaaaagcccatgatcttcaagcagggaagccccagtgagtagctgcattcctagaaattgaagtttcagagctacacaaacactttttctgtcccaaccgttccctcacagcaaagcaacaatacaggctagggatggtaatcctttaaacatacaaaaattgctcgtgttataaattacccagtttagaggggaaaaaaaaacaattattcctaaataaatggataagtagaattaatggttgaggcaggaccatacagagtgtgggaactgctggggatctagggaattcagtgggaccaatgaaagcatggctgagaaatagcaggtagtccaggatagtctaagggaggtgttcccatctgagcccagagataagggtgtcttcctagaacattagccgtagtggaattaacaggaaatcatgagggtgacgtagaattgagtcttccaggggactctatcagaactggaccatctccaagtatataacgatgagtcctcttaatgctaggagtagaaaatggtcctaggaaggggactgaggattgcggtggggggtggggtggaaaagaaagtacagaacaaaccctgtgtcactgtcccaagttgctaagtgaacagaactatctcagcatcagaatgagaaagcctgagaagaaagaaccaaccacaagcacacaggaaggaaagcgcaggaggtgaaaatgctttcttggccagggtagtaagaattagaggttaatgcagggactgtaaaaccaccttttctgcttcaatatctaattcctgtgtagctttgttcattgcatttattaaacaaatgttgtataaccaatactaaatgtactactgagcttcgctgagttaagttatgaaactttcaaatccttcatcatgtcagttccaatgaggtggggatggagaagacaattgttgcttatgaaagaaagctttagctgtctctgttttgtaagctttaagcgcaacatttcttggttccaataaagcattttacaagatcttgcatgctactcttagatagaagatgggaaaaccatggtaataaaatatgaatg

SEQ ID NO: 10660 - DNA, 462 bp, Homo sapiens
  source 1..462: mol_type = unassigned DNA
attgtgagagtaaccaacgtggggttacgggggagaatctggagagaagagaagaggttaacaaccctcccacttcctggccacccccctccaccttttctgggctccggatatctttggtgacttgtccactccagtgtggcatcatgtggcagctgctcctcccaactgctctgctacttctagtttcagctggcatgcggactgatctcccaaaggctgtggtgttcctggagcctcaatggtacagggtgctcgagaaggacagtgtgactctgaagtgccagggagcctactcccctgaggacaattccacacagtggtttcacaatgagagcctcatctcaagccaggcctcgagctacttcattgacgctgccacagtcgacgacagtggagagtacaggtgccagacaaacctctccaccctcagtgacccggtgcagctagaagtccatatcg

SEQ ID NO: 10661 - DNA, 2301 bp, Homo sapiens
  source 1..2301: mol_type = unassigned DNA
gattctgtgtgtgtcctcagatgctcagccacagacctttgagggagtaaagggggcagacccacccaccttgcctccaggctctttccttcctggtcctgttctatggtggggctcccttgccagacttcagactgagaagtcagatgaagtttcaagaaaaggaaattggtgggtgacagagatgggtggaggggctggggaaaggctgtttacttcctcctgtctagtcggtttggtccctttagggctccggatatctttggtgacttgtccactccagtgtggcatcatgtggcagctgctcctcccaactgctctgctacttctagtttcagctggcatgcggactgatctcccaaaggctgtggtgttcctggagcctcaatggtacagggtgctcgagaaggacagtgtgactctgaagtgccagggagcctactcccctgaggacaattccacacagtggtttcacaatgagagcctcatctcaagccaggcctcgagctacttcattgacgctgccacagtcgacgacagtggagagtacaggtgccagacaaacctctccaccctcagtgacccggtgcagctagaagtccatatcggctggctgttgctccaggcccctcggtgggtgttcaaggaggaagaccctattcacctgaggtgtcacagctggaagaacactgctctgcataaggtcacatatttacagaatggcaaaggcaggaagtattttcatcataattctgacttctacattccaaaagccacactcaaagacagcggctcctacttctgcagggggctttttgggagtaaaaatgtgtcttcagagactgtgaacatcaccatcactcaaggtttggcagtgtcaaccatctcatcattctttccacctgggtaccaagtctctttctgcttggtgatggtactcctttttgcagtggacacaggactatatttctctgtgaagacaaacattcgaagctcaacaagagactggaaggaccataaatttaaatggagaaaggaccctcaagacaaatgacccccatcccatgggggtaataagagcagtagcagcagcatctctgaacatttctctggatttgcaaccccatcatcctcaggcctctctacaagcagcaggaaacatagaactcagagccagatcccttatccaactctcgacttttccttggtctccagtggaagggaaaagcccatgatcttcaagcagggaagccccagtgagtagctgcattcctagaaattgaagtttcagagctacacaaacactttttctgtcccaaccgttccctcacagcaaagcaacaatacaggctagggatggtaatcctttaaacatacaaaaattgctcgtgttataaattacccagtttagaggggaaaaaaaaacaattattcctaaataaatggataagtagaattaatggttgaggcaggaccatacagagtgtgggaactgctggggatctagggaattcagtgggaccaatgaaagcatggctgagaaatagcaggtagtccaggatagtctaagggaggtgttcccatctgagcccagagataagggtgtcttcctagaacattagccgtagtggaattaacaggaaatcatgagggtgacgtagaattgagtcttccaggggactctatcagaactggaccatctccaagtatataacgatgagtcctcttaatgctaggagtagaaaatggtcctaggaaggggactgaggattgcggtggggggtggggtggaaaagaaagtacagaacaaaccctgtgtcactgtcccaagttgctaagtgaacagaactatctcagcatcagaatgagaaagcctgagaagaaagaaccaaccacaagcacacaggaaggaaagcgcaggaggtgaaaatgctttcttggccagggtagtaagaattagaggttaatgcagggactgtaaaaccaccttttctgcttcaatatctaattcctgtgtagctttgttcattgcatttattaaacaaatgttgtataaccaatactaaatgtactactgagcttcgctgagttaagttatgaaactttcaaatccttcatcatgtcagttccaatgaggtggggatggagaagacaattgttgcttatgaaagaaagctttagctgtctctgttttgtaagctttaagcgcaacatttcttggttccaataaagcattttacaagatcttgcatgctactcttagatagaagatgggaaaaccatggtaataaaatatgaatg

SEQ ID NO: 10662 - DNA, 887 bp, Homo sapiens
  source 1..887: mol_type = unassigned DNA
tctttggtgacttgtccactccagtgtggcatcatgtggcagctgctcctcccaactgctctgctacttctagtttcagctggcatgcggactgaagatctcccaaaggctgtggtgttcctggagcctcaatggtacagggtgctcgagaaggacagtgtgactctgaagtgccagggagcctactcccctgaggacaattccacacagtggtttcacaatgagagcctcatctcaagccaggcctcgagctacttcattgacgctgccacagtcgacgacagtggagagtacaggtgccagacaaacctctccaccctcagtgacccggtgcagctagaagtccatatcggctggctgttgctccaggcccctcggtgggtgttcaaggaggaagaccctattcacctgaggtgtcacagctggaagaacactgctctgcataaggtcacatatttacagaatggcaaaggcaggaagtattttcatcataattctgacttctacattccaaaagccacactcaaagacagcggctcctacttctgcagggggctttttgggagtaaaaatgtgtcttcagagactgtgaacatcaccatcactcaaggtttggcagtgtcaaccatctcatcattctttccacctgggtaccaagtctctttctgcttggtgatggtactcctttttgcagtggacacaggactatatttctctgtgaagacaaacattcgaagctcaacaagagactggaaggaccataaatttaaatggagaaaggaccctcaagacaaatgacccccatcccatgggggtaataagagcagtagcagcagcatctctgaacatttctctggatttgcaaccccatcatcctcaggcctctc

SEQ ID NO: 10663 - DNA, 2289 bp, Homo sapiens
  source 1..2289: mol_type = unassigned DNA
agatgctcagccgcagacctttgggagagtaaagggggcacacccacccaccttgcctccaggctctttccttcctattcctgttctatggtggggctccattgcgagacttcagattgagaaatcagatgaagtttcaagaaaaggaaactggcaggtgacagagatgggtggagggactggggaaaggctgtttactccctcctgtctagtcggcttggtccctttagggctccggatatctttggtgacttgtccactccagtgtggcatcatgtggcagctgctcctcccaactgctctgctacttctagtttcagctggcatgcggactgaagatctcccaaaggctgtggtgttcctggagcctcaatggtacagcgtgcttgagaaggacagtgtgactctgaagtgccagggagcctactcccctgaggacaattccacacagtggtttcacaatgagaacctcatctcaagccaggcctcgagctacttcattgacgctgccacagtcaacgacagtggagagtacaggtgccagacaaacctctccaccctcagtgacccggtgcagctagaagtccatatcggctggctgttgctccaggcccctcggtgggtgttcaaggaggaagaccctattcacctgaggtgtcacagctggaagaacactgctctgcataaggtcacatatttacagaatggcaaagacaggaagtattttcatcataattctgacttccacattccaaaagccacactcaaagatagcggctcctacttctgcagggggcttgttgggagtaaaaatgtgtcttcagagactgtgaacatcaccatcactcaaggtttggcagtgtcaaccatctcatcattctctccacctgggtaccaagtctctttctgcttggtgatggtactcctttttgcagtggacacaggactatatttctctgtgaagacaaacatttgaagctcaacaagagactggaaggaccataaacttaaatggagaaaggaccctcaagacacatgacccccatcccatgggggtaataagagcagtggcagcagcatctctgaacatttctctggatttgcaaccccatcatcctcaggcctctctacaagcagcaggaaacatagaactcagagccagatcctttatccaactctcgatttttccttggtctccagtggaagggaaaagcccatgatcttcaagcagggaagccccagtgagtagctgcattcctagaaattgaagtttcagagctacacaaacactttttctgtcccaaccattccctcacagcaaagcaacaatacaggctagggatggtaatcctttaaacatacaaaaattgctcgtattataaattacccagtttagagggaaaaaaagaaaataattattcctaaacaaatggataagtagaattaatggttgaggcaggaccctacagagtgtgggaactgctggggatctagagaattcagtgggaccaatgaaagcatggctgagaaatagcagggtagtccaggatagtctaagggaggtgttcccatctgagcccagagataagggtgtcttcctagaacattagccgtagtggaattaacaggaaatcatgagggtgacgtagaattgagtcttccaggggactctatcagaactggaccatttccaagtatataacgatgagtcctctaatgctaggagtagaaaatggtcctaggaaggggactgaggattggggtgggggtggggtggaaaagaaagtacagaacaaaccctgtgtcactgtctcaagttaagctaagtgaacagaactatctcagcatcagaatgagaaagcctgagaagaaagaaccaaccagaagcacacaggaaggaaagcgcaggaggtgaaaatgctttcttggccggggtagtaagaattagaggttaatgcagggactgtaaaaccaccttttctgcttcaatgtctagttcctgtatagctttgttcattgcatttattaaacaaatgttgtataaccaatactaaatgtactactgagcttcactgagttacgctgtgaaactttcaaatccttcttcatgtcagttccaatgaggtggggatggagaagacaattgttgcttatgaaagaaagctttagctgtctctgttttgtaagctttcagtgcaacatttcttggttccaataaagcattttacaagatcttgcatgctactcttagatagaagatggcaaaaccatggtaataaaatatgaatg

SEQ ID NO: 10664 - DNA, 2143 bp, Homo sapiens
  source 1..2143: mol_type = unassigned DNA
aggctgacagaccagcccagatccagtggcccggaggggcctgagctaaatccgcaggacctgggtaacacgaggaagggctccggatatctttggtgacttgtccactccagtgtggcatcatgtggcagctgctcctcccaactgctctgctacttctagtttcagctggcatgcggactgaagatctcccaaaggctgtggtgttcctggagcctcaatggtacagcgtgcttgagaaggacagtgtgactctgaagtgccagggagcctactcccctgaggacaattccacacagtggtttcacaatgagaacctcatctcaagccaggcctcgagctacttcattgacgctgccacagtcaacgacagtggagagtacaggtgccagacaaacctctccaccctcagtgacccggtgcagctagaagtccatatcggctggctgttgctccaggcccctcggtgggtgttcaaggaggaagaccctattcacctgaggtgtcacagctggaagaacactgctctgcataaggtcacatatttacagaatggcaaagacaggaagtattttcatcataattctgacttccacattccaaaagccacactcaaagatagcggctcctacttctgcagggggcttgttgggagtaaaaatgtgtcttcagagactgtgaacatcaccatcactcaaggtttggcagtgtcaaccatctcatcattctctccacctgggtaccaagtctctttctgcttggtgatggtactcctttttgcagtggacacaggactatatttctctgtgaagacaaacatttgaagctcaacaagagactggaaggaccataaacttaaatggagaaaggaccctcaagacacatgacccccatcccatgggggtaataagagcagtggcagcagcatctctgaacatttctctggatttgcaaccccatcatcctcaggcctctctacaagcagcaggaaacatagaactcagagccagatcctttatccaactctcgatttttccttggtctccagtggaagggaaaagcccatgatcttcaagcagggaagccccagtgagtagctgcattcctagaaattgaagtttcagagctacacaaacactttttctgtcccaaccattccctcacagcaaagcaacaatacaggctagggatggtaatcctttaaacatacaaaaattgctcgtattataaattacccagtttagagggaaaaaaagaaaataattattcctaaacaaatggataagtagaattaatggttgaggcaggaccctacagagtgtgggaactgctggggatctagagaattcagtgggaccaatgaaagcatggctgagaaatagcagggtagtccaggatagtctaagggaggtgttcccatctgagcccagagataagggtgtcttcctagaacattagccgtagtggaattaacaggaaatcatgagggtgacgtagaattgagtcttccaggggactctatcagaactggaccatttccaagtatataacgatgagtcctctaatgctaggagtagaaaatggtcctaggaaggggactgaggattggggtgggggtggggtggaaaagaaagtacagaacaaaccctgtgtcactgtctcaagttaagctaagtgaacagaactatctcagcatcagaatgagaaagcctgagaagaaagaaccaaccagaagcacacaggaaggaaagcgcaggaggtgaaaatgctttcttggccggggtagtaagaattagaggttaatgcagggactgtaaaaccaccttttctgcttcaatgtctagttcctgtatagctttgttcattgcatttattaaacaaatgttgtataaccaatactaaatgtactactgagcttcactgagttacgctgtgaaactttcaaatccttcttcatgtcagttccaatgaggtggggatggagaagacaattgttgcttatgaaagaaagctttagctgtctctgttttgtaagctttcagtgcaacatttcttggttccaataaagcattttacaagatcttgcatgctactcttagatagaagatggcaaaaccatggtaataaaatatgaatgataaaa

SEQ ID NO: 10665 - DNA, 1893 bp, Homo sapiens
  source 1..1893: mol_type = unassigned DNA
gaaggatattaaagagcacctgcaggaattttttaaggggatgccgggggaagggcttgaaggaggaactaaggaggcttccagaagattttgattaacagcgagcgctagggaaggccacggggatacagaggggtaggaggaggatccagagacctccaagttgtggactccggaggcatcgagttcctttcccagttttgtcaagaattccctgagcggcagacaccctcaaagtaaaaaacgggaaccacagagaaggaaaaagaagaaccacaagcgttttgagaaacaaacaggctgggcctagggcctggggtgtgccctgcaactggggggtggggctggatgttcttggagtcagggagcagcagcctcccacaggatgtgagagaggaactggggtctccagtcacgggagccaggagccggccagggccgcaggcaggaagggagcgaggctgaagggaacgtcgtcctctcagcatgggggtcccgcggcctcagccctgggcgctggggctcctgctctttctccttcctgggagcctgggcgcagaaagccacctctccctcctgtaccaccttaccgcggtgtcctcgcctgccccggggactcctgccttctgggtgtccggctggctgggcccgcagcagtacctgagctacaatagcctgcggggcgaggcggagccctgtggagcttgggtctgggaaaaccaggtgtcctggtattgggagaaagagaccacagatctgaggatcaaggagaagctctttctggaagctttcaaagctttggggggaaaaggtccctacactctgcagggcctgctgggctgtgaactgggccctgacaacacctcggtgcccaccgccaagttcgccctgaacggcgaggagttcatgaatttcgacctcaagcagggcacctggggtggggactggcccgaggccctggctatcagtcagcggtggcagcagcaggacaaggcggccaacaaggagctcaccttcctgctattctcctgcccgcaccgcctgcgggagcacctggagaggggccgcggaaacctggagtggaaggagcccccctccatgcgcctgaaggcccgacccagcagccctggcttttccgtgcttacctgcagcgccttctccttctaccctccggagctgcaacttcggttcctgcggaatgggctggccgctggcaccggccagggtgacttcggccccaacagtgacggatccttccacgcctcgtcgtcactaacagtcaaaagtggcgatgagcaccactactgctgcattgtgcagcacgcggggctggcgcagcccctcagggtggagctggaatctccagccaagtcctccgtgctcgtggtgggaatcgtcatcggtgtcttgctactcacggcagcggctgtaggaggagctctgttgtggagaaggatgaggagtgggctgccagccccttggatctcccttcgtggagacgacaccggggtcctcctgcccaccccaggggaggcccaggatgctgatttgaaggatgtaaatgtgattccagccaccgcctgaccatccgccattccgactgctaaaagcgaatgtagtcaggcccctttcatgctgtgagacctcctggaacactggcatctctgagcctccagaaggggttctgggcctagttgtcctccctctggagccccgtcctgtggtctgcctcagtttcccctcctaatacatatggctgttttccacctcgataatataacacgagtttgggcccgaatcagtgtgttctcatcatttttcaggcaggggaggtaagggaataagtcgggggactgaatggcggctgggcctcggatctctcctacaggtaac

SEQ ID NO: 10666 - DNA, 1731 bp, Homo sapiens
  source 1..1731: mol_type = unassigned DNA
gtgccccctcccgccccaggtcgtcctctcagcatgggggtcccgcggcctcagccctgggcgctggggctcctgctctttctccttcctgggagcctgggcgcagaaagccacctctccctcctgtaccaccttaccgcggtgtcctcgcctgccccggggactcctgccttctgggtgtccggctggctgggcccgcagcagtacctgagctacaatagcctgcggggcgaggcggagccctgtggagcttgggtctgggaaaaccaggtgtcctggtattgggagaaagagaccacagatctgaggatcaaggagaagctctttctggaagctttcaaagctttggggggaaaaggtccctacactctgcagggcctgctgggctgtgaactgggccctgacaacacctcggtgcccaccgcctgcgggagcacctggagaggggccgcggaaacctggagtggaaggagcccccctccatgcgcctgaaggcccgacccagcagccctggcttttccgtgcttacctgcagcgccttctccttctaccctccggagctgcaacttcggttcctgcggaatgggctggccgctggcaccggccagggtgacttcggccccaacagtgacggatccttccacgcctcgtcgtcactaacagtcaaaagtggcgatgagcaccactactgctgcattgtgcagcacgcggggctggcgcagcccctcagggtggagctgggtgaggtcccgccaggtggtgatgctcctggtttcccgttgccttgtctcactgctgcgccggtccttcctgagtctgaccttcctccccactgctgccacctccttgaatctgactgccttgaacctcacgcctgtcagtgcccccaaaacctgatggcttgtccttcccaaggccaactgccttccgtctcctgctgcttctggcctcactgagtctgaagagctgttaactaccatggccagtcctccctgagtctgaccatcttccatcctgctgctgctgctgctgctgctgcgggtcttcctggaatctgaccattcgttgtctgctatgcccgtcctcaccaagactgactgcctgctgctttgctactgcccgggcccatgagactgacttcccactgctctgcctgcctctccccactgcccatcagacacttggtgctggaatctccgaggctgggagggactgggagcgccccagttctgtgtcctgactgggtggggtggaggggctgctccacatctcacagcgttctctggctgcagaatctccagccaagtcctccgtgctcgtggtgggaatcgtcatcggtgtcttgctactcacggcagcggctgtaggaggagctctgttgtggagaaggatgaggagtgggctgccagccccttggatctcccttcgtggagacgacaccggggtcctcctgcccaccccaggggaggcccaggatgctgatttgaaggatgtaaatgtgattccagccaccgcctgaccatccgccattccgactgctaaaagcgaatgtagtcaggcccctttcatgctgtgagacctcctggaacactggcatctctgagcctccagaaggggttctgggcctagttgtcctccctctggagccccgtcctgtggtctgcctcagtttcccctcctaatacatatggctgttttccacctcgataatataacacgagtttgggcccg

SEQ ID NO: 10667 - DNA, 1629 bp, Homo sapiens
  source 1..1629: mol_type = unassigned DNA
agcctatcaagtgtctgtaattaattaaccaactgagatccagttcaggggtgaaagttcttcaggtacgaggagggcattgttgtcagtctggaccgagcccgcagagcccctcctcggcgtcctggtcccggccgtgcccgcggtgtcccgggaggaaggggcgggccgggggtcgggaggagtcacgtgccccctcccgccccaggtcgtcctctcagcatgggggtcccgcggcctcagccctgggcgctggggctcctgctctttctccttcctgggagcctgggcgcagaaagccacctctccctcctgtaccaccttaccgcggtgtcctcgcctgccccggggactcctgccttctgggtgtccggctggctgggcccgcagcagtacctgagctacaatagcctgcggggcgaggcggagccctgtggagcttgggtctgggaaaaccaggtgtcctggtattgggagaaagagaccacagatctgaggatcaaggagaagctctttctggaagctttcaaagctttggggggaaaaggtccctacactctgcagggcctgctgggctgtgaactgggccctgacaacacctcggtgcccaccgccaagttcgccctgaacggcgaggagttcatgaatttcgacctcaagcagggcacctggggtggggactggcccgaggccctggctatcagtcagcggtggcagcagcaggacaaggcggccaacaaggagctcaccttcctgctattctcctgcccgcaccgcctgcgggagcacctggagaggggccgcggaaacctggagtggaaggagcccccctccatgcgcctgaaggcccgacccagcagccctggcttttccgtgcttacctgcagcgccttctccttctaccctccggagctgcaacttcggttcctgcggaatgggctggccgctggcaccggccagggtgacttcggccccaacagtgacggatccttccacgcctcgtcgtcactaacagtcaaaagtggcgatgagcaccactactgctgcattgtgcagcacgcggggctggcgcagcccctcagggtggagctggaatctccagccaagtcctccgtgctcgtggtgggaatcgtcatcggtgtcttgctactcacggcagcggctgtaggaggagctctgttgtggagaaggatgaggagtgggctgccagccccttggatctcccttcgtggagacgacaccggggtcctcctgcccaccccaggggaggcccaggatgctgatttgaaggatgtaaatgtgattccagccaccgcctgaccatccgccattccgactgctaaaagcgaatgtagtcaggcccctttcatgctgtgagacctcctggaacactggcatctctgagcctccagaaggggttctgggcctagttgtcctccctctggagccccgtcctgtggtctgcctcagtttcccctcctaatacatatggctgttttccacctcgataatataacacgagtttgggcccgaatcagtgtgttctcatcatttttcaggcaggggaggtaagggaataagtcgggggactgaatggcggctgggcctcggatctctcctacaggtaac

SEQ ID NO: 10668 - DNA, 1351 bp, Homo sapiens
  source 1..1351: mol_type = unassigned DNA
ctcagcatgggggtcccgcggcctcagccctgggcgctggggctcctgctctttctccttcctgggagcctgggcgcagaaagccacctctccctcctgtaccaccttaccgcggtgtcctcgcctgccccggggactcctgccttctgggtgtccggctggctgggcccgcagcagtacctgagctacaatagcctgcggggcgaggcggagccctgtggagcttgggtctgggaaaaccaggtgtcctggtattgggagaaagagaccacagatctgaggatcaaggagaagctctttctggaagctttcaaagctttggggggaaaaggtccctacactctgcagggcctgctgggctgtgaactgggccctgacaacacctcggtgcccaccgccaagttcgccctgaacggcgaggagttcatgaatttcgacctcaagcagggcacctggggtggggactggcccgaggccctggctatcagtcagcggtggcagcagcaggacaaggcggccaacaaggagctcaccttcctgctattctcctgcccgcaccgcctgcgggagcacctggagaggggccgcggaaacctggagtggaagggctgctggacaaagatagataccagctggggatgtgcacagatattcattccaagtgccacaaaggagaagttgagactcaaccagagcccccctccatgcgcctgaaggcccgacccagcagccctggcttttccgtgcttacctgcagcgccttctccttctaccctccggagctgcaacttcggttcctgcggaatgggctggccgctggcaccggccagggtgacttcggccccaacagtgacggatccttccacgcctcgtcgtcactaacagtcaaaagtggcgatgagcaccactactgctgcattgtgcagcacgcggggctggcgcagcccctcagggtggagctgggtgaggtcccgccaggtggtgatgctcctggtttcccgttgccttgtctcactgctgcgccggtccttcctgagtctgaccttcctccccactgctgccacctccttgaatctgactgccttgaacctcacgcctgtcagtgcccccaaaacctgatggcttgtccttcccaaggccaactgccttccgtctcctgctgcttctggcctcactgagtctgaagagctgttaactaccatggccagtcctccctgagtctgaccatcttccatcctgctgctgctgctgctgctgctgcgggtcttcctggaatctgaccattcgttgtctgctatgcccgtcctcaccaagactgactgcctgctgctttgctactgcccgggcccat

SEQ ID NO: 10669 - DNA, 2605 bp, Homo sapiens
  source 1..2605: mol_type = unassigned DNA
aaatggcaggggaattcctctcctgaattttgaattttccctgccctcctgcccaagttgttgcatcacttgtccgggagatgcctgaatgggctggtaagctggggcaccctaaatagtctgagacccctgaaggggacacaagaggaggaaggatatggatcagtgttttcttttttgaagctactgttaccactcctggaaaagttcttcaggaataagtgacagtaagaatgacaagggattaggactggcttcctcttataaataataaaatccaaagagaagtgacttgaggtgagtggcagagctacgccttgcaccccgaccttccgttgctagctccagctgctttccaaaataccaccttgacttctcagtctccaggtttaaaggagagcaactagaagtcgtccaaacacctgcatctcataaggagaagaaaagtccacctggatcttgtttctggactgagatggatggagaggccacagtgaagcctggagaacaaaaggaagtggtgaggagaggaagagaagtggactactccaggctcattgctggcactttaccacaatctcacgtcaccagcaggagggcgggatggaaaatgcccctcttcctcatactgtgcctgctacaaggttcttctttcgcccttccacaaaaaagaccccatccgagatggctgtgggagggctctctcccctccaggacccatctccgggccatgggaacactcaggccttcctcgcccctctgctggcgggaggagagctcctttgcagctccaaattcattgaagggctcaaggctggtgtcaggggagcctggaggagctgtcaccatccagtgccattatgccccctcatctgtcaacaggcaccagaggaagtactggtgccgtctggggcccccaagatggatctgccagaccattgtgtccaccaaccagtatactcaccatcgctatcgtgaccgtgtggccctcacagactttccacagagaggcttgtttgtggtgaggctgtcccaactgtccccggatgacatcggatgctacctctgcggcattggaagtgaaaacaacatgctgttcttaagcatgaatctgaccatctctgcaggtcccgccagcaccctccccacagccactccagctgctggggagctcaccatgagatcctatggaacagcgtctccagtggccaacagatggaccccaggaaccacccagaccttaggacaggggacagcatgggacacagttgcttccactccaggaaccagcaagactacagcttcagctgagggaagacgaaccccaggagcaaccaggccagcagctccagggacaggcagctgggcagagggttctgtcaaagcacctgctccgattccagagagtccaccttcaaagagcagaagcatgtccaatacaacagaaggtgtttgggagggcaccagaagctcggtgacaaacagggctagagccagcaaggacaggagggagatgacaactaccaaggctgataggccaagggaggacatagagggggtcaggatagctcttgatgcagccaaaaaggtcctaggaaccattgggccaccagctctggtctcagaaactttggcctgggaaatcctcccacaagcaacgccagtttctaagcaacaatctcagggttccattggagaaacaactccagctgcaggcatgtggaccttgggaactccagctgcagatgtgtggatcttgggaactccagctgcagatgtgtggaccagcatggaggcagcatctggggaaggaagcgctgcaggggacctagatgctgccactggagacagaggtccccaagcaacactgagccagaccccggcagtaggaccctggggaccccctggcaaggagtcctccgtgaagcgtacttttccagaagatgaaagcagctctcggaccctggctcctgtctctaccatgctggccctgtttatgcttatggctctggttctattgcaaaggaagctctggagaaggaggacctctcaggaggcagaaagggtcaccttaattcagatgacacattttctggaagtgaacccccaagcagaccagctgccccatgtggaaagaaagatgctccaggatgactctcttcctgctggggccagcctgactgccccagagagaaatccaggaccctgagggacagagagatgaactgctcagttaccatgggagaaggaccaagatcaaaggccttcaggaccccagcctctttccatcatccttcctccacctgtgggaagagaagctgatgcagccggtgctccacccatggaagaaaggctggctgtccttgggcccaagaaagtcaagcattatccacgtccaaaggtgacaagatgactcaaaggagacttcaagaacagtgtatgaaacactggaagaggtcacctaggaaaagcatgaaatttccattcctgaatgtttgaaaatagaagaggcttccaatcagtgtggaaagtgacaaatcccctatcaacactcccagcccttgctgggggctccttttctgactactgttagcactcagcctcc

SEQ ID NO: 10670 - DNA, 2108 bp, Homo sapiens
  source 1..2108: mol_type = unassigned DNA
agctggagggcaccagctgccagccaaatggcaggggaattcctctcctgaattttgaattttccctgccctcctgcccaagttgttgcatcacttgtccgggagatgcctgaatgggctggtaagctggggcaccctaaatagtctgagacccctgaaggggacacaagaggaggaaggatatggatcagtgttttcttttttgaagctactgttaccactcctggaaaagttcttcaggaataagtgacagtaagaatgacaagggattaggactggcttcctcttataaataataaaatccaaagagaagtgacttgaggtgagtggcagagctacgccttgcaccccgaccttccgttgctagctccagctgctttccaaaataccaccttgacttctcagtctccaggtttaaaggagagcaactagaagtcgtccaaacacctgcatctcataaggagaagaaaagtccacctggatcttgtttctggactgagatggatggagaggccacagtgaagcctggagaacaaaaggtgcctttgtggacacatggatggccccctgatgacccatctccttcctttgctgcaggttcttctttcgcccttccacaaaaaagaccccatccgagatggctgtgggagggctctctcccctccaggacccatctccgggccatgggaacactcaggccttcctcgcccctctgctggcgggaggagagctcctttgcagctccaaattcattgaagggctcaaggctggtgtcaggggagcctggaggagctgtcaccatccagtgccattatgccccctcatctgtcaacaggcaccagaggaagtactggtgccgtctggggcccccaagatggatctgccagaccattgtgtccaccaaccagtatactcaccatcgctatcgtgaccgtgtggccctcacagactttccacagagaggcttgtttgtggtgaggctgtcccaactgtccccggatgacatcggatgctacctctgcggcattggaagtgaaaacaacatgctgttcttaagcatgaatctgaccatctctgcaggtcccgccagcaccctccccacagccactccagctgctggggagctcaccatgagatcctatggaacagcgtctccagtggccaacagatggaccccaggaaccacccagaccttaggacaggggacagcatgggacacagttgcttccactccaggaaccagcaagactacagcttcagctgagggaagacgaaccccaggagcaaccaggccagcagctccagggacaggcagctgggcagagggttctgtcaaagcacctgctccgattccagagagtccaccttcaaagagcagaagcatgtccaatacaacagaaggtgtttgggagggcaccagaagctcggtgacaaacagggctagagccagcaaggacaggagggagatgacaactaccaaggctgataggccaagggaggacatagagggggtcaggatagctcttgatgcagccaaaaaggtcctaggaaccattgggccaccagctctggtctcagaaactttggcctgggaaatcctcccacaagcaacgccagtttctaagcaacaatctcagggttccattggagaaacaactccagctgcaggcatgtggaccttgggaactccagctgcagatgtgtggatcaccagcatggaggcagcatctggggaaggaagcgctgcaggggacctagatgctgccactggagacagaggtccccaagcaacactgagccagaccccggcagtaggaccctggggaccccctggcaaggagtcctccgtgaagcgagcaacatgcccaggtttaagtactcttaaagaaatcaaagtcagtgctgtccttacccagaaccctcacagtctgctctgtgtctctgcagctcaggaggcagaaagggtcaccttaattcagatgacacattttctggaagtgaacccccaagcagaccagctgccccatgtggaaagaaagatgctccaggatgactctcttcctgctggggccagcctgactgccccagagagaaatccaggaccctga

SEQ ID NO: 10671 - DNA, 1898 bp, Homo sapiens
  source 1..1898: mol_type = unassigned DNA
agctggagggcaccagctgccagccaaatggcaggggaattcctctcctgaattttgaattttccctgccctcctgcccaagttgttgcatcacttgtccgggagatgcctgaatgggctggtaagctggggcaccctaaatagtctgagacccctgaaggggacacaagaggaggaaggatatggatcagtgttttcttttttgaagctactgttaccactcctggaaaagttcttcaggaataagtgacagtaagaatgacaagggattaggactggcttcctcttataaataataaaatccaaagagaagtgacttgagtctccaggtttaaaggagagcaactagaagtcgtccaaacacctgcatctcataaggagaagaaaagtccacctggatcttgtttctggactgagatggatggagaggccacagtgaagcctggagaacaaaaggaagtggtgaggagaggaagagaagtggactactccaggctcattgctggcactttaccacaatctcacgtcaccagcaggagggcgggatggaaaatgcccctcttcctcatactgtgcctgctacaaggttcttctttcgcccttccacaaaaaagaccccatccgagatggctgtgggagggctctctcccctccaggacccatctccgggccatgggaacactcaggccttcctcgcccctctgctggcgggaggagagctcctttgcagctccaaattcattgaagggctcaaggctggtgtcaggggagcctggaggagctgtcaccatccagtgccattatgccccctcatctgtcaacaggcaccagaggaagtactggtgccgtctggggcccccaagatggatctgccagaccattgtgtccaccaaccagtatactcaccatcgctatcgtgaccgtgtggccctcacagactttccacagagaggcttgtttgtggtgaggctgtcccaactgtccccggatgacatcggatgctacctctgcggcattggaagtgaaaacaacatgctgttcttaagcatgaatctgaccatctctgcagtacttttccagaagatgaaagcagctctcggaccctggctcctgtctctaccatgctggccctgtttatgcttatggctctggttctattgcaaaggaagctctggagaaggaggacctctcaggaggcagaaagggtcaccttaattcagatgacacattttctggaagtgaacccccaagcagaccagctgccccatgtggaaagaaagatgctccaggatgactctcttcctgctggggccagcctgactgccccagagagaaatccaggaccctgagggacagagagatgaactgctcagttaccatgggagaaggaccaagatcaaaggccttcaggaccccagcctctttccatcatccttcctccacctgtgggaagagaagctgatgcagccggtgctccacccatggaagaaaggctggctgtccttgggcccaagaaagtcaagcattatccacgtccaaaggtgacaagatgactcaaaggagacttcaagaacagtgtatgaaacactggaagaggtcacctaggaaaagcatgaaatttccattcctgaatgtttgaaaatagaagaggcttccaatcagtgtggaaagtgacaaatcccctatcaacactcccagcccttgctgggggctccttttctgactactgttagcactcagcctcccattcacatgtattatatttaagtgtaccagccttgccttctcaagtagattctaagctcctttaaggcagtaattgcattttatctgtctcatgatgcccccagagaacttccaactcagtaggaccccaataaatacctgtgtctgattga

SEQ ID NO: 10672 - DNA, 1307 bp, Homo sapiens
  source 1..1307: mol_type = unassigned DNA
cctggatcttgtttctggactgagatggatggagaggccacagtgaagcctggagaacaaaaggaagtggtgaggagaggaagagaagtggactactccaggctcattgctggcactttaccacaatctcacgtcaccagcaggagggcgggatggaaaatgcccctcttcctcatactgtgcctgctacaaggttcttctttcgcccttccacaaaaaagaccccatccgagatggctgtgggagggctctctcccctccaggacccatctccgggccatgggaacactcaggccttcctcgcccctctgctggcgggaggagagctcctttgcagctccaaattcattgaagggctcaaggctggtgtcaggggagcctggaggagctgtcaccatccagtgccattatgccccctcatctgtcaacaggcaccagaggaagtactggtgccgtctggggcccccaagatggatctgccagaccattgtgtccaccaaccagtatactcaccatcgctatcgtgaccgtgtggccctcacagactttccacagagaggcttgtttgtggtgaggctgtcccaactgtccccggatgacatcggatgctacctctgcggcattggaagtgaaaacaacatgctgttcttaagcatgaatctgaccatctctgcagtacttttccagaagatgaaagcagctctcggaccctggctcctgtctctaccatgctggccctgtttatgcttatggctctggttctattgcaaaggaagctctggagaaggaggacctctcaggaggcagaaagggtcaccttaattcagatgacacattttctggaagtgaacccccaagcagaccagctgccccatgtggaaagaaagatgctccaggatgactctcttcctgctggggccagcctgactgccccagagagaaatccaggaccctgagggacagagagatgaactgctcagttaccatgggagaaggaccaagatcaaaggccttcaggaccccagcctctttccatcatccttcctccacctgtgggaagagaagctgatgcagccggtgctccacccatggaagaaaggctggctgtccttgggcccaagaaagtcaagcattatccacgtccaaaggtgacaagatgactcaaaggagacttcaagaacagtgtatgaaacactggaagaggtcacctaggaaaagcatgaaatttccattcctgaatgtttgaaaatagaagaggcttccaatcagtgtggaaagtgacaaatcccctatcaacactcccagcc

SEQ ID NO: 10673 - DNA, 2778 bp, Homo sapiens
  source 1..2778: mol_type = unassigned DNA
attctttttttgatgagaggcatctctaggtaccatccctgacctggtcctcatgctgccgaggctgttgctgttgatctgtgctccactctgtgaacctgccgagctgtttttgatagccagcccctcccatcccacagaggggagcccagtgaccctgacgtgtaagatgccctttctacagagttcagatgcccagttccagttctgctttttcagagacacccgggccttgggcccaggctggagcagctcccccaagctccagatcgctgccatgtggaaagaagacacagggtcatactggtgcgaggcacagacaatggcgtccaaagtcttgaggagcaggagatcccagataaatgtgcacagggtccctgtcgctgatgtgagcttggagactcagcccccaggaggacaggtgatggagggagacaggctggtcctcatctgctcagttgctatgggcacaggagacatcaccttcctttggtacaaaggggctgtaggtttaaaccttcagtcaaagacccagcgttcactgacagcagagtatgagattccttcagtgagggagagtgatgctgagcaatattactgtgtagctgaaaatggctatggtcccagccccagtgggctggtgagcatcactgtcagaatcccggtgtctcgcccaatcctcatgctcagggctcccagggcccaggctgcagtggaggatgtgctggagcttcactgtgaggccctgagaggctctcctccgatcctgtactggttttatcacgaggatatcaccctggggagcaggtcggccccctctggaggaggagcctccttcaacctttccctgactgaagaacattctggaaactactcctgtgaggccaacaatggcctgggggcccagcgcagtgaggcggtgacactcaacttcacaggaagacgttcagccagggatccactcaggagccttcccagccctctaccccaagagttcacctacctcaactcacctaccccagggcagctacagcctatatatgaaaatgaaccaagagaacaatcagtggctgtgcatggcagacaacagcattcctcagagcagaaggctcagaaaccctggggacacatatggaggacaaggtttccttagacatctattccaggctgaggaaagcaaacattacagatgtggactatgaagatgctatgtaaggttatggaagattctgctctttgaaaaccatccatgaccccaagcctcaggcctgatatgttcttcagagatcctggggcattagctttccagtatacctcttctggatgccattctccatggcactattccttcatctactgtgaagtgaagttggcgcagccctgaagaaactacctaggagaactaatagacacaggagtgacagggactttgttatcagaaccagattcctgccggctcctttgaaaacaggtcatattgtgctcttctgtttacaagaggaaacaagatggaataaaagaaattgggatcttgggttggagggacagtgaagcttagagcacatgaactcaaggttagtgactctgcaggacttcacagagagagctgtgcccatcattcagtccaagtgctttctctgcccagacagcacagaactccagccccgctacttacatggatcatcgagtttccacctaaaatatgattctatttattttgagtcactgttaccaaattagaactaaaacaaagttacataaaaagttattgtgactccacttaattttagtgacgtatttttgtatatataggccaacctataccacatccaaaattatgtatctattacagcccctagaagctttataaatacagtgtgtcttcttttattcacaaaatttttgaaatcgtggtaatatggtttgaaacctgtatcttaattattttttttttaaattgagacagggtctcactctgtcactcaatctggaatgcagtggcacaatcttgcctcactgcaacgcctgcctctcaggctcaagcaaacctctcacctcagcctgctgagtagctgggactacaggcacatgccaccaaacttggccattttttgtcttacgtagagacaagatttcaccgttttgcccaggctggtctcaaactcctgggctcaagcaatgtattgaattttaaaataaccaggcactcactcttatgaattaataaacatttggaggtatataaagtaaaaagttaaagtctttcctgtaagttaacacaaatgttaactattgttaaaaactttacaggtagctctctagatatttttctatttttgtatgtatacttatgcatacatgtaagtatataaacatttagaagtgtacctatctaacaaactattatgaaatactttcaaatctgtaaatagatctattatactattttaaaagtctctatagtagtgtgttatatagataaatcataacttttttctttttttattgtagtaaatatgcacaacataaaattgatcattttaaccatttttaagtgtacaattcagtggcattaagtactatcataatatattttaatccttctcatcactggtggacattaaggagactctcaaaaaattcatattataaaaacaaagttcaaacaaatgtctttgtactagcatattatggcactcctgctggattatctgaaggataaatttgtaaatctagtattgctagattatgcatattaaatattcttgttaaatagtc

SEQ ID NO: 10674 - DNA, 2596 bp, Homo sapiens
  source 1..2596: mol_type = unassigned DNA
ctcgactctgaggtgcattctttttttgatgagaggcatctctaggtaccatccctgacctggtcctcatgctgccgaggctgttgctgttgatctgtgctccactctgtgaacctgccgagctgtttttgatagccagcccctcccatcccacagaggggagcccagtgaccctgacgtgtaagatgccctttctacagagttcagatgcccagttccagttctgctttttcagagacacccgggccttgggcccaggctggagcagctcccccaagctccagatcgctgccatgtggaaagaagacacagggtcatactggtgcgaggcacagacaatggcgtccaaagtcttgaggagcaggagatcccagataaatgtgcacagggtccctgtcgctgatgtgagcttggagactcagcccccaggaggacaggtgatggagggagacaggctggtcctcatctgctcagttgctatgggcacaggagacatcaccttcctttggtacaaaggggctgtaggtttaaaccttcagtcaaagacccagcgttcactgacagcagagtatgagattccttcagtgagggagagtgatgctgagcaatattactgtgtagctgaaaatggctatggtcccagccccagtgggctggtgagcatcactgtcagaatcccggtgtctcgcccaatcctcatgctcagggctcccagggcccaggctgcagtggaggatgtgctggagcttcactgtgaggccctgagaggctctcctccgatcctgtactggttttatcacgaggatatcaccctggggagcaggtcggccccctctggaggaggagcctccttcaacctttccctgactgaagaacattctggaaactactcctgtgaggccaacaatggcctgggggcccagcgcagtgaggcggtgacactcaacttcacagtgcctactggggccagaagcaatcatcttacctcaggagtcattgaggggctgctcagcacccttggtccagccaccgtggccttattattttgctacggcctcaaaagaaaaataggaagacgttcagccagggatccactcaggagccttcccagccctctaccccaagagttcacctacctcaactcacctaccccagggcagctacagcctatatatgaaaatgtgaatgttgtaagtggggatgaggtttattcactggcgtactataaccagccggagcaggaatcagtagcagcagaaaccctggggacacatatggaggacaaggtttccttagacatctattccaggctgaggaaagcaaacattacagatgtggactatgaagatgctatgtaaggttatggaagattctgctctttgaaaaccatccatgaccccaagcctcaggcctgatatgttcttcagagatcctggggcattagctttccagtatacctcttctggatgccattctccatggcactattccttcatctactgtgaagtgaagttggcgcagccctgaagaaactacctaggagaactaatagacacaggagtgacagggactttgttatcagaaccagattcctgccggctcctttgaaaacaggtcatattgtgctcttctgtttacaagaggaaacaagatggaataaaagaaattgggatcttgggttggagggacagtgaagcttagagcacatgaactcaaggttagtgactctgcaggacttcacagagagagctgtgcccatcattcagtccaagtgctttctctgcccagacagcacagaactccagccccgctacttacatggatcatcgagtttccacctaaaatatgattctatttattttgagtcactgttaccaaattagaactaaaacaaagttacataaaaagttattgtgactccacttaattttagtgacgtatttttgtatatataggccaacctataccacatccaaaattatgtatctattacagcccctagaagctttataaatacagtgtgtcttcttttattcacaaaatttttgaaatcgtggtaatatggtttgaaacctgtatcttaattattttttttttaaattgagacagggtctcactctgtcactcaatctggaatgcagtggcacaatcttgcctcactgcaacgcctgcctctcaggctcaagcaaacctctcacctcagcctgctgagtagctgggactacaggcacatgccaccaaacttggccattttttgtcttacgtagagacaagatttcaccgttttgcccaggctggtctcaaactcctgggctcaagcaatgtattgaattttaaaataaccaggcactcactcttatgaattaataaacatttggaggtatataaagtaaaaagttaaagtctttcctgtaagttaacacaaatgttaactattgttaaaaactttacaggtagctctctagatatttttctatttttgtatgtatacttatgcatacatgtaagtatataaacatttagaagtgtacctatctaacaaactattatgaaatactttcaaatctgtaaatagatctattatactattttaaaa

SEQ ID NO: 10675 - DNA, 1554 bp, Homo sapiens
  source 1..1554: mol_type = unassigned DNA
gtaccatccctgacctggtcctcatgctgccgaggctgttgctgttgatctgtgctccactctgtgaacctgccgagctgtttttgatagccagcccctcccatcccacagaggggagcccagtgaccctgacgtgtaagatgccctttctacagagttcagatgcccagttccagttctgctttttcagagacacccgggccttgggcccaggctggagcagctcccccaagctccagatcgctgccatgtggaaagaagacacagggtcatactggtgcgaggcacagacaatggcgtccaaagtcttgaggagcaggagatcccagataaatgtgcacagggtccctgtcgctgatgtgagcttggagactcagcccccaggaggacaggtgatggagggagacaggctggtcctcatctgctcagttgctatgggcacaggagacatcaccttcctttggtacaaaggggctgtaggtttaaaccttcagtcaaagacccagcgttcactgacagcagagtatgagattccttcagtgagggagagtgatgctgagcaatattactgtgtagctgaaaatggctatggtcccagccccagtgggctggtgagcatcactgtcagaatcccggtgtctcgcccaatcctcatgctcagggctcccagggcccaggctgcagtggaggatgtgctggagcttcactgtgaggccctgagaggctctcctccgatcctgtactggttttatcacgaggatatcaccctggggagcaggtcggccccctctggaggaggagcctccttcaacctttccctgactgaagaacattctggaaactactcctgtgaggccaacaatggcctgggggcccagcgcagtgaggcggtgacactcaacttcacagtgcctactggggccagaagcaatcatcttacctcaggagtcattgaggggctgctcagcacccttggtccagccaccgtggccttattattttgctacggcctcaaaagaaaaataggaagacgttcagccagggatccactcaggagccttcccagccctctaccccaagagttcacctacctcaactcacctaccccagggcagctacagcctatatatgaaaatgtgaatgttgtaagtggggatgaggtttattcactggcgtactataaccagccggagcaggaatcagtagcagaaaccctggggacacatatggaggacaaggtttccttagacatctattccaggctgaggaaagcaaacattacagatgtggactatgaagatgctatgtaaggttatggaagattctgctctttgaaaaccatccatgaccccaagcctcaggcctgatatgttcttcagagatcctggggcattagctttccagtatacctcttctggatgccattctccatggcactattccttcatctactgtgaagtgaagttggcgcagccctgaagaaactacctaggagaactaatagacacaggagtgacagggactttgttatcagaaccagattcctgccggctc

SEQ ID NO: 10676 - DNA, 3118 bp, Homo sapiens
  source 1..3118: mol_type = unassigned DNA
cgcgccgcagccgcggagggaggggcggggcgggctccggtgtcagcgaccaagccgcaggtggcggcgagcgcggggctcggcccgagctcaggagactggcaatgactctgtagctcaaacttgcctctctcttcagacaggcactggacggggcctgcaggggtctccacagagaccatcaggatgtcgtattttggggagcatttttggggcgagaaaaatcatggctttgaggtcctgtaccacagcgtgaagcaggggcccatctccaccaaggagctggcggacttcatccgggagagggccaccatcgaggagacctactcgaaggcgatggcgaaactctccaagctggccagcaacgggacccccatggggaccttcgccccgctctgggaggtcttccgcgtctcctcggacaagctggcgctgtgccacctggaactgacacggaagttacaggatctcatcaaggacgttctccgctacggcgaggaacagctcaagacccacaagaagtgcaaggaggaagtggtgagcaccttggatgctgtgcaggtactctcgggcgtcagccagctcctgcccaagtcccgcgagaactacctgaaccgttgcatggaccaggagcggctgcggagggagagtaccagccagaaggagatggacaaggcggagactaaaaccaagaaggcggcagagagcctgcggcgctcagtggaaaaatacaactcagcccgagctgactttgagcagaagatgctggactcagccctgcgcttccaagccatggaggagacacacctgaggcacatgaaggcactgctgggctcatatgctcactcggtggaggacacgcacgtgcagattgggcaggtgcatgaggaatttaagcagaacatcgagaacgtcagcgtggagatgctactcaggaagtttgcagagagtaagggcacaggccgggagaagcctggacctctggacttcgaggcatacagtgcggctgccctgcaggaagcgatgaaacgtttgcggggagccaaggcctttcgccttccaggactaagccggcgggagcgggagccagagccacctgcagctgtagatttcctggagcccgattcagggacatgtccagaggtggatgaagaaggtttcactgtccggcctgatgtgacccagaacagcacggccgagccctcccgtttctcgtccagcgactccgacttcgacgatgaagagccccgcaagttctatgtgcacatcaagcctgccccggcccgggctccagcctgcagccccgaggcagcagcggcacagctcagggccaccgcgggcagcctcatccttcctcctggcccagggggcaccatgaaacgccattcttcacgggacgctgctgggaaaccccagagacctcggtctgcccccagaaccagcagctgtgcagagagattgcagtcagaggagcaggtgtccaagaacctctttgggccgcccctggagtcagcctttgaccacgaagattttacaggctctagcagcctgggcttcacctccagcccctcccctttctcctcctcgtcgcccgaaaacgtggaggattccggcctggactctccgtcccacgcggcacctggcccctccccagattcctgggtcccccgcccaggcaccccgcagagcccgcccagctgtagggcgccacccccagaggccaggggtatccgggcaccgcctctgccagactcgccgcagcccctcgcctcgtctccaggcccctgggggctggaggccttggccggaggagacctgatgcctgcacctgctgaccccacagccagggagggcctggcagccccacccaggagacttcgctctaggaaggtgtcctgccctctcacacgtagcaatggggacctgtctcgttccctgagcccctccccactgggctcttcagccgccagcactgccttggaacggcccagcttcttatcccagacaggacacggagtctcccggggtccgagccctgtggtcctgggctcccaggatgccctgcccatagccacagccttcacagagtatgtccacgcctacttccgtggccacagccccagctgcctggctcgagtaactggggagctgaccatgaccttccctgctggcatcgtgcgtgtgttcagcgggaccccaccaccacctgtcctcagcttccggcttgtacacacaaccgctattgagcacttccagcccaacgccgatctgctgttcagtgacccctcccagagtgaccctgagaccaaagacttctggctcaacatggcagctctgaccgaagccctgcagcgccaggcagagcagaaccccactgcctcctactacaacgtggtgctgctgcgataccagttctcccgcccgggtccccagtctgtgcctctgcagctcagtgcccactggcagtgtggagccaccctcacccaggtctcagtggagtacggctaccggcccggtgccacggctgtgcccacaccactcacgaacgtccagatcctgctgcctgtgggggagcctgtgaccaacgtccgcttgcagccggctgccacctggaacctggaggagaagcggctcacttggaggcttccagatgtgtccgaggcaggcggttctggccgcctctctgccagctgggagccgctctcagggcccagcacacccagccccgtggctgcacagttcaccagcgaggggaccactctgtcgggcgtggacttggaactggtgggcagcggttaccgcatgtcgctggtgaagaggaggtttgccacagggatgtacctggtgagctgctgaacccgcaaatgctgctgccccagctctacactgcgccctggtgctggctgaccaccccctgccctcctgccggaccctggggcctcccaccccagcctccctgaggcccatactccacggagaggagccccatgcccagcctggctgagcccgagattcgctcctccccctcatgccaaccccacacaggtcccggccttttaatgttctttgaataaacactttattttctaataaaataaaaaaggaaaccttttcctgc

SEQ ID NO: 10677 - DNA, 3118 bp, Homo sapiens
  source 1..3118: mol_type = unassigned DNA
cgcgccgcagccgcggagggaggggcggggcgggctccggtgtcagcgaccaagccgcaggtggcggcgagcgcggggctcggcccgagctcaggaggtgagtaatgactctgtagctcaaacttgcctctctcttcagacaggcactggacggggcctgcaggggtctccacagagaccatcaggatgtcgtattttggggagcatttttggggcgagaaaaatcatggctttgaggtcctgtaccacagcgtgaagcaggggcccatctccaccaaggagctggcggacttcatccgggagagggccaccatcgaggagacctactcgaaggcgatggcgaaactctccaagctggccagcaacgggacccccatggggaccttcgccccgctctgggaggtcttccgcgtctcctcggacaagctggcgctgtgccacctggaactgacacggaagttacaggatctcatcaaggacgttctccgctacggcgaggaacagctcaagacccacaagaagtgcaaggaggaagtggtgagcaccttggatgctgtgcaggtactctcgggcgtcagccagctcctgcccaagtcccgcgagaactacctgaaccgttgcatggaccaggagcggctgcggagggagagtaccagccagaaggagatggacaaggcggagactaaaaccaagaaggcggcagagagcctgcggcgctcagtggaaaaatacaactcagcccgagctgactttgagcagaagatgctggactcagccctgcgcttccaagccatggaggagacacacctgaggcacatgaaggcactgctgggctcatatgctcactcggtggaggacacgcacgtgcagattgggcaggtgcatgaggaatttaagcagaacatcgagaacgtcagcgtggagatgctactcaggaagtttgcagagagtaagggcacaggccgggagaagcctggacctctggacttcgaggcatacagtgcggctgccctgcaggaagcgatgaaacgtttgcggggagccaaggcctttcgccttccaggactaagccggcgggagcgggagccagagccacctgcagctgtagatttcctggagcccgattcagggacatgtccagaggtggatgaagaaggtttcactgtccggcctgatgtgacccagaacagcacggccgagccctcccgtttctcgtccagcgactccgacttcgacgatgaagagccccgcaagttctatgtgcacatcaagcctgccccggcccgggctccagcctgcagccccgaggcagcagcggcacagctcagggccaccgcgggcagcctcatccttcctcctggcccagggggcaccatgaaacgccattcttcacgggacgctgctgggaaaccccagagacctcggtctgcccccagaaccagcagctgtgcagagagattgcagtcagaggagcaggtgtccaagaacctctttgggccgcccctggagtcagcctttgaccacgaagattttacaggctctagcagcctgggcttcacctccagcccctcccctttctcctcctcgtcgcccgaaaacgtggaggattccggcctggactctccgtcccacgcggcacctggcccctccccagattcctgggtcccccgcccaggcaccccgcagagcccgcccagctgtagggcgccacccccagaggccaggggtatccgggcaccgcctctgccagactcgccgcagcccctcgcctcgtctccaggcccctgggggctggaggccttggccggaggagacctgatgcctgcacctgctgaccccacagccagggagggcctggcagccccacccaggagacttcgctctaggaaggtgtcctgccctctcacacgtagcaatggggacctgtctcgttccctgagcccctccccactgggctcttcagccgccagcactgccttggaacggcccagcttcttatcccagacaggacacggagtctcccggggtccgagccctgtggtcctgggctcccaggatgccctgcccatagccacagccttcacagagtatgtccacgcctacttccgtggccacagccccagctgcctggctcgagtaactggggagctgaccatgaccttccctgctggcatcgtgcgtgtgttcagcgggaccccaccaccacctgtcctcagcttccggcttgtacacacaaccgctattgagcacttccagcccaacgccgatctgctgttcagtgacccctcccagagtgaccctgagaccaaagacttctggctcaacatggcagctctgaccgaagccctgcagcgccaggcagagcagaaccccactgcctcctactacaacgtggtgctgctgcgataccagttctcccgcccgggtccccagtctgtgcctctgcagctcagtgcccactggcagtgtggagccaccctcacccaggtctcagtggagtacggctaccggcccggtgccacggctgtgcccacaccactcacgaacgtccagatcctgctgcctgtgggggagcctgtgaccaacgtccgcttgcagccggctgccacctggaacctggaggagaagcggctcacttggaggcttccagatgtgtccgaggcaggcggttctggccgcctctctgccagctgggagccgctctcagggcccagcacacccagccccgtggctgcacagttcaccagcgaggggaccactctgtcgggcgtggacttggaactggtgggcagcggttaccgcatgtcgctggtgaagaggaggtttgccacagggatgtacctggtgagctgctgaacccgcaaatgctgctgccccagctctacactgcgccctggtgctggctgaccaccccctgccctcctgccggaccctggggcctcccaccccagcctccctgaggcccatactccacggagaggagccccatgcccagcctggctgagcccgagattcgctcctccccctcatgccaaccccacacaggtcccggccttttaatgttctttgaataaacactttattttctaataaaataaaaaaggaaaccttttcctgc

SEQ ID NO: 10678 - DNA, 3117 bp, Homo sapiens
  source 1..3117: mol_type = unassigned DNA
cagatggggaaactgaggcacggagctggacagtgactcagacaccaggagctgcctggagtggagctgagagctcaggtctgggctcagccagtccagagtgcaaatctactgtcccttcctagctgtgtgatcttgacaggcactggacggggcctgcaggggtctccacagagaccatcaggatgtcgtattttggggagcatttttggggcgagaaaaatcatggctttgaggtcctgtaccacagcgtgaagcaggggcccatctccaccaaggagctggcggacttcatccgggagagggccaccatcgaggagacctactcgaaggcgatggcgaaactctccaagctggccagcaacgggacccccatggggaccttcgccccgctctgggaggtcttccgcgtctcctcggacaagctggcgctgtgccacctggaactgacacggaagttacaggatctcatcaaggacgttctccgctacggcgaggaacagctcaagacccacaagaagtgcaaggaggaagtggtgagcaccttggatgctgtgcaggtactctcgggcgtcagccagctcctgcccaagtcccgcgagaactacctgaaccgttgcatggaccaggagcggctgcggagggagagtaccagccagaaggagatggacaaggcggagactaaaaccaagaaggcggcagagagcctgcggcgctcagtggaaaaatacaactcagcccgagctgactttgagcagaagatgctggactcagccctgcgcttccaagccatggaggagacacacctgaggcacatgaaggcactgctgggctcatatgctcactcggtggaggacacgcacgtgcagattgggcaggtgcatgaggaatttaagcagaacatcgagaacgtcagcgtggagatgctactcaggaagtttgcagagagtaagggcacaggccgggagaagcctggacctctggacttcgaggcatacagtgcggctgccctgcaggaagcgatgaaacgtttgcggggagccaaggcctttcgccttccaggactaagccggcgggagcgggagccagagccacctgcagctgtagatttcctggagcccgattcagggacatgtccagaggtggatgaagaaggtttcactgtccggcctgatgtgacccagaacagcacggccgagccctcccgtttctcgtccagcgactccgacttcgacgatgaagagccccgcaagttctatgtgcacatcaagcctgccccggcccgggctccagcctgcagccccgaggcagcagcggcacagctcagggccaccgcgggcagcctcatccttcctcctggcccagggggcaccatgaaacgccattcttcacgggacgctgctgggaaaccccagagacctcggtctgcccccagaaccagcagctgtgcagagagattgcagtcagaggagcaggtgtccaagaacctctttgggccgcccctggagtcagcctttgaccacgaagattttacaggctctagcagcctgggcttcacctccagcccctcccctttctcctcctcgtcgcccgaaaacgtggaggattccggcctggactctccgtcccacgcggcacctggcccctccccagattcctgggtcccccgcccaggcaccccgcagagcccgcccagctgtagggcgccacccccagaggccaggggtatccgggcaccgcctctgccagactcgccgcagcccctcgcctcgtctccaggcccctgggggctggaggccttggccggaggagacctgatgcctgcacctgctgaccccacagccagggagggcctggcagccccacccaggagacttcgctctaggaaggtgtcctgccctctcacacgtagcaatggggacctgtctcgttccctgagcccctccccactgggctcttcagccgccagcactgccttggaacggcccagcttcttatcccagacaggacacggagtctcccggggtccgagccctgtggtcctgggctcccaggatgccctgcccatagccacagccttcacagagtatgtccacgcctacttccgtggccacagccccagctgcctggctcgagtaactggggagctgaccatgaccttccctgctggcatcgtgcgtgtgttcagcgggaccccaccaccacctgtcctcagcttccggcttgtacacacaaccgctattgagcacttccagcccaacgccgatctgctgttcagtgacccctcccagagtgaccctgagaccaaagacttctggctcaacatggcagctctgaccgaagccctgcagcgccaggcagagcagaaccccactgcctcctactacaacgtggtgctgctgcgataccagttctcccgcccgggtccccagtctgtgcctctgcagctcagtgcccactggcagtgtggagccaccctcacccaggtctcagtggagtacggctaccggcccggtgccacggctgtgcccacaccactcacgaacgtccagatcctgctgcctgtgggggagcctgtgaccaacgtccgcttgcagccggctgccacctggaacctggaggagaagcggctcacttggaggcttccagatgtgtccgaggcaggcggttctggccgcctctctgccagctgggagccgctctcagggcccagcacacccagccccgtggctgcacagttcaccagcgaggggaccactctgtcgggcgtggacttggaactggtgggcagcggttaccgcatgtcgctggtgaagaggaggtttgccacagggatgtacctggtgagctgctgaacccgcaaatgctgctgccccagctctacactgcgccctggtgctggctgaccaccccctgccctcctgccggaccctggggcctcccaccccagcctccctgaggcccatactccacggagaggagccccatgcccagcctggctgagcccgagattcgctcctccccctcatgccaaccccacacaggtcccggccttttaatgttctttgaataaacactttattttctaataaaataaaaaaggaaaccttttcctgc

SEQ ID NO: 10679 - DNA, 3214 bp, Homo sapiens
  source 1..3214: mol_type = unassigned DNA
cgcgccgcagccgcggagggaggggcggggcgggctccggtgtcagcgaccaagccgcaggtggcggcgagcgcggggctcggcccgagctcaggagatggggaaactgaggcacggagctggacagtgactcagacaccaggagctgcctggagtggagctgagagctcaggtctgggctcagccagtccagagtgcaaatctactgtcccttcctagctgtgtgatcttggcaagcactggacggggcctgcaggggtctccacagagaccatcaggatgtcgtattttggggagcatttttggggcgagaaaaatcatggctttgaggtcctgtaccacagcgtgaagcaggggcccatctccaccaaggagctggcggacttcatccgggagagggccaccatcgaggagacctactcgaaggcgatggcgaaactctccaagctggccagcaacgggacccccatggggaccttcgccccgctctgggaggtcttccgcgtctcctcggacaagctggcgctgtgccacctggaactgacacggaagttacaggatctcatcaaggacgttctccgctacggcgaggaacagctcaagacccacaagaagtgcaaggaggaagtggtgagcaccttggatgctgtgcaggtactctcgggcgtcagccagctcctgcccaagtcccgcgagaactacctgaaccgttgcatggaccaggagcggctgcggagggagagtaccagccagaaggagatggacaaggcggagactaaaaccaagaaggcggcagagagcctgcggcgctcagtggaaaaatacaactcagcccgagctgactttgagcagaagatgctggactcagccctgcgcttccaagccatggaggagacacacctgaggcacatgaaggcactgctgggctcatatgctcactcggtggaggacacgcacgtgcagattgggcaggtgcatgaggaatttaagcagaacatcgagaacgtcagcgtggagatgctactcaggaagtttgcagagagtaagggcacaggccgggagaagcctggacctctggacttcgaggcatacagtgcggctgccctgcaggaagcgatgaaacgtttgcggggagccaaggcctttcgccttccaggactaagccggcgggagcgggagccagagccacctgcagctgtagatttcctggagcccgattcagggacatgtccagaggtggatgaagaaggtttcactgtccggcctgatgtgacccagaacagcacggccgagccctcccgtttctcgtccagcgactccgacttcgacgatgaagagccccgcaagttctatgtgcacatcaagcctgccccggcccgggctccagcctgcagccccgaggcagcagcggcacagctcagggccaccgcgggcagcctcatccttcctcctggcccagggggcaccatgaaacgccattcttcacgggacgctgctgggaaaccccagagacctcggtctgcccccagaaccagcagctgtgcagagagattgcagtcagaggagcaggtgtccaagaacctctttgggccgcccctggagtcagcctttgaccacgaagattttacaggctctagcagcctgggcttcacctccagcccctcccctttctcctcctcgtcgcccgaaaacgtggaggattccggcctggactctccgtcccacgcggcacctggcccctccccagattcctgggtcccccgcccaggcaccccgcagagcccgcccagctgtagggcgccacccccagaggccaggggtatccgggcaccgcctctgccagactcgccgcagcccctcgcctcgtctccaggcccctgggggctggaggccttggccggaggagacctgatgcctgcacctgctgaccccacagccagggagggcctggcagccccacccaggagacttcgctctaggaaggtgtcctgccctctcacacgtagcaatggggacctgtctcgttccctgagcccctccccactgggctcttcagccgccagcactgccttggaacggcccagcttcttatcccagacaggacacggagtctcccggggtccgagccctgtggtcctgggctcccaggatgccctgcccatagccacagccttcacagagtatgtccacgcctacttccgtggccacagccccagctgcctggctcgagtaactggggagctgaccatgaccttccctgctggcatcgtgcgtgtgttcagcgggaccccaccaccacctgtcctcagcttccggcttgtacacacaaccgctattgagcacttccagcccaacgccgatctgctgttcagtgacccctcccagagtgaccctgagaccaaagacttctggctcaacatggcagctctgaccgaagccctgcagcgccaggcagagcagaaccccactgcctcctactacaacgtggtgctgctgcgataccagttctcccgcccgggtccccagtctgtgcctctgcagctcagtgcccactggcagtgtggagccaccctcacccaggtctcagtggagtacggctaccggcccggtgccacggctgtgcccacaccactcacgaacgtccagatcctgctgcctgtgggggagcctgtgaccaacgtccgcttgcagccggctgccacctggaacctggaggagaagcggctcacttggaggcttccagatgtgtccgaggcaggcggttctggccgcctctctgccagctgggagccgctctcagggcccagcacacccagccccgtggctgcacagttcaccagcgaggggaccactctgtcgggcgtggacttggaactggtgggcagcggttaccgcatgtcgctggtgaagaggaggtttgccacagctgcacccccacagggatgtacctggtgagctgctgaacccgcaaatgctgctgccccagctctacactgcgccctggtgctggctgaccaccccctgccctcctgccggaccctggggcctcccaccccagcctccctgaggcccatactccacggagaggagccccatgcccagcctggctgagcccgagattcgctcctccccctcatgccaaccccacacaggtcccggccttttaatgttctttgaataaacactttattttctaataaaataaaaaaggaaa

SEQ ID NO: 10680 - DNA, 2907 bp, Homo sapiens
  source 1..2907: mol_type = unassigned DNA
agtggcctcgtggctgtctcctggcgcctgccccgtcagacaggggccccatcccactcgctaccctgtccgatggggaaactgaggcacggagctggacagtgactcagacaccagggcgagaaaaatcatggctttgaggtcctgtaccacagcgtgaagcaggggcccatctccaccaaggagctggcggacttcatccgggagagggccaccatcgaggagacctactcgaaggcgatggcgaaactctccaagctggccagcaacgggacccccatggggaccttcgccccgctctgggaggtcttccgcgtctcctcggacaagctggcgctgtgccacctggaactgacacggaagttacaggatctcatcaaggacgttctccgctacggcgaggaacagctcaagacccacaagaagtgcaaggaggaagtggtgagcaccttggatgctgtgcaggtactctcgggcgtcagccagctcctgcccaagtcccgcgagaactacctgaaccgttgcatggaccaggagcggctgcggagggagagtaccagccagaaggagatggacaaggcggagactaaaaccaagaaggcggcagagagcctgcggcgctcagtggaaaaatacaactcagcccgagctgactttgagcagaagatgctggactcagccctgcgcttccaagccatggaggagacacacctgaggcacatgaaggcactgctgggctcatatgctcactcggtggaggacacgcacgtgcagattgggcaggtgcatgaggaatttaagcagaacatcgagaacgtcagcgtggagatgctactcaggaagtttgcagagagtaagggcacaggccgggagaagcctggacctctggacttcgaggcatacagtgcggctgccctgcaggaagcgatgaaacgtttgcggggagccaaggcctttcgccttccaggactaagccggcgggagcgggagccagagccacctgcagctgtagatttcctggagcccgattcagggacatgtccagaggtggatgaagaaggtttcactgtccggcctgatgtgacccagaacagcacggccgagccctcccgtttctcgtccagcgactccgacttcgacgatgaagagccccgcaagttctatgtgcacatcaagcctgccccggcccgggctccagcctgcagccccgaggcagcagcggcacagctcagggccaccgcgggcagcctcatccttcctcctggcccagggggcaccatgaaacgccattcttcacgggacgctgctgggaaaccccagagacctcggtctgcccccagaaccagcagctgtgcagagagattgcagtcagaggagcaggtgtccaagaacctctttgggccgcccctggagtcagcctttgaccacgaagattttacaggctctagcagcctgggcttcacctccagcccctcccctttctcctcctcgtcgcccgaaaacgtggaggattccggcctggactctccgtcccacgcggcacctggcccctccccagattcctgggtcccccgcccaggcaccccgcagagcccgcccagctgtagggcgccacccccagaggccaggggtatccgggcaccgcctctgccagactcgccgcagcccctcgcctcgtctccaggcccctgggggctggaggccttggccggaggagacctgatgcctgcacctgctgaccccacagccagggagggcctggcagccccacccaggagacttcgctctaggaaggtgtcctgccctctcacacgtagcaatggggacctgtctcgttccctgagcccctccccactgggctcttcagccgccagcactgccttggaacggcccagcttcttatcccagacaggacacggagtctcccggggtccgagccctgtggtcctgggctcccaggatgccctgcccatagccacagccttcacagagtatgtccacgcctacttccgtggccacagccccagctgcctggctcgagtaactggggagctgaccatgaccttccctgctggcatcgtgcgtgtgttcagcgggaccccaccaccacctgtcctcagcttccggcttgtacacacaaccgctattgagcacttccagcccaacgccgatctgctgttcagtgacccctcccagagtgaccctgagaccaaagacttctggctcaacatggcagctctgaccgaagccctgcagcgccaggcagagcagaaccccactgcctcctactacaacgtggtgctgctgcgataccagttctcccgcccgggtccccagtctgtgcctctgcagctcagtgcccactggcagtgtggagccaccctcacccaggtctcagtggagtacggctaccggcccggtgccacggctgtgcccacaccactcacgaacgtccagatcctgctgcctgtgggggagcctgtgaccaacgtccgcttgcagccggctgccacctggaacctggaggagaagcggctcacttggaggcttccagatgtgtccgaggcaggcggttctggccgcctctctgccagctgggagccgctctcagggcccagcacacccagccccgtggctgcacagttcaccagcgaggggaccactctgtcgggcgtggacttggaactggtgggcagcggttaccgcatgtcgctggtgaagaggaggtttgccacagggatgtacctggtgagctgctgaacccgcaaatgctgctgccccagctctacactgcgccctggtgctggctgaccaccccctgccctcctgccggaccctggggcctcccaccccagcctccctgaggcccatactccacggagaggagccccatgcccagcctggctg

SEQ ID NO: 10681 - DNA, 3204 bp, Homo sapiens
  source 1..3204: mol_type = unassigned DNA
acacaagcctccaacttggtgctgacggaagtggcctcgtggctgtctcctggcgcctgccccgtcagacaggggccccatcccactcgctaccctgtccgatggggaaactgaggcacggagctggacagtgactcagacaccaggagctgcctggagtggagctgagagctcaggtctgggctcagccagtccagagtgcaaatctactgtcccttcctagctgtgtgatcttggcaagcactggacggggcctgcaggggtctccacagagaccatcaggatgtcgtattttggggagcatttttggggcgagaaaaatcatggctttgaggtcctgtaccacagcgtgaagcaggggcccatctccaccaaggagctggcggacttcatccgggagagggccaccatcgaggagacctactcgaaggcgatggcgaaactctccaagctggccagcaacgggacccccatggggaccttcgccccgctctgggaggtcttccgcgtctcctcggacaagctggcgctgtgccacctggaactgacacggaagttacaggatctcatcaaggacgttctccgctacggcgaggaacagctcaagacccacaagaagtgcaaggaggaagtggtgagcaccttggatgctgtgcaggtactctcgggcgtcagccagctcctgcccaagtcccgcgagaactacctgaaccgttgcatggaccaggagcggctgcggagggagagtaccagccagaaggagatggacaaggcggagactaaaaccaagaaggcggcagagagcctgcggcgctcagtggaaaaatacaactcagcccgagctgactttgagcagaagatgctggactcagccctgcgcttccaagccatggaggagacacacctgaggcacatgaaggcactgctgggctcatatgctcactcggtggaggacacgcacgtgcagattgggcaggtgcatgaggaatttaagcagaacatcgagaacgtcagcgtggagatgctactcaggaagtttgcagagagtaagggcacaggccgggagaagcctggacctctggacttcgaggcatacagtgcggctgccctgcaggaagcgatgaaacgtttgcggggagccaaggcctttcgccttccaggactaagccggcgggagcgggagccagagccacctgcagctgtagatttcctggagcccgattcagggacatgtccagaggtggatgaagaaggtttcactgtccggcctgatgtgacccagaacagcacggccgagccctcccgtttctcgtccagcgactccgacttcgacgatgaagagccccgcaagttctatgtgcacatcaagcctgccccggcccgggctccagcctgcagccccgaggcagcagcggcacagctcagggccaccgcgggcagcctcatccttcctcctggcccagggggcaccatgaaacgccattcttcacgggacgctgctgggaaaccccagagacctcggtctgcccccagaaccagcagctgtgcagagagattgcagtcagaggagcaggtgtccaagaacctctttgggccgcccctggagtcagcctttgaccacgaagattttacaggctctagcagcctgggcttcacctccagcccctcccctttctcctcctcgtcgcccgaaaacgtggaggattccggcctggactctccgtcccacgcggcacctggcccctccccagattcctgggtcccccgcccaggcaccccgcagagcccgcccagctgtagggcgccacccccagaggccaggggtatccgggcaccgcctctgccagactcgccgcagcccctcgcctcgtctccaggcccctgggggctggaggccttggccggaggagacctgatgcctgcacctgctgaccccacagccagggagggcctggcagccccacccaggagacttcgctctaggaaggtgtcctgccctctcacacgtagcaatggggacctgtctcgttccctgagcccctccccactgggctcttcagccgccagcactgccttggaacggcccagcttcttatcccagacaggacacggagtctcccggggtccgagccctgtggtcctgggctcccaggatgccctgcccatagccacagccttcacagagtatgtccacgcctacttccgtggccacagccccagctgcctggctcgagtaactggggagctgaccatgaccttccctgctggcatcgtgcgtgtgttcagcgggaccccaccaccacctgtcctcagcttccggcttgtacacacaaccgctattgagcacttccagcccaacgccgatctgctgttcagtgacccctcccagagtgaccctgagaccaaagacttctggctcaacatggcagctctgaccgaagccctgcagcgccaggcagagcagaaccccactgcctcctactacaacgtggtgctgctgcgataccagttctcccgcccgggtccccagtctgtgcctctgcagctcagtgcccactggcagtgtggagccaccctcacccaggtctcagtggagtacggctaccggcccggtgccacggctgtgcccacaccactcacgaacgtccagatcctgctgcctgtgggggagcctgtgaccaacgtccgcttgcagccggctgccacctggaacctggaggagaagcggctcacttggaggcttccagatgtgtccgaggcaggcggttctggccgcctctctgccagctgggagccgctctcagggcccagcacacccagccccgtggctgcacagttcaccagcgaggggaccactctgtcgggcgtggacttggaactggtgggcagcggttaccgcatgtcgctggtgaagaggaggtttgccacagggatgtacctggtgagctgctgaacccgcaaatgctgctgccccagctctacactgcgccctggtgctggctgaccaccccctgccctcctgccggaccctggggcctcccaccccagcctccctgaggcccatactccacggagaggagccccatgcccagcctggctgagcccgagattcgctcctccccctcatgccaaccccacacaggtcccggccttttaatgttctttgaataaacactttattttctaataaaataaaaaaggaaa

SEQ ID NO: 10682 - DNA, 3094 bp, Homo sapiens
  source 1..3094: mol_type = unassigned DNA
gggcgggctccggtgtcagcgaccaagccgcaggtggcggcgagcgcggggctcggcccgagctcaggagatggggaaactgaggcacggagctggacagtgactcagacaccagacaggcactggacggggcctgcaggggtctccacagagaccatcaggatgtcgtattttggggagcatttttggggcgagaaaaatcatggctttgaggtcctgtaccacagcgtgaagcaggggcccatctccaccaaggagctggcggacttcatccgggagagggccaccatcgaggagacctactcgaaggcgatggcgaaactctccaagctggccagcaacgggacccccatggggaccttcgccccgctctgggaggtcttccgcgtctcctcggacaagctggcgctgtgccacctggaactgacacggaagttacaggatctcatcaaggacgttctccgctacggcgaggaacagctcaagacccacaagaagtgcaaggaggaagtggtgagcaccttggatgctgtgcaggtactctcgggcgtcagccagctcctgcccaagtcccgcgagaactacctgaaccgttgcatggaccaggagcggctgcggagggagagtaccagccagaaggagatggacaaggcggagactaaaaccaagaaggcggcagagagcctgcggcgctcagtggaaaaatacaactcagcccgagctgactttgagcagaagatgctggactcagccctgcgcttccaagccatggaggagacacacctgaggcacatgaaggcactgctgggctcatatgctcactcggtggaggacacgcacgtgcagattgggcaggtgcatgaggaatttaagcagaacatcgagaacgtcagcgtggagatgctactcaggaagtttgcagagagtaagggcacaggccgggagaagcctggacctctggacttcgaggcatacagtgcggctgccctgcaggaagcgatgaaacgtttgcggggagccaaggcctttcgccttccaggactaagccggcgggagcgggagccagagccacctgcagctgtagatttcctggagcccgattcagggacatgtccagaggtggatgaagaaggtttcactgtccggcctgatgtgacccagaacagcacggccgagccctcccgtttctcgtccagcgactccgacttcgacgatgaagagccccgcaagttctatgtgcacatcaagcctgccccggcccgggctccagcctgcagccccgaggcagcagcggcacagctcagggccaccgcgggcagcctcatccttcctcctggcccagggggcaccatgaaacgccattcttcacgggacgctgctgggaaaccccagagacctcggtctgcccccagaaccagcagctgtgcagagagattgcagtcagaggagcaggtgtccaagaacctctttgggccgcccctggagtcagcctttgaccacgaagattttacaggctctagcagcctgggcttcacctccagcccctcccctttctcctcctcgtcgcccgaaaacgtggaggattccggcctggactctccgtcccacgcggcacctggcccctccccagattcctgggtcccccgcccaggcaccccgcagagcccgcccagctgtagggcgccacccccagaggccaggggtatccgggcaccgcctctgccagactcgccgcagcccctcgcctcgtctccaggcccctgggggctggaggccttggccggaggagacctgatgcctgcacctgctgaccccacagccagggagggcctggcagccccacccaggagacttcgctctaggaaggtgtcctgccctctcacacgtagcaatggggacctgtctcgttccctgagcccctccccactgggctcttcagccgccagcactgccttggaacggcccagcttcttatcccagacaggacacggagtctcccggggtccgagccctgtggtcctgggctcccaggatgccctgcccatagccacagccttcacagagtatgtccacgcctacttccgtggccacagccccagctgcctggctcgagtaactggggagctgaccatgaccttccctgctggcatcgtgcgtgtgttcagcgggaccccaccaccacctgtcctcagcttccggcttgtacacacaaccgctattgagcacttccagcccaacgccgatctgctgttcagtgacccctcccagagtgaccctgagaccaaagacttctggctcaacatggcagctctgaccgaagccctgcagcgccaggcagagcagaaccccactgcctcctactacaacgtggtgctgctgcgataccagttctcccgcccgggtccccagtctgtgcctctgcagctcagtgcccactggcagtgtggagccaccctcacccaggtctcagtggagtacggctaccggcccggtgccacggctgtgcccacaccactcacgaacgtccagatcctgctgcctgtgggggagcctgtgaccaacgtccgcttgcagccggctgccacctggaacctggaggagaagcggctcacttggaggcttccagatgtgtccgaggcaggcggttctggccgcctctctgccagctgggagccgctctcagggcccagcacacccagccccgtggctgcacagttcaccagcgaggggaccactctgtcgggcgtggacttggaactggtgggcagcggttaccgcatgtcgctggtgaagaggaggtttgccacagggatgtacctggtgagctgctgaacccgcaaatgctgctgccccagctctacactgcgccctggtgctggctgaccaccccctgccctcctgccggaccctggggcctcccaccccagcctccctgaggcccatactccacggagaggagccccatgcccagcctggctgagcccgagattcgctcctccccctcatgccaaccccacacaggtcccggccttttaatgttctttgaataaacactttattttctaataaaataaaaaaggaaaccttttcctgc

SEQ ID NO: 10683 - DNA, 1278 bp, Homo sapiens
  source 1..1278: mol_type = unassigned DNA
gcggaacccggcgcggcggcggcacgatggtcatggcgtatttcgtcgagaatttttggggggaaaaaaatagtggctttgatgtcctctaccataatatgaaacatggacagatatcaacaaaagaactagcagattttgtaagggaacgagctaccatagaggaggcatactccaggtcaatgacaaaactagcaaaatctgcaagcaattattcacaacttggaacatttgcaccagtatgggatgtattcaaaacatctacagagaaattagcaaattgtcacttggatcttgttagaaaattacaagaattaataaaggaagttcagaagtatggagaagaacaagtaaagtctcataaaaagactaaagaagaagttgcaggaactctggaagctgtccaaaccattcagagcataactcaggccctccagaaatccaaggaaaattacaatgccaagtgtgtagaacaggagcgtttgaaaaaggaaggagctacacaaagagaaatagaaaaggcagctgttaaatctaagaaagctacagatacctataaactctatgtggaaaaatatgcattagcaaaagctgatttcgaacagaaaatgacagaaacagctcagaaatttcaagatattgaagaaactcatctcattcacataaaggaaattataggatccttgtcaaatgctataaaggaaattcatttgcagataggccaggtccatgaagaatttataaataacatggctaatactacagttgaaagtttgatacaaaaatttgctgagtcaaaaggcactgggaaggaaagacctggcctcattgaatttgaagaatgtgacactgctagtgcagttgaaggtataaaaccaaggaaaagaaagacctttgctttgccaggaatcattaaaaaggaaaaagatgcagaatctgtatggagtttcactgttgttgcccaggttggaatgcaatggcgcgatcttggcttactgcattctccacctcccaggttcaagcgattctcctcctacctcagcctcccaagtagctggaattacggcgcccaccaccacatctggctaattttttgtatttttagtagagacagggtttcaccatattggccaggctggtcgcgaactcctgacctcaggtgaaccacccgcctcagcttcccaaagtgctgggattacaggcctgagccacgcgcccggcctgatttaccttcttttaaaaataaaaaattaatatacaaagaatatgtaataaaca

SEQ ID NO: 10684 - DNA, 4980 bp, Homo sapiens
  source 1..4980: mol_type = unassigned DNA
gccggtctctgggaagaaggcggcggcggcgaaaggcgggggtgctgtgggggccgggccgtgtttacacagcggcgggcgggcgcggacgcggaacccggcgcggcggcggcacgatggtcatggcgtatttcgtcgagaatttttggggggaaaaaaatagtggctttgatgtcctctaccataatatgaaacatggacagatatcaacaaaagaactagcagattttgtaagggaacgagctaccatagaggaggcatactccaggtcaatgacaaaactagcaaaatctgcaagcaattattcacaacttggaacatttgcaccagtatgggatgtattcaaaacatctacagagaaattagcaaattgtcacttggatcttgttagaaaattacaagaattaataaaggaagttcagaagtatggagaagaacaagtaaagtctcataaaaagactaaagaagaagttgcaggaactctggaagctgtccaaaccattcagagcataactcaggccctccagaaatccaaggaaaattacaatgccaagtgtgtagaacaggagcgtttgaaaaaggaaggagctacacaaagagaaatagaaaaggcagctgttaaatctaagaaagctacagatacctataaactctatgtggaaaaatatgcattagcaaaagctgatttcgaacagaaaatgacagaaacagctcagaaatttcaagatattgaagaaactcatctcattcacataaaggaaattataggatccttgtcaaatgctataaaggaaattcatttgcagataggccaggtccatgaagaatttataaataacatggctaatactacagttgaaagtttgatacaaaaatttgctgagtcaaaaggcactgggaaggaaagacctggcctcattgaatttgaagaatgtgacactgctagtgcagttgaaggtataaaaccaaggaaaagaaagacctttgctttgccaggaatcattaaaaaggaaaaagatgcagaatctgtggaatgtcctgatgcagattcattgaacattcctgatgtagatgaagaaggctacagtattaaaccagaaacaaatcagaatgataccaaagagaaccatttctactcatctagtgattctgactccgaagatgaagaaccaaagaagtatcggatagaaattaagcctatgcatccaaataactcacatcacacaatggcttctttggatgaattaaaagtatctatagggaatataacactctccccagcaatatctgtaagtacaaacacaagacttaacagaaactttaacgatgaggagttaacaaaatcaaagccatctgctccacccaatgaaaaaggaaccagtgatttacttgcttgggaccccctatttggaccatctcttgattcatcttcttcatcttcactaacttcatcatcatcagccaggcccacaactcctctttctgtaggcaccattgtcccacctccgaggcctgcttccagaccaaagcttacttcaggcaaactcagtgggattaatgaaatacccaggccattcagcccacctgtaacttccaacaccagcccacctcctgctgcaccattagcccgggcagaaagttcttcttctatctcatcatctgcttcattgagtgctgccaatactccaacagtaggtgtgtcacggggtcccagccctgtcagccttggaaatcaggataccttacctgtggcagttgcccttacagaatctgttaatgcctactttaaaggagcagatcccaccaagtgtattgtgaagatcactggtgatatgacaatgtcatttccaagtggaattattaaagtcttcaccagcaatccaactccagctgtgttgtgcttcagggtgaaaaatatcagcagactagagcagattcttccaaatgcacagcttgtgttcagtgatccatcacaatgtgattccaacacaaaagatttttggatgaacatgcaagctgttacagtctacctcaagaagctgtcagagcaaaatccagctgcttcttattataatgtagatgtattaaagtatcaggtatcatcaaatggtattcagtccactcctctgaatcttgcaacatactggaaatgtagtgctagcaccacagatcttagagtggattataaatacaatccagaagctatggtggcacctagtgtgctttccaacatacaggtggtggtaccagtggatggaggagtaacgaacatgcagtcccttccccctgcaatatggaatgcagaacaaatgaaagccttttggaaattgtctagtatttcagaaaaatcagaaaatggaggttctgggtccctccgagcaaaatttgatctttcagaaggacctagtaaacccacgacacttgcagtacaattcctcagcgagggaagtaccctttcaggagtagatttcgaacttgtgggcactggctataggctttccttaataaagaagcggtttgctactggacgatacctggcggattgttgatggacctgggaaagtgatgtggcttcagggattacaaacctgccattctgcattatctgttctttccaaacactattttaacttgtatgatgtctttcaaacttagacatatttgagagctgactacaaacattaaatcgcacttttaaagtgagtcattgaaataaatagtactgaaatgattctctatgttgtaaatgatcaactacaatattcaggaagcacatttattcagattctcagtaaaaatgaagtttttgtaggattaatttttaaattatttccagtgtctatgttgaaaaaaagggttatagtgtaatatcaggcctaaagtttcagaagagcaagcacaaagtaatttagctttccatacatttttagagtcagagataactttgaaatttcataagtttgatattcagtggatacaaatagaacatgaattctaagttttgggtaatgttaactcagaacacttaatcaaattgagctatgtgccataaggtaatcagaccagagtccaagttgtatgcaaaaaatctataatttgattctcataaacatattaataaagtataagtgatgttttatatgatttttaaaaaaaattctcaagtgcaatgtgttttaaaataagcttgcaaatgacagcagagacatttacttctgcagttagttaactttataggagttgtgatttttttgatgaattaatgctgtagatttaatttatttttatatggaattgcataatgtgtgccttttaaaacaataacaaaaaccagagatgtgcctatacaatttgtgttcattaatgtgcctcactttttttctcagtctgaatcttctgttcagaatcttacagtgatcaagcatttttataagatatttgcaatttttgtaaatatttttggcctgcaactgggaaggggattcagagtcataaagcctaacttaagaatcctggctcacttctttggtgatacactgtagccactagaaagagaaataaacccaatggcatgtgtttacaggaagaaagattaccttcagatacttgacattaacctcatcaaaagtgtgtgaattttaaaacaaattctaaaaaaactatagtgctaaattggtaactggtattttaactctcaatttagcattttccttgatactttatcattgaaaatttatgcatttatttactgattgtgttgtgaacatgagttttatggtattttgtgagggatgcattttttaaaagattaattttggaaacagaaggagaagcactgccatttgtttttatttcaacaattggaaaaattaccaatttgtacattttaattattcaatttctactttgtaaaaatagggaaattatttgaagtgatatatttggttaaacatttctaaaaataaactaccaatactaaatagtaagaaacctaactttagtagcaaatcttgattaattgaagaaataaaatatttcggataaggtttcataatttacaaatgggaatttcatttataataataaatatgagtgtcctttatttgcctagtagaagtgataaattgtgttatatatgataatttatataaaaccactaattgttccgttaagcttcacagaaaataaaacctctattactagacatttatgtaacatcttgctgtactaaatacagcagaaaatctactctttagcaatatataacacagtatatgcttttttatatattcaatgttagcccaagtctgaatttacatttgactaaagcagcacataagataatttgctaaaatgctaatctttactaaatagtgagctaaattagaatttctaactcttatattgtgctcttttaaatgccaattacagtcccttactggaattctaactgtaatttgctttgcaatcaaactgcttttagggcagccaatattttattattggaattcagacactgttcttaccgtgtttgtttttaatcaaatattacctaaaaatgtacaaattagtgaaatggttaaacttctgcactttcttagttaccacagtcttcataccaagtattgggtacaggttacaattttgaagccatatgagtttatattgattttttttttccatttaaaaatccactaatggtgtaaaagagaccagtagattttcaatgggaaatgtacctagcaagctggttcttgcttatatatagtgataaactttgtagctgcctctttaaccaagaatttgtaaacacaactctaataaatgtgagttttaaaggattgttatttactactttggattgtaattagaacaatgcacatctgtcttccaagattttgtaaatatttttgatttttttcattaaatgtaaattttacataaaagttgtgctcttaataaacatgtaatatataattt

SEQ ID NO: 10685 - DNA, 4981 bp, Homo sapiens
  source 1..4981: mol_type = unassigned DNA
gccggtctctgggaagaaggcggcggcggcgaaaggcgggggtgctgtgggggccgggccgtgtttacacagcggcgggcgggcgcggacgcggaacccggcgcggcggcggcacgatggtcatggcgtatttcgtcgagaatttttggggggaaaaaaatagtggctttgatgtcctctaccataatatgaaacatggacagatatcaacaaaagaactagcagattttgtaagggaacgagctaccatagaggaggcatactccaggtcaatgacaaaactagcaaaatctgcaagcaattattcacaacttggaacatttgcaccagtatgggatgtattcaaaacatctacagagaaattagcaaattgtcacttggatcttgttagaaaattacaagaattaataaaggaagttcagaagtatggagaagaacaagtaaagtctcataaaaagactaaagaagaagttgcaggaactctggaagctgtccaaaccattcagagcataactcaggccctccagaaatccaaggaaaattacaatgccaagtgtgtagaacaggagcgtttgaaaaaggaaggagctacacaaagagaaatagaaaaggcagctgttaaatctaagaaagctacagatacctataaactctatgtggaaaaatatgcattagcaaaagctgatttcgaacagaaaatgacagaaacagctcagaaatttcaagatattgaagaaactcatctcattcacataaaggaaattataggatccttgtcaaatgctataaaggaaattcatttgcagataggccaggtccatgaagaatttataaataacatggctaatactacagttgaaagtttgatacaaaaatttgctgagtcaaaaggcactgggaaggaaagacctggcctcattgaatttgaagaatgtgacactgctagtgcagttgaaggtataaaaccaaggaaaagaaagacctttgctttgccaggaatcattaaaaaggaaaaagatgcagaatctgtggaatgtcctgatgcagattcattgaacattcctgatgtagatgaagaaggctacagtattaaaccagaaacaaatcagaatgataccaaagagaaccatttctactcatctagtgattctgactccgaagatgaagaaccaaagaagtatcggatagaaattaagcctatgcatccaaataactcacatcacacaatggcttctttggatgaattaaaagtatctatagggaatataacactctccccagcaatatctagacacagtccagtacagatgaatcggaatttgtctaatgaggagttaacaaaatcaaagccatctgctccacccaatgaaaaaggaaccagtgatttacttgcttgggaccccctatttggaccatctcttgattcatcttcttcatcttcactaacttcatcatcatcagccaggcccacaactcctctttctgtaggcaccattgtcccacctccgaggcctgcttccagaccaaagcttacttcaggcaaactcagtgggattaatgaaatacccaggccattcagcccacctgtaacttccaacaccagcccacctcctgctgcaccattagcccgggcagaaagttcttcttctatctcatcatctgcttcattgagtgctgccaatactccaacagtaggtgtgtcacggggtcccagccctgtcagccttggaaatcaggataccttacctgtggcagttgcccttacagaatctgttaatgcctactttaaaggagcagatcccaccaagtgtattgtgaagatcactggtgatatgacaatgtcatttccaagtggaattattaaagtcttcaccagcaatccaactccagctgtgttgtgcttcagggtgaaaaatatcagcagactagagcagattcttccaaatgcacagcttgtgttcagtgatccatcacaatgtgattccaacacaaaagatttttggatgaacatgcaagctgttacagtctacctcaagaagctgtcagagcaaaatccagctgcttcttattataatgtagatgtattaaagtatcaggtatcatcaaatggtattcagtccactcctctgaatcttgcaacatactggaaatgtagtgctagcaccacagatcttagagtggattataaatacaatccagaagctatggtggcacctagtgtgctttccaacatacaggtggtggtaccagtggatggaggagtaacgaacatgcagtcccttccccctgcaatatggaatgcagaacaaatgaaagccttttggaaattgtctagtatttcagaaaaatcagaaaatggaggttctgggtccctccgagcaaaatttgatctttcagaaggacctagtaaacccacgacacttgcagtacaattcctcagcgagggaagtaccctttcaggagtagatttcgaacttgtgggcactggctataggctttccttaataaagaagcggtttgctactggacgatacctggcggattgttgatggacctgggaaagtgatgtggcttcagggattacaaacctgccattctgcattatctgttctttccaaacactattttaacttgtatgatgtctttcaaacttagacatatttgagagctgactacaaacattaaatcgcacttttaaagtgagtcattgaaataaatagtactgaaatgattctctatgttgtaaatgatcaactacaatattcaggaagcacatttattcagattctcagtaaaaatgaagtttttgtaggattaatttttaaattatttccagtgtctatgttgaaaaaaagggttatagtgtaatatcaggcctaaagtttcagaagagcaagcacaaagtaatttagctttccatacatttttagagtcagagataactttgaaatttcataagtttgatattcagtggatacaaatagaacatgaattctaagttttgggtaatgttaactcagaacacttaatcaaattgagctatgtgccataaggtaatcagaccagagtccaagttgtatgcaaaaaatctataatttgattctcataaacatattaataaagtataagtgatgttttatatgatttttaaaaaaaattctcaagtgcaatgtgttttaaaataagcttgcaaatgacagcagagacatttacttctgcagttagttaactttataggagttgtgatttttttgatgaattaatgctgtagatttaatttatttttatatggaattgcataatgtgtgccttttaaaacaataacaaaaaccagagatgtgcctatacaatttgtgttcattaatgtgcctcactttttttctcagtctgaatcttctgttcagaatcttacagtgatcaagcatttttataagatatttgcaatttttgtaaatatttttggcctgcaactgggaaggggattcagagtcataaagcctaacttaagaatcctggctcacttctttggtgatacactgtagccactagaaagagaaataaacccaatggcatgtgtttacaggaagaaagattaccttcagatacttgacattaacctcatcaaaagtgtgtgaattttaaaacaaattctaaaaaaactatagtgctaaattggtaactggtattttaactctcaatttagcattttccttgatactttatcattgaaaatttatgcatttatttactgattgtgttgtgaacatgagttttatggtattttgtgagggatgcattttttaaaagattaattttggaaacagaaggagaagcactgccatttgtttttatttcaacaattggaaaaattaccaatttgtacattttaattattcaatttctactttgtaaaaatagggaaattatttgaagtgatatatttggttaaacatttctaaaaataaactaccaatactaaatagtaagaaacctaactttagtagcaaatcttgattaattgaagaaataaaatatttcggataaggtttcataatttacaaatgggaatttcatttataataataaatatgagtgtcctttatttgcctagtagaagtgataaattgtgttatatatgataatttatataaaaccactaattgttccgttaagcttcacagaaaataaaacctctattactagacatttatgtaacatcttgctgtactaaatacagcagaaaatctactctttagcaatatataacacagtatatgcttttttatatattcaatgttagcccaagtctgaatttacatttgactaaagcagcacataagataatttgctaaaatgctaatctttactaaatagtgagctaaattagaatttctaactcttatattgtgctcttttaaatgccaattacagtcccttactggaattctaactgtaatttgctttgcaatcaaactgcttttagggcagccaatattttattattggaattcagacactgttcttaccgtgtttgtttttaatcaaatattacctaaaaatgtacaaattagtgaaatggttaaacttctgcactttcttagttaccacagtcttcataccaagtattgggtacaggttacaattttgaagccatatgagtttatattgattttttttttccatttaaaaatccactaatggtgtaaaagagaccagtagattttcaatgggaaatgtacctagcaagctggttcttgcttatatatagtgataaactttgtagctgcctctttaaccaagaatttgtaaacacaactctaataaatgtgagttttaaaggattgttatttactactttggattgtaattagaacaatgcacatctgtcttccaagattttgtaaatatttttgatttttttcattaaatgtaaattttacataaaagttgtgctcttaataaacatgtaatatataattta

SEQ ID NO: 10686 - DNA, 2700 bp, Homo sapiens
  source 1..2700: mol_type = unassigned DNA
acgcggaacccggcgcggcggcggcacgatggtcatggcgtatttcgtcgagaatttttggggggaaaaaaatagtggctttgatgtcctctaccataatatgaaacatggacagatatcaacaaaagaactagcagattttgtaagggaacgagctaccatagaggaggcatactccaggtcaatgacaaaactagcaaaatctgcaagcaattattcacaacttggaacatttgcaccagtatgggatgtattcaaaacatctacagagaaattagcaaattgtcacttggatcttgttagaaaattacaagaattaataaaggaagttcagaagtatggagaagaacaagtaaagtctcataaaaagactaaagaagaagttgcaggaactctggaagctgtccaaaccattcagagcataactcaggccctccagaaatccaaggaaaattacaatgccaagtgtgtagaacaggagcgtttgaaaaaggaaggagctacacaaagagaaatagaaaaggcagctgttaaatctaagaaagctacagatacctataaactctatgtggaaaaatatgcattagcaaaagctgatttcgaacagaaaatgacagaaacagctcaggtccatgaagaatttataaataacatggctaatactacagttgaaagtttgatacaaaaatttgctgagtcaaaaggcactgggaaggaaagacctggcctcattgaatttgaagaatgtgacactgctagtgcagttgaaggtataaaaccaaggaaaagaaagacctttgctttgccaggaatcattaaaaaggaaaaagatgcagaatctgtggaatgtcctgatgcagattcattgaacattcctgatgtagatgaagaaggctacagtattaaaccagaaacaaatcagaatgataccaaagagaaccatttctactcatctagtgattctgactccgaagatgaagaaccaaagaagtatcggatagaaattaagcctatgcatccaaataactcacatcacacaatggcttctttggatgaattaaaagtatctatagggaatataacactctccccagcaatatctagacacagtccagtacagatgaatcggaatttgtctaatgaggagttaacaaaatcaaagccatctgctccacccaatgaaaaaggaaccagtgatttacttgcttgggaccccctatttggaccatctcttgattcatcttcttcatcttcactaacttcatcatcatcagccaggcccacaactcctctttctgtaggcaccattgtcccacctccgaggcctgcttccagaccaaagcttacttcaggcaaactcagtgggattaatgaaatacccaggccattcagcccacctgtaacttccaacaccagcccacctcctgctgcaccattagcccgggcagaaagttcttcttctatctcatcatctgcttcattgagtgctgccaatactccaacagtaggtgtgtcacggggtcccagccctgtcagccttggaaatcaggataccttacctgtggcagttgcccttacagaatctgttaatgcctactttaaaggagcagatcccaccaagtgtattgtgaagatcactggtgatatgacaatgtcatttccaagtggaattattaaagtcttcaccagcaatccaactccagctgtgttgtgcttcagggtgaaaaatatcagcagactagagcagattcttccaaatgcacagcttgtgttcagtgatccatcacaatgtgattccaacacaaaagatttttggatgaacatgcaagctgttacagtctacctcaagaagctgtcagagcaaaatccagctgcttcttattataatgtagatgtattaaagtatcaggtatcatcaaatggtattcagtccactcctctgaatcttgcaacatactggaaatgtagtgctagcaccacagatcttagagtggattataaatacaatccagaagctatggtggcacctagtgtgctttccaacatacaggtggtggtaccagtggatggaggagtaacgaacatgcagtcccttccccctgcaatatggaatgcagaacaaatgaaagccttttggaaattgtctagtatttcagaaaaatcagaaaatggaggttctgggtccctccgagcaaaatttgatctttcagaaggacctagtaaacccacgacacttgcagtacaattcctcagcgagggaagtaccctttcaggagtagatttcgaacttgtgggcactggctataggctttccttaataaagaagcggtttgctactggacgatacctggcggattgttgatggacctgggaaagtgatgtggcttcagggattacaaacctgccattctgcattatctgttctttccaaacactattttaacttgtatgatgtctttcaaacttagacatatttgagagctgactacaaacattaaatcgcacttttaaagtgagtcattgaaataaatagtactgaaatgattctctatgttgtaaatgatcaactacaatattcaggaagcacatttattcagattctcagtaaaaatgaagtttttgtaggattaatttttaaattatttccagtgtctatgttgaaaaaaagggttatagtgtaatatcaggcctaaagtttca

SEQ ID NO: 10687 - DNA, 5939 bp, Homo sapiens
  source 1..5939: mol_type = unassigned DNA
gccgcgcggcgcgggggaggagaccttcatctgttcacgcggtagcgcggattgcggttcgcggcgcgcgccaccggggaaggagcggtgggccgaggggttggaggtggggccccaggaggacctcgggctgtgggccgggagagcggagtcggggagtggggcgggggagcgaggtggcgccggggagcctgggatatggcgcggccagacgatgaggagggggcggcggtggcgcccggacacccgctcgcgaaaggatacctcccgttgccgaggggcgcgcccgttgggaaggagagcgtggagctgcagaacgggcccaaagcgggcaccttcccggtgaatggggccccccgggacagcctcgctgccgcctcgggagttctgggcgggcctcagactccactggccccagaagaggagacccaggcccggctgctgcctgcgggcgcgggagctgagaccccgggggccgagagcagcccgctgccccttacggcgctctccccgcggcgcttcgtggtgctcctgatcttcagcctgtactcgctggtcaacgcctttcagtggatccagtacagcatcattagcaacgtcttcgagggcttctacggtgtcaccttgctgcacatcgactggctgtccatggtgtacatgctggcctacgtgcccctcatcttcccggccacctggctgctggacaccagaggcctgcggctcaccgccctgctgggctccggcctcaactgcctgggtgcctggatcaagtgcggcagtgtgcagcagcatctcttctgggtcaccatgttgggccagtgcttgtgctcggtggcccaggtgttcatcctgggcttgccctcccgcatcgcctcagtgtggtttgggcccaaagaggtgtccacagcttgtgccaccgccgtgctgggcaatcagcttggaactgcagttggctttttgctaccaccagttttagtacccaacacacagaatgacacaaatctcctggcttgtaatatcagcaccatgttttatggaacatcagctgttgccacacttttatttattttaacagcaattgccttcaaagaaaaacctcggtatccaccaagtcaggctcaagcagctcttcaagacagtccccctgaagagtactcctataagaaatcaataagaaacctgtttaaaaacattccttttgtccttctgttgatcacttatggtatcatgactggtgccttttattcagtctcaacgttattaaatcaaatgatattgacatattatgagggagaagaagtcaatgctggaaggattgggctaacgctagtagtagctggaatggtgggctctattctttgtggcttatggctggattatactaaaacatacaaacagactactctgatagtttatattttgtcttttattggaatggttatctttactttcacattggaccttagatatattatcatcgtgtttgttactggaggggtgcttggcttcttcatgactggttacctccctttgggttttgaatttgctgttgaaatcacttaccctgaatctgaaggtacttcatctggtcttcttaatgcttctgcacagatatttggaattttgttcacattggctcaaggaaagctcacatcagactatggtcctaaggcagggaacatttttctctgtgtctggatgtttataggcatcatattaacagcattaatcaagtctgatctgcgaagacacaacataaatataggaattacaaatgttgatgttaaagctataccagctgacagtcccacagaccaagaaccaaaaacggttatgttgtccaagcagtcagaatcagcaatttgaagagaaaggcaaagttactgtcctgtagtaattggggacaatgtgatcatccttggagagagatgtgagcaccaaggctgggtttgtatgtggtgggggaataaacacacttacttgaaaattaccatatgaactctaaatgcataattattattttgcttaattgttaaattaagggaaattttcttaaaattcttctgtttacatcatgttaacactactgtttatctaattagtatccggtttttagtctcatattgtatctgaaagtaagcttcttgacgtttactttttaaaagtcgatgtttttcttttttgtagaaaatggaagcttagaatactttttaaagtgataatatggggtgttcagtccccataagatataatagttcatgcagtttatatattaaagtatccagtggaactaaatgtacaatatattcctaattggctgcctttttcactgtgctgaccagctgttcaagccacttcagtttgagtacaacataccaacatgacactactcacccacaaaggacagcattgggatcaggctttcagatgacctctaagatttttcccatttattgtactcttgttacaaagtactttttaacacatgcagtcaatggctataaaaactattctgtgtacagattctacccagactttggtcttagaattatgttctaattaaggagcctggttacaggttcattctgtcttgagttcttttctgtgctgcctttctatcatggataaatgctaacgctgtattttttcactccaacttgagatagagtagttttgtacccattgccttttttttcttttaaactctctttttttttttttcctgatgtgtaactttctagtaagataatttcatcatgtatgttactggctatttcatgatttcatgtatcacatcgtatattttgccttgaagattcctgaaataaggaaatctataataacttcagatagcctacatgtccccatttagtggagacctcttgaatgctatttgaattctgcagtatcatttttatgaccattctcctttgaggaatactatgcccaggtacatgctctatcagtgtgccgggagagtggattcttttcttcactgcagagtcatcacactgttagaatagtctgctcttttacatgctcaggtagggaaaataggaccaaatatatttccacagtgcctaccactgtgtcatgtttacagtgagagtttaaatattgttgatgtcctgactctgtgagctcatagggagtatcttcatagtaatgacatttgatcagccataaaatttacattatgttcatatgcacccaaaaaagctagtcaggtaatgaatacccttgaagtgaatagcaattttgatttaggcagtgtgttaggccatccttgcattgctataaagaaatatttaggctgggcgtggtggctcacgcctgtaatcccagcactttgggaggctgaagcgtgtggatcacctgaggtcaggagttcaagaccagcctggccaacatggtaaaaccccatctctactaaaaaaaaaaaaaaaaaaaaaaaaaaaaaaaaaggccaggcgcagtgctgtggctcatgcctgtaatctcagcactttgggaggccaaggcaggtggatcacaaagtcaggagttcaaaaccagcctggccaagatggtgaaaccccatctctactaaaaatacaaaaattagcgcagtggcaggcgcctgtaatcccagctactcaggaggctgaggcaggagaatcgcttgaatgcgaatggcagaggttgcagtgagcgaaaatcacactactgcactccagcctgggagataaagtgagactgtctcaaataaataaataaataaataaataaataaataaataaataaataaaacctgaggttgagcacgatggctcacacctatagtcccagcactttgggaggctgaggtgggtggatcatttgaggccaggagttgaagaccagtctggccaacatggcaaaaccccatctctactaaaaatacatacacacacacacacacacacaaattagccgggcatggtggcacacgcctgtagtcccagcttcttgggaagctgaggcatgagaattgcctgaacctggaaggcggaggctacagtgagctgagattgcgccactgcactccagcctgggtgacagagcgagactctgtttcaggaaaaaaagaacagaaatacctgagactgggtaatttataaataaaagaggtttaagtggctcacagttctgcaggctgtgtaagcatggcaccagtgtctgctcggcttctggggagccctcagggagctttactcatggtgaaaggctaagtgggagcagagatgtcacatggcgaagcaggagcaagagagcagggaggtgccacacaccttcaaacaaccagattttgtgaaaactcactcattactgcaaggacagcaccaagccatgagggatccacccgcaggacccaaacaccttctattagggccaaccttcaacattggggattacatttcaatgtgagattggagggacaagtatcccaactatatcaggcagaatatatgcattgatatatattgaaattataacattctctataatcaagtgactgtaaattatgtcgaatctgaccctggggaatgtgttatctaaagaatttgactaagaatcaggaactctgtgtccatgtcctggatgtatttctgtatgttcctataactctggacaaatcattaaacctctctgggcagcgttttcctcatccatgaaatgaatgtgttcaatttgatctcaaagatctttccaaaatattaaatgccattaatcatggaatagaccaaattattgtatcacaggaacttgaatccagccagagaaaaattccctggacaattggataaacaaatgtgattgctaccttatggatacaacggacttttacatttctttttagcctttttagtcagttgagggtaactcaagcagagtatgtccaatcattagcttcctttgatatttacattacaggtaaaaacggccaaaaatatattttaaggtctctccccaaatgtttttatttttaaactatcaatgttgtttaaaataatcatgtacttgttgagttcctgaggtttggaacaaattacacataaaatttagaatactttatttctgaaaagcatatacatatatgttatgtttatttttccttgttgattagaaaggtgatggaatatgtgacaatgcaaaatgaattgataatttttctgtattttgagtgaaagttgtctgtaatatgtcaagcaagaatgttataattctacagtaatgtgtgacttcatgacagagctacattctgagaaatttgtcattaggtgatttcatcattgtgtgaacatcatgaagtgtacttacacaaacctaggtggtagagcctactgcacacctgggctagatggcaaagtctgtcgcttctgggctacagacctgtacagcatggtactgtattgaatactgtaggcaactgtaacacaatggtatctgtgtaatctaaacatagaacagataatacattgtgctacaatgtaacaatggctgtggcatcactaggtgataggaatttttcagttccattataatcttataggatctctgtcatatgtggtcaattgttgatcgaaacatgactgtatgtcgtattttcagaaaatggaataggtaatcatcacttgtgtgaattttaatcaaatgacttaggaaagaaactggatgtttcaaaagctgttgcatttattacaaatgtcacaaatacagctcttgccttttgagaatgttggagagatgtctttaaaaaatatgtttgtgtgtaaaaatgtgtctgtatgcaatagctagaaaaatgcctgtgtcttaagtcattactcatgttctaatttttgttctttgtactatttatctgtatgcttgttcttcagtatttcagactcaaaataaatttatttttttatgttaa

SEQ ID NO: 10688 - DNA, 12119 bp, Homo sapiens
  source 1..12119: mol_type = unassigned DNA
gtcacaccctcgaataatgacgcatacctatcctactgttactgatcacctagtaataatcttgtagttcacattactcatttttcaccaaattcttttggtgaaggacgcttcagaaacggccatcactgaagagcagacccgtttgggttctccacgcattctagactcccgaagagctcatgttttttggctagacctatgaccattttcgctagacttcactgcacgttttctcaagtatcttctttgtccctaatgtgtgacacctcatcatggacacgctactttagctaaggcatgaccagcaatgaacagtagtaagatatgtgctgattagaaggctcacttgtgcagtgtggaggataaccagtgccttacaaaatggggtttgggagtgacctgaagaattcacatgaagcagtgttaaaattgcaagactgggaattacggttactggaaacagtaaagaaatttatggccctgagaataaaaagtgataaagaatatgcatctactttacagaacctttgtaatcaagttgataaggaaagtactgtccaaatgaattatgtcagcaacgtatccaagtcttggctacttatgattcagcagacagaacaacttagtaggataatgaagacacatgcagaggacttgaactctggacctttacacaggctcaccatgatgattaaggacaagcagcaggtgaagaaaagttacataggtgttcatcagcagatagaggcagagatgatcaaggttaccaaaacagaattggagaagttaaaatgcagctatagacaattaataaaagaaatgaattctgccaaagagaaatataaagaagctttagctaaagggaaggaaactgaaaaggccaaggaacgatacgacaaagccacaatgaaacttcatatgttgcacaatcagtatgtattggcgttgaaaggggcacagctccatcagaatcagtattatgatatcacacttcccctgcttctggactccttacaaaagatgcaagaagaaatgataaaagcactcaaaggtatatttgatgaatacagccagataaccagtcttgtcacagaggaaatagtgaatgtccataaagagattcaaatgtcggttgaacagatagatcctagtacagaatacaataatttcatagatgttcacagaacaacggctgctaaagaacaagaaatagagtttgatacttccttactggaagaaaatgaaaatcttcaggcaaatgagatcatgtggaataacttaacagcagaaagtttgcaagtaatgttgaaaacgttagcggaagaacttatgcaaacacagcagatgcttttaaacaaggaggaggctgttttggagttagagaagagaattgaagaatcttctgaaacttgtgagaagaagtctgatattgtgcttctgctaagccaaaaacaggcacttgaagaactgaaacagtcagtccagcagctgagatgcactgaagcaaagttttcagcacagaaggaattactagagcaaaaagtgcaagaaaatgatgggaaagagccacctccagtagtaaattatgaagaagatgcacgatcagttacatctatggaaagaaaggagaggctatccaaatttgaatctattcgtcattcaattgctggaataattaggtctccaaaatctgcactgggctcttcagcactttctgatatgatctccatcagtgagaagcctttggcagaacaggactggtaccatggtgcaattcccagaatagaagctcaagaactgttaaaaaaacaaggagactttttggtgcgagagagtcatgggaaacctggtgaatatgtcctttctgtatattctgatggacagaggagacattttatcatacaatatgttgataacatgtatcgattcgagggcactgggttttcaaacattcctcaacttatagatcatcactatacaacaaaacaggtcatcactaagaaatcaggtgtagttctgctgaatcctattcctaaggacaagaaatggattctcagtcatgaagatgtcatattgggagaattactgggcaagggaaattttggtgaagtatataagggcacattaaaggataaaacttctgttgctgttaaaacatgtaaagaagatcttcctcaggaattgaaaataaaatttttacaagaagccaaaattctcaagcaatatgatcatcccaatattgtcaaacttataggagtttgcacacaaagacagcctgtctacatcattatggaactggtttcaggaggtgatttcctcacctttctgagaaggaagaaggatgaactaaaactcaaacagttagtgaaattttcattagacgctgctgctggtatgttgtatctcgagagtaaaaactgtatacacagggaccttgctgcaagaaactgcctggtaggtgaaaataatgttctgaaaatcagtgactttggaatgtctcgtcaagaggatggtggagtgtattcatcttctggcttaaagcagattcccattaaatggacagcaccggaagctcttaattatgggagatacagttcagagagtgacgtgtggagctttggcatccttctctgggagaccttcagcttaggggtttgtccgtaccctggaatgacaaatcagcaagcaagagagcaagtagaaagaggataccggatgtcagctccccagcactgtccagaggatatttccaaaatcatgatgaagtgttgggattataaacctgaaaatcgccctaagttcagtgaacttcagaaagagctcactatcatcaagagaaaactcacatagtgacaggatggcgccaaactcagccttcaggactctgtcctccagcagagtaacattattgttctcattaacaatgaatttataccacattaccttcgacagtcttctaccattattttttattaactgggtgttttaaaagtacgttccacttgtaaaaagtcaaaggcaaatttgttaaagaaataggcagtcctaccaagggctttcttagctaaccatagcaatcctaccatttcaggccattgcaaatagaaaagcacaggcttctaagtgtgtgaaggataaaagatctatcctatccttttcacaccttgtttctacttcaggcacagtttgtaggctgccatcctatgccacagaccctactccgttggtgctataaacagcattggtaatgccatgtttgcaggacatgttccaaccacagctggctttcacctctgccaaagcaggattatatttgtaaacaaacaaacagaattttatattgggaattatttggacctcctgagatttttcttttctttcttgccaggtataagcccaatgtaagaatcatcatgctcctacattatttgtaaggttgtcattttcctcctcctttgtctgggcatcagaaaacaatgcacgtaggtcgggcacggtggctcacgcctgtaatcccaggcatgtaatctcatgcctgggattacaggcgtgagccacagtgcccagccccctccctcctttgggaggctgaggcaggcggatcacctgaggtcaggagttcgagaccagcctggcttgcatggtgaaaccctgtctctaccaaaaaaaaaaaaagaaacacacacacaacgcatgaaacgtcgtcaaagttagagttgaggcagttgcttttcaaggatgtacagagagctgtgaagcaagaaacagatttgaacaggagggtgggctggagaacagagcagctaaagaatgattaacagagtaaagaagaaagtgaaaatataaaaccaccttatcagagttatgcctttctaaacatctaaacaaacaaacattcacatattctattctaaaaacacataataatacatattctattttatggtctgaatttaccagaaaggtcctaagaaaagtttcaggagttcgtagagtcctcgtaatggcaacaaaaattttgagagaaactgcaaagcacaaatccacagaaataacagcatactttcagttaagcattttcaccttagagggggcattccaaaatgtaatttcctttatttgtaccagtttttagagctgtcagaatttcatgattctagttcaccaacacattcacgtgtgtacatgcgcgtgcacacacaccaccaaggtgcaagacagatgtgaatgaagtagacagtctagaagtcaggtgaatattaatgagaaatatgacatagggacagccctcccatttctacttccaccttcattgaccattatactgccccctggacattcttaccattagctgacaggtatgcaagcagagtgctgaagatgtctcatgtgaataaaatgtaactcactcactcagttaaaactaggattctgtatcttaactcttatctagggaacttacttacttaccccatgatctgtatatagttgcctctcaggataaatgcatatatagaagatggtcatgctcagggctaaatatgttctggaagccttttataagttctcaggcctgtgtcctggtaaacattaccttagtgattatttggtctgcattcattggaagagcttagggatagaaaatgcctcctgccctctccagctgtttgctgcctgtaccatcgcacagaactcacaccagtactttagagtatgaaagataatactgaagagaaaagtgacttgtatctaacatttcaatctccttgcagatttcatacatacttaatgattagtacattcagactaaagggaaatttcttttgatggcacgtactatggtaaatcaaagcgcaaactcagaagtgctatggtattgaggcacttaccaaccttcaaaagtaagagtaaaatgggatattcctacccttttttttagtatttctaagtgaatctctgtaatattctttgtctgtttaaagaaaacagcctcccatctcatagtggcttcatgctaagctctcagcaaggagagagaatgatggttttggctttagttttatgaacaagacctaaagcttaatcctgacattctggtgttaagaatgaacacagcattgatatttcacttatccaggctgttagaatttgcagttcacatcattactctgtgcttaaatttaaaaagcttttcaaaacatcgtgacatgtgtagcatttaaattccattttattctttgtcctaaagcaggcagtggtatagttcaggattaataacttattgggagtctctcagtcatatagaatattaaatttaatatagtcacatgcattaagaaaaacttacgcaaacagtttttcactgttaattttgttgtgcttgaagcataatttattcatcccttctgtcactgataattaattattggaattatatactttaggaggctaatccatgcccaggaagcacgaacatactgttcagaatgtgcaagttgatgtagggaaaggaagattcagaaatgtacaaaatcctgtgatttgtttagtaagaaaagagttgtaaccaaaatttcttctggtccggatgtaattagtccagtcacaaatctttgtgttgttaatggattattcaagatatatatatatattcttactactgcatagttcctctcataagtccttaaatttattaaaagggggaggtaaacacaagcagtctgtgtctcactggtcactaaggggcctttatgagacagtttaggttgttcatcatttcacaaggaaagaaatttttcactgttaaattaacatttattaccaacatgtgaaacctaaaattaattttgcattccatgtaatctaaggccaaagccaacatattctttctcttctgggaaaataaaattgacaggttttgtttaaacttcagaaactgaagctttatttcagcctgtcctgccatgaggtctccagtgagaggtctccagtgaaaggtctcatgtaattgtttctcttttatctcccaaatttaatgtgggcaataaaattctcctttcgtaattcactgttttattacaaatacgatattactgaaacatcttattagcagataagtatagaccaggagcctaactgtgttagatattttcagtgcacatttcacagttgtttttcattttaggattattttgagaagaaaaaatgttttgtaattgaaatagttttaatttcctttaaaccataatttggtttttctatctatattatattcagttcagttttcccatataacttttgtgaagattggctagtaccacaaaataactatggcttcacaatactagtgttagattatgtcaagaagaaagtgttttagttacaacatacgccacccactgaggaccttgtagtgggataaacaaaaattaaaatgcaacaatccaaataaattataatgtaacaatacaaatatctgaatcataagtcacagtttttcagggttctttcagtcacaccactttataattaattctggtgagtcatcagatgtaggaatgtacctgaaaaccttacttagtatactgtgtacactgtttaatggccatgcatcttttgaagtttgatattttctgaaaaagcattgtttgcctcagccctcttctttttacgtatactccatttatcattgatattttagatgtttcttatcaacaaaattggctgccctggttagtgctgagtcatcgcaagacttgcttttgcatttaggaagccacaccctcccacaaaacagaacagtgcaaaataagcagcagagagacagacagttggaaaagacatgttttctttaggtattaatatcttaattaaatggaatcagattttgtatggaaatgagtttatattacatttccattatactaagtcagtgtgaaagtttaccatcaaaatagcgttacttcttttatgactaactctgatttgcttatacatatcagaatgatattcattaaatattttaatttcatttatttttctatgttttgattagtttcacatcaagtctgaatactatattttggaagaatccaaaaccacatatgaagatactgattttaaaagtcaggatttcatgtaccaagaatgacctacttgaaggagattttgctacactcttagagtcccaaaaattcccctttaaaaaaaatgctgtcctacagaaggtgtataaactataccttagccataattcaatttaatgaaatactaccccattaaaagccatcctcctgcctcataccgattcagaaattaaattctgaacttttagtgtaggcattaggaatcacttagccacttaataaggactgagattcttgggtggcagaaaaatcctggtgtgctagattcttagtcactttaaactgcatagaagtaatgagcataggcttcagtatatttaataaggtgctgaggcagcagattcaaatgcaaaagagggaggaaccagttattccaaggcaggatgatgcacccccacacagagtgtggaaaaattaaagtgaaacaaagatttggacagtgtcattaggaagcctgaggagaacatgctacaaggccagatcctgtcctatggaaaataaaaaagatcagcagaactaaagcaaaagcagtcatctccagtgtgtgggccttagcaaagagtaaaccaaatacctctccttgtgttaggagcactgttatattcccagctcagagatgattgtgtgctgggaaatgcttatattcattatttcccaactaatgcatttggacatatgtattccagtttttcaaagacactacccaaagcttctttacatttgcattggttatatttaatatttcttaagctaagatcactgattatccacacgttattagaaatctttggttacagtgaggcttaacctgggctaaagtctcctaaatgggactacacttagatccgccctatttcacctttggactaacgttgactaaatggctcctagagttacccacagagggagcttactatgatgagagctactgtggggaaacatagtattcaacagagaaatggaagaatacaagtagcaatgttccttgtcttcaataacatttgagggaaaggaatctagaaatcctaaagcttagtcagggtgcctaaggtaagacacaaaaagaaagagacatccagaaaggaaggttgaaaggaaatgaagggcagtaacaaagcaccaatgtaaaatgacccatagccaacaataaatgcaataacaataaaggaaactaaccctcacaaagggtttgaggagcttcctgctgtgtgtccttaaacagtgcgtgcctcttaagtctctacaacacttttttaaagggcattgaattggacattggtttaatttttacctacgctccctataatctcaggaggtaaccattatttaatcagaattacccttgctctgtttatctgtgaggcctcagacacaacggtggttcagccctctccctaagcagtagcaagctgagtaatggcacacatatgtctaggatagccagcattcaggaaaattgctgtgaacctcctgtttttaattttaatatagaaaaagtctttcaggtttgtgacacgaagacagatttagcttcccacttgtcagcaaatttgtaaaaacctcaaaacaaatgaatatttggaattcactctaagagatacaaatcctgaatttctaactatcttctcaaatattactgaggccagcaagatgcaagtgttctacaaaataatgaactgttctaagtgacagtgttgatgctggaagtggaatgttatgttttcgctcagctgtattcattcagaaagtttttcttgaacatctgccacatgaggtgcagagaatactaccaggtgctagtttttccagtatttgacttctgattactatttccttttctcatctttagtttttcaagattttgctttaccaaaatagtaaagcctttatcatcagcttatattgaataatgttgtaattggtttcaatcaaagtttctcctcaggtacttgggggcccctagccttctaaggaactcccaggcacctacttaacaaggccagctacacactcagtatgtgataagccccatgatggatgcaggttagaattcaaagacctggttggagtcctagatgtggagacaggatgatcaggtcacacttgttagatgactaacactatcagtagaagctcttgagagattttcctaacgcagcaagatttctgtgagtagaggtatcctgggaggtatcctgggaggcagcctattgacttgaccaagtaagctgatcaggtggcctcctctacccactaaagaaatgtgtaaacactagcaataattgctttatcttaaactcctggacatactcagttcttccattccactgttctattgccaataccttttgttgttttcttcacactcctcttggcagcaaatgtctgaaagtatttcaattgtgtaatgttaaggagttttttcatagcttcagaaaagagggcagcaaatatgaagccttaagttcaaaataagtcattctacctagaaatacagaccccagagcacattgcatgaaaatacctgtactctgcagttcctcaaagcagtattcttcctgaaaagccaaacaccacacctattttcctatttgctaagaatcagaataagcacgttgtaaatagtatccaaagcagattctaaaatgacatagtaagaagccagattcaaattgtaaccaaagaagacaatagaaatcccactttaccccactgtcatcagttagaacacccttgcaaaaactgtaaccacttaagcaattcatctgatcccagaagatcataccttcttttgaaagtataggacagatatcagtgggaaacgtcggcgttctgagcaacacaggataaatgtaggagggccttaaaaaataaatctcaattcatacactggagcagcaaaaaactgagcaggaaaggaaacagaatccaaagtcatttttcatatagctgttgtcaaatagtataaccttggtgtcttctttgagttgcctggacagtatttatgaaacaaaaaactaaatgccccccatttggggacggggggaggggttcagacctctaacctggattcagagccttagaggccgagagggaatctggaatctggtattactgagatcctaggtaaaagaaccagcctggcagtctttcccacctcattggtccgtgcttttatttttaaacccaaaagaaagaaagaaacacaccctcttatgtaggaatttcccttttacaaataatttgacctggtagaaataaacttgcctgcctgctcttaaatgccagacagttggaagcaaatgccgagggaaaggtgcccagagccatgcttgataggactttgaatattttctccttaattaaagtacgttgcttgtatttagactataagatgctatggaggtctatcccatgccatgccaatgtgaattgctttgcttcagtaacaatcagaagaccagtccaacagaaaataacttgtcataattccaccttagattctagacctctcatacctgcagtgtacagaatatgtacatgttccaatggaattcactatttttggctttagtgtcaaagagattggttctacaaggttcatctgatttcccataacaagtaaattttataatcctatgattctaaattcaatccccaatatagattctaagcatcaaatcaaaatcacagacaaaggggaactggtcgagaggggtcttagttatttcaaatccatgaccaaagtgtccaaagacatgaaactcttatacctgctgagcatttcactttactatacaaaatgtcagctacccagttgcatcctgtgacatgatcagactgtcaatgtggaccagtggccaggagcatatttatgggccatttctgttcatcattctttacagagcattgaggtttcccactgaaacagcttctttagtcagacgtctatagattttacataaatttacatttaaatgcattaagttagatggcccaattgagcatctgaatgaatatagtgggggttggtggtggtgcaaattctgctggctttatgttatggttttcttcgtgttttttcttggttttgtctggcttcttctggcaagtgccctaaaagactggaacactgtataaagtcatagacatagaaccatatgggaaagcccagatgaaaaaatggaagaataaaatcaagttgtcaaagttccagcaacagccctgacttcttcaggaatccaagcaaattgaaagccaagacaaaatgtacaaatggtgcccatgccattcatttgactgtgggtggccctctagtctagggctctcttagtgaatggttgtggaaatatgatttttctaagttccttccttttccttttgatagatgagtttgagatgatggagtaggagtggggccctcaggcacttctggtaaagacattccacctgcaagcagcattttgagtaaagcactgctgtggtttgccgatttatggtccatttaatgttaggctaaagcacctttaatcatttttgttgttttaagataatgtatttgtgaagtggataaacactggaaatagggtgcttcttctggaaagttcagtgtaaaacacaaacaaggctttggcgggtttatctggctttataaacaagtctgaaaaatggatgaaagctaaatatataaagcagttggttgtctatcttttatcatttttactcagatctgtatttaacacttatttatttgttagtttttacattcaaaagaaatacactttgaactttggctaacattgtaggatattttttaattgtttctacatttttaaagcatgattcatcatttttgtaaacttagatcattttttaattgtcttttcttttccaatagaccagttaccactcatgtgtctgcagaacctctttattgtattcctataataaatgtaaaatatttgtagcaaa

SEQ ID NO: 10689 - DNA, 2922 bp, Homo sapiens
  source 1..2922: mol_type = unassigned DNA
acatacacagatatgtgctgattagaaggctcacttgtgcagtgtggaggataaccagtgccttacaaaatggggtttgggagtgacctgaagaattcacatgaagcagtgttaaaattgcaagactgggaattacggttactggaaacagtaaagaaatttatggccctgagaataaaaagtgataaagaatatgcatctactttacagaacctttgtaatcaagttgataaggaaagtactgtccaaatgaattatgtcagcaacgtatccaagggaaggaaactgaaaaggccaaggaacgatacgacaaagccacaatgaaacttcatatgttgcacaatcagtatgtattggcgttgaaaggggcacagctccatcagaatcagtattatgatatcacacttcccctgcttctggactccttacaaaagatgcaagaagaaatgataaaagcactcaaaggtatatttgatgaatacagccagataaccagtcttgtcacagaggaaatagtgaatgtccataaagagattcaaatgtcggttgaacagatagatcctagtacagaatacaataatttcatagatgttcacagaacaacggctgctaaagaacaagaaatagagtttgatacttccttactggaagaaaatgaaaatcttcaggcaaatgagatcatgtggaataacttaacagcagaaagtttgcaagtaatgttgaaaacgttagcggaagaacttatgcaaacacagcagatgcttttaaacaaggaggaggctgttttggagttagagaagagaattgaagaatcttctgaaacttgtgagaagaagtctgatattgtgcttctgctaagccaaaaacaggcacttgaagaactgaaacagtcagtccagcagctgagatgcactgaagcaaagttttcagcacagaaggaattactagagcaaaaagtgcaagaaaatgatgggaaagagccacctccagtagtaaattatgaagaagatgcacgatcagttacatctatggaaagaaaggagaggctatccaaatttgaatctattcgtcattcaattgctggaataattaggtctccaaaatctgcactgggctcttcagcactttctgatatgatctccatcagtgagaagcctttggcagaacaggactggtaccatggtgcaattcccagaatagaagctcaagaactgttaaaaaaacaaggagactttttggtgcgagagagtcatgggaaacctggtgaatatgtcctttctgtatattctgatggacagaggagacattttatcatacaatatgttgataacatgtatcgattcgagggcactgggttttcaaacattcctcaacttatagatcatcactatacaacaaaacaggtcatcactaagaaatcaggtgtagttctgctgaatcctattcctaaggacaagaaatggattctcagtcatgaagatgtcatattgggagaattactgggcaagggaaattttggtgaagtatataagggcacattaaaggataaaacttctgttgctgttaaaacatgtaaagaagatcttcctcaggaattgaaaataaaatttttacaagaagccaaaattctcaagcaatatgatcatcccaatattgtcaaacttataggagtttgcacacaaagacagcctgtctacatcattatggaactggtttcaggaggtgatttcctcacctttctgagaaggaagaaggatgaactaaaactcaaacagttagtgaaattttcattagacgctgctgctggtatgttgtatctcgagagtaaaaactgtatacacagggaccttgctgcaagaaactgcctggtaggtgaaaataatgttctgaaaatcagtgactttggaatgtctcgtcaagaggatggtggagtgtattcatcttctggcttaaagcagattcccattaaatggacagcaccggaagctcttaattatgggagatacagttcagagagtgacgtgtggagctttggcatccttctctgggagaccttcagcttaggggtttgtccgtaccctggaatgacaaatcagcaagcaagagagcaagtagaaagaggataccggatgtcagctccccagcactgtccagaggatatttccaaaatcatgatgaagtgttgggattataaacctgaaaatcgccctaagttcagtgaacttcagaaagagctcactatcatcaagagaaaactcacatagtgacaggatggcgccaaactcagccttcaggactctgtcctccagcagagtaacattattgttctcattaacaatgaatttataccacattaccttcgacagtcttctaccattattttttattaactgggtgttttaaaagtacgttccacttgtaaaaagtcaaaggcaaatttgttaaagaaataggcagtcctaccaagggctttcttagctaaccatagcaatcctaccatttcaggccattgcaaatagaaaagcacaggcttctaagtgtgtgaaggataaaagatctatcctatccttttcacaccttgtttctacttcaggcacagtttgtaggctgccatcctatgccacagaccctactccgttggtgctataaacagcattggtaatgccatgtttgcaggacatgttccaaccacagctggctttcacctctgccaaagcaggattatatttgtaaacaaacaaacagaattttatattgggaattatttggacctcctgagatttttcttttctttcttgccaggtataagcccaatgtaagaatcatcatgctcctacattatttgtaaggttgtcattttcctcctcctttgtctgggcatcagaaaacaatgcacgtaggtcgggcacggtggctcacgcc

SEQ ID NO: 10690 - DNA, 1486 bp, Homo sapiens
  source 1..1486: mol_type = unassigned DNA
gtcacaccctcgaataatgacgcatacctatcctactgttactgatcacctagtaataatcttgtagttcacattactcatttttcaccaaattcttttggtgaaggacgcttcagaaacggccatcactgaagagcagacccgtttgggttctccacgcattctagactcccgaagagatatgtgctgattagaaggctcacttgtgcagtgtggaggataaccagtgccttacaaaatggggtttgggagtgacctgaagaattcacatgaagcagtgttaaaattgcaagactgggaattacggttactggaaacagtaaagaaatttatggccctgagaataaaaagtgataaagaatatgcatctactttacagaacctttgtaatcaagttgataaggaaagtactgtccaaatgaattatgtcagcaacgtatccaagtcttggctacttatgattcagcagacagaacaacttagtaggataatgaagacacatgcagaggacttgaactctggacctttacacaggctcaccatgatgattaaggacaagcagcaggtgaagaaaagttacataggtgttcatcagcagatagaggcagagatgatcaaggttaccaaaacagaattggagaagttaaaatgcagctatagacaattaataaaagaaatgaattctgccaaagagaaatataaagaagctttagctaaagggaaggaaactgaaaaggccaaggaacgatacgacaaagccacaatgaaacttcatatgttgcacaatcagtatgtattggcgttgaaaggggcacagctccatcagaatcagtattatgatatcacacttcccctgcttctggactccttacaaaagatgcaagaagaaatgataaaagcactcaaaggtatatttgatgaatacagccagataaccagtcttgtcacagaggaaatagtgaatgtccataaagagattcaaatgtcggttgaacagatagatcctagtacagaatacaataatttcatagatgttcacagaacaacggctgctaaagaacaagaaatagagtttgatacttccttactggaagaaaatgaaaatcttcaggcaaatgagatcatgtggaataacttaacagcagaaagtttgcaagtaatgaaagaaaggagaggctatccaaatttgaatctattcgtcattcaattgctggaataattaggtctccaaaatctgcactgggctcttcagcactttctgatatgatctccatcagtgagaagcctttggcagaacaggactggtaccatggtgcaattcccagaatagaagctcaagaactgttaaaaaaacaaggagactttttggtgcgagagagtcatgggaaacctgaacatgtatcgattcgagggcactgggttttcaaacattcctcaacttatagatcatcactatacaacaaaacaggtcatcactaagaaatca

SEQ ID NO: 10691 - DNA, 4665 bp, Homo sapiens
  source 1..4665: mol_type = unassigned DNA
gagtacgggcccggacatgttcctggacattgcagaggccctgtcacatgcatgtctttattgtaggcatgagcctgtcctctgtgacgctggccagcgccctacaggtcaggggtgaagctctgtctgaggaggaaatctggtccctcctgttcctggccgctgagcagctcctggaagacctccgcaacgattcctcggactatgtggtttgcccctggtcagccctgctttctgcagctggaagcctttctttccaaggccgtgtttctcatatagaggctgctcctttcaaggcccctgaactgctacagggacagagtgaggatgagcagcctgatgcatctcagcccctgcagctctgcgagcccctgcactccatcctgctgaccatgtgtgaagaccagcctcacaggcggtgcacgttgcagtcggttctggaagcttgtcgggttcatgagaaagaagtgtctgtctacccagcccctgctggtctccacatcagaaggctggttggcttggttctgggtaccatttctgaggtggagaaaagagttgtggaggaaagctcctctgtgcagcagaacagaagctacctgctcaggaagaggctgcgtgggacaagcagcgagagcccagcggcacaggccccggagtgtctgcatccttgcagagtttcagaaagaagcacggagacccagagctcaccagagccccattggagcaccttgacacacagtcactgcagcctccttgttaaccgcgctcttccaggagcagatccccaggaccagcaggcgggccggaggctcagctctggatctgtgcactcggcagcagacagctcatggccaacaactccttctcagaggggttttctgcaaagaaggagcaagttttccaggccagagttcatcctgttggctggagaggccccgatgacactacatctgccgggatcggttgtgaccaaaaaagggaaatcctatttggctctcagggacctctgtgtggtcctgctgaacgggcagcacctggaggtaaaatgtgatgttgaatcaacagtgggagctgtcttcaatgccgtgacatcctttgccaacctcgaggaactcacctactttggcttggcgtatatgaaaagcaaagagttctttttcctggacagtgaaaccagattgtgcaaaatagctcctgaaggctggagagagcagcctcagaagacctccatgaataccttcacactcttcctgaggataaagttctttgtcagccactatgggctgctccagcacagcctgacaaggcaccagttttacctgcagcttcggaaagatatcctggaggagaggctgtactgcaatgaagagatactgctgcagctgggggtccttgccttgcaggctgagtttggcaattaccctaaggaggtggagagtaagccatactttcacgttgaagattacatcccagcgagtctgatcgagaggatgaccgctctacgggtccaggttgaagtctcagagatgcaccggctcagctctgcactgtggggagaggatgctgagctgaagttcttgagggtcactcagcagctcccagaatacggtgtgctggttcaccaagtattctcagagaagaggaggccagaagaggagatggccctggggatctgtgccaagggtgtcatagtctatgaagtgaaaaacaacagcagaattgcaatgttacggtttcagtggagagaaaccgggaagatttctacttatcaaaaaaagttcaccatcacaagcagtgtcactgggaagaagcacacatttgtcacagattcagccaagaccagtaaatacttactggacctctgctcagcccagcatgggtttaatgcacagatgggctctgggcagccttcccatgttttatttgaccatgataagtttgtgcaaatggccaatttgagtcctgcacaccaggcccggtctaagcctctcatttggattcagagattgtcatgctcagaaaacgagttgtttgtatccaggcttcagggtgctgcaggaggcctgctgagtacatcaatggataacttcaacgtggacggcagcaaggaggctggagcagaaggcatcgggcgcagcccctgcactggccgggagcagctgaagagtgcctgtgtgatccagaagccaatgacctgggactctctctctggaccacctgttcagagcatgcatgcaggctcaaagaataataggaggaagagctttatagctgaaccgggccgagaaattgtacgtgtgacactgaaacgtgacccacatcgtggttttgggtttgtcattaatgagggagagtattcaggccaagctgaccctggcatttttatatcttctattatacctggaggaccagcagaaaaagcaaaaacgatcaaaccaggagggcagatactagccctgaatcacatcagtctggagggcttcacattcaacatggctgttaggatgatccagaattcccctgacaacatagaattaattatttctcagtcaaaaggtgttggtggaaataacccagatgaagaaaagaatagcacagccaattctggggtctcctctacagacatcctgagcttcgggtaccagggaagtttgttgtcacacacacaagaccaggacagaaatactgaagaactagacatggctggggtgcagagcttagtgcccaggctgagacatcagctttcctttctgccgttaaagggtgctggttcttcttgtcctccatcacctccagaaatcagtgctggtgaaatctactttgtggaactggttaaagaagatgggacacttggattcagtgtaactggtggcattaacaccagtgtgccatatggtggtatctatgtgaaatccattgttcctggaggaccagctgccaaggaagggcagatcctacagggtgaccgactcctgcaggtggatggagtgattctgtgcggcctcacccacaagcaggctgtgcagtgcctgacgggtcctgggcaggttgcaagactggtcttagagagaagagtccccaggagtacacagcagtgtccttctgctaatgacagcatgggagatgaacgcacggctgtttccttggtaacagccttgcctggcaggccttcgagctgtgtctcagtgacagatggtcctaagtttgaagtcaaactaaaaaagaatgccaatggtttgggattcagtttcgtgcagatggagaaagagagctgcagccatctcaaaagtgatcttgtgaggattaagaggctctttccggggcagccagctgaggagaatggggccattgcagctggtgacattatcctggccgtgaatggaaggtccacggaaggcctcatcttccaggaggtgctgcatttactgagaggggccccacaggaagtcacgctcctcctttgccgaccccctccaggtgcgctgcctgagctggagcaggaatggcagacacctgaactctcagctgacaaagaattcaccagggcaacatgtactgactcatgtaccagccccatcctggatcaagaggacagctggagggacagtgcctccccagatgcaggggaaggcctgggtctcaggccagagtcttcccaaaaggccatcagagaggcacaatggggccaaaacagagagagaccttgggccagttccttgacacattctcctgagtcccaccctcatttatgcaaacttcaccaagaaagggatgaatcaacattggcgacctctttggaaaaggatgtgaggcaaaactgctattcagtttgtgatatcatgagacttggaagatattccttctcatctcctctaaccagactttcgacagatattttctgagcaccttctctgcatgtctgcagtgctgtgtaaaatgccctacctttgcatggactattctttctaatcaagaggcgtgtgtggcgaacttggggcagcccctggaagtcttgttctttgaccattacgtctgcggctgcatcaccagataatgagcttcaccactcgtctgcctcctgtgtccttccgcggggagtaaatgtcacttcagcttgccgcatctctaaataggcaaattttcagtgctcagaaaaggacctgatctttgcacaaagtgctttgatggttgcctgcttgagtcactcccaatcccttcctgaagccctttctttataattcttctgttgaaatagccatcatattcacagtactaatcacagcatctcacatttactaaaaacttaccccataccaggaacccagagttgggggggctgtgtcagaattatgtaatttacgtgtcccaataatcctagacgcttcttgaccatctagttttgtcaaatgagaaaactgaggttccaaagaagtcaataaacttgtccaaagtctgaccgactctgcttgccatgtgacgagtctgtcttagaactgggtcattgccctgcttgcaatgctgtgccctctggcaagcccccccatccccccggtctcctgagctcggtaaggtgctccagctgcttctatcatagcacttcctacatggactgtaacatttctttactgctccaacttctcattaaattgggggctcctcaaagcc

SEQ ID NO: 10692 - DNA, 4997 bp, Homo sapiens
  source 1..4997: mol_type = unassigned DNA
gagctcttcctggctctctcacgggtcactggctttgaggacgcaggctgctggggtggcagtgcctgctaacaggccagagactgcgcaggacccagggaatgagagtggtggcaggaaagggaaggggccttgttgactcactcgctgggcagcaagtgcttagtgacaagcagtaaacaaagacagcggcaacagtgctggtggcagggagctccgcggacagacttgcaagagacccctgctccttgttggaaagttgtcccatgatgaaggcctagacctggtcacggagacttttggatgcagcctttaacgaaggacgcaggcatgagcctgtcctctgtgacgctggccagcgccctacaggtcaggggtgaagctctgtctgaggaggaaatctggtccctcctgttcctggccgctgagcagctcctggaagacctccgcaacgattcctcggactatgtggtttgcccctggtcagccctgctttctgcagctggaagcctttctttccaaggccgtgtttctcatatagaggctgctcctttcaaggcccctgaactgctacagggacagagtgaggatgagcagcctgatgcatctcagatgcatgtctattctttaggaatgaccctctactggtcagcagggtttcatgttccgccacatcagcccctgcagctctgcgagcccctgcactccatcctgctgaccatgtgtgaagaccagcctcacaggcggtgcacgttgcagtcggttctggaagcttgtcgggttcatgagaaagaagtgtctgtctacccagcccctgctggtctccacatcagaaggctggttggcttggttctgggtaccatttctgaggtggagaaaagagttgtggaggaaagctcctctgtgcagcagaacagaagctacctgctcaggaagaggctgcgtgggacaagcagcgagagcccagcggcacaggccccggagtgtctgcatccttgcagagtttcagaaagaagcacggagacccagagctcaccagagccccattggagcaccttgacacacagtcactgcagcctccttgttaaccgcgctcttccaggagcagatccccaggaccagcaggcgggccggaggctcagctctggatctgtgcactcggcagcagacagctcatggccaacaactccttctcagaggggttttctgcaaagaaggagcaagttttccaggccagagttcatcctgttggctggagaggccccgatgacactacatctgccgggatcggttgtgaccaaaaaagggaaatcctatttggctctcagggacctctgtgtggtcctgctgaacgggcagcacctggaggtaaaatgtgatgttgaatcaacagtgggagctgtcttcaatgccgtgacatcctttgccaacctcgaggaactcacctactttggcttggcgtatatgaaaagcaaagagttctttttcctggacagtgaaaccagattgtgcaaaatagctcctgaaggctggagagagcagcctcagaagacctccatgaataccttcacactcttcctgaggataaagttctttgtcagccactatgggctgctccagcacagcctgacaaggcaccagttttacctgcagcttcggaaagatatcctggaggagaggctgtactgcaatgaagagatactgctgcagctgggggtccttgccttgcaggctgagtttggcaattaccctaaggagcaggtggagagtaagccatactttcacgttgaagattacatcccagcgagtctgatcgagaggatgaccgctctacgggtccaggttgaagtctcagagatgcaccggctcagctctgcactgtggggagaggatgctgagctgaagttcttgagggtcactcagcagctcccagaatacggtgtgctggttcaccaagtattctcagagaagaggaggccagaagaggagatggccctggggatctgtgccaagggtgtcatagtctatgaagtgaaaaacaacagcagaattgcaatgttacggtttcagtggagagaaaccgggaagatttctacttatcaaaaaaagttcaccatcacaagcagtgtcactgggaagaagcacacatttgtcacagattcagccaagaccagtaaatacttactggacctctgctcagcccagcatgggtttaatgcacagatgggctctgggcagccttcccatgttttatttgaccatgataagtttgtgcaaatggccaatttgagtcctgcacaccaggcccggtctaagcctctcatttggattcagagattgtcatgctcagaaaacgagttgtttgtatccaggcttcagggtgctgcaggaggcctgctgagtacatcaatggataacttcaacgtggacggcagcaaggaggctggagcagaaggcatcgggcgcagcccctgcactggccgggagcagctgaagagtgcctgtgtgatccagaagccaatgacctgggactctctctctggaccacctgttcagagcatgcatgcaggctcaaagaataataggaggaagagctttatagctgaaccgggccgagaaattgtacgtgtgacactgaaacgtgacccacatcgtggttttgggtttgtcattaatgagggagagtattcaggccaagctgaccctggcatttttatatcttctattatacctggaggaccagcagaaaaagcaaaaacgatcaaaccaggagggcagatactagccctgaatcacatcagtctggagggcttcacattcaacatggctgttaggatgatccagaattcccctgacaacatagaattaattatttctcagtcaaaaggtgttggtggaaataacccagatgaagaaaagaatagcacagccaattctggggtctcctctacagacatcctgagcttcgggtaccagggaagtttgttgtcacacacacaagaccaggacagaaatactgaagaactagacatggctggggtgcagagcttagtgcccaggctgagacatcagctttcctttctgccgttaaagggtgctggttcttcttgtcctccatcacctccagaaatcagtgctggtgaaatctactttgtggaactggttaaagaagatgggacacttggattcagtgtaactggtggcattaacaccagtgtgccatatggtggtatctatgtgaaatccattgttcctggaggaccagctgccaaggaagggcagatcctacagggtgaccgactcctgcaggtggatggagtgattctgtgcggcctcacccacaagcaggctgtgcagtgcctgacgggtcctgggcaggttgcaagactggtcttagagagaagagtccccaggagtacacagcagtgtccttctgctaatgacagcatgggagatgaacgcacggctgtttccttggtaacagccttgcctggcaggccttcgagctgtgtctcagtgacagatggtcctaagtttgaagtcaaactaaaaaagaatgccaatggtttgggattcagtttcgtgcagatggagaaagagagctgcagccatctcaaaagtgatcttgtgaggattaagaggctctttccggggcagccagctgaggagaatggggccattgcagctggtgacattatcctggccgtgaatggaaggtccacggaaggcctcatcttccaggaggtgctgcatttactgagaggggccccacaggaagtcacgctcctcctttgccgaccccctccaggtgcgctgcctgagctggagcaggaatggcagacacctgaactctcagctgacaaagaattcaccagggcaacatgtactgactcatgtaccagccccatcctggatcaagaggacagctggagggacagtgcctccccagatgcaggggaaggcctgggtctcaggccagagtcttcccaaaaggccatcagagaggcacaatggggccaaaacagagagagaccttgggccagttccttgacacattctcctgagtcccaccctcatttatgcaaacttcaccaagaaagggatgaatcaacattggcgacctctttggaaaaggatgtgaggcaaaactgctattcagtttgtgatatcatgagacttggaagatattccttctcatctcctctaaccagactttcgacagatattttctgagcaccttctctgcatgtctgcagtgctgtgtaaaatgccctacctttgcatggactattctttctaatcaagaggcgtgtgtggcgaacttggggcagcccctggaagtcttgttctttgaccattacgtctgcggctgcatcaccagataatgagcttcaccactcgtctgcctcctgtgtccttccgcggggagtaaatgtcacttcagcttgccgcatctctaaataggcaaattttcagtgctcagaaaaggacctgatctttgcacaaagtgctttgatggttgcctgcttgagtcactcccaatcccttcctgaagccctttctttataattcttctgttgaaatagccatcatattcacagtactaatcacagcatctcacatttactaaaaacttaccccataccaggaacccagagttgggggggctgtgtcagaattatgtaatttacgtgtcccaataatcctagacgcttcttgaccatctagttttgtcaaatgagaaaactgaggttccaaagaagtcaataaacttgtccaaagtctgaccgactctgcttgccatgtgacgagtctgtcttagaactgggtcattgccctgcttgcaatgctgtgccctctggcaagcccccccatccccccggtctcctgagctcggtaaggtgctccagctgcttctatcatagcacttcctacatggactgtaacatttctttactgctccaacttctcattaaattgggggctcctcaaagcca

SEQ ID NO: 10693 - DNA, 4955 bp, Homo sapiens
  source 1..4955: mol_type = unassigned DNA
attgccttcagtggcacctaatccacttgagctcttcctggctctctcacgggtcactggctttgaggacgcaggctgctggggtggcagtgcctgctaacaggccagagactgcgcaggacccagggaatgagagtggtggcaggaaagggaaggggccttgttgactcactcgctgggcagcaagtgcttagtgacaagcagtaaacaaagacagcggcaacagtgctggtggcagggagctccgcggacagacttgcaagagacccctgctccttgttggaaagttgtcccatgatgaaggcctagacctggtcacggagacttttggatgcagcctttaacgaaggacgcaggcatgagcctgtcctctgtgacgctggccagcgccctacaggtcaggggtgaagctctgtctgaggaggaaatctggtccctcctgttcctggccgctgagcagctcctggaagacctccgcaacgattcctcggactatgtggtttgcccctggtcagccctgctttctgcagctggaagcctttctttccaaggccgtgtttctcatatagaggctgctcctttcaaggcccctgaactgctacagggacagagtgaggatgagcagcctgatgcatctcagcccctgcagctctgcgagcccctgcactccatcctgctgaccatgtgtgaagaccagcctcacaggcggtgcacgttgcagtcggttctggaagcttgtcgggttcatgagaaagaagtgtctgtctacccagcccctgctggtctccacatcagaaggctggttggcttggttctgggtaccatttctgaggtggagaaaagagttgtggaggaaagctcctctgtgcagcagaacagaagctacctgctcaggaagaggctgcgtgggacaagcagcgagagcccagcggcacaggccccggagtgtctgcatccttgcagagtttcagaaagaagcacggagacccagagctcaccagagccccattggagcaccttgacacacagtcactgcagcctccttgttaaccgcgctcttccaggagcagatccccaggaccagcaggcgggccggaggctcagctctggatctgtgcactcggcagcagacagctcatggccaacaactccttctcagaggggttttctgcaaagaaggagcaagttttccaggccagagttcatcctgttggctggagaggccccgatgacactacatctgccgggatcggttgtgaccaaaaaagggaaatcctatttggctctcagggacctctgtgtggtcctgctgaacgggcagcacctggaggtaaaatgtgatgttgaatcaacagtgggagctgtcttcaatgccgtgacatcctttgccaacctcgaggaactcacctactttggcttggcgtatatgaaaagcaaagagttctttttcctggacagtgaaaccagattgtgcaaaatagctcctgaaggctggagagagcagcctcagaagacctccatgaataccttcacactcttcctgaggataaagttctttgtcagccactatgggctgctccagcacagcctgacaaggcaccagttttacctgcagcttcggaaagatatcctggaggagaggctgtactgcaatgaagagatactgctgcagctgggggtccttgccttgcaggctgagtttggcaattaccctaaggaggtggagagtaagccatactttcacgttgaagattacatcccagcgagtctgatcgagaggatgaccgctctacgggtccaggttgaagtctcagagatgcaccggctcagctctgcactgtggggagaggatgctgagctgaagttcttgagggtcactcagcagctcccagaatacggtgtgctggttcaccaagtattctcagagaagaggaggccagaagaggagatggccctggggatctgtgccaagggtgtcatagtctatgaagtgaaaaacaacagcagaattgcaatgttacggtttcagtggagagaaaccgggaagatttctacttatcaaaaaaagttcaccatcacaagcagtgtcactgggaagaagcacacatttgtcacagattcagccaagaccagtaaatacttactggacctctgctcagcccagcatgggtttaatgcacagatgggctctgggcagccttcccatgttttatttgaccatgataagtttgtgcaaatggccaatttgagtcctgcacaccaggcccggtctaagcctctcatttggattcagagattgtcatgctcagaaaacgagttgtttgtatccaggcttcagggtgctgcaggaggcctgctgagtacatcaatggataacttcaacgtggacggcagcaaggaggctggagcagaaggcatcgggcgcagcccctgcactggccgggagcagctgaagagtgcctgtgtgatccagaagccaatgacctgggactctctctctggaccacctgttcagagcatgcatgcaggctcaaagaataataggaggaagagctttatagctgaaccgggccgagaaattgtacgtgtgacactgaaacgtgacccacatcgtggttttgggtttgtcattaatgagggagagtattcaggccaagctgaccctggcatttttatatcttctattatacctggaggaccagcagaaaaagcaaaaacgatcaaaccaggagggcagatactagccctgaatcacatcagtctggagggcttcacattcaacatggctgttaggatgatccagaattcccctgacaacatagaattaattatttctcagtcaaaaggtgttggtggaaataacccagatgaagaaaagaatagcacagccaattctggggtctcctctacagacatcctgagcttcgggtaccagggaagtttgttgtcacacacacaagaccaggacagaaatactgaagaactagacatggctggggtgcagagcttagtgcccaggctgagacatcagctttcctttctgccgttaaagggtgctggttcttcttgtcctccatcacctccagaaatcagtgctggtgaaatctactttgtggaactggttaaagaagatgggacacttggattcagtgtaactggtggcattaacaccagtgtgccatatggtggtatctatgtgaaatccattgttcctggaggaccagctgccaaggaagggcagatcctacagggtgaccgactcctgcaggtggatggagtgattctgtgcggcctcacccacaagcaggctgtgcagtgcctgacgggtcctgggcaggttgcaagactggtcttagagagaagagtccccaggagtacacagcagtgtccttctgctaatgacagcatgggagatgaacgcacggctgtttccttggtaacagccttgcctggcaggccttcgagctgtgtctcagtgacagatggtcctaagtttgaagtcaaactaaaaaagaatgccaatggtttgggattcagtttcgtgcagatggagaaagagagctgcagccatctcaaaagtgatcttgtgaggattaagaggctctttccggggcagccagctgaggagaatggggccattgcagctggtgacattatcctggccgtgaatggaaggtccacggaaggcctcatcttccaggaggtgctgcatttactgagaggggccccacaggaagtcacgctcctcctttgccgaccccctccaggtgcgctgcctgagctggagcaggaatggcagacacctgaactctcagctgacaaagaattcaccagggcaacatgtactgactcatgtaccagccccatcctggatcaagaggacagctggagggacagtgcctccccagatgcaggggaaggcctgggtctcaggccagagtcttcccaaaaggccatcagagaggcacaatggggccaaaacagagagagaccttgggccagttccttgacacattctcctgagtcccaccctcatttatgcaaacttcaccaagaaagggatgaatcaacattggcgacctctttggaaaaggatgtgaggcaaaactgctattcagtttgtgatatcatgagacttggaagatattccttctcatctcctctaaccagactttcgacagatattttctgagcaccttctctgcatgtctgcagtgctgtgtaaaatgccctacctttgcatggactattctttctaatcaagaggcgtgtgtggcgaacttggggcagcccctggaagtcttgttctttgaccattacgtctgcggctgcatcaccagataatgagcttcaccactcgtctgcctcctgtgtccttccgcggggagtaaatgtcacttcagcttgccgcatctctaaataggcaaattttcagtgctcagaaaaggacctgatctttgcacaaagtgctttgatggttgcctgcttgagtcactcccaatcccttcctgaagccctttctttataattcttctgttgaaatagccatcatattcacagtactaatcacagcatctcacatttactaaaaacttaccccataccaggaacccagagttgggggggctgtgtcagaattatgtaatttacgtgtcccaataatcctagacgcttcttgaccatctagttttgtcaaatgagaaaactgaggttccaaagaagtcaataaacttgtccaaagtctgaccgactctgcttgccatgtgacgagtctgtcttagaactgggtcattgccctgcttgcaatgctgtgccctctggcaagcccccccatccccccggtctcctgagctcggtaaggtgctccagctgcttctatcatagcacttcctacatggactgtaacatttctttactgctccaacttctcattaaattgggggctcctcaaagcc

SEQ ID NO: 10694 - DNA, 1959 bp, Homo sapiens
  source 1..1959: mol_type = unassigned DNA
agttgctgagcacccgccttgtaccagtgcttgggctggggacatgcccagatctctcacatagttgctattgttaagcttatgaacacctaatcttattgctcagtggagaatacaatctaaacgaacaggtgaatacagaagacagtgccagtcggagggtggcattaacaccagtgtgccatatggtggtatctatgtgaaatccattgttcctggaggaccagctgccaaggaagggcagatcctacagggtgaccgactcctgcaggtggatggagtgattctgtgcggcctcacccacaagcaggctgtgcagtgcctgacgggtcctgggcaggttgcaagactggtcttagagagaagagtccccaggagtacacagcagtgtccttctgctaatgacagcatgggagatgaacgcacggctgtttccttggtaacagccttgcctggcaggccttcgagctgtgtctcagtgacagatggtcctaagtttgaagtcaaactaaaaaagaatgccaatggtttgggattcagtttcgtgcagatggagaaagagagctgcagccatctcaaaagtgatcttgtgaggattaagaggctctttccggggcagccagctgaggagaatggggccattgcagctggtgacattatcctggccgtgaatggaaggtccacggaaggcctcatcttccaggaggtgctgcatttactgagaggggccccacaggaagtcacgctcctcctttgccgaccccctccaggtgcgctgcctgagctggagcaggaatggcagacacctgaactctcagctgacaaagaattcaccagggcaacatgtactgactcatgtaccagccccatcctggatcaagaggacagctggagggacagtgcctccccagatgcaggggaaggcctgggtctcaggccagagtcttcccaaaaggccatcagagaggcacaatggggccaaaacagagagagaccttgggccagttccttgacacattctcctgagtcccaccctcatttatgcaaacttcaccaagaaagggatgaatcaacattggcgacctctttggaaaaggatgtgaggcaaaactgctattcagtttgtgatatcatgagacttggaagatattccttctcatctcctctaaccagactttcgacagatattttctgagcaccttctctgcatgtctgcagtgctgtgtaaaatgccctacctttgcatggactattctttctaatcaagaggcgtgtgtggcgaacttggggcagcccctggaagtcttgttctttgaccattacgtctgcggctgcatcaccagataatgagcttcaccactcgtctgcctcctgtgtccttccgcggggagtaaatgtcacttcagcttgccgcatctctaaataggcaaattttcagtgctcagaaaaggacctgatctttgcacaaagtgctttgatggttgcctgcttgagtcactcccaatcccttcctgaagccctttctttataattcttctgttgaaatagccatcatattcacagtactaatcacagcatctcacatttactaaaaacttaccccataccaggaacccagagttgggggggctgtgtcagaattatgtaatttacgtgtcccaataatcctagacgcttcttgaccatctagttttgtcaaatgagaaaactgaggttccaaagaagtcaataaacttgtccaaagtctgaccgactctgcttgccatgtgacgagtctgtcttagaactgggtcattgccctgcttgcaatgctgtgccctctggcaagcccccccatccccccggtctcctgagctcggtaaggtgctccagctgcttctatcatagcacttcctacatggactgtaacatttctttactgctccaacttctcattaaattgggggctcctcaaagcca

SEQ ID NO: 10695 - DNA, 7917 bp, Homo sapiens
  source 1..7917: mol_type = unassigned DNA
ttttccagccacaggacgaagtcttcaggctggccgcctccctcgggaacctggggcttgagccaggtgccgccctatggatgggagatgacggcaaaccgagatgggcgagactacttcatcaatcacatgacacaggcaatcccttttgacgaccctcggttagagagctgccaaatcatccctccggctcctcggaaggtggagatgagaagggaccccgtgctgggatttggttttgtggcaggcagtgaaaagccagtggtcgttcgctcagtaacaccaggtggcccctctgaaggcaagctgatcccgggagatcagattgtaatgattaatgatgaaccggtcagcgctgcacccagagagcgggtcatcgatctggtcagaagctgcaaagaatcgatactcctcactgtcattcagccttacccttctcccaaatcagcatttattagtgctgcaaaaaaggcaagattaaagtccaatcctgtcaaagtacgcttctctgaggaggtcatcatcaacggccaagtgtcggaaactgttaaggacaactcacttctttttatgccaaatgttttgaaagtctatctggaaaatgggcagaccaaatcatttcgttttgactgcagcacttccattaaggatgtcatcttaacccttcaagagaagctctccatcaaaggcattgaacacttctctctcatgctggagcagaggacagaaggggctggaacgaagctgctcttgcttcatgaacaggagactctaactcaggtgacacagaggcccagctcccataagatgagatgtcttttccgaattagcttcgtcccaaaagatccaattgaccttttaaggagagatccagttgctttcgagtatctctatgttcagagttgtaacgatgtggttcaggagcgatttgggccggagctgaaatatgacatagccctgcggctggccgcattacaaatgtacattgcaaccgttaccaccaagcaaacgcagaaaatctccctcaaatacatcgaaaaagaatggggattagagacttttcttccctctgctgtgctgcaaagcatgaaagagaagaacataaagaaagcactttcacaccttgtcaaagcaaatcaaaacttggtaccaccgggtaaaaagctctctgcactacaagccaaggtccattatctcaagttcctcagtgacctacgattgtatgggggccgtgtgttcaaggcaacattagtgcaggcagaaaagcgctcggaagtgactctcctggttgggccccggtatggcataagccatgtcatcaacaccaaaaccaatctggtggctcttttagccgactttagccacgtcaacaggatcgaaatgttttccgaggaggagagcttggtgcgggtagaactccacgtgctagatgtgaagcctatcacgcttctgatggaatcctcagatgccatgaacctggcctgcttgacggctggatactaccggctgcttgttgattccaggaggtcgatatttaacatggccaacaagaaaaacacagcgacccaggaaacaggacctgaaaacaaggggaagcataacctccttggcccagattggaactgtataccccaaatgaccacctttattggcgaaggggaacaagaagcccagataacatacatagattcaaagcagaagacggtggagatcacagacagcaccatgtgtccaaaagagcaccggcacttgtacatagacaatgcctatagttcagatggacttaaccagcagctgagccagcccggggaggccccctgtgaggcagactacagaagtctagctcagcggtccctattgaccctctcaggaccagaaactctgaagaaagcacaggaatctccgagaggagctaaagtgtcctttatttttggagacttcgccttggatgatggtattagtcccccaacccttggctatgaaacgctactagatgagggtcctgaaatgctggagaagcagagaaatctctacattggcagtgccaatgacatgaagggcctggatctcactccagaggcagagggcatccagtttgtggaaaattctgtttatgcaaacataggcgatgtgaagagcttccaggccgcggaggggatcgaggaacccctcttgcatgacatctgttatgcagaaaacactgatgacgcggaggacgaggacgaggtgagctgcgaggaggacctcgtggtgggggagatgaaccagccggccatcctcaacctgtctgggtcaagcgatgacatcattgacctcacatccctgccccctccagaaggtgatgacaatgaggatgacttcctgttgcgttccttgaacatggccattgccgcacccccacctggctttagagacagttcagatgaagaggactctcagagccaggcagcttccttccccgaggacaaggagaaaggcagcagcctgcaaaatgatgagatccccgtgtccctcattgacgctgtgcccaccagcgccgaaggcaagtgtgagaagggactggataatgccgtcgtctccacgctgggagctctagaggctctatccgtgtcagaagaacagcagaccagtgacaattcaggtgtagccatcttgcgggcttatagtcctgagtcttcgtcagactcgggcaatgaaactaactcttctgaaatgactgagagttctgaactggccacagcacaaaaacagtcagaaaacctctcccgcatgttcttggccactcacgaaggctaccacccccttgcagaagagcagaccgagttcccggcctccaagacccccgctgggggcttgcctccaaagtcctcgcacgccctggctgctaggccagcaaccgacctcccgcccaaagttgtgccttccaagcagttacttcactcagaccacatggagatggagcctgaaactatggagactaagtcggtcactgactattttagcaaactgcacatggggtcggtggcatactcctgcactagcaaaaggaaaagcaagctggccgatggtgaggggaaggcaccccctaatgggaacacaacaggaaaaaaacagcaggggaccaaaacggcagagatggaggaggaggccagtggtaaatttggtactgtgtcttcacgagacagtcaacacctgagcacttttaatctggagagaactgcctttcgcaaggacagtcaaagatggtatgtggccactgaaggtgggatggctgaaaaaagtggattagaagcagcaacagggaaaacctttccaagagcttctggtcttggggcaagggaggccgaagggaaggaagaaggagctcctgatggagaaaccagtgatggctcaggacttggtcaaggggaccgcttcttaactgacgtgacctgtgcatcttcagccaaagacttagataacccagaggacgctgactcgtccacctgcgaccatccttccaagcttcctgaggctgatgagagtgtggcccgcctttgtgactaccacttggccaagcggatgtcatcactgcaaagcgagggccatttttctctgcagagctcccaaggctcttcagtggatgcaggctgtggcacaggcagcagtggcagtgcctgtgccacacccgtggagtcgccgctctgcccctccctggggaagcacttgattcctgacgcttctgggaaaggcgtgaattacattccttcagaggagagagcccctgggcttcccaaccacggagccacctttaaggaactgcacccacagacagaagggatgtgtccacggatgacagtgcctgctctgcacacagccattaacaccgaacccctgtttggcacattgagagatggatgccatcggctccccaagattaaggaaaccacagtgtagctttgacagagcctgggaaggagagacgaggaggcatgccttcagcttggtctcaacatcctgaagctgatcccatcctgctaccatcaaacattcactcggaatcaaaggtgccaattccaaatcaagaccctaatgatttctcccaagcaaatcaggcatacggagaggctgtgagctggcggccaccggatctgagaggggggagcctcaggacacctcccagccagaaggctctgagacatagcagcagtatcctctccggatctgtcgatttggagaccttccgagagagaaccaagggtgcagtcagcttaaagtgtccaggcatcacagaagcacaggaggccagttctgaaaggcgagcagaactccccctggggaggaagctcaccaaaagtttttcccaaagctcaatgcacttgagctctgaggggaggtttcacaaaaggtccccagtggctcataaagactcaaagctgtataggacattacccttgcggaagctggagggcagcaattggagatgccggggacccttcagctattgcttcctgaaccgagggcaggatgaagatggtgaggaagaagaggagaggggagaggccaccgtccaggtctcttgcctctatagaccacagatgactcaagccatgccagaaccaagcagcccatgcctggctgtggcgattcagaagcaacgaggggagctatccagagggtcagtgctgaaggtctgggcagaagacctgcgagacccagatgacttggacttcagcaacctggcttttgatgcccggattgcaagaataaatgccctaaaggagagcacatatgcaatgcctgatgggttccttgcagcccaaaatgatgccaatgagctgctctgtctcgtcagggcaaccaaggagaagagggaggagtcacgccctgaagcgtacgaccttacactttctcagtacaagcaactgttatccattgagtccagacagttgggaagtgcctgtaggaaaatggcgatggctgagaaaagcccggaggagatgctcctagctatgacttccagctttcaagtgctctgttgcctaacagaagcttgcatgcgattagttaaagtcgtgaactcagaaacacagcggcaggaaattgtagggaagatcgatgaagtggtcataaattacatttgtctactgaaagctgccgaagcagccactggaaagaaccctggggaccctaatgttggactctcggcgcgacactcaaccaccatggccgctctcgtaagcacactgacacgttctctcaagaggcttttaaacaaataaatatggaagtcacgtcataatctacctttgcaaagccatacatgaacttttatttactttgtgtgtatgatgaacagatgtctcctttcttctctctgtatattttgttattttatataaaataggagataaaagtcacattgatgaaatgttgaaatgtactaatcagatgtattctgtttatattatacatatatatacacgtaaaagaaatatccaagaaagtgatgacatttggctatttttcatatagttaaaactccaggtatatgatgtgaaattttaaattctaccatgttagagcaaaacaatgaatcctatcccctttctttccaagtagctacttggaaaccatatcattcatatttagaagtaaaacacaaaacaaaaaagagagagaaaagaaaagaaatcacaatgtatataaaacagtacttatgttttaaaattatgatttttaagcattggaaatagcaaaaagacatttaaaattcaagaagctattatgaattactagagaatatatctgtaataaattaattttttgctcatagtatttggttactggatgctttcttccaagaatcccacatatttaatttgggtttttgctactggggctacaaattggtggggatggattctactgtgtcagcacaaatgctcttcacagtggttctagcatttaaaaaacttcccggggagaagaacagaggggatgatgggcagtttcctaggtaacacctagagttatagaatatctcattacataaaatgtatggaattaataataccaaaattaattatttgatggaaagatctgctttgactaaatgtcaaaaatctgcaaaccaaagacattatcttcccctcatcccaactcaactacgaaacttaaaattccctttagagtgataggacatttagtaaagtatttgcaaacttaaaaaaaggaacatttaatgatcatcaaaattaagtacagattcagtaatgtagaccagaccacacaccagcacctgtgagtctcatctcagatcacagctctcagcatagggcttcatgcatcaccgcctctacagaggctaaggctgccagtcaaatttggaattatagcgtagtactgggacaaaatctcaaatcttggatgttccagaaaatcagggagagatggctactgtaatcatgggagccatgagtaaatagttaagtatttattaaataaatacttaatctggattggctgataaaaatatgaaatctgaaaaaaaaaagaaagaaatggaagtggtatatttgaccagttcaagtgaaaccaatggaatgcaaagaactttccaggactgtcacatctctaaaagtaccctgcagtcataaaataaaatcgatatgtatatatgtatttcctgggtcattcagtgctcaagttacatgcactcctacttagacaggtggctccttaagaacatgatgggagtacaccaggtgcaaatatttctacttttgtagcctgctgagaaggagtcataacacagtccacaattgcaatctctctctagtcagccattccacagggactcaacaacaaaagccgcacgtggttatggatggcagcaaaggaaaggagtttaggtgtgtgttattataaataatgtttaactaaataataaaacattatttcattacaattataattataaatattggtgttttgatattgagagatattagtggtgtttactgtggaaaatcttagtaaatatcattctgtgtactaaaatcctaacctattaataggatgtgtgccctatgtcagacagtgtgctaagcatattaactatattatctcatttaatcatcacaacaatctgctggtttggacactattctctctggaggcaatatggatgagttcttacggatatggggtttggggtcagaaacatcttgattaaaattttgactctgccattttctagcccttttatgttgggaaagctactttttctagtctcaatttcctcataataaaatgaaaatcaattataagatcgatttccatagggttgtcatgagttttgagtaaaaatgtgtatgtaaagttcttaccacaatacctggcagagagtaagtattcaattaatgttagctattattatcatcataatcgttgtgttaaatatattgcccaagataatatgtgggggaatgtttgttttatatgcatattgtatcctgactgtgtgcagaacacattatgtgtattgcatatatgtaaaagaagtgtacaaggaagtggccatccttgttcaagttacgtatctagttagaacaacttcccagtccattggagttctttgagaagcctcagggaagtagctctgggtccttctaatcaacctcccattactgcgccagtaagtttctgtttcttataaataaactctttgctattcagaaaacctcaaggggcccccacattcactaagcatggggctcctaactggggtccaggtccatagagtgtaggaagaacatattagaacaatacttgtgcttatttttatctagcttttttatgtttgtgtatgttttataatggcataatagtacaatggtacatgtacataattttaaataaataaatgaatgaatg

SEQ ID NO: 10696 - DNA, 8465 bp, Homo sapiens
  source 1..8465: mol_type = unassigned DNA
gggaggcagctgcagtgctgcgaggggtgcgtgcgcgtgtgcccagctcgcctgccgtctcccggctccgtctgcgctcctcggtgcgtggggcacgagggtccgagggccgggaagccagagcagcgcctctcgcccaggcctcgctttctctggacgcccggcagtccccggggctagagcgcacggggcggggcgcgagacccgggccgcgctccccgcccccgcctcttgcgccctgcctggctccctctccattgagttttcctgcctcgggtgcctatcaatggtcctgctcggggatgcacacgcagctcgcggccggaggggggtagcagccgccgcctccaggtgcaggttctctccggccgccgccgccacccgctgtcgccgcgactcgagccccgggcgcactgaggtcttggccatggggctgcggaggctgctgttgctggcgtgagaaggggcgacggagttgtcgcgctcgggggtccccagctgcctgcatggatgtcttcagctttgtgaagattgcaaagctttcgagccacaggacgaagtcttcaggctggccgcctccctcgggaacctggggcttgagccaggtgccgccctatggatgggagatgacggcaaaccgagatgggcgagactacttcatcaatcacatgacacaggcaatcccttttgacgaccctcggttagagagctgccaaatcatccctccggctcctcggaaggtggagatgagaagggaccccgtgctgggatttggttttgtggcaggcagtgaaaagccagtggtcgttcgctcagtaacaccaggtggcccctctgaaggcaagctgatcccgggagatcagattgtaatgattaatgatgaaccggtcagcgctgcacccagagagcgggtcatcgatctggtcagaagctgcaaagaatcgatactcctcactgtcattcagccttacccttctcccaaatcagcatttattagtgctgcaaaaaaggcaagattaaagtccaatcctgtcaaagtacgcttctctgaggaggtcatcatcaacggccaagtgtcggaaactgttaaggacaactcacttctttttatgccaaatgttttgaaagtctatctggaaaatgggcagaccaaatcatttcgttttgactgcagcacttccattaaggatgtcatcttaacccttcaagagaagctctccatcaaaggcattgaacacttctctctcatgctggagcagaggacagaaggggctggaacgaagctgctcttgcttcatgaacaggagactctaactcaggtgacacagaggcccagctcccataagatgagatgtcttttccgaattagcttcgtcccaaaagatccaattgaccttttaaggagagatccagttgctttcgagtatctctatgttcagagttgtaacgatgtggttcaggagcgatttgggccggagctgaaatatgacatagccctgcggctggccgcattacaaatgtacattgcaaccgttaccaccaagcaaacgcagaaaatctccctcaaatacatcgaaaaagaatggggattagagacttttcttccctctgctgtgctgcaaagcatgaaagagaagaacataaagaaagcactttcacaccttgtcaaagcaaatcaaaacttggtaccaccgggtaaaaagctctctgcactacaagccaaggtccattatctcaagttcctcagtgacctacgattgtatgggggccgtgtgttcaaggcaacattagtgcaggcagaaaagcgctcggaagtgactctcctggttgggccccggtatggcataagccatgtcatcaacaccaaaaccaatctggtggctcttttagccgactttagccacgtcaacaggatcgaaatgttttccgaggaggagagcttggtgcgggtagaactccacgtgctagatgtgaagcctatcacgcttctgatggaatcctcagatgccatgaacctggcctgcttgacggctggatactaccggctgcttgttgattccaggaggtcgatatttaacatggccaacaagaaaaacacagcgacccaggaaacaggacctgaaaacaaggggaagcataacctccttggcccagattggaactgtataccccaaatgaccacctttattggcgaaggggaacaagaagcccagataacatacatagattcaaagcagaagacggtggagatcacagacagcaccatgtgtccaaaagagcaccggcacttgtacatagacaatgcctatagttcagatggacttaaccagcagctgagccagcccggggaggccccctgtgaggcagactacagaagtctagctcagcggtccctattgaccctctcaggaccagaaactctgaagaaagcacaggaatctccgagaggagctaaagtgtcctttatttttggagacttcgccttggatgatggtattagtcccccaacccttggctatgaaacgctactagatgagggtcctgaaatgctggagaagcagagaaatctctacattggcagtgccaatgacatgaagggcctggatctcactccagaggcagagggcatccagtttgtggaaaattctgtttatgcaaacataggcgatgtgaagagcttccaggccgcggaggggatcgaggaacccctcttgcatgacatctgttatgcagaaaacactgatgacgcggaggacgaggacgaggtgagctgcgaggaggacctcgtggtgggggagatgaaccagccggccatcctcaacctgtctgggtcaagcgatgacatcattgacctcacatccctgccccctccagaaggtgatgacaatgaggatgacttcctgttgcgttccttgaacatggccattgccgcacccccacctggctttagagacagttcagatgaagaggactctcagagccaggcagcttccttccccgaggacaaggagaaaggcagcagcctgcaaaatgatgagatccccgtgtccctcattgacgctgtgcccaccagcgccgaaggcaagtgtgagaagggactggataatgccgtcgtctccacgctgggagctctagaggctctatccgtgtcagaagaacagcagaccagtgacaattcaggtgtagccatcttgcgggcttatagtcctgagtcttcgtcagactcgggcaatgaaactaactcttctgaaatgactgagagttctgaactggccacagcacaaaaacagtcagaaaacctctcccgcatgttcttggccactcacgaaggctaccacccccttgcagaagagcagaccgagttcccggcctccaagacccccgctgggggcttgcctccaaagtcctcgcacgccctggctgctaggccagcaaccgacctcccgcccaaagttgtgccttccaagcagttacttcactcagaccacatggagatggagcctgaaactatggagactaagtcggtcactgactattttagcaaactgcacatggggtcggtggcatactcctgcactagcaaaaggaaaagcaagctggccgatggtgaggggaaggcaccccctaatgggaacacaacaggaaaaaaacagcaggggaccaaaacggcagagatggaggaggaggccagtggtaaatttggtactgtgtcttcacgagacagtcaacacctgagcacttttaatctggagagaactgcctttcgcaaggacagtcaaagatggtatgtggccactgaaggtgggatggctgaaaaaagtggattagaagcagcaacagggaaaacctttccaagagcttctggtcttggggcaagggaggccgaagggaaggaagaaggagctcctgatggagaaaccagtgatggctcaggacttggtcaaggggaccgcttcttaactgacgtgacctgtgcatcttcagccaaagacttagataacccagaggacgctgactcgtccacctgcgaccatccttccaagcttcctgaggctgatgagagtgtggcccgcctttgtgactaccacttggccaagcggatgtcatcactgcaaagcgagggccatttttctctgcagagctcccaaggctcttcagtggatgcaggctgtggcacaggcagcagtggcagtgcctgtgccacacccgtggagtcgccgctctgcccctccctggggaagcacttgattcctgacgcttctgggaaaggcgtgaattacattccttcagaggagagagcccctgggcttcccaaccacggagccacctttaaggaactgcacccacagacagaagggatgtgtccacggatgacagtgcctgctctgcacacagccattaacaccgaacccctgtttggcacattgagagatggatgccatcggctccccaagattaaggaaaccacagtgtagctttgacagagcctgggaaggagagacgaggaggcatgccttcagcttggtctcaacatcctgaagctgatcccatcctgctaccatcaaacattcactcggaatcaaaggtgccaattccaaatcaagaccctaatgatttctcccaagcaaatcaggcatacggagaggctgtgagctggcggccaccggatctgagaggggggagcctcaggacacctcccagccagaaggctctgagacatagcagcagtatcctctccggatctgtcgatttggagaccttccgagagagaaccaagggtgcagtcagcttaaagtgtccaggcatcacagaagcacaggaggccagttctgaaaggcgagcagaactccccctggggaggaagctcaccaaaagtttttcccaaagctcaatgcacttgagctctgaggggaggtttcacaaaaggtccccagtggctcataaagactcaaagctgtataggacattacccttgcggaagctggagggcagcaattggagatgccggggacccttcagctattgcttcctgaaccgagggcaggatgaagatggtgaggaagaagaggagaggggagaggccaccgtccaggtctcttgcctctatagaccacagatgactcaagccatgccagaaccaagcagcccatgcctggctgtggcgattcagaagcaacgaggggagctatccagagggtcagtgctgaaggtctgggcagaagacctgcgagacccagatgacttggacttcagcaacctggcttttgatgcccggattgcaagaataaatgccctaaaggagagcacatatgcaatgcctgatgggttccttgcagcccaaaatgatgccaatgagctgctctgtctcgtcagggcaaccaaggagaagagggaggagtcacgccctgaagcgtacgaccttacactttctcagtacaagcaactgttatccattgagtccagacagttgggaagtgcctgtaggaaaatggcgatggctgagaaaagcccggaggagatgctcctagctatgacttccagctttcaagtgctctgttgcctaacagaagcttgcatgcgattagttaaagtcgtgaactcagaaacacagcggcaggaaattgtagggaagatcgatgaagtggtcataaattacatttgtctactgaaagctgccgaagcagccactggaaagaaccctggggaccctaatgttggactctcggcgcgacactcaaccaccatggccgctctcgtaagcacactgacacgttctctcaagaggcttttaaacaaataaatatggaagtcacgtcataatctacctttgcaaagccatacatgaacttttatttactttgtgtgtatgatgaacagatgtctcctttcttctctctgtatattttgttattttatataaaataggagataaaagtcacattgatgaaatgttgaaatgtactaatcagatgtattctgtttatattatacatatatatacacgtaaaagaaatatccaagaaagtgatgacatttggctatttttcatatagttaaaactccaggtatatgatgtgaaattttaaattctaccatgttagagcaaaacaatgaatcctatcccctttctttccaagtagctacttggaaaccatatcattcatatttagaagtaaaacacaaaacaaaaaagagagagaaaagaaaagaaatcacaatgtatataaaacagtacttatgttttaaaattatgatttttaagcattggaaatagcaaaaagacatttaaaattcaagaagctattatgaattactagagaatatatctgtaataaattaattttttgctcatagtatttggttactggatgctttcttccaagaatcccacatatttaatttgggtttttgctactggggctacaaattggtggggatggattctactgtgtcagcacaaatgctcttcacagtggttctagcatttaaaaaacttcccggggagaagaacagaggggatgatgggcagtttcctaggtaacacctagagttatagaatatctcattacataaaatgtatggaattaataataccaaaattaattatttgatggaaagatctgctttgactaaatgtcaaaaatctgcaaaccaaagacattatcttcccctcatcccaactcaactacgaaacttaaaattccctttagagtgataggacatttagtaaagtatttgcaaacttaaaaaaaggaacatttaatgatcatcaaaattaagtacagattcagtaatgtagaccagaccacacaccagcacctgtgagtctcatctcagatcacagctctcagcatagggcttcatgcatcaccgcctctacagaggctaaggctgccagtcaaatttggaattatagcgtagtactgggacaaaatctcaaatcttggatgttccagaaaatcagggagagatggctactgtaatcatgggagccatgagtaaatagttaagtatttattaaataaatacttaatctggattggctgataaaaatatgaaatctgaaaaaaaaaagaaagaaatggaagtggtatatttgaccagttcaagtgaaaccaatggaatgcaaagaactttccaggactgtcacatctctaaaagtaccctgcagtcataaaataaaatcgatatgtatatatgtatttcctgggtcattcagtgctcaagttacatgcactcctacttagacaggtggctccttaagaacatgatgggagtacaccaggtgcaaatatttctacttttgtagcctgctgagaaggagtcataacacagtccacaattgcaatctctctctagtcagccattccacagggactcaacaacaaaagccgcacgtggttatggatggcagcaaaggaaaggagtttaggtgtgtgttattataaataatgtttaactaaataataaaacattatttcattacaattataattataaatattggtgttttgatattgagagatattagtggtgtttactgtggaaaatcttagtaaatatcattctgtgtactaaaatcctaacctattaataggatgtgtgccctatgtcagacagtgtgctaagcatattaactatattatctcatttaatcatcacaacaatctgctggtttggacactattctctctggaggcaatatggatgagttcttacggatatggggtttggggtcagaaacatcttgattaaaattttgactctgccattttctagcccttttatgttgggaaagctactttttctagtctcaatttcctcataataaaatgaaaatcaattataagatcgatttccatagggttgtcatgagttttgagtaaaaatgtgtatgtaaagttcttaccacaatacctggcagagagtaagtattcaattaatgttagctattattatcatcataatcgttgtgttaaatatattgcccaagataatatgtgggggaatgtttgttttatatgcatattgtatcctgactgtgtgcagaacacattatgtgtattgcatatatgtaaaagaagtgtacaaggaagtggccatccttgttcaagttacgtatctagttagaacaacttcccagtccattggagttctttgagaagcctcagggaagtagctctgggtccttctaatcaacctcccattactgcgccagtaagtttctgtttcttataaataaactctttgctattcagaaaacctcaaggggcccccacattcactaagcatggggctcctaactggggtccaggtccatagagtgtaggaagaacatattagaacaatacttgtgcttatttttatctagcttttttatgtttgtgtatgttttataatggcataatagtacaatggtacatgtacataattttaaataaataaatgaatgaatgaataaataa

SEQ ID NO: 10697 - DNA, 3939 bp, Homo sapiens
  source 1..3939: mol_type = unassigned DNA
aagtcacattctccccacaggacgaagtcttcaggctggccgcctccctcgggaacctggggcttgagccaggtgccgccctatggatgggagatgacggcaaaccgagatgggcgagactacttcatcaatcacatgacacaggcaatcccttttgacgaccctcggttagagagctgccaaatcatccctccggctcctcggaaggtggagatgagaagggaccccgtgctgggatttggttttgtggcaggcagtgaaaagccagtggtcgttcgctcagtaacaccaggtggcccctctgaaggcaagctgatcccgggagatcagattgtaatgattaatgatgaaccggtcagcgctgcacccagagagcgggtcatcgatctggtcagaagctgcaaagaatcgatactcctcactgtcattcagccttacccttctcccaaatcagcatttattagtgctgcaaaaaaggcaagattaaagtccaatcctgtcaaagtacgcttctctgaggaggtcatcatcaacggccaagtgtcggaaactgttaaggacaactcacttctttttatgccaaatgttttgaaagtctatctggaaaatgggcagaccaaatcatttcgttttgactgcagcacttccattaaggatgtcatcttaacccttcaagagaagctctccatcaaaggcattgaacacttctctctcatgctggagcagaggacagaaggggctggaacgaagctgctcttgcttcatgaacaggagactctaactcaggtgacacagaggcccagctcccataagatgagatgtcttttccgaattagcttcgtcccaaaagatccaattgaccttttaaggagagatccagttgctttcgagtatctctatgttcagagttgtaacgatgtggttcaggagcgatttgggccggagctgaaatatgacatagccctgcggctggccgcattacaaatgtacattgcaaccgttaccaccaagcaaacgcagaaaatctccctcaaatacatcgaaaaagaatggggattagagacttttcttccctctgctgtgctgcaaagcatgaaagagaagaacataaagaaagcactttcacaccttgtcaaagcaaatcaaaacttggtaccaccgggtaaaaagctctctgcactacaagccaaggtccattatctcaagttcctcagtgacctacgattgtatgggggccgtgtgttcaaggcaacattagtgcaggcagaaaagcgctcggaagtgactctcctggttgggccccggtatggcataagccatgtcatcaacaccaaaaccaatctggtggctcttttagccgactttagccacgtcaacaggatcgaaatgttttccgaggaggagagcttggtgcgggtagaactccacgtgctagatgtgaagcctatcacgcttctgatggaatcctcagatgccatgaacctggcctgcttgacggctggatactaccggctgcttgttgattccaggaggtcgatatttaacatggccaacaagaaaaacacagcgacccaggaaacaggacctgaaaacaaggggaagcataacctccttggcccagattggaactgtataccccaaatgaccacctttattggcgaaggggaacaagaagcccagataacatacatagattcaaagcagaagacggtggagatcacagacagcaccatgtgtccaaaagagcaccggcacttgtacatagacaatgcctatagttcagatggacttaaccagcagctgagccagcccggggaggccccctgtgaggcagactacagaagtctagctcagcggtccctattgaccctctcaggaccagaaactctgaagaaagcacaggaatctccgagaggagctaaagtgtcctttatttttggagacttcgccttggatgatggtattagtcccccaacccttggctatgaaacgctactagatgagggtcctgaaatgctggagaagcagagaaatctctacattggcagtgccaatgacatgaagggcctggatctcactccagaggcagagggcatccagtttgtggaaaattctgtttatgcaaacataggcgatgtgaagagcttccaggccgcggaggggatcgaggaacccctcttgcatgacatctgttatgcagaaaacactgatgacgcggaggacgaggacgaggtgagctgcgaggaggacctcgtggtgggggagatgaaccagccggccatcctcaacctgtctgggtcaagcgatgacatcattgacctcacatccctgccccctccagaaggtgatgacaatgaggatgacttcctgttgcgttccttgaacatggccattgccgcacccccacctggctttagagacagttcagatgaagaggactctcagagccaggcagcttccttccccgaggacaaggagaaaggcagcagcctgcaaaatgatgagatccccgtgtccctcattgacgctgtgcccaccagcgccgaaggcaagtgtgagaagggactggataatgccgtcgtctccacgctgggagctctagaggctctatccgtgtcagaagaacagcagaccagtgacaattcaggtgtagccatcttgcgggcttatagtcctgagtcttcgtcagactcgggcaatgaaactaactcttctgaaatgactgagagttctgaactggccacagcacaaaaacagtcagaaaacctctcccgcatgttcttggccactcacgaaggctaccacccccttgcagaagagcagaccgagttcccggcctccaagacccccgctgggggcttgcctccaaagtcctcgcacgccctggctgctaggccagcaaccgacctcccgcccaaagttgtgccttccaagcagttacttcactcagaccacatggagatggagcctgaaactatggagactaagtcggtcactgactattttagcaaactgcacatggggtcggtggcatactcctgcactagcaaaaggaaaagcaagctggccgatggtgaggggaaggcaccccctaatgggaacacaacaggaaaaaaacagcaggggaccaaaacggcagagatggaggaggaggccagtggtaaatttggtactgtgtcttcacgagacagtcaacacctgagcacttttaatctggagagaactgcctttcgcaaggacagtcaaagatggtatgtggccactgaaggtgggatggctgaaaaaagtggattagaagcagcaacagggaaaacctttccaagagcttctggtcttggggcaagggaggccgaagggaaggaagaaggagctcctgatggagaaaccagtgatggctcaggacttggtcaaggggaccgcttcttaactgacgtgacctgtgcatcttcagccaaagacttagataacccagaggacgctgactcgtccacctgcgaccatccttccaagcttcctgaggctgatgagagtgtggcccgcctttgtgactaccacttggccaagcggatgtcatcactgcaaagcgagggccatttttctctgcagagctcccaaggctcttcagtggatgcaggctgtggcacaggcagcagtggcagtgcctgtgccacacccgtggagtcgccgctctgcccctccctggggaagcacttgattcctgacgcttctgggaaaggcgtgaattacattccttcagaggagagagcccctgggcttcccaaccacggagccacctttaaggaactgcacccacagacagaagggatgtgtccacggatgacagtgcctgctctgcacacagccattaacaccgaacccctgtttggcacattgagagatggatgccatcggctccccaagattaaggaaaccacaggt

SEQ ID NO: 10698 - DNA, 5297 bp, Homo sapiens
  source 1..5297: mol_type = unassigned DNA
gaggcggaggcgagcgaacagagggagggacccgcccgccgcgccccggccgctgggcatgtgtgtccgcaggcgcccgacgctgccgatgtcccggggctgagccgcgcccaggtgtcccggacagtgcgtgcgagcgtgtgtgtccgcgcaggcgagcaccgcgccggccctgagcctcccgctcgctccccacggccgcggtgcatgttcgcctcctgccactgtgtgccgagaggcaggaggaccatgaaaatgatccactttcggagctccagcgtcaaatcgctcagccaggagatgagatgcaccatccggctgctggacgactcggagatctcctgccacatccagagggaaaccaaagggcagtttctcattgaccacatctgcaactactacagcctgctggagaaggactactttggcattcgctatgtggacccagagaagcaaaggcactggcttgaacctaacaagtccatcttcaagcaaatgaaaactcatccaccatacaccatgtgctttagagtgaaattctacccacatgaacccttgaagattaaagaagagctcacaagataccttttataccttcagattaaaagggacatttttcatggccgcctgctgtgctccttttctgatgctgcctacctgggtgcctgtattgttcaagctgagcttggtgattacgatcctgatgagcatcctgagaattacatcagtgagtttgagattttccccaagcagtcacagaagctggaaagaaaaatagtggaaattcataaaaatgaactcagggggcagagcccaccagttgctgaatttaacttgctcctgaaagctcacactttggaaacctacggggtggatcctcacccatgcaaggattcaacaggcacaacaacatttttaggattcacagctgcaggctttgtggtctttcagggaaataagagaatccatttgataaaatggccagatgtctgcaaattgaagtttgaagggaagacattttatgtgattggcacccagaaggagaaaaaagccatgttggcattccatacttcaacaccagctgcctgcaaacatctttggaagtgtggagtggaaaaccaggccttttataagtatgcaaaatccagtcagatcaagactgtatcaagcagcaagatattttttaaaggaagtagatttcgatatagtgggaaagttgccaaagaggtggtggaggccagttccaagatccagagggagcctcctgaggtgcacagagccaacattactcagagccgcagttcccactccttgaacaaacagctcatcattaacatggaacccctgcagcccctgcttccttcccccagcgagcaagaagaagaacttcctctgggtgagggtgttccattgcctaaagaggagaacatttctgctcccttgatctccagctccccagtgaaggcagcccgggagtatgaagatccccctagtgaagaggaagataaaataaaagaagaacctttaaccatctctgaactagtgtacaacccaagtgccagcctgctccccacccctgtggatgacgatgagattgacatgctctttgactgtccttctaggcttgagttggaaagagaagacacagattcatttgaggatctggaagcagatgaaaacgcctttttgattgctgaagaagaggagctgaaggaggctcgccgtgctttgtcgtggagctatgacattctgactggccatattcgggtgaacccactggtcaagagtttttccaggctccttgtggtgggcctgggactgctgctctttgtatttcccctgctcctcctccttttggagtcaggtattgatctctccttcttatgcgaaatccgccagacaccagagtttgagcagtttcactatgaatactactgtcccctcaaggagtgggtggctgggaaagtccacctcatcctctacatgctgggttgctcatgaagttaatctctcacgtgactaagggctatattcaatgctagtgatttctttttttcagcaaatgcctggttctgaagggtcacggggctgtcaacaggtgttccttactcataattgattattcaaacctttaagttagctttccataattcactgcacttaaataagtttaaatcaaatacagttattttagttacaggttaggaagatggtctttaaataaccaaaaatatgtttattttttattatagtgtagacatacccttcatctattatatcataatacatgttacattggactgaattagattttcccatttctaatagttggcaccattataagctataaggttcagaatcagaattttagtaacaactcaagagaaagttgttgaatataatccttagtgaaaacagtgtcctctaaccaatgcctatacaactaaatttatgctgggtttttggttctgtttttttaaaaatatttttatgtgttcaaactattttggtaaatttttagcaaaaaaaaaaaagaagcctcctggagttatttacatgtacagattgtaagactaatgcacaaaaggtatatcagaatttttttaatgttttggcgctactttgtttttaaaaatatttttggctgaacaataccataatttgttatgatctgcataggagatagaaaatgggtagaaagacactatagtaagtaagctgctaaaacagaggatggaactggaggatgtagaaactgagagcatcaagtggactcagggtggtccatttttcaaagtatttggacaagaggacttgttattttcatttgtattctgtccgtatattttggctggagaagcagatgttttaaaaagaaagtgagagtttaaaggaaaaaaggtaacagatgtgctagtcagttgcatatcaatgtacattaacccaagagtgaaggcagataggaactggagaaatggaaagtggcaaaaatgagttctggtgaggctggcaggcaaatggtgacaggcgaatggtctattttatgaaagtgatggtgatgccagcgttcgatgatgtgaagagcagtgcagtcgctgtctgagttaacatgaacatgtttaagtggatctaaataaaagtggagaaactttaaggtaaatattttgatccctcatgccatttgttgtgattctgtagaagaaacttcaaaaatgtgtttgtatgtgagtgtgcgtgtgtgtgtgtgtgagagagagagagagagagagagagagaatatgaatggctttttgatacatgtccatgatcatgttttgcggtggtcattatactcctttcctttcccagttgttttaaaatttgacttccatagagaaactggagaggcctcatgagatgacataccagttcagcctgggtaaagtagtgacatgaccctaaccagactgtagaggggaccagtgctctagtaccttccttgataccattaaatccatgatggaaaggatttaatccaacaatttaatggtatcaaggaaggtactagagcattgtaccatcagcaacgtactgatgccttcccatgcagactacctgctgatactgtgttatgtgggagaaagataagagtctagaacttatgccatggagcatagagcttctctgtggattgaaaacattccactgccctaatgtacaaagttacagggcccacttggaatcgctctctctagctaatgacattccaaccctatcattagcatgatttctaaattgggcaatacatttccactcactcagtggagctctgagtacttcactggacatttaattttggaaatgagttttgaaactcagttcgtgaagcctgcagtcgagcaaatgactatatatttgccattaagtttgaggggtttcctttcctatatgctttcagtgatttattttgctttttaaataaagattgtttgtttattacctgaaagttgatactgatttaggaatatattttctgtgattggaatcctcaacaatttattttggaagcttgcagatggctaggtttgaaattgaaatttgtgtttttctccttcttttctcatacgacttctaagtcatcctttctgacataaggcaactttagtgtagtctgcacaaaattagtccccttctgatcatgcgtcatataattttctctaaagttctgactatgacaaatcatctggccctcagtctttcaaaataatattatataatattttttaaattatggaactaatatattttccattgtaaaatacttaaaaaatatgatagtataaatatcacatgtaatccaacgatgcagatttatcttaaggagtaataaatatattattttaacatttccagctaacatctcttttctcttaggtggaaacttcattgttgaatagaaatgtttttaagtgaagaagttgacagaatagggtctgctgaatttaaacagccatcaaaagttaaactggaatcttgaaatgccatttgctcggcatagaatcagagccttttagaaacatccatttaagttttgttagaagatagtcaccagttgcctgaatcgaatgaggaaaagcctgcttccagagatggacagtatattatagagtgagatatagagtttaaagcaagtgtgtgagtatatgtatattccatattattggtatatgtgtgtttatatatgaatctgtatatatgtgtgtctttgaatagacacaacatatatgcccctcatgcataattgtgcttattttgccctaattgaggaatttgagatgtattattggttcttctccctctcagatactatggtgggtaaaacccacagcctgaaagggttaaattttccataaatgccactgagtgtacatttgtggatataaataaatatatataatacacacacacatatggcaaatacatatacacacacaatattgcctttagtgctaatgcaagttggatcatgaaaacaatgtaggtaaagtaaagtatgtatttgtctgtgcttgaaaaatattgtaaaatgttatgtatttggaatatattttgtggtttgtctaatatttataaacacaactcggggtgaattcacaatgagtttatttcattgaaatactagagatatgggggccatgttactgtgattggagccttacctttgtatagtgaaatttgcatttctatgtcaacatccagattgttttatatgttaatatggtggcaggaatccctaataaaaatactctggggtaaaa

SEQ ID NO: 10699 - DNA, 964 bp, Homo sapiens
  source 1..964: mol_type = unassigned DNA
tgagttatttctgttggccgcattaggaacctgacatttgattcattcagtgggtcctgcctaggtcctttaaaacagaatggactgttagggaaaggctgccctgggccatgcaggccgaggagaccaaggggattggaataaccagtatggcaaaatgcttggtcaagatccagactcgacgaagcctccaattgcacatggtgaaccactgcaacagtaatgtgtttgttcgtctgctgagactcggctccaaggtcacagctcgtaacactggtgttccattgcctaaagaggagaacatttctgctcccttgatctccagctccccagtgaaggcagcccgggagtatgaagatccccctagtgaagaggaagataaaataaaagaagaacctttaaccatctctgaactagtgtacaacccaagtgccagcctgctccccacccctgtggatgacgatgagattgacatgctctttgactgtccttctaggcttgagttggaaagagaagacacagattcatttgaggatctggaagcagatgaaaacgcctttttgattgctgaagaagaggagctgaaggaggctcgccgtgctttgtcgtggagctatgacattctgactggccatattcgggtgaacccactggtcaagagtttttccaggctccttgtggtgggcctgggactgctgctctttgtatttcccctgctcctcctccttttggagtcagtctccatgcagtaaacagacccagcagaacctgcccgtggtgagctcagccaagacttggctctccatgttccagcctccgtctgtgactgggtgggtaagttcggtgggccccacccagtgggctcggcagccgtcacttcacagaagaagaaaggaaccttgcttaggcctcagatcccagctgtgctctccaatccattaataaagctgcttttaaccctctc

SEQ ID NO: 10700 - DNA, 1323 bp, Homo sapiens
  source 1..1323: mol_type = unassigned DNA
gaggcggaggcgagcgaacagagggagggacccgcccgccgcgccccggccgctgggcatgtgtgtccgcaggcgcccgacgctgccgatgtcccggggctgagccgcgcccaggtgtcccggacagtgcgtgcgagcgtgtgtgtccgcgcaggcgagcaccgcgccggccctgagcctcccgctcgctccccacggccgcggtgcatgttcgcctcctgccactgtgtgccgagaggcaggaggaccatgaaaatgatccactttcggagctccagcgtcaaatcgctcagccaggagatgagatgcaccatccggctgctggacgactcggagatctcctgccacatccagagggaaaccaaagggcagtttctcattgaccacatctgcaactactacagcctgctggagaaggactactttggcattcgctatgtggacccagagaagcaaaggcactggcttgaacctaacaagtccatcttcaagcaaatgaaaactcatccaccatacaccatgtgctttagagtgaaattctacccacatgaacccttgaagattaaagaagagctcacaagataccttttataccttcagattaaaagggacatttttcatggccgcctgctgtgctccttttctgatgctgcctacctgggtgcctgtattgttcaagctgagcttggtgattacgatcctgatgagcatcctgagaattacatcagtgagtttgagattttccccaagcagtcacagaagctggaaagaaaaatagtggaaattcataaaaatgaactcagggggcagagcccaccagttgctgaatttaacttgctcctgaaagctcacactttggaaacctacggggtggatcctcacccatgcaaggattcaacaggcacaacaacatttttaggattcacagctgcaggctttgtggtctttcagggaaataagagaatccatttgataaaatggccagatgtctgcaaattgaagtttgaagggaagacattttatgtgattggcacccagaaggagaaaaaagccatgttggcattccatacttcaacaccagctgcctgcaaacatctttggaagtgtggagtggaaaaccaggccttttataagtatgcaaaatccagtcagatcaagactgtatcaagcagcaagatattttttaaaggaagtagatttcgatatagtgggaaagttgccaaagaggtggtggaggccagttccaagatccagagggagcctcctgaggtgcacagatgtgtacagaagaaaatttgttcctgctttggggtgacttggtga

SEQ ID NO: 10701 - DNA, 1397 bp, Homo sapiens
  source 1..1397: mol_type = unassigned DNA
gcttcatttcggaagtgattcatagcacttctgcttacaactctctgatcaggactcatcccaagatcttacccaggatcaaggaaatgcaattctatggtgttcagaagggggcagagcccaccagttgctgaatttaacttgctcctgaaagctcacactttggaaacctacggggtggatcctcacccatgcaaggattcaacaggcacaacaacatttttaggattcacagctgcaggctttgtggtctttcagggaaataagagaatccatttgataaaatggccagatgtctgcaaattgaagtttgaagggaagacattttatgtgattggcacccagaaggagaaaaaagccatgttggcattccatacttcaacaccagctgcctgcaaacatctttggaagtgtggagtggaaaaccaggccttttataagtatgcaaaatccagtcagatcaagactgtatcaagcagcaagatattttttaaaggaagtagatttcgatatagtgggaaagttgccaaagaggtggtggaggccagttccaagatccagagggagcctcctgaggtgcacagagccaacattactcagagccgcagttcccactccttgaacaaacagctcatcattaacatggaacccctgcagcccctgcttccttcccccagcgagcaagaagaagaacttcctctgggtgagggtgttccattgcctaaagaggagaacatttctgctcccttgatctccagctccccagtgaaggcagcccgggagtatgaagatccccctagtgaagaggaagataaaataaaagaagaacctttaaccatctctgaactagtgtacaacccaagtgccagcctgctccccacccctgtggatgacgatgagattgacatgctctttgactgtccttctaggcttgagttggaaagagaagacacagattcatttgaggatctggaagcagatgaaaacgcctttttgattgctgaagaagaggagctgaaggaggctcgccgtgctttgtcgtggagctatgacattctgactggccatattcgggtgaacccactggtcaagagtttttccaggctccttgtggtgggcctgggactgctgctctttgtatttcccctgctcctcctccttttggagtcagtctccatgcagtaaacagacccagcagaacctgcccgtggtgagctcagccaagacttggctctccatgttccagcctccgtctgtgactgggtgggtaagttcggtgggccccacccagtgggctcggcagccgtcacttcacagaagaagaaaggaaccttgcttaggcctcagatcccagctgtgctctccaatccattaataaagctgcttttaaccctctc

SEQ ID NO: 10702 - DNA, 2198 bp, Homo sapiens
  source 1..2198: mol_type = unassigned DNA
cgcgagcccgccgggggtctcaggctctgggcgtcctcggcgagcgagcccgggcagagggaggcgcacgagcgcgcgcgacagaaggaggcggggaaaggagggggcgaggcggaggcgagcgaacagagggagggacccgcccgccgcgccccggccgctgggcatgtgtgtccgcaggcgcccgacgctgccgatgtcccggggctgagccgcgcccaggtgtcccggacagtgcgtgcgagcgtgtgtgtccgcgcaggcgagcaccgcgccggccctgagcctcccgctcgctccccacggccgcggtgcatgttcgcctcctgccactgtgtgccgagaggcaggaggaccatgaaaatgatccactttcggagctccagcgtcaaatcgctcagccaggagatgagatgcaccatccggctgctggacgactcggagatctcctgccacatccagagggaaaccaaagggcagtttctcattgaccacatctgcaactactacagcctgctggagaaggactactttggcattcgctatgtggacccagagaagcaaaggcactggcttgaacctaacaagtccatcttcaagcaaatgaaaactcatccaccatacaccatgtgctttagagtgaaattctacccacatgaacccttgaagattaaagaagagctcacaagataccttttataccttcagattaaaagggacatttttcatggccgcctgctgtgctccttttctgatgctgcctacctgggtgcctgtattgttcaagctgagcttggtgattacgatcctgatgagcatcctgagaattacatcagtgagtttgagattttccccaagcagtcacagaagctggaaagaaaaatagtggaaattcataaaaatgaactcagggggcagagcccaccagttgctgaatttaacttgctcctgaaagctcacactttggaaacctacggggtggatcctcacccatgcaaggattcaacaggcacaacaacatttttaggattcacagctgcaggctttgtggtctttcagggaaataagagaatccatttgataaaatggccagatgtctgcaaattgaagtttgaagggaagacattttatgtgattggcacccagaaggagaaaaaagccatgttggcattccatacttcaacaccagctgcctgcaaacatctttggaagtgtggagtggaaaaccaggccttttataagtatgcaaaatccagtcagatcaagactgtatcaagcagcaagatattttttaaaggaagtagatttcgatatagtgggaaagttgccaaagaggtggtggaggccagttccaagatccagagggagcctcctgaggtgcacagagccaacattactcagagccgcagttcccactccttgaacaaacagctcatcattaacatggaacccctgcagcccctgcttccttcccccagcgagcaagaagaagaacttcctctgggtgagggtgttccattgcctaaagaggagaacatttctgctcccttgatctccagctccccagtgaaggcagcccgggagtatgaagatccccctagtgaagaggaagataaaataaaagaagaacctttaaccatctctgaactagtgtacaacccaagtgccagcctgctccccacccctgtggatgacgatgagattgacatgctctttgactgtccttctaggcttgagttggaaagagaagacacagattcatttgaggatctggaagcagatgaaaacgcctttttgattgctgaagaagaggagctgaaggaggctcgccgtgctttgtcgtggagctatgacattctgactggccatattcgggtgaacccactggtcaagagtttttccaggctccttgtggtgggcctgggactgctgctctttgtatttcccctgctcctcctccttttggagtcagtctccatgcagtaaacagacccagcagaacctgcccgtggtgagctcagccaagacttggctctccatgttccagcctccgtctgtgactgggtgggtaagttcggtgggccccacccagtgggctcggcagccgtcacttcacagaagaagaaaggaaccttgcttaggcctcagatcccagctgtgctctccaatccattaataaagctgcttttaaccctctc

SEQ ID NO: 10703 - DNA, 662 bp, Homo sapiens
  source 1..662: mol_type = unassigned DNA
ggcacaacaacatttttaggattcacagctgcaggctttgtggtctttcagggaaataagagaatccatttgataaaatggccagatgtctgcaaattgaagtttgaagggaagacattttatgtgattggcacccagaaggagaaaaaagccatgttggcattccatacttcaacaccagctgcctgcaaacatctttggaagtgtggagtggaaaaccaggccttttataagtatgcaaaatccagtcagatcaagactgtatcaagcagcaagatattttttaaaggaagtagatttcgatatagtgggaaagttgccaaagaggtggtggaggccagttccaagatccagagggagcctcctgaggtgcacagatgtgtacagaagaaaatttgttcctgctttggggtgacttggtgaggagctgtaatgtgaaagtctgcaaaaccaggctatcacactgtaagaagcagaagactacaggatgagagaagctggagaatcttggctccaggcatgttggtgcagatcctgaaagtgcagcctgcccaccaatgagaaaagtctttatggttccctcctcttccccaaattgtacttattcaatgcagcagaaatgaagaggaaatgataaaacatatcattcatctgtttcagaa

SEQ ID NO: 10704 - DNA, 3198 bp, Homo sapiens
  source 1..3198: mol_type = unassigned DNA
aaatgcccttgggtgtgcattacttcaagcaaacggaagtgtgccccgctgacagtgggaatgcctggctgggggtgggggggcccgagtgcaccacatccagctgggagtgaaattcctggagaaagcacccacagcactctgagcctgcttgcagcccaacggcctcgctgagaatgctacatttaaaagtgcagtttttggatgattcccagaagatttttgtggttgatcaaaagtcatccgggaaggcattgtttaacctgagttgcagccatctaaatcttgctgaaaaggaatattttggattagaattctgcagccattctggaaataatgtttggctggagcttttgaagcccataacaaagcaggtaaaaaatcctaaggagattgttttcaaatttatggtgaaatttttcccagtggaccctggacatctgcgggaagaacttacaaggtatctttttactcttcaaataaagaaggatttggctctaggaaggcttccatgcagtgacaactgtacagcgttgatggtatctcacatcttacaatcagaacttggagactttcatgaagaaacagataggaagcatctggcacaaactcggtacttaccaaaccaagactgtttagagggcaagatcatgcactttcatcagaagcacattggcaggagcccagctgaatctgacattctgctactggacatagcaaggaagctggatatgtatggcatcaggcctcaccccgccagtgatggtgaagggatgcagattcacctggctgttgctcacatgggagtactggtgttacggggaaatacaaagatcaatacttttaactgggctaaaatccgcaagttgagttttaagagaaagcattttctcatcaaacttcatgccaatatcttggtgttgtgcaaggataccttggagttcaccatggccagccgagatgcctgcaaggctttctggaagacttgtgtggaataccatgctttcttcaggctttcggaagagcccaaatcaaagcccaaaaccctactctgcagcaagggttccagtttccgctatagtggacgaacccaaaggcaacttttggaatatgggagaaaagggaggctgaagagcttgccatttgaaaggaaacattacccatctcagtaccatgaacgacagtgcaggtcctcaccagacctcctctctgatgtgtcaaaacaagtggaagatttgagactagcatatggtggtggctactaccaaaatgtgaatggagtgcacgcatctgagccagtgctggagagtaggaggaggaattctgcattggaggtgacatttgcaactgagctggagcattccaaaccagaggcggatcccacattgctacatcagtcccaaagcagttcctctttcccttttatttatatggaccctgtctttaacactgagcccaatcctaaccctgatcccagagacattttttcagagaggagttctctaagctccttccaaacaagctgtaagttttctggtaatcacatgagcatatattctggcctcacaagcaaagtgcgtccagcaaagcagctaacttacacggatgtgccctatattccttgtacaggtcagcaggttggtattatgcctccccaggtctttttttatgtggacaagccaccccaggtgcccagatggtccccaattagagcagaggaaaggacaagtccacatagctatgtagagcccactgcaatgaagccagctgaaagaagcccaaggaatatcagaatgaagagctttcagcaagacctgcaagtactccaagaagctatagccaggactagcggtaggagcaacatcaatgtaggtctagaagaggaagacccaaatttggaagatgcatttgtatgtaacattcaagagcaaacccctaaaaggtcccagagccaatcagacatgaaaactattcgttttccttttgggtcagaatttagacctttagggccttgtcctgctctcagtcataaagcagacctgtttacggatatgtttgcagagcaggagttgccagcagttctaatggatcaaagtacagcagaaaggtatgtagctagtgaatccagtgattctgaatcagagattcttaaaccagactactatgctttgtatggcaaagaaataaggtcacccatggccagaatccgcctgtcttctggtagtctacagttagatgaagaagatgaagatgcttatttcaacacaccaactgctgaagacaggacttcactaaaaccatgtaattactttttagcttaaaagtgtgaacctatggacatttctgagccagttccatgttaccgacttaggcagaaaataatgaagttgtagaaaccattttcttggttactacatattcattggtattaaggaaatctcattttggatgcctgccttatgaaagatccagctgttgcctcattccttgagtttcactcttccattacctctgaagggactttagaacatgccctctcctcaccagcactgtggcaaggcaaggtgggtatttgtcatctccactgcatacttcctcatagagacattgtgagtgaaggtcaggctcttcaatgctgaagaatggtgacagtatgggttggcatatggaattagcgtctaatggcatttagtgatttagtagattgtgactgtgttgatctttgtgctcttaaacaacactgaacaaatatttcagtctttactatttgtgtggggcccagtagaaatggtcttgtaatatgctaaatacttccatttttataacatataaaagcagagcatggccctcctacagcctcaggaaggaggtggtggcatagatcctctcaagagaatacaggtttagaattaatctaggacttggcagaattctaaacctaggaaattcatgaattaaatcaatttctagagccagacataaaccagatgaaagtatcatgttgttttacttataacttctatattcttatctactatatctagtaaaagagaaacattatcaggtcagtttgtttatctaatatttcctgccagaatttattttttgtcatagcttcttgcatgtatgcaggccaggaaatgaatgttattgtaataaagtgtgatggaaaatccaggtaattaaaaaataaattat

SEQ ID NO: 10705 - DNA, 2864 bp, Homo sapiens
  source 1..2864: mol_type = unassigned DNA
aaaaggcatctgactgactgggggcaccattcctttcttgaatcatcttggatctgggagaaggaaaatgcttctttcttatttctgtttctttctcaagagattctccccaatttctttgcaggtatctttttactcttcaaataaagaaggatttggctctaggaaggcttccatgcagtgacaactgtacagcgttgatggtatctcacatcttacaatcagaacttggagactttcatgaagaaacagataggaagcatctggcacaaactcggtacttaccaaaccaagactgtttagagggcaagatcatgcactttcatcagaagcacattggcaggagcccagctgaatctgacattctgctactggacatagcaaggaagctggatatgtatggcatcaggcctcaccccgccagtgatggtgaagggatgcagattcacctggctgttgctcacatgggagtactggtgttacggggaaatacaaagatcaatacttttaactgggctaaaatccgcaagttgagttttaagagaaagcattttctcatcaaacttcatgccaatatcttggtgttgtgcaaggataccttggagttcaccatggccagccgagatgcctgcaaggctttctggaagacttgtgtggaataccatgctttcttcaggctttcggaagagcccaaatcaaagcccaaaaccctactctgcagcaagggttccagtttccgctatagtggacgaacccaaaggcaacttttggaatatgggagaaaagggaggctgaagagcttgccatttgaaaggaaacattacccatctcagtaccatgaacgacagtgcaggtcctcaccagacctcctctctgatgtgtcaaaacaagtggaagatttgagactagcatatggtggtggctactaccaaaatgtgaatggagtgcacgcatctgagccagtgctggagagtaggaggaggaattctgcattggaggtgacatttgcaactgagctggagcattccaaaccagaggcggatcccacattgctacatcagtcccaaagcagttcctctttcccttttatttatatggaccctgtctttaacactgagcccaatcctaaccctgatcccagagacattttttcagagaggagttctctaagctccttccaaacaagctgtaagttttctggtaatcacatgagcatatattctggcctcacaagcaaagtgcgtccagcaaagcagctaacttacacggatgtgccctatattccttgtacaggtcagcaggttggtattatgcctccccaggtctttttttatgtggacaagccaccccaggtgcccagatggtccccaattagagcagaggaaaggacaagtccacatagctatgtagagcccactgcaatgaagccagctgaaagaagcccaaggaatatcagaatgaagagctttcagcaagacctgcaagtactccaagaagctatagccaggactagcggtaggagcaacatcaatgtaggtctagaagaggaagacccaaatttggaagatgcatttgtatgtaacattcaagagcaaacccctaaaaggtcccagagccaatcagacatgaaaactattcgttttccttttgggtcagaatttagacctttagggccttgtcctgctctcagtcataaagcagacctgtttacggatatgtttgcagagcaggagttgccagcagttctaatggatcaaagtacagcagaaaggtatgtagctagtgaatccagtgattctgaatcagagattcttaaaccagactactatgctttgtatggcaaagaaataaggtcacccatggccagaatccgcctgtcttctggtagtctacagttagatgaagaagatgaagatgcttatttcaacacaccaactgctgaagacaggacttcactaaaaccatgtaattactttttagcttaaaagtgtgaacctatggacatttctgagccagttccatgttaccgacttaggcagaaaataatgaagttgtagaaaccattttcttggttactacatattcattggtattaaggaaatctcattttggatgcctgccttatgaaagatccagctgttgcctcattccttgagtttcactcttccattacctctgaagggactttagaacatgccctctcctcaccagcactgtggcaaggcaaggtgggtatttgtcatctccactgcatacttcctcatagagacattgtgagtgaaggtcaggctcttcaatgctgaagaatggtgacagtatgggttggcatatggaattagcgtctaatggcatttagtgatttagtagattgtgactgtgttgatctttgtgctcttaaacaacactgaacaaatatttcagtctttactatttgtgtggggcccagtagaaatggtcttgtaatatgctaaatacttccatttttataacatataaaagcagagcatggccctcctacagcctcaggaaggaggtggtggcatagatcctctcaagagaatacaggtttagaattaatctaggacttggcagaattctaaacctaggaaattcatgaattaaatcaatttctagagccagacataaaccagatgaaagtatcatgttgttttacttataacttctatattcttatctactatatctagtaaaagagaaacattatcaggtcagtttgtttatctaatatttcctgccagaatttattttttgtcatagcttcttgcatgtatgcaggccaggaaatgaatgttattgtaataaagtgtgatggaaaatccaggtaattaaaaaataaattataa

SEQ ID NO: 10706 - DNA, 3338 bp, Homo sapiens
  source 1..3338: mol_type = unassigned DNA
gggtggagcgcggggagccaggcgaggggccgcgacgacgggactccattagccgctccggccacaggcagcgcttcgccagccgaggaaccggacgcggacaccgccgccccgcgagcctccagcccctcgcctgttgccgcgcgagtcccgggcccggagcgctaggagcgcgcggaaggagccatggctctggacgggataaggatgccagatggctgctacgcggacgggacgtgggaactgagtgtccatgtgacggacctgaaccgcgatgtcaccctgagagtgaccggcgaggtgcacattggaggcgtgatgcttaagctggtggagaaactcgatgtaaaaaaagattggtctgaccatgctctctggtgggaaaagaagagaacttggcttctgaagacacattggaccttagataagtatggtattcaggcagatgctaagcttcagttcacccctcagcacaaactgctccgcctgcagcttcccaacatgaagtatgtgaaggtgaaagtgaatttctctgatagagtcttcaaagctgtttctgacatctgtaagacttttaatatcagacaccccgaagaactttctctcttaaagaaacccagagatccaacaaagaaaaaaaagaagaagctagatgaccagtctgaagatgaggcacttgaattagaggggcctcttatcactcctggatcaggaagtatatattcaagcccaggactgtatagtaaaacaatgacccccacttatgatgctcatgatggaagccccttgtcaccaacttctgcttggtttggtgacagtgctttgtcagaaggcaatcctggtatacttgctgtcagtcaaccaatcacgtcaccagaaatcttggcaaaaatgttcaagcctcaagctcttcttgataaagcaaaaatcaaccaaggatggcttgattcctcaagatctctcatggaacaagatgtgaaggaaaatgaggccttgctgctccgattcaagtattacagcttttttgatttgaatccaaagtatgatgcaatcagaatcaatcagctttacgagcaggccaaatgggccattctcctggaagagattgaatgcacagaagaagaaatgatgatgtttgcagccctgcagtatcatatcaataagctgtcaatcatgacatcagagaatcatttgaacaacagtgacaaagaagttgatgaagttgatgctgccctttcagacctggagattactctggaagggggtaaaacgtcaacaattttgggtgacattacttccattcctgaacttgctgactacattaaagttttcaagccaaaaaagctgactctgaaaggttacaaacaatattggtgcaccttcaaagacacatccatttcttgttataagagcaaagaagaatccagtggcacaccagctcatcagatgaacctcaggggatgtgaagttaccccagatgtaaacatttcaggccaaaaatttaacattaaactcctgattccagttgcagaaggcatgaatgaaatctggcttcgttgtgacaatgaaaaacagtatgcacactggatggcagcctgcagattagcctccaaaggcaagaccatggcggacagttcttacaacttagaagttcagaatattctttcctttctgaagatgcagcatttaaacccagatcctcagttaataccagagcagatcacgactgatataactcctgaatgtttggtgtctccccgctatctaaaaaagtataagaacaagcagataacagcgagaatcttggaggcccatcagaatgtagctcagatgagtctaattgaagccaagatgagatttattcaagcttggcagtcactacctgaatttggcatcactcacttcattgcaaggttccaagggggcaaaaaagaagaacttattggaattgcatacaacagactgattcggatggatgccagcactggagatgcaattaaaacatggcgtttcagcaacatgaaacagtggaatgtcaactgggaaatcaaaatggtcaccgtagagtttgcagatgaagtacgattgtccttcatttgtactgaagtagattgcaaagtggttcatgaattcattggtggctacatatttctctcaacacgtgcaaaagaccaaaacgagagtttagatgaagagatgttctacaaacttaccagtggttgggtgtgaataggaatactgtttaatgaaactccacggccataacaatatttaactttaaaagctgtttgttatatgctgcttaataaagtaagcttgaaatttatcattttatcatgaaaacttctttgccttaccagaccagttaatatgtgcactaaacaagcacgactattaatctatcatgttatgatataataaacttgaatttgtcacacattccttagggccatgaattgaaaactgaaatagtgggcaaatcaggaacaaaccatcactgatttactgatttaagctagccaaactgtaagaaacaagccatctattttaaagctatccagggcttaacctatatgaactctatttatcatgtctaatgcatgtgatttaatgtatgtttaatttgatatcatgttttaaaatatcctacttctggtagccatttaattcctccccctacccccaaataaatcaggcatgcaggaggcctgatatttagtaatgtcattgtgtttgaccttgaaggaaaatgctattagtccgtcgtgcttgatttgtttttgtccttgaataagcatgttatgtatattgtctcgtgtttttatttttacaccatattgtattacacttttagtattcaccagcataatcactgtctgcctaaaatatgcaactctttgcattacaatatgaagtaaagttctatgaagtatgcattttgtgtaactaatgtaaaaacacaaattttataaaattgtacagttttttaaaaactactcacaactagcagatggcttaaatgtagcaatctctgcgttaattaaatgcctttaagagatataattaacgtgcagttttaatatctactaaattaagaatgacttcattatgatcatgatttgccacaatgtccttaactctaatgcctggactggccatgttctagtctgttgcgctgttacaatctgtattggtgctagtcagaaaattcctagctcacatagcccaaaagggtgcgagggagaggtggattaccagtattgttcaataatccatggttcaaagactgtataaatgcattttattttaaataaaagcaaaacttttatttaatattt

SEQ ID NO: 10707 - DNA, 3352 bp, Homo sapiens
  source 1..3352: mol_type = unassigned DNA
gggtggagcgcggggagccaggcgaggggccgcgacgacgggactccattagccgctccggccacaggcagcgcttcgccagccgaggaaccggacgcggacaccgccgccccgcgagcctccagcccctcgcctgttgccgcgcgagtcccgggcccggagcgctaggagcgcgcggaaggagccatggctctggacgggataaggatgccagatggctgctacgcggacgggacgtgggaactgagtgtccatgtgacggacctgaaccgcgatgtcaccctgagagtgaccggcgaggtgcacattggaggcgtgatgcttaagctggtggagaaactcgatgtaaaaaaagattggtctgaccatgctctctggtgggaaaagaagagaacttggcttctgaagacacattggaccttagataagtatggtattcaggcagatgctaagcttcagttcacccctcagcacaaactgctccgcctgcagcttcccaacatgaagtatgtgaaggtgaaagtgaatttctctgatagagtcttcaaagctgtttctgacatctgtaagacttttaatatcagacaccccgaagaactttctctcttaaagaaacccagagatccaacaaagaaaaaaaagaagaagctagatgaccagtctgaagatgaggcacttgaattagaggggcctcttatcactcctggatcaggaagtatatattcaagcccaggactgtatagtaaaacaatgacccccacttatgatgctcatgatggaagccccttgtcaccaacttctgcttggtttggtgacagtgctttgtcagaaggcaatcctggtatacttgctgtcagtcaaccaatcacgtcaccagaaatcttggcaaaaatgttcaagcctcaagctcttcttgataaagcaaaaatcaaccaaggatggcttgattcctcaagatctctcatggaacaagatgtgaaggaaaatgaggccttgctgctccgattcaagtattacagcttttttgatttgaatccaaagtatgatgcaatcagaatcaatcagctttacgagcaggccaaatgggccattctcctggaagagattgaatgcacagaagaagaaatgatgatgtttgcagccctgcagtatcatatcaataagctgtcaatcatgacatcagagaatcatttgaacaacagtgacaaagaagttgatgaagttgatgctgccctttcagacctggagattactctggaagggggtaaaacgtcaacaattttgggtgacattacttccattcctgaacttgctgactacattaaagttttcaagccaaaaaagctgactctgaaaggttacaaacaatattggtgcaccttcaaagacacatccatttcttgttataagagcaaagaagaatccagtggcacaccagctcatcagatgaacctcaggggatgtgaagttaccccagatgtaaacatttcaggccaaaaatttaacattaaactcctgattccagttgcagaaggcatgaatgaaatctggcttcgttgtgacaatgaaaaacagtatgcacactggatggcagcctgcagattagcctccaaaggcaagaccatggcggacagttcttacaacttagaagttcagaatattctttcctttctgaagatgcagcatttaaacccagatcctcagttaataccagagcagatcacgactgatataactcctgaatgtttggtgtctccccgctatctaaaaaagtataagaacaagcagccaggctatataagagatttgataacagcgagaatcttggaggcccatcagaatgtagctcagatgagtctaattgaagccaagatgagatttattcaagcttggcagtcactacctgaatttggcatcactcacttcattgcaaggttccaagggggcaaaaaagaagaacttattggaattgcatacaacagactgattcggatggatgccagcactggagatgcaattaaaacatggcgtttcagcaacatgaaacagtggaatgtcaactgggaaatcaaaatggtcaccgtagagtttgcagatgaagtacgattgtccttcatttgtactgaagtagattgcaaagtggttcatgaattcattggtggctacatatttctctcaacacgtgcaaaagaccaaaacgagagtttagatgaagagatgttctacaaacttaccagtggttgggtgtgaataggaatactgtttaatgaaactccacggccataacaatatttaactttaaaagctgtttgttatatgctgcttaataaagtaagcttgaaatttatcattttatcatgaaaacttctttgccttaccagaccagttaatatgtgcactaaacaagcacgactattaatctatcatgttatgatataataaacttgaatttgtcacacattccttagggccatgaattgaaaactgaaatagtgggcaaatcaggaacaaaccatcactgatttactgatttaagctagccaaactgtaagaaacaagccatctattttaaagctatccagggcttaacctatatgaactctatttatcatgtctaatgcatgtgatttaatgtatgtttaatttgatatcatgttttaaaatatcctacttctggtagccatttaattcctccccctacccccaaataaatcaggcatgcaggaggcctgatatttagtaatgtcattgtgtttgaccttgaaggaaaatgctattagtccgtcgtgcttgatttgtttttgtccttgaataagcatgttatgtatattgtctcgtgtttttatttttacaccatattgtattacacttttagtattcaccagcataatcactgtctgcctaaaatatgcaactctttgcattacaatatgaagtaaagttctatgaagtatgcattttgtgtaactaatgtaaaaacacaaattttataaaattgtacagttttttaaaaactactcacaactagcagatggcttaaatgtagcaatctctgcgttaattaaatgcctttaagagatataattaacgtgcagttttaatatctactaaattaagaatgacttcattatgatcatgatttgccacaatgtccttaactctaatgcctggactggccatgttctagtctgttgcgctgttacaatctgtattggtgctagtcagaaaattcctagctcacatagcccaaaagggtgcgagggagaggtggattaccagtattgttcaataatccatggttcaaagactgtataaatgcattttattttaaataaaagcaaaacttttattt

SEQ ID NO: 10708 - DNA, 3369 bp, Homo sapiens
  source 1..3369: mol_type = unassigned DNA
cacaggcagcgcttcgccagccgaggaaccggacgcggacaccgccgccccgcgagcctccagcccctcgcctgttgccgcgcgagtcccgggcccggagcgctaggagcgcgcggtgagggagcgggaccccgccgggacccgagggggcgcggcggggaggggaacggggagtcagcccgcgctgtgtctcggggccggccggcaggaaggagccatggctctggacgggataaggatgccagatggctgctacgcggacgggacgtgggaactgagtgtccatgtgacggacctgaaccgcgatgtcaccctgagagtgaccggcgaggtgcacattggaggcgtgatgcttaagctggtggagaaactcgatgtaaaaaaagattggtctgaccatgctctctggtgggaaaagaagagaacttggcttctgaagacacattggaccttagataagtatggtattcaggcagatgctaagcttcagttcacccctcagcacaaactgctccgcctgcagcttcccaacatgaagtatgtgaaggtgaaagtgaatttctctgatagagtcttcaaagctgtttctgacatctgtaagacttttaatatcagacaccccgaagaactttctctcttaaagaaacccagagatccaacaaagaaaaaaaagaagaagctagatgaccagtctgaagatgaggcacttgaattagaggggcctcttatcactcctggatcaggaagtatatattcaagcccaggactgtatagtaaaacaatgacccccacttatgatgctcatgatggaagccccttgtcaccaacttctgcttggtttggtgacagtgctttgtcagaaggcaatcctggtatacttgctgtcagtcaaccaatcacgtcaccagaaatcttggcaaaaatgttcaagcctcaagctcttcttgataaagcaaaaatcaaccaaggatggcttgattcctcaagatctctcatggaacaagatgtgaaggaaaatgaggccttgctgctccgattcaagtattacagcttttttgatttgaatccaaagtatgatgcaatcagaatcaatcagctttacgagcaggccaaatgggccattctcctggaagagattgaatgcacagaagaagaaatgatgatgtttgcagccctgcagtatcatatcaataagctgtcaatcatgacatcagagaatcatttgaacaacagtgacaaagaagttgatgaagttgatgctgccctttcagacctggagattactctggaagggggtaaaacgtcaacaattttgggtgacattacttccattcctgaacttgctgactacattaaagttttcaagccaaaaaagctgactctgaaaggttacaaacaatattggtgcaccttcaaagacacatccatttcttgttataagagcaaagaagaatccagtggcacaccagctcatcagatgaacctcaggggatgtgaagttaccccagatgtaaacatttcaggccaaaaatttaacattaaactcctgattccagttgcagaaggcatgaatgaaatctggcttcgttgtgacaatgaaaaacagtatgcacactggatggcagcctgcagattagcctccaaaggcaagaccatggcggacagttcttacaacttagaagttcagaatattctttcctttctgaagatgcagcatttaaacccagatcctcagttaataccagagcagatcacgactgatataactcctgaatgtttggtgtctccccgctatctaaaaaagtataagaacaagcagataacagcgagaatcttggaggcccatcagaatgtagctcagatgagtctaattgaagccaagatgagatttattcaagcttggcagtcactacctgaatttggcatcactcacttcattgcaaggttccaagggggcaaaaaagaagaacttattggaattgcatacaacagactgattcggatggatgccagcactggagatgcaattaaaacatggcgtttcagcaacatgaaacagtggaatgtcaactgggaaatcaaaatggtcaccgtagagtttgcagatgaagtacgattgtccttcatttgtactgaagtagattgcaaagtggttcatgaattcattggtggctacatatttctctcaacacgtgcaaaagaccaaaacgagagtttagatgaagagatgttctacaaacttaccagtggttgggtgtgaataggaatactgtttaatgaaactccacggccataacaatatttaactttaaaagctgtttgttatatgctgcttaataaagtaagcttgaaatttatcattttatcatgaaaacttctttgccttaccagaccagttaatatgtgcactaaacaagcacgactattaatctatcatgttatgatataataaacttgaatttgtcacacattccttagggccatgaattgaaaactgaaatagtgggcaaatcaggaacaaaccatcactgatttactgatttaagctagccaaactgtaagaaacaagccatctattttaaagctatccagggcttaacctatatgaactctatttatcatgtctaatgcatgtgatttaatgtatgtttaatttgatatcatgttttaaaatatcctacttctggtagccatttaattcctccccctacccccaaataaatcaggcatgcaggaggcctgatatttagtaatgtcattgtgtttgaccttgaaggaaaatgctattagtccgtcgtgcttgatttgtttttgtccttgaataagcatgttatgtatattgtctcgtgtttttatttttacaccatattgtattacacttttagtattcaccagcataatcactgtctgcctaaaatatgcaactctttgcattacaatatgaagtaaagttctatgaagtatgcattttgtgtaactaatgtaaaaacacaaattttataaaattgtacagttttttaaaaactactcacaactagcagatggcttaaatgtagcaatctctgcgttaattaaatgcctttaagagatataattaacgtgcagttttaatatctactaaattaagaatgacttcattatgatcatgatttgccacaatgtccttaactctaatgcctggactggccatgttctagtctgttgcgctgttacaatctgtattggtgctagtcagaaaattcctagctcacatagcccaaaagggtgcgagggagaggtggattaccagtattgttcaataatccatggttcaaagactgtataaatgcattttattttaaataaaagcaaaacttttatttaatattt

SEQ ID NO: 10709 - DNA, 2082 bp, Homo sapiens
  source 1..2082: mol_type = unassigned DNA
cagccgaggaaccggacgcggacaccgccgccccgcgagcctccagcccctcgcctgttgccgcgcgagtcccgggcccggagcgctaggagcgcgcggaaggagccatggctctggacgggataaggatgccagatggctgctacgcggacgggacgtgggaactgagtgtccatgtgacggacctgaaccgcgatgtcaccctgagagtgaccggcgaggtgcacattggaggcgtgatgcttaagctggtggagaaactcgatgtaaaaaaagattggtctgaccatgctctctggtgggaaaagaagagaacttggcttctgaagacacattggaccttagataagtatggtattcaggcagatgctaagcttcagttcacccctcagcacaaactgctccgcctgcagcttcccaacatgaagtatgtgaaggtgaaagtgaatttctctgatagagtcttcaaagctgtttctgacatctgtaagacttttaatatcagacaccccgaagaactttctctcttaaagaaacccagagatccaacaaagaaaaaaaagaagaagctagatgaccagtctgaagatgaggcacttgaattagaggggcctcttatcactcctggatcaggaagtatatattcaagcccaggactgtatagtaaaacaatgacccccacttatgatgctcatgatggaagccccttgtcaccaacttctgcttggtttggtgacagtgctttgtcagaaggcaatcctggtatacttgctgtcagtcaaccaatcacgtcaccagaaatcttggcaaaaatgttcaagcctcaagctcttcttgataaagcaaaaatcaaccaaggatggcttgattcctcaagatctctcatggaacaagatgtgaaggaaaatgaggccttgctgctccgattcaagtattacagcttttttgatttgaatccaaagtatgatgcaatcagaatcaatcagctttacgagcaggccaaatgggccattctcctggaagagattgaatgcacagaagaagaaatgatgatgtttgcagccctgcagtatcatatcaataagctgtcaatcatgacatcagagaatcatttgaacaacagtgacaaagaagttgatgaagttgatgctgccctttcagacctggagattactctggaagggggtaaaacgtcaacaattttgggtgacattacttccattcctgaacttgctgactacattaaagttttcaagccaaaaaagctgactctgaaaggttacaaacaatattggtgcaccttcaaagacacatccatttcttgttataagagcaaagaagaatccagtggcacaccagctcatcagatgaacctcaggggatgtgaagttaccccagatgtaaacatttcaggccaaaaatttaacattaaactcctgattccagttgcagaaggcatgaatgaaatctggcttcgttgtgacaatgaaaaacagtatgcacactggatggcagcctgcagattagcctccaaaggcaagaccatggcggacagttcttacaacttagaagttcagaatattctttcctttctgaagatgcagcatttaaacccagatcctcagttaataccagagcagatcacgactgatataactcctgaatgtttggtgtctccccgctatctaaaaaagtataagaacaagcagccaggctatataagagatttgataacagcgagaatcttggaggcccatcagaatgtagctcagatgagtctaattgaagccaagatgagatttattcaagcttggcagtcactacctgaatttggcatcactcacttcattgcaaggttccaagggggcaaaaaagaagaacttattggaattgcatacaacagactgattcggatggatgccagcactggagatgcaattaaaacatggcgtttcagcaacatgaaacagtggaatgtcaactgggaaatcaaaatggtaaactcataacaatgttacttgaatatagtccttctctgatacaaattagtacattaagaataaaaaggcctataaattctga

SEQ ID NO: 10710 - DNA, 2064 bp, Homo sapiens
  source 1..2064: mol_type = unassigned DNA
atggctctggacgggataaggatgccagatggctgctacgcggacgggacgtgggaactgagtgtccatgtgacggacctgaaccgcgatgtcaccctgagagtgaccggcgaggtgcacattggaggcgtgatgcttaagctggtggagaaactcgatgtaaaaaaagattggtctgaccatgctctctggtgggaaaagaagagaacttggcttctgaagacacattggaccttagataagtatggtattcaggcagatgctaagcttcagttcacccctcagcacaaactgctccgcctgcagcttcccaacatgaagtatgtgaaggtgaaagtgaatttctctgatagagtcttcaaagctgtttctgacatctgtaagacttttaatatcagacaccccgaagaactttctctcttaaagaaacccagagatccaacaaagaaaaaaaagaagaagctagatgaccagtctgaagatgaggcacttgaattagaggggcctcttatcactcctggatcaggaagtatatattcaagcccaggactgtatagtaaaacaatgacccccacttatgatgctcatgatggaagccccttgtcaccaacttctgcttggtttggtgacagtgctttgtcagaaggcaatcctggtatacttgctgtcagtcaaccaatcacgtcaccagaaatcttggcaaaaatgttcaagcctcaagctcttcttgataaagcaaaaatcaaccaaggatggcttgattcctcaagatctctcatggaacaagatgtgaaggaaaatgaggccttgctgctccgattcaagtattacagcttttttgatttgaatccaaagtatgatgcaatcagaatcaatcagctttacgagcaggccaaatgggccattctcctggaagagattgaatgcacagaagaagaaatgatgatgtttgcagccctgcagtatcatatcaataagctgtcaatcatgacatcagagaatcatttgaacaacagtgacaaagaagttgatgaagttgatgctgccctttcagacctggagattactctggaagggggtaaaacgtcaacaattttgggtgacattacttccattcctgaacttgctgactacattaaagttttcaagccaaaaaagctgactctgaaaggttacaaacaatattggtgcaccttcaaagacacatccatttcttgttataagagcaaagaagaatccagtggcacaccagctcatcagatgaacctcaggggatgtgaagttaccccagatgtaaacatttcaggccaaaaatttaacattaaactcctgattccagttgcagaaggcatgaatgaaatctggcttcgttgtgacaatgaaaaacagtatgcacactggatggcagcctgcagattagcctccaaaggcaagaccatggcggacagttcttacaacttagaagttcagaatattctttcctttctgaagatgcagcatttaaacccagatcctcagttaataccagagcagatcacgactgatataactcctgaatgtttggtgtctccccgctatctaaaaaagtataagaacaagcagccaggctatataagagatttgataacagcgagaatcttggaggcccatcagaatgtagctcagatgagtctaattgaagccaagatgagatttattcaagcttggcagtcactacctgaatttggcatcactcacttcattgcaaggttccaagggggcaaaaaagaagaacttattggaattgcatacaacagactgattcggatggatgccagcactggagatgcaattaaaacatggcgtttcagcaacatgaaacagtggaatgtcaactgggaaatcaaaatggtcaccgtagagtttgcagatgaagtacgattgtccttcatttgtactgaagtagattgcaaagtggttcatgaattcattggtggctacatatttctctcaacacgtgcaaaagaccaaaacgagagtttagatgaagagatgttctacaaacttaccagtggttgggtgtga

SEQ ID NO: 10711 - DNA, 587 bp, Homo sapiens
  source 1..587: mol_type = unassigned DNA
gtttcccagtaatgttaatgaacaaaaggttatctgcctagcgagttccttttccaagcgtttgagacaattcgacaagattatgagactgcgaactggagtcttttatctttaaaaggaaggagccatggctctggacgggataaggatgccagatggctgctacgcggacgggacgtgggaactgagtgtccatgtgacggacctgaaccgcgatgtcaccctgagagtgaccggcgaggtgcacattggaggcgtgatgcttaagctggtggagaaactcgatgtaaaaaaagattggtctgaccatgctctctggtgggaaaagaagagaacttggcttctgaagacacattggaccttagataagtatggtattcaggcagatgctaagcttcagttcacccctcagcacaaactgctccgcctgcagcttcccaacatgaagtatgtgaaggtgaaagtgaatttctctgatagagtcttcaaagctgtttctgacatctgtaagacttttaatatcagacaccccgaagaactttctctcttaaagaaacccagagatccaacaaagaaaaaaaagaaga

SEQ ID NO: 10712 - DNA, 2489 bp, Homo sapiens
  source 1..2489: mol_type = unassigned DNA
gagaaaggagggcaggaagcccacggcccacaggggtgtagcccgagacccacctgcagcccccagcccttgccaggaaagcagcagccgcagccatggcggggatgaagacagcctccggggactacatcgactcgtcatgggagctgcgggtgtttgtgggagaggaggacccagaggccgagtcggtcaccctgcgggtcactggggagtcgcacatcggcggggtgctcctgaagattgtggagcagatcaatcgcaagcaggactggtcagaccatgctatttggtgggaacagaagaggcagtggctgctgcagacccactggacactggacaagtacgggatcctggccgacgcacgcctcttctttgggccccagcaccggcccgtcatccttcggttgcccaaccgccgcgcactgcgcctccgtgccagcttctcccagcccctcttccaggctgtggctgccatctgccgcctcctcagcatccggcaccccgaggagctgtccctgctccgggctcctgagaagaaggagaagaagaagaaagagaaggagccagaggaagagctctatgacttgagcaaggttgtcttggctgggggcgtggcacctgcactgttccgggggatgccagctcacttctcggacagcgcccagactgaggcctgctaccacatgctgagccggccccagccgccacccgaccccctcctgctccagcgtctgccacggcccagctccctgtcagacaagacccagctccacagcaggtggctggactcgtcgcggtgtctcatgcagcagggcatcaaggccggggacgcactctggctgcgcttcaagtactacagcttcttcgatttggatcccaagacagaccccgtgcggctgacacagctgtatgagcaggcccggtgggacctgctgctggaggagattgactgcaccgaggaggagatgatggtgtttgccgccctgcagtaccacatcaacaagctgtcccagagcggggaggtgggggagccggctggcacagacccagggctggacgacctggatgtggccctgagcaacctggaggtgaagctggaggggtcggcgcccacagatgtgctggacagcctcaccaccatcccagagctcaaggaccatctccgaatctttcgcatcccacgaaggccccggaagctgaccctgaagggctaccgccaacactgggtggtgttcaaggagaccacactgtcctactacaagagccaggacgaggcccctggggaccccattcagcagctcaacctcaagggctgtgaggtggttcccgatgttaacgtctccggccagaagttctgcattaaactcctagtgccctcccctgagggcatgagtgagatctacctgcggtgccaggatgagcagcagtatgcccgctggatggctggctgccgcctggcctccaaaggccgcaccatggccgacagcagctacaccagcgaggtgcaggccatcctggccttcctcagcctgcagcgcacgggcagtgggggcccgggcaaccacccccacggccctgatgcctctgccgagggcctcaacccctacggcctcgttgccccccgtttccagcgaaagttcaaggccaagcagctcaccccacggatcctggaagcccaccagaatgtggcccagttgtcgctggcagaggcccagctgcgcttcatccaggcctggcagtccctgcccgacttcggcatctcctatgtcatggtcaggttcaagggcagcaggaaagacgagatcctgggcatcgccaacaaccgactgatccgcatcgacttggccgtgggcgacgtggtcaagacctggcgtttcagcaacatgcgccagtggaatgtcaactgggacatccggcaggtggccatcgagtttgatgaacacatcaatgtggccttcagctgcgtgtctgccagctgccgaattgtacacgagtatatcgggggctacattttcctgtcgacgcgggagcgggcccgtggggaggagctggatgaagacctcttcctgcagctcaccgggggccatgaggccttctgagggctgtctgattgcccctgccctgctcaccaccctgtcacagccactcccaagcccacacccacaggggctcactgccccacacccgctccaggcaggcacccagctgggcatttcacctgctgtcactgactttgtgcaggccaaggacctggcagggccagacgctgtaccatcacccaggccagggatgggggtgggggtccctgagctcatgtggtgccccctttccttgtctgagtggctgaggctgatacccctgacctatctgcagtcccccagcacacaaggaagaccagatgtagctacaggatgatgaaacatggtttcaaacgagttctttcttgttactttttaaaatttcttttttataaattaatattttattgt

SEQ ID NO: 10713 - DNA, 2477 bp, Homo sapiens
  source 1..2477: mol_type = unassigned DNA
gagaaaggagggcaggaagcccacggcccacaggggtgtagcccgagacccacctgcagcccccagcccttgccaggaaagcagcagccgcagccatggcggggatgaagacagcctccggggactacatcgactcgtcatgggagctgcgggtgtttgtgggagaggaggacccagaggccgagtcggtcaccctgcgggtcactggggagtcgcacatcggcggggtgctcctgaagattgtggagcagatcaatcgcaagcaggactggtcagaccatgctatttggtgggaacagaagaggcagtggctgctgcagacccactggacactggacaagtacgggatcctggccgacgcacgcctcttctttgggccccagcaccggcccgtcatccttcggttgcccaaccgccgcgcactgcgcctccgtgccagcttctcccagcccctcttccaggctgtggctgccatctgccgcctcctcagcatccggcaccccgaggagctgtccctgctccgggctcctgagaagaaggagaagaagaagaaagagaaggagccagaggaagagctctatgacttgagcaaggttgtcttggctgggggcgtggcacctgcactgttccgggggatgccagctcacttctcggacagcgcccagactgaggcctgctaccacatgctgagccggccccagccgccacccgaccccctcctgctccagcgtctgccacggcccagctccctgtcagacaagacccagctccacagcaggtggctggactcgtcgcggtgtctcatgcagcagggcatcaaggccggggacgcactctggctgcgcttcaagtactacagcttcttcgatttggatcccaagacagaccccgtgcggctgacacagctgtatgagcaggcccggtgggacctgctgctggaggagattgactgcaccgaggaggagatgatggtgtttgccgccctgcagtaccacatcaacaagctgtcccagagcggggaggtgggggagccggctggcacagacccagggctggacgacctggatgtggccctgagcaacctggaggtgaagctggaggggtcggcgcccacagatgtgctggacagcctcaccaccatcccagagctcaaggaccatctccgaatctttcggccccggaagctgaccctgaagggctaccgccaacactgggtggtgttcaaggagaccacactgtcctactacaagagccaggacgaggcccctggggaccccattcagcagctcaacctcaagggctgtgaggtggttcccgatgttaacgtctccggccagaagttctgcattaaactcctagtgccctcccctgagggcatgagtgagatctacctgcggtgccaggatgagcagcagtatgcccgctggatggctggctgccgcctggcctccaaaggccgcaccatggccgacagcagctacaccagcgaggtgcaggccatcctggccttcctcagcctgcagcgcacgggcagtgggggcccgggcaaccacccccacggccctgatgcctctgccgagggcctcaacccctacggcctcgttgccccccgtttccagcgaaagttcaaggccaagcagctcaccccacggatcctggaagcccaccagaatgtggcccagttgtcgctggcagaggcccagctgcgcttcatccaggcctggcagtccctgcccgacttcggcatctcctatgtcatggtcaggttcaagggcagcaggaaagacgagatcctgggcatcgccaacaaccgactgatccgcatcgacttggccgtgggcgacgtggtcaagacctggcgtttcagcaacatgcgccagtggaatgtcaactgggacatccggcaggtggccatcgagtttgatgaacacatcaatgtggccttcagctgcgtgtctgccagctgccgaattgtacacgagtatatcgggggctacattttcctgtcgacgcgggagcgggcccgtggggaggagctggatgaagacctcttcctgcagctcaccgggggccatgaggccttctgagggctgtctgattgcccctgccctgctcaccaccctgtcacagccactcccaagcccacacccacaggggctcactgccccacacccgctccaggcaggcacccagctgggcatttcacctgctgtcactgactttgtgcaggccaaggacctggcagggccagacgctgtaccatcacccaggccagggatgggggtgggggtccctgagctcatgtggtgccccctttccttgtctgagtggctgaggctgatacccctgacctatctgcagtcccccagcacacaaggaagaccagatgtagctacaggatgatgaaacatggtttcaaacgagttctttcttgttactttttaaaatttcttttttataaattaatattttattgt

SEQ ID NO: 10714 - DNA, 1006 bp, Homo sapiens
  source 1..1006: mol_type = unassigned DNA
acccgccctgctcgtgataaggcacaagcaagggctgccctgaaggaagctccaaagagaaaggagggcaggaagcccacggcccacaggggtgtagcccgagacccacctgcagcccccagcccttgccaggaaagcagccgcagccatggcggggatgaagacagcctccggggactacatcgactcgtcatgggagctgcgggtgtttgtgggagaggaggacccagaggccgagtcggtcaccctgcgggtcactggggagtcgcacatcggcggggtgctcctgaagattgtggagcagatcaatcgcaagcaggactggtcagaccatgctatttggtgggaacagaagaggcagtggctgctgcagacccactggacactggacaagtacgggatcctggccgacgcacgcctcttctttgggccccagcaccggcccgtcatccttcggttgcccaaccgccgcgcactgcgcctccgtgccagcttctcccagcccctcttccaggctgtggctgccatctgccgcctcctcagcatccggcaccccgaggagctgtccctgctccgggctcctgagaagaaggagaagaagaagaaagagaaggagccagaggaagagctctatgacttgagcaaggttgtcttggctgggggcgtggcacctgcactgttccgggggatgccagctcacttctcggacagcgcccagactgaggcctgctaccacatgctgagccggccccagccgccacccgaccccctcctgctccagcgtctgccacggcccagctccctgtcagacaagacccagctccacagcaggtggctggactcgtcgcggtgtctcatgcagcagggcatcaaggccggggacgcactctggctgcgcttcaagtactacagcttcttcgatttggatcccaagacagaccccgtgcggctgacacagctgtatgagcaggcccggtgggacctgctgctggaggagattgactgc

SEQ ID NO: 10715 - DNA, 3206 bp, Homo sapiens
  source 1..3206: mol_type = unassigned DNA
gggcgtgagaggcggggcggggccgcgctctgcttgccaatgtctttataggtcacccggaaggcacgcggaacctcggcgcggtgcttccagcagggtctctccgccactccagccccgcgcccctcgccgcggccctcgggcgtctgcgccgcagctgccgcccccgcctctttggagtctctcgcggcctcaaagcgcggcctgcgtcgcttccggcagttcccgaccgcgggcgatggctgccgctgggggcgcccggctgctgcgcgccgcttctgctgtcctcggcggcccggccggccggtggctgcaccacgctgggtcccgcgctggatccagcggcctgctgaggaaccgggggccgggcgggagcgcggaggcgagccggtcgctgagcgtgtcggcgcgggcccggagcagctcagaagataaaataacagtccactttataaaccgtgatggtgaaacattaacaaccaaaggaaaagttggtgattctctgctagatgttgtggttgaaaataatctagatattgatggctttggtgcatgtgagggaaccctggcttgttcaacctgtcacctcatctttgaagatcacatatatgagaagttagatgcaatcactgatgaggagaatgacatgctcgatctggcatatggactaacagacagatcacggttgggctgccaaatctgtttgacaaaatctatggacaatatgactgttcgagtgcctgaaacagtggctgatgccagacaatccattgatgtgggcaagacctcctgaactagaacaaataggaatattttcatggaattttacctatttttataattattatttcttaaagtgattaaatgagaacatggatgagtggacttcatattatgactagctttactattttaattcaccttgcataactactgaattttgtcattcttgaaagtatgcaatttttattttggttatattacaaaaatgtcaatcaaatattaaaaaatagttaatgtgatagaaaaaccttacatatttttttcttatgtttgtttagcgactttagcaaaatgttttcatataatctcatctgtttacctagaagataggttaaggaaatatattattattcctgtttgatgtgggtgaaggcagagatctaacctggcttgtttagggccataccactaattagaaaatctgtgctagaacctgtgtcttattcctataagctatgtgttcagactgaaactggagaaattatgactattttatttatagtagtagttaaatctgaatgtgtatggacaaaaatatttaattgctcagtaaactgcttaacttcaaagatagttattgaccttataaataaatatttcaaaattttgattcggaagactaagtctggacgtagacattataatgctatcaaagaagtttgatctctgttttgactaaactagaggaaaaatgattggatgtgtttattcttttctaagcagaatggtttaactttgtactctttgaaaaataatgctgatttataaatctctgcctataacagaatggaaaccttatgaatgaattgtgtttctctgtcctgagctggagaagggaatgagcaggctgacacgttgcacagccccaggtggcgccattctctcacgcaaggatggggctgcagggtgagcagcgtgggctgcagtgtgtcagtcccaggagtgagggagtggcaagcaccacagattaccacgtatgtgtggaagacattcgtactcttatctttactataaataaattcataaaagttaacaaaggggtacacagtatggtctttggaaatataataaaacatcaactaacttggactaattgtgaggaagagcagaacaaattagtagaaagaggttataagacaattgagttagcttcatgtgtattattgcagcttgatcatttatataaatatttgtctagtacaatgcttgacatacagcattgtgttatgcccattggggacacagaggtgaacaagacaaggaatgccatcagggaattcaccttttattaggaaaatataaaatatgtatgtatgtgcagataatttgcttgaactaaactgactagttctgctaaataagattttaaactaattcatatgtaaaaagtgattaggaagaacttgaagtatcatttgatgcttaataactattgagtagttttttttttttttttttggtggggggagcgggggacagggtcttactctgtcactcaggccagagtacaatagtatgatctcggctcactgcaacttctgcctcccagtttcaagggattctcgtgcctcagcctcccaggtagctggtactacaggcacggaccaccacgcctggctaatttttgtattttttctagggacagggttttaccacgttgcccaggctggtcttgaacttttgagctcgagtgatccacccacctcagcctcccaaaatgctgggattacagatgtgagccaccgtgcttggccataactattgaatgctttctatgtggagagtgcttgtcttaattttctgttgctataatagaataacacagactgggtaatttataaagaaaagagatttatttggatcatggttctggaggctgggaggtccaagagcatggtaccagcatctgcttggcatctggtgacagctttcttgctgcatcattacatggtggaagggcaagagaatgcgagtgagagcaagagggcaaaatgattatccttttatcaggagcccacttctgacataactaacccacacctgagataacggcattaatccattcatgaggtctctgctcttaaaggagatcacctcttaaaggacccacctttcaatgccattacactggcaatttaatttcaagatgagttttggaggggacattcaaaccatagcagtgctataattttaaagtacttcaaagccaatttattctcttaattagcttcattattcttgtctttgtgtgtggattacctaaactctccttccagagctactttaatgattatattcaaccaaagcactctaaaatttagagtataaattgtcttatatttcaaattagaaaagttcaaatgaagtttaattgtgttattttataaaaccttctaaaattattaaatggaggatataatcta

SEQ ID NO: 10716 - DNA, 1897 bp, Homo sapiens
  source 1..1897: mol_type = unassigned DNA
gcttgtgggcgggcccgggcaggagcgggcttgccctgcggagcagtagctaggaacagatccacttgcaggttgctgttcccagccatggcttcgcgctgctggcgctggtggggctggtcggcgtggcctcggacccggctgcctcccgccgggagcaccccgagcttctgccaccatttctccacacaggagaagaccccccagatctgtgtggtgggcagtggcccagctggcttctacacggcccaacacctgctaaagcacccccaggcccacgtggacatctacgagaaacagcctgtgccctttggcctggtgcgctttggtgtggcgcctgatcaccccgaggtgaagaatgtcatcaacacatttacccagacggcccattctggccgctgtgccttctggggcaacgtggaggtgggcagggacgtgacggtgccggagctgcgggaggcctaccacgctgtggtgctgagctacggggcagaggaccatcgggccctggaaattcctggtgaggagctgccaggtgtgtgctccgcccgggccttcgtgggctggtacaacgggcttcctgagaaccaggagctggagccagacctgagctgtgacacagccgtgattctggggcaggggaacgtggctctggacgtggcccgcatcctactgaccccacctgagcacctggaggccctccttttgtgccagagaacggacatcacgaaggcagccctgggtgtactgaggcagagtcgagtgaagacagtgtggctagtgggccggcgtggacccctgcaagtggccttcaccattaaggagcttcgggagatgattcagttaccgggagcccggcccattttggatcctgtggatttcttgggtctccaggacaagatcaaggaggtcccccgcccgaggaagcggctgacggaactgctgcttcgaacggccacagagaagccagggccggcggaagctgcccgccaggcatcggcctcccgtgcctggggcctccgctttttccgaagcccccagcaggtgctgccctcaccagatgggcggcgggcagcaggtgtccgcctagcagtcactagactggagggtgtcgatgaggccacccgtgcagtgcccacgggagacatggaagacctcccttgtgggctggtgctcagcagcattgggtataagagccgccctgtcgacccaagcgtgccctttgactccaagcttggggtcatccccaatgtggagggccgggttatggatgtgccaggcctctactgcagcggctgggtgaagagaggacctacaggtgtcatagccacaaccatgactgacagcttcctcaccggccagatgctgctgcaggacctgaaggctgggttgctcccctctggccccaggcctggctacgcagccatccaggccctgctcagcagccgaggggtccggccagtctctttctcagactgggagaagctggatgccgaggaggtggcccggggccagggcacggggaagcccagggagaagctggtggatcctcaggagatgctgcgcctcctgggccactgagcccagccccagccccggcccccagcagggaagggatgagtgttgggaggggaagggctgggtccgtctgagtgggactttgcacctctgctgatcccggccggccctggcttggaggcttggctgctcttccagcgtctctcctccctcctggggaaggtcgcccttgcgcgcaaggttttagctttcagcaactgaggtaaccttagggacaggtggaggtgtgggccgatctaaccccttacccatctctctactgctggactgtggagggtcaccaggttgggaacatgctggaaataaaacagctgcaacc

SEQ ID NO: 10717 - DNA, 1809 bp, Homo sapiens
  source 1..1809: mol_type = unassigned DNA
acagatccacttgcaggttgctgttcccagccatggcttcgcgctgctggcgctggtggggctggtcggcgtggcctcggacccggctgcctcccgccgggagcaccccgacctttgggggttcagatgaagtaagagaccctgcaaatgccaaagccttgaggaacaagagaaggaggatgcaggtgagggtgaagcttgggaagttccagcttctgttggatattcaggagaagaccccccagatctgtgtggtgggcagtggcccagctggcttctacacggcccaacacctgctaaagcacccccaggcccacgtggacatctacgagaaacagcctgtgccctttggcctggtgcgctttggtgtggcgcctgatcaccccgaggtgaagaatgtcatcaacacatttacccagacggcccattctggccgctgtgccttctggggcaacgtggaggtgggcagggacgtgacggtgccggagctgcgggaggcctaccacgctgtggtgctgagctacggggcagaggaccatcgggccctggaaattcctggtgaggagctgccaggtgtgtgctccgcccgggccttcgtgggctggtacaacgggcttcctgagaaccaggagctggagccagacctgagctgtgacacagccgtgattctggggcaggggaacgtggctctggacgtggcccgcatcctactgaccccacctgagcacctggagagaacggacatcacgaaggcagccctgggtgtactgaggcagagtcgagtgaagacagtgtggctagtgggccggcgtggacccctgcaagtggccttcaccattaaggagcttcgggagatgattcagttaccgggagcccggcccattttggatcctgtggatttcttgggtctccaggacaagatcaaggaggtcccccgcccgaggaagcggctgacggaactgctgcttcgaacggccacagagaagccagggccggcggaagctgcccgccaggcatcggcctcccgtgcctggggcctccgctttttccgaagcccccagcaggtgctgccctcaccagatgggcggcgggcagcaggtgtccgcctagcagtcactagactggagggtgtcgatgaggccacccgtgcagtgcccacgggagacatggaagacctcccttgtgggctggtgctcagcagcattgggtataagagccgccctgtcgacccaagcgtgccctttgactccaagcttggggtcatccccaatgtggagggccgggttatggatgtgccaggcctctactgcagcggctgggtgaagagaggacctacaggtgtcatagccacaaccatgactgacagcttcctcaccggccagatgctgctgcaggacctgaaggctgggttgctcccctctggccccaggcctggctacgcagccatccaggccctgctcagcagccgaggggtccggccagtctctttctcagactgggagaagctggatgccgaggaggtggcccggggccagggcacggggaagcccagggagaagctggtggatcctcaggagatgctgcgcctcctgggccactgagcccagccccagccccggcccccagcagggaagggatgagtgttgggaggggaagggctgggtccgtctgagtgggactttgcacctctgctgatcccggccggccctggcttggaggcttggctgctcttccagcgtctctcctccctcctggggaaggtcgcccttgcgcgcaaggttttagctttcagcaactgaggtaacctta

SEQ ID NO: 10718 - DNA, 1705 bp, Homo sapiens
  source 1..1705: mol_type = unassigned DNA
agatccacttgcaggttgctgttcccagccatggcttcgcgctgctggcgctggtggggctggtcggcgtggcctcggacccggctgcctcccgccgggagcaccccgagcttctgccaccatttctccacacaggagaagaccccccagatctgtgtggtgggcagtggcccagctggcttctacacggcccaacacctgctaaagcagcacccccaggcccacgtggacatctacgagaaacagcctgtgccctttggcctggtgcgctttggtgtggcgcctgatcaccccgaggtgaagagctacggggcagaggaccatcgggccctggaaattcctggtgaggagctgccaggtgtgtgctccgcccgggccttcgtgggctggtacaacgggcttcctgagaaccaggagctggagccagacctgagctgtgacacagccgtgattctggggcaggggaacgtggctctggacgtggcccgcatcctactgaccccacctgagcacctggagagaacggacatcacgaaggcagccctgggtgtactgaggcagagtcgagtgaagacagtgtggctagtgggccggcgtggacccctgcaagtggccttcaccattaaggagcttcgggagatgattcagttaccgggagcccggcccattttggatcctgtggatttcttgggtctccaggacaagatcaaggaggtcccccgcccgaggaagcggctgacggaactgctgcttcgaacggccacagagaagccagggccggcggaagctgcccgccaggcatcggcctcccgtgcctggggcctccgctttttccgaagcccccagcaggtgctgccctcaccagatgggcggcgggcagcaggtgtccgcctagcagtcactagactggagggtgtcgatgaggccacccgtgcagtgcccacgggagacatggaagacctcccttgtgggctggtgctcagcagcattgggtataagagccgccctgtcgacccaagcgtgccctttgactccaagcttggggtcatccccaatgtggagggccgggttatggatgtgccaggcctctactgcagcggctgggtgaagagaggacctacaggtgtcatagccacaaccatgactgacagcttcctcaccggccagatgctgctgcaggacctgaaggctgggttgctcccctctggccccaggcctggctacgcagccatccaggccctgctcagcagccgaggggtccggccagtctctttctcagactgggagaagctggatgccgaggaggtggcccggggccagggcacggggaagcccagggagaagctggtggatcctcaggagatgctgcgcctcctgggccactgagcccagccccagccccggcccccagcagggaagggatgagtgttgggaggggaagggctgggtccgtctgagtgggactttgcacctctgctgatcccggccggccctggcttggaggcttggctgctcttccagcgtctctcctccctcctggggaaggtcgcccttgcgcgcaaggttttagctttcagcaactgaggtaaccttagggacaggtggaggtgtgggccgatctaaccccttacccatctctctactgctggactgtggagggtcaccaggttgggaacatgctggaaataaaacagctgcaaccaag

SEQ ID NO: 10719 - DNA, 1967 bp, Homo sapiens
  source 1..1967: mol_type = unassigned DNA
gcttgtgggcgggcccgggcaggagcgggcttgccctgcggagcagtagctaggaacagatccacttgcaggttgctgttcccagccatggcttcgcgctgctggcgctggtggggctggtcggcgtggcctcggacccggctgcctcccgccgggagcaccccgagcttctgccaccatttctccacacaggagaagaccccccagatctgtgtggtgggcagtggcccagctggcttctacacggcccaacacctgctaaagagggtggaagccttgtgttctcagcccagggtcctgaactctcctgctctgtctggggaaggggaggacctgggggcgtcccagcctctctctctcgaccccaccagctgccaccctgttccccagcagcacccccaggcccacgtggacatctacgagaaacagcctgtgccctttggcctggtgcgctttggtgtggcgcctgatcaccccgaggtgaagaatgtcatcaacacatttacccagacggcccattctggccgctgtgccttctggggcaacgtggaggtgggcagggacgtgacggtgccggagctgcgggaggcctaccacgctgtggtgctgagctacggggcagaggaccatcgggccctggaaattcctggtgaggagctgccaggtgtgtgctccgcccgggccttcgtgggctggtacaacgggcttcctgagaaccaggagctggagccagacctgagctgtgacacagccgtgattctggggcaggggaacgtggctctggacgtggcccgcatcctactgaccccacctgagcacctggagagaacggacatcacgaaggcagccctgggtgtactgaggcagagtcgagtgaagacagtgtggctagtgggccggcgtggacccctgcaagtggccttcaccattaaggagcttcgggagatgattcagttaccgggagcccggcccattttggatcctgtggatttcttgggtctccaggacaagatcaaggaggtcccccgcccgaggaagcggctgacggaactgctgcttcgaacggccacagagaagccagggccggcggaagctgcccgccaggcatcggcctcccgtgcctggggcctccgctttttccgaagcccccagcaggtgctgccctcaccagatgggcggcgggcagcaggtgtccgcctagcagtcactagactggagggtgtcgatgaggccacccgtgcagtgcccacgggagacatggaagacctcccttgtgggctggtgctcagcagcattgggtataagagccgccctgtcgacccaagcgtgccctttgactccaagcttggggtcatccccaatgtggagggccgggttatggatgtgccaggcctctactgcagcggctgggtgaagagaggacctacaggtgtcatagccacaaccatgactgacagcttcctcaccggccagatgctgctgcaggacctgaaggctgggttgctcccctctggccccaggcctggctacgcagccatccaggccctgctcagcagccgaggggtccggccagtctctttctcagactgggagaagctggatgccgaggaggtggcccggggccagggcacggggaagcccagggagaagctggtggatcctcaggagatgctgcgcctcctgggccactgagcccagccccagccccggcccccagcagggaagggatgagtgttgggaggggaagggctgggtccgtctgagtgggactttgcacctctgctgatcccggccggccctggcttggaggcttggctgctcttccagcgtctctcctccctcctggggaaggtcgcccttgcgcgcaaggttttagctttcagcaactgaggtaaccttagggacaggtggaggtgtgggccgatctaaccccttacccatctctctactgctggactgtggagggt

SEQ ID NO: 10720 - DNA, 2157 bp, Homo sapiens
  source 1..2157: mol_type = unassigned DNA
acagatccacttgcaggttgctgttcccagccatggcttcgcgctgctggcgctggtggggctggtcggcgtggcctcggacccggctgcctcccgccgggagcaccccgagtaggagcagggcgcctttggggctggatgggagcgcggggaggcctgcgagcgctgagtaggggtcggagcagagctggggcagggctggagaagggcttctgccaccatttctccacacaggagaagaccccccagatctgtgtggtgggcagtggcccagctggcttctacacggcccaacacctgctaaagggagctccaagctactggctgtgctcctaagacaggaccacatgcagcacgtttgggacagtggcccttagcttgagtcaggcactgagcacagcatctcgtagcatcctcatgacaacctgcaaagcaggtgtcgtgcctcttgcttcacagcagcacccccaggcccacgtggacatctacgagaaacagcctgtgccctttggcctggtgcgctttggtgtggcgcctgatcaccccgaggtgaagaatgtcatcaacacatttacccagacggcccattctggccgctgtgccttctggggcaacgtggaggtgggcagggacgtgacggtgccggagctgcgggaggcctaccacgctgtggtgctgagctacggggcagaggaccatcgggccctggaaattcctggtgaggagctgccaggtgtgtgctccgcccgggccttcgtgggctggtacaacgggcttcctgagaaccaggagctggagccagacctgagctgtgacacagccgtgattctggggcaggggaacgtggctctggacgtggcccgcatcctactgaccccacctgagcacctggagagaacggacatcacgaaggcagccctgggtgtactgaggcagagtcgagtgaagacagtgtggctagtgggccggcgtggacccctgcaagtggccttcaccattaaggagcttcgggagatgattcagttaccgggagcccggcccattttggatcctgtggatttcttgggtctccaggacaagatcaaggaggtcccccgcccgaggaagcggctgacggaactgctgcttcgaacggccacagagaagccagggccggcggaagctgcccgccaggcatcggcctcccgtgcctggggcctccgctttttccgaagcccccagcaggtgctgccctcaccagatgggcggcgggcagcaggtgtccgcctagcagtcactagactggaggtgagtctcatgtttctcaaagacacccccttcccaggcctctgccacccgcctggtgttgcccacactctccccaacagggtgtcgatgaggccacccgtgcagtgcccacgggagacatggaagacctcccttgtgggctggtgctcagcagcattgggtataagagccgccctgtcgacccaagcgtgccctttgactccaagcttggggtcatccccaatgtggagggccgggttatggatgtgccaggcctctactgcagcggctgggtgaagagaggacctacaggtgtcatagccacaaccatgactgacagcttcctcaccggccagatgctgctgcaggacctgaaggctgggttgctcccctctggccccaggcctggctacgcagccatccaggccctgctcagcagccgaggggtccggccagtctctttctcagactgggagaagctggatgccgaggaggtggcccggggccagggcacggggaagcccagggagaagctggtggatcctcaggagatgctgcgcctcctgggccactgagcccagccccagccccggcccccagcagggaagggatgagtgttgggaggggaagggctgggtccgtctgagtgggactttgcacctctgctgatcccggccggccctggcttggaggcttggctgctcttccagcgtctctcctccctcctggggaaggtcgcccttgcgcgcaaggttttagctttcagcaactgaggtaaccttagggacaggtggaggtgtgggccgatctaaccccttacccatctctctactgctggactgtggagggtcaccaggttgggaacatgctggaaataaaacagctgcaacc

SEQ ID NO: 10721 - DNA, 1827 bp, Homo sapiens
  source 1..1827: mol_type = unassigned DNA
agagaatgtccttgttagcggggagcagctagagggacaggagggagggaaggaaggaaggaggaaacctggaagatgaggtcagccacgagagataaggggtaagaatatccggcagacttagcgttccggaggtggccctggagaggacatcgtgacccagagtgaaggatctgtcgcaggaaagaatggaagataaggacagagagcacccccaggcccacgtggacatctacgagaaacagcctgtgccctttggcctggtgcgctttggtgtggcgcctgatcaccccgaggtgaagaatgtcatcaacacatttacccagacggcccattctggccgctgtgccttctggggcaacgtggaggtgggcagggacgtgacggtgccggagctgcgggaggcctaccacgctgtggtgctgagctacggggcagaggaccatcgggccctggaaattcctggtgaggagctgccaggtgtgtgctccgcccgggccttcgtgggctggtacaacgggcttcctgagaaccaggagctggagccagacctgagctgtgacacagccgtgattctggggcaggggaacgtggctctggacgtggcccgcatcctactgaccccacctgagcacctggagagaacggacatcacgaaggcagccctgggtgtactgaggcagagtcgagtgaagacagtgtggctagtgggccggcgtggacccctgcaagtggccttcaccattaaggagcttcgggagatgattcagttaccgggagcccggcccattttggatcctgtggatttcttgggtctccaggacaagatcaaggaggtcccccgcccgaggaagcggctgacggaactgctgcttcgaacggccacagagaagccagggccggcggaagctgcccgccaggcatcggcctcccgtgcctggggcctccgctttttccgaagcccccagcaggtgctgccctcaccagatgggcggcgggcagcaggtgtccgcctagcagtcactagactggagggtgtcgatgaggccacccgtgcagtgcccacgggagacatggaagacctcccttgtgggctggtgctcagcagcattgggtataagagccgccctgtcgacccaagcgtgccctttgactccaagcttggggtcatccccaatgtggagggccgggttatggatgtgccaggcctctactgcagcggctgggtgaagagaggacctacaggtgtcatagccacaaccatgactgacagcttcctcaccggccagatgctgctgcaggacctgaaggctgggttgctcccctctggccccaggcctggctacgcagccatccaggccctgctcagcagccgaggggtccggccagtctctttctcagactgggagaagctggatgccgaggaggtggcccggggccagggcacggggaagcccagggagaagctggtggatcctcaggagatgctgcgcctcctgggccactgagcccagccccagccccggcccccagcagggaagggatgagtgttgggaggggaagggctgggtccgtctgagtgggactttgcacctctgctgatcccggccggccctggcttggaggcttggctgctcttccagcgtctctcctccctcctggggaaggtcgcccttgcgcgcaaggttttagctttcagcaactgaggtaaccttagggacaggtggaggtgtgggccgatctaaccccttacccatctctctactgctggactgtggagggtcaccaggttgggaacatgctggaaataaaacagctgcaaccaag

SEQ ID NO: 10722 - DNA, 1827 bp, Homo sapiens
  source 1..1827: mol_type = unassigned DNA
ggttgctgttcccagccatggcttcgcgctgctggcgctggtggggctggtcggcgtggcctcggacccggctgcctcccgccgggagcaccccgagcttctgccaccatttctccacacaggagaagaccccccagatctgtgtggtgggcagtggcccagctggcttctacacggcccaacacctgctaaagcacccccaggcccacgtggacatctacgagaaacagcctgtgccctttggcctggtgcgctttggtgtggcgcctgatcaccccgaggtgaagaatgtcatcaacacatttacccagacggcccattctggccgctgtgccttctggggcaacgtggaggtgggcagggacgtgacggtgccggagctgcgggaggcctaccacgctgtggtgctgagctacggggcagaggaccatcgggccctggaaattcctggtgaggagctgccaggtgtgtgctccgcccgggccttcgtgggctggtacaacgggcttcctgagaaccaggagctggagccagacctgagctgtgacacagccgtgattctggggcaggggaacgtggctctggacgtggcccgcatcctactgaccccacctgagcacctggaggccctccttttgtgccagagaacggacatcacgaaggcagccctgggtgtactgaggcagagtcgagtgaagacagtgtggctagtgggccggcgtggacccctgcaagtggccttcaccattaaggagcttcgggagatgattcagttaccgggagcccggcccattttggatcctgtggatttcttgggtctccaggacaagatcaaggaggtcccccgcccgaggaagcggctgacggaactgctgcttcgaacggccacagagaagccagggccggcggaagctgcccgccaggcatcggcctcccgtgcctggggcctccgctttttccgaagcccccagcaggtgctgccctcaccagatgggcggcgggcagcaggtgtccgcctagcagtcactagactggagggtgtcgatgaggccacccgtgcagtgcccacgggagacatggaagacctcccttgtgggctggtgctcagcagcattgggtataagagccgccctgtcgacccaagcgtgccctttgactccaagcttggggtcatccccaatgtggagggccgggttatggatgtgccaggcctctactgcagcggctgggtgaagagaggacctacaggtgtcatagccacaaccatgactgacagcttcctcaccggccagatgctgctgcaggacctgaaggctgggttgctcccctctggccccaggcctggctacgcagccatccaggccctgctcagcagccgaggggtccggccagtctctttctcagactgggagaagctggatgccgaggaggtggcccggggccagggcacggggaagcccagggagaagctggtggatcctcaggagatgctgcgcctcctgggccactgagcccagccccagccccggcccccagcagggaagggatgagtgttgggaggggaagggctgggtccgtctgagtgggactttgcacctctgctgatcccggccggccctggcttggaggcttggctgctcttccagcgtctctcctccctcctggggaaggtcgcccttgcgcgcaaggttttagctttcagcaactgaggtaaccttagggacaggtggaggtgtgggccgatctaaccccttacccatctctctactgctggactgtggagggtcaccaggttgggaacatgctggaaataaaacagctgcaacc

SEQ ID NO: 10723 - DNA, 1766 bp, Homo sapiens
  source 1..1766: mol_type = unassigned DNA
tagctaggaacagatccacttgcaggttgctgttcccagccatggcttcgcgctgctggcgctggtggggctggtcggcgtggcctcggacccggctgcctcccgccgggagcaccccgagcttctgccaccatttctccacacaggagaagaccccccagatctgtgtggtgggcagtggcccagctggcttctacacggcccaacacctgctaaagcacccccaggcccacgtggacatctacgagaaacagcctgtgccctttggcctggtgcgctttggtgtggcgcctgatcaccccgaggtgaagacggcccattctggccgctgtgccttctggggcaacgtggaggtgggcagggacgtgacggtgccggagctgcgggaggcctaccacgctgtggtgctgagctacggggcagaggaccatcgggccctggaaattcctggtgaggagctgccaggtgtgtgctccgcccgggccttcgtgggctggtacaacgggcttcctgagaaccaggagctggagccagacctgagctgtgacacagccgtgattctggggcaggggaacgtggctctggacgtggcccgcatcctactgaccccacctgagcacctggagagaacggacatcacgaaggcagccctgggtgtactgaggcagagtcgagtgaagacagtgtggctagtgggccggcgtggacccctgcaagtggccttcaccattaaggagcttcgggagatgattcagttaccgggagcccggcccattttggatcctgtggatttcttgggtctccaggacaagatcaaggaggtcccccgcccgaggaagcggctgacggaactgctgcttcgaacggccacagagaagccagggccggcggaagctgcccgccaggcatcggcctcccgtgcctggggcctccgctttttccgaagcccccagcaggtgctgccctcaccagatgggcggcgggcagcaggtgtccgcctagcagtcactagactggagggtgtcgatgaggccacccgtgcagtgcccacgggagacatggaagacctcccttgtgggctggtgctcagcagcattgggtataagagccgccctgtcgacccaagcgtgccctttgactccaagcttggggtcatccccaatgtggagggccgggttatggatgtgccaggcctctactgcagcggctgggtgaagagaggacctacaggtgtcatagccacaaccatgactgacagcttcctcaccggccagatgctgctgcaggacctgaaggctgggttgctcccctctggccccaggcctggctacgcagccatccaggccctgctcagcagccgaggggtccggccagtctctttctcagactgggagaagctggatgccgaggaggtggcccggggccagggcacggggaagcccagggagaagctggtggatcctcaggagatgctgcgcctcctgggccactgagcccagccccagccccggcccccagcagggaagggatgagtgttgggaggggaagggctgggtccgtctgagtgggactttgcacctctgctgatcccggccggccctggcttggaggcttggctgctcttccagcgtctctcctccctcctggggaaggtcgcccttgcgcgcaaggttttagctttcagcaactgaggtaaccttagggacaggtggaggtgtgggccgatctaaccccttacccatctctctactgctggactgtggagg

SEQ ID NO: 10724 - DNA, 2642 bp, Homo sapiens
  source 1..2642: mol_type = unassigned DNA
atactgctgggattacaggcgcccgccaccacgcccggctaattttttgtatttttagtagagacggggtttcactgtgttggcaaggatggtctctatctcctgacctcgtgatatgcccgcctccgcctcccaaagtgctgggattacaggcttgagccaccgcgtctggcctatttatttattattttcgagacggagtgttgctcttgtggcccaggctggagtgcaacggcgggatttcggctcactgcaacctctgcctcccgggttcaagcaattctcctgcctcagcctcctgagtagctgggattacaggcaggcaccaccacacccggctaattttgtatttttagtagaaacggggtttctccatgttggtcagtctggtttcgaactcccagcgtcaggtcatctgcctgcctcggcctcccaaagtgctgggattacaggcgtgagccaccgcgcccagccacttctgtatttttaaaaaagtggtaaggaagtggaggattaaatgatttgcccaaagtctcacagtaatttgtagagctgagattgaaattcgggtgaaacttcacatatcacattctttttatcagatggcagtttctggatttactcttggtacctgcatacttctgttgcacattagttatgtggctaattatcccaatggaaaagtaacacagtcatgccatggaatgattcctgaacatggtcatagtccacagtctgttcctgttcatgacatttacgtgagtcagatgacattcaggccaggagatcagattgaagttactttgtcagggcatccatttaaaggctttctcctagaagcgcgtaatgctgaggatctgaatggccctcctattggctccttcacattgattgacagtgaagtgtcacaacttttgacctgtgaagatatacagggatcagcagtgagtcacagaagtgcatctaaaaaaacagaaattaaagtctactggaatgctccaagcagtgctccaaatcacacacagtttctagtcacagttgttgagaagtataaaatctactgggtgaagattcctggtcctataatttcacaaccaaatgcatttccttttacaacacctaaagctacagtagtacctttgccaacgttacctcccgtttcccacttaaccaaaccattcagtgcctcagattgtgggaacaagaagttctgtattaggagtcctttgaactgtgacccagagaaggaggcttcctgtgtcttcttgtccttcacaagagatgaccaatcggtgatggttgaaatgagcggccccagtaaaggctatttatcctttgcattgtctcatgatcagtggatgggtgatgatgatgcttatctgtgtattcatgaagatcagactgtgtacatccagccttcccatttaacggggcgaagtcaccctgtaatggactccagggatacccttgaggatatggcttggaggttggcggacggtgttatgcagtgttctttcagaagaaacattacccttcctggagttaagaatagatttgatctaaacacaagctattacatatttctagcagatggtgcagctaatgatggtcgaatttacaagcactctcagcaacctttgattacctatgaaaaatatgatgtgacagactctccaaagaacataggaggatcccattctgtactccttctgaaggttcatggtgccttaatgtttgtggcatggatgactactgttagcataggtgtactggttgcccggttcttcaagccagtttggtcaaaagctttcttgcttggtgaagcagcttggtttcaggtgcatcggatgctcatgttcaccacaactgtcctcacctgcattgcttttgttatgccgtttatatacaggggaggctggagtaggcatgcaggttaccacccatacctcggctgtatagtgatgactttggcagttcttcagcctcttctggcagtcttcaggccacctttacatgacccaagaaggcaaatgtttaactggactcattggagtatgggaacagctgctagaataatagcagtggcagcgatgttcctgggaatggatttaccaggactgaatcttcctgattcatggaaaacctatgcaatgaccggattcgtagcctggcatgttgggactgaggttgttctggagttgaaatattggatgatgacagaattcagatccttcagtcatttactgcagtggaaacagagggtcatgcttttaaaaaggcagtgttggcaatttatgtctgtgggaatgttacttttctcatcatatttttatctgcaatcaaccatctatgagcaagcaaagaccttggcttttgcaggccaagtgataattatcatcaaaccaaagaaacttgaagcctgtcctgactgcctggagcatatttgtgaattctcacttggaagactggggtcatgtctgtagaggaattctgaagtccagcctttagagaacaacattcaagagggtcatatagactataaattaatgtcatgccctatatgtaattctgggtcttaaaggaaagattgtacttcaggagaagtaactctcaaatatttcatgccaagattttaagaatgt

SEQ ID NO: 10725 - DNA, 2706 bp, Homo sapiens
  source 1..2706: mol_type = unassigned DNA
atactgctgggattacaggcgcccgccaccacgcccggctaattttttgtatttttagtagagacggggtttcactgtgttggcaaggatggtctctatctcctgacctcgtgatatgcccgcctccgcctcccaaagtgctgggattacaggcttgagccaccgcgtctggcctatttatttattattttcgagacggagtgttgctcttgtggcccaggctggagtgcaacggcgggatttcggctcactgcaacctctgcctcccgggttcaagcaattctcctgcctcagcctcctgagtagctgggattacaggcaggcaccaccacacccggctaattttgtatttttagtagaaacggggtttctccatgttggtcagtctggtttcgaactcccagcgtcaggtcatctgcctgcctcggcctcccaaagtgctgggattacaggcgtgagccaccgcgcccagccacttctgtatttttaaaaaagtggtaaggaagtggaggattaaatgatttgcccaaagtctcacagtaatttgtagagctgagattgaaattcgggtgaaacttcacatatcacattctttttatcagatggcagtttctggatttactcttggtacctgcatacttctgttgcacattagttatgtggctaattatcccaatggaaaagtaacacagtcatgccatggaatgattcctgaacatggtcatagtccacagtctgttcctgttcatgacatttacgtgagtcagatgacattcaggccaggagatcagattgaagttactttgtcagggcatccatttaaaggctttctcctagaagcgcgtaatgctgaggatctgaatggccctcctattggctccttcacattgattgacagtgaagtgtcacaacttttgacctgtgaagatatacagggatcagcagtgagtcacagaagtgcatctaaaaaaacagaaattaaagtctactggaatgctccaagcagtgctccaaatcacacacagtttctagtcacagttgttgagaagtataaaatctactgggtgaagattcctggtcctataatttcacaaccaaatgcatttccttttacaacacctaaagctacagtagtacctttgccaacgttacctcccgtttcccacttaaccaaaccattcagtgcctcagattgtgggaacaagaagttctgtattaggagtcctttgaactgtgacccagagaaggaggcttcctgtgtcttcttgtccttcacaagagatgaccaatcggtgatggttgaaatgagcggccccagtaaaggctatttatcctttgcattgtctcatgatcagtggatgggtgatgatgatgcttatctgtgtattcatgaagatcagactgtgtacatccagccttcccatttaacggggcgaagtcaccctgtaatggactccagggatacccttgaggatatggcttggaggttggcggacggtgttatgcagtgttctttcagaagaaacattacccttcctggagttaagaatagatttgatctaaacacaagctattacatatttctagcagatggtgcagctaatgatggtcgaatttacaagcactctcagcaacctttgattacctatgaaaaatatgatgtgacagactctccaaagaacataggaggatcccattctgtactccttctgaaggttcatggtgccttaatgtttgtggcatggatgactactgttagcataggtgtactggttgcccggttcttcaagccagtttggtcaaaagctttcttgcttggtgaagcagcttggtttcaggtgcatcggatgctcatgttcaccacaactgtcctcacctgcattgcttttgttatgccgtttatatacaggggaggctggagtaggcatgcaggttaccacccatacctcggctgtatagtgatgactttggcagttcttcagcctcttctggcagtcttcaggccacctttacatgacccaagaaggcaaatgtttaactggactcattggagtatgggaacagctgctagaataatagcagtggcagcgatgttcctgggaatggatttaccaggactgaatcttcctgattcatggaaaacctatgcaatgaccggattcgtagcctggcatgttgggactgaggttgttctggaggtacatgcttatcggctctctcgcaaagttgaaatattggatgatgacagaattcagatccttcagtcatttactgcagtggaaacagagggtcatgcttttaaaaaggcagtgttggcaatttatgtctgtgggaatgttacttttctcatcatatttttatctgcaatcaaccatctatgagcaagcaaagaccttggcttttgcaggccaagtgataattatcatcaaaccaaagaaacttgaagcctgtcctgactgcctggagcatatttgtgaattctcacttggaagactggggtcatgtctgtagaggaattctgaagtccagcctttagagaacaacattcaagagggtcatatagactataaattaatgtcatgccctatatgtaattctgggtcttaaaggaaagattgtacttcaggagaagtaactctcaaatatttcatgccaagattttaagaatgttggtatttaagaaaataaatagtgatttggaaaatc

SEQ ID NO: 10726 - DNA, 870 bp, Homo sapiens
  source 1..870: mol_type = unassigned DNA
ggcggcgctatgctgtcctgcttcaggctcctctccaggcacatcagcccttcgctggcgtctctgcgcccggtgcgctgctgcttcgcgctcccgctgcgttgggccccggggcgccccttggaccccaggcagatcgccccccgccgccccctggccgcagccgcctcctcccgggaccctaccgggcccgccgccggcccctctcgggtgcgccagaacttccaccccgactccgaggctgccatcaaccgccagatcaacctcgagctctatgcgtcctacgtgtacttgtccatggcctattacttctcccgggatgacgtggccttgaacaacttctccaggtatttccttcaccagtcccgggaggagaccgagcacgcggagaagctgatgaggctgcagaaccagcgaggaggccggatccgcctgcaggacatcaagaagccggaacaggacgactgggaaagcgggctgcatgccatggagtgtgctctactcttggaaaagaacgtgaaccagtcgttgctggaattgcacgctctagcctcagataaaggtgacccccatttgtgcgatttcctggaaacctactacctgaatgagcaggtgaagtctatcaaagaactaggtgaccacgtgcacaacttagtgaagatgggggccccggatgctggcctggcggagtacctttttgacacacatacccttggaaatgaaaacaagcagaactaagccacgagctgccttcctcccaggctagtggatccaaagaccaaagtcagctgtctcctgctttcttgcccttaaaatcacctccatctttatattcttctgttatactattcctccaataaagtgatttgt

SEQ ID NO: 10727 - DNA, 1229 bp, Homo sapiens
  source 1..1229: mol_type = unassigned DNA
ataagagaccacaagcgacccgcagggccagacgttcttcgccgagagtcgtcggggtttcctgcttcaacagtgcttggacggaacccggcgctcgttccccaccccggccggccgcccatagccagccctccgtcacctcttcaccgcaccctcggactgccccaaggcccccgccgccgctccagcgccgcgcagccaccgccgccgccgccgcctctccttagtcgccgccatgacgaccgcgtccacctcgcaggtgcgccagaactaccaccaggactcagaggccgccatcaaccgccagatcaacctggagctctacgcctcctacgtttacctgtccatgtcttactactttgaccgcgatgatgtggctttgaagaactttgccaaatactttcttcaccaatctcatgaggagagggaacatgctgagaaactgatgaagctgcagaaccaacgaggtggccgaatcttccttcaggatatcaagaaaccagactgtgatgactgggagagcgggctgaatgcaatggagtgtgcattacatttggaaaaaaatgtgaatcagtcactactggaactgcacaaactggccactgacaaaaatgacccccatttgtgtgacttcattgagacacattacctgaatgagcaggtgaaagccatcaaagaattgggtgaccacgtgaccaacttgcgcaagatgggagcgcccgaatctggcttggcggaatatctctttgacaagcacaccctgggagacagtgataatgaaagctaagcctcgggctaatttccccatagccgtggggtgacttccctggtcaccaaggcagtgcatgcatgttggggtttcctttaccttttctataagttgtaccaaaacatccacttaagttctttgatttgtaccattccttcaaataaagaaatttggtacccaggtgttgtctttgaggtcttgggatgaatcagaaatctatccaggctatcttccagattccttaagtgccgttgttcagttctaatcacactaatcaaaaagaaacgagtatttgtatttattaaactcattagtttgggcagtatactaaggtgtggctgtcttggattcagatagaactaagggttcccgactctgaatccagagtctgagttaaatgtttccaatggttcagtctagctttcacagtttttatgaataaaaggcattaaaggctgaa

SEQ ID NO: 10728 - DNA, 860 bp, Homo sapiens
  source 1..860: mol_type = unassigned DNA
tcggggtttcctgcttcaacagtgcttggacggaacccggcgctcgttccccaccccggccggccgcccatagccagccctccgtcacctcttcaccgcaccctcggactgccccaaggcccccgccgcctctccttagtcgccgccatgacgaccgcgtccacctcgcaggtgcgccagaactaccaccaggactcagaggccgccatcaaccgccagatcaacctggagctctacgcctcctacgtttacctgtccatgtcttactactttgaccgcgatgatgtggctttgaagaactttgccaaatactttcttcaccaatctcatgaggagagggaacatgctgagaaactgatgaagctgcagaaccaacgaggtggccgaatcttccttcaggatatcaagaaaccagactgtgatgactgggagagcgggctgaatgcaatggagtgtgcattacatttggaaaaaaatgtgaatcagtcactactggaactgcacaaactggccactgacaaaaatgacccccatttgtgtgacttcattgagacacattacctgaatgagcaggtgaaagccatcaaagaattgggtgaccacgtgaccaacttgcgcaagatgggagcgcccgaatctggcttggcggaatatctctttgacaagcacaccctgggagacagtgataatgaaagctaagcctcgggctaatttccccatagccgtggggtgacttccctggtcaccaaggcagtgcatgcatgttggggtttcctttaccttttctataagttgtaccaaaacatccacttaagttctttgatttgtaccattccttcaaataaagaaatttggtaccc

SEQ ID NO: 10729 - DNA, 786 bp, Homo sapiens
  source 1..786: mol_type = unassigned DNA
ggggtttcctgcttcaacagtgcttggacggaacccggcgctcgttccccaccccggccggccgcccatagccagccctccgtcacctcttcaccgcaccctcggactgccccaaggcccccgccgccgctccagcgccgcgcagccaccgccgccgccgccgcctctccttagtcgccgccatgacgaccgcgtccacctcgcagtcttactactttgaccgcgatgatgtggctttgaagaactttgccaaatactttcttcaccaatctcatgaggagagggaacatgctgagaaactgatgaagctgcagaaccaacgaggtggccgaatcttccttcaggatatcaagaaaccagactgtgatgactgggagagcgggctgaatgcaatggagtgtgcattacatttggaaaaaaatgtgaatcagtcactactggaactgcacaaactggccactgacaaaaatgacccccatttgtgtgacttcattgagacacattacctgaatgagcaggtgaaagccatcaaagaattgggtgaccacgtgaccaacttgcgcaagatgggagcgcccgaatctggcttggcggaatatctctttgacaagcacaccctgggagacagtgataatgaaagctaagcctcgggctaatttccccatagccgtggggtgacttccctggtcaccaaggcagtgcatgcatgttggggtttcctttaccttttctataagttgtaccaaaacatccacttaagttctttgatttgtaccattccttcaa

SEQ ID NO: 10730 - DNA, 811 bp, Homo sapiens
  source 1..811: mol_type = unassigned DNA
cacccgcctttcactatccgccattcttgtcacctcagctgctgccctcgctaccgcaccgacttcgcccgtgtgctcgcctgcacttgcgctgcccgccatggccaccgcccagccgtcgcaggtgcgccagaagtacgacaccaactgcgacgccgccatcaacagccacatcacgctggagctctacacctcctacctgtacctgtctatggccttctacttcaaccgggacgacgtggccctggagaacttcttccgctacttcctgcgcctgtcggacgacaaaatggagcatgcccagaagctgatgaggctgcagaacctgcgcggtggccacatctgccttcacgatatcaggaagccagagtgccaaggctgggagagcgggctcgtggccatggagtccgccttccacctggagaagaacgtcaaccagagcctgctggatctgtaccagctggccgtggagaagggcgacccccagctgtgccacttcctggagagccactacctgcacgagcaagtcaagaccatcaaagagctgggtggctacgtgagcaacctgcgcaagatttgttccccggaagccggcctggctgagtacctgttcgacaagctcaccctgggcggccgcgtcaaagagacttgagcccagatgggccccacagccacggggtcccttccctgggtcaggccactaggcggggcgtgcatgttgccctttcagaacgttctcttcagttttatctttcagttttaccattgttagcaaaaaagttatctggttctcaaagcaataaaggtgtcc

SEQ ID NO: 10731 - DNA, 870 bp, Homo sapiens
  source 1..870: mol_type = unassigned DNA
gcagttcggcggtcccgcgggtctgtctcttgcttcaacagtgtttggacggaacagatccggggactctcttccagcctccgaccgccctccgatttcctctccgcttgcaacctccgggaccatcttctcggccatctcctgcttctgggacctgccagcaccgtttttgtggttagctccttcttgccaaccaaccatgagctcccagattcgtcagaattattccaccgacgtggaggcagccgtcaacagcctggtcaatttgtacctgcaggcctcctacacctacctctctctgggcttctatttcgaccgcgatgatgtggctctggaaggcgtgagccacttcttccgcgaattggccgaggagaagcgcgagggctacgagcgtctcctgaagatgcaaaaccagcgtggcggccgcgctctcttccaggacatcaagaagccagctgaagatgagtggggtaaaaccccagacgccatgaaagctgccatggccctggagaaaaagctgaaccaggcccttttggatcttcatgccctgggttctgcccgcacggacccccatctctgtgacttcctggagactcacttcctagatgaggaagtgaagcttatcaagaagatgggtgaccacctgaccaacctccacaggctgggtggcccggaggctgggctgggcgagtatctcttcgaaaggctcactctcaagcacgactaagagccttctgagcccagcgacttctgaagggccccttgcaaagtaatagggcttctgcctaagcctctccctccagccaataggcagctttcttaactatcctaacaagccttggaccaaatggaaataaagctttttgatgc

SEQ ID NO: 10732 - DNA, 573 bp, Homo sapiens
  source 1..573: mol_type = unassigned DNA
atgagctcccagattcgtcagaattattccaccgacgtggaggcagccgtcaacagcctggtcaatttgtacctgcaggcctcctacacctacctctctctgggcttctatttcgaccgcgatgatgtggctctggaaggcgtgagccacttcttccgcgaattggccgaggagaagcgcgagggctacgagcgtctcctgaagatgcaaaaccagcgtggcggccgcgctctcttccaggacatcaagaagccagctgaagatgagtggggtaaaaccccagacgccatgaaagctgccatggccctggagaaaaagctgaaccaggcccttttggatcttcatgccctgggttctgcccgcacggacccccatctctgtgacttcctggagactcacttcctagatgaggaagtgaagcttatcaagaagatgggtgaccacctgaccaacctccacaggctgggtggcccggaggctgggctgggcgagtatctctcgaaaggctcactctcaagcacgactaagagccttctgagcccagcgacttctgaagggccccttgcaaagtaa

SEQ ID NO: 10733 - DNA, 3853 bp, Homo sapiens
  source 1..3853: mol_type = unassigned DNA
cggcagcgaatgagcgggcgcgccgggagggcgcgaggtcagggggctggggacgcgcgtggggatcgctacccggctcggccactgctgggcggacacctgggcgcgccgccgcgggaggagcccggactcgggccgaggctgcccaggcaatgcgttcactcggcgcaaacatggctgcggccctgcgcgccgcgggcgtcctgctccgcgatccgctggcatccagcagctggagggtctgtcagccatggaggtggaagtcaggtgcagctgcagcggccgtcaccacagaaacagcccagcatgcccagggtgcaaaacctcaagttcaaccgcagaagaggaagccgaaaactggaatattaatgctaaacatgggaggccctgaaactcttggagatgttcacgacttccttctgagactcttcttggaccgagacctcatgacacttcctattcagaataagctggcaccattcatcgccaaacgccgaacccccaagattcaagagcagtaccgcaggattggaggcggatcccccatcaagatatggacttccaagcagggagagggcatggtgaagctgctggatgaattgtcccccaacacagcccctcacaaatactatattggatttcggtacgtccatcctttaacagaagaagcaattgaagagatggagagagatggcctagaaagggctattgctttcacacagtatccacagtacagctgctccaccacaggcagcagcttaaatgccatttacagatactataatcaagtgggacggaagcccacgatgaagtggagcactattgacaggtggcccacacatcacctcctcatccagtgctttgcagatcatattctaaaggaactggaccattttccacttgagaagagaagcgaggtggtcattctgttttctgctcactcactgcccatgtctgtggtcaacagaggcgacccatatcctcaggaggtaagcgccactgtccaaaaagtcatggaaaggctggagtactgcaacccctaccgactggtgtggcaatccaaggttggtccaatgccctggttgggtcctcaaacagacgaatctatcaaagggctttgtgagagggggaggaagaatatcctcttggttccgatagcatttaccagtgaccatattgaaacgctgtatgagctggacatcgagtactctcaagttttagccaaggagtgtggagttgaaaacatcagaagagctgagtctcttaatggaaatccattgttctctaaggccctggccgacttggtgcattcacacatccagtcaaacgagctgtgttccaagcagctgaccctgagctgtccgctctgtgtcaatcctgtctgcagggagactaaatccttcttcaccagccagcagctgtgacccccgccggtggaccccgtggcgttaggcaaatgcccaacctccagatacctccgatgtggagagggtgttatttagagatcaaggaaggaagtcatccttccttgatatatatacagcctttgggtacaaattgtgtggtttcttgaggattggactcttgatggatttctatttttatataactatacagtaagcatttgtattttctctctctaggtataagttactagtttggaatgtccatcaggacctttaataaatgagttaaaaatttgtcttatgagacacacctatttaagtacagattttggctttattgcccaaaaccctcctgaaagggtacggagagtcccctctgtgggctggcagtgtgaatgagatctgtttagtctcgtgcatatagttgctgttttttaaatgaacacagttgagtatttgaagtgaatttgaaaaagaaatgttacttaatctttccctaagcccatgggttacagaatgctagggaggcaatttggttacctgcaatggctgcttttgccagcgaggccaccattcattggtcatcttggtatttgtgtgtgaatctcactttcctcaatgtaaaaaggaatcaagtatggatttcagaggtgctcttagattccccatacacccaagggtaataaacgtgtacaagtacagtgttcatgatacgtgccttggtgggagtccgtggtgccacagggaaggggctcccactgcttctggtctccagggacagtgctgctggaaaggctagtgatgagcttcaccctggagctcctcccgggaccttgcaagcctctccatccagcatcttctctatcttagttgaatgccttctttctgaacatttgttttaagaattattttataaagtcaacaatactttgcttgaattctttcttaatttacgattttttattataaaaatgtatagtgatacaatgggacatgtgaagaatacagaaaagtaaccactttaatgcaataactgttatcataatattgtatttcgtggtagtcctttcctgtagatatttttaatgccatttaatgccattgtcaccttggatttatgagtgaaaagtgtttctaaaaatatagaaataatgtcagatcagagtctgatcttctatgtttgtatttaaatggattaaaagatccccggtggttccatgaagaatttgtaaagatcactttctctttcctccaagccctgaaactttgttcttcaaaagagcgtttctttttttttttttttttagccagtttataaagtggaagtattaggagattcataaatcttctatattgagaattggctatgttaataaatattacaacatcattaaggttttagctaagtttgattcatgctgtctgttaaatcaaaactgatctaaatcagaattattaaatgtgaggagcttttttaatacaggaaaagaaacatgtcatccacttgagttaatagttttcctacgttgatgacagccctcatgagtagcatccacatttttaaaatttcaaattggtttttctactagtagattgtgtttctagagaaagatacaaggcataggtgattgtttaggattttcctctagcctttgccattacctttttggggatgaggttcacagtagactttgagtgaccgtcccaccgtgaagtgaattctctgagctggtggtgtggtgctggaaggaaggttatttttggagccactctctccccttaaggatatttcccaagggcctgcttcaattctttgatgactttagaggtgaaaaaatatttttatggagatgatgcagaaaactccaattcaggagcccttgcgagtatatctgaagcacttatttgctaaggaaacctgaattgatagcagtactgtgctgtctggaataatgtccttgatactgagttgggaccagactggcttttatagtgacaggcaaagaggaatttattgagatcactgctcatggcatttgttgctgtaagaagtgttgcctttgattgttactaaccacggatgggtaacggtcatacattaggctagtgtttggtaggacaaaatctttttagagctttgagaattgtcatcctgttggtcaactttgaaatacaaatgtttgccctggtaattagcaatgaactgctggcagtttcttcagctgtgtatatacggatctggcttttaattgatgaatcaacttctacagaaacttttgcagggacagtgttgatgaggcagtttagcttgccagggtgatgataaagcccaggtccctgcatgtatagtgctcttctaaagaatatgcattcttgaactacttaactttttaaaaatcacaataaatttttgcactcaaaatttgcttcgtatcaggagaaatgaa

SEQ ID NO: 10734 - DNA, 2526 bp, Homo sapiens
  source 1..2526: mol_type = unassigned DNA
aggagcccggactcgggccgaggctgcccaggcaatgcgttcactcggcgcaaacatggctgcggccctgcgcgccgcgggcgtcctgctccgcgatccgctggcatccagcagctggagggtctgtcagccatggaggtggaagtcaggtgcagctgcagcggccgtcaccacagaaacagcccagcatgcccagggtgcaaaacctcaagttcaaccgcagaagaggtatgagtctaacatcaggaagccgaaaactggaatattaatgctaaacatgggaggccctgaaactcttggagatgttcacgacttccttctgagactcttcttggaccgagacctcatgacacttcctattcagaataagctggcaccattcatcgccaaacgccgaacccccaagattcaagagcagtaccgcaggattggaggcggatcccccatcaagatatggacttccaagcagggagagggcatggtgaagctgctggatgaattgtcccccaacacagcccctcacaaatactatattggatttcggtacgtccatcctttaacagaagaagcaattgaagagatggagagagatggcctagaaagggctattgctttcacacagtatccacagtacagctgctccaccacaggcagcagcttaaatgccatttacagatactataatcaagtgggacggaagcccacgatgaagtggagcactattgacaggtggcccacacatcacctcctcatccagtgctttgcagatcatattctaaaggaactggaccattttccacttgagaagagaagcgaggtggtcattctgttttctgctcactcactgcccatgtctgtggtcaacagaggcgacccatatcctcaggaggtaagcgccactgtccaaaaagtcatggaaaggctggagtactgcaacccctaccgactggtgtggcaatccaaggttggtccaatgccctggttgggtcctcaaacagacgaatctatcaaagggctttgtgagagggggaggaagaatatcctcttggttccgatagcatttaccagtgaccatattgaaacgctgtatgagctggacatcgagtactctcaagttttagccaaggagtgtggagttgaaaacatcagaagagctgagtctcttaatggaaatccattgttctctaaggccctggccgacttggtgcattcacacatccagtcaaacgagctgtgttccaagcagctgaccctgagctgtccgctctgtgtcaatcctgtctgcagggagactaaatccttcttcaccagccagcagctgtgacccccgccggtggaccccgtggcgttaggcaaatgcccaacctccagatacctccgatgtggagagggtgttatttagagatcaaggaaggaagtcatccttccttgatatatatacagcctttgggtacaaattgtgtggtttcttgaggattggactcttgatggatttctatttttatataactatacagtaagcatttgtattttctctctctaggtataagttactagtttggaatgtccatcaggacctttaataaatgagttaaaaatttgtcttatgagacacacctatttaagtacagattttggctttattgcccaaaaccctcctgaaagggtacggagagtcccctctgtgggctggcagtgtgaatgagatctgtttagtctcgtgcatatagttgctgttttttaaatgaacacagttgagtatttgaagtgaatttgaaaaagaaatgttacttaatctttccctaagcccatgggttacagaatgctagggaggcaatttggttacctgcaatggctgcttttgccagcgaggccaccattcattggtcatcttggtatttgtgtgtgaatctcactttcctcaatgtaaaaaggaatcaagtatggatttcagaggtgctcttagattccccatacacccaagggtaataaacgtgtacaagtacagtgttcatgatacgtgccttggtgggagtccgtggtgccacagggaaggggctcccactgcttctggtctccagggacagtgctgctggaaaggctagtgatgagcttcaccctggagctcctcccgggaccttgcaagcctctccatccagcatcttctctatcttagttgaatgccttctttctgaacatttgttttaagaattattttataaagtcaacaatactttgcttgaattctttcttaatttacgattttttattataaaaatgtatagtgatacaatgggacatgtgaagaatacagaaaagtaaccactttaatgcaataactgttatcataatattgtatttcgtggtagtcctttcctgtagatatttttaatgccatttaatgccattgtcaccttggatttatgagtgaaaagtgtttctaaaaatatagaaataatgtcagatcagagtctgatcttctatgtttgtatttaaatggattaaaagatccccggtggttccatg

SEQ ID NO: 10735 - DNA, 1627 bp, Homo sapiens
  source 1..1627: mol_type = unassigned DNA
gttgtaacaaaaccgctcaagtctgccttaaagagccttacaagccagccagtccctgcagctccacaaactgacccatcctgggccttgttctccacagaatgggtctgctccttcccctggcactctgcatcctagtcctgtgctgcggagcaatgtctccaccccagctggccctcaacccctcggctctgctctcccggggctgcaatgactcagatgtgctggcagttgcaggctttgccctgcgggatattaacaaagacagaaaggatggctatgtgctgagactcaaccgagtgaacgacgcccaggaatacagacggggtggcctgggatctctgttctatcttacactggatgtgctagagactgactgccatgtgctcagaaagaaggcatggcaagactgtggaatgaggatattttttgaatcagtttatggtcaatgcaaagcaatattttatatgaacaacccaagtagagttctctatttagctgcttataactgtactcttcgcccagtttcaaaaaaaaagatttacatgacgtgccctgactgcccaagctccatacccactgactcttccaatcaccaagtgctggaggctgccaccgagtctcttgcgaaatacaacaatgagaacacatccaagcagtattctctcttcaaagtcaccagggcttctagccagtgggtggtcggcccttcttactttgtggaatacttaattaaagaatcaccatgtactaaatcccaggccagcagctgttcacttcagtcctccgactctgtgcctgttggtctttgcaaaggttctctgactcgaacacactgggaaaagtttgtctctgtgacttgtgacttctttgaatcacaggctccagccactggaagtgaaaactctgctgttaaccagaaacctacaaaccttcccaaggtggaagaatcccagcagaaaaacacccccccaacagactccccctccaaagctgggccaagaggatctgtccaatatcttcctgacttggatgataaaaattcccaggaaaagggccctcaggaggcctttcctgtgcatctggacctaaccacgaatccccagggagaaaccctggatatttccttcctcttcctggagcctatggaggagaagctggtggtcctgcctttccccaaagaaaaagcacgcactgctgagtgcccagggccagcccagaatgccagccctcttgtccttccgccatgagaatcacacagagtcttctgtaggggtatggtgcgccgcatgacatgggaggcgatggggacgatggacagagacagagcgtgcacacgtagagtggctagtgaaggacgcctttttgactcttcttggtctcagcatgttgactgggattggaaataatgagactgagccctcggcttgggctgcactctaccctgtacactgccttgtaccctgagctgcatcacctcctaaactgagcagtctcataccatggagagatgcctctcttatgtcttcagccactcacttataaagatacttatcttttcagcagtatatatgtgctgaaatctcagcatgaaagcattgcatgagtaaagatactttccctaaca

SEQ ID NO: 10736 - DNA, 1410 bp, Homo sapiens
  source 1..1410: mol_type = unassigned DNA
gtcagcatttgtccagccctgctggagagccactaggagaggcatcagtctccagtacaaattaacaaaccggctgctggcttatgtatcagttgcctatgcatagggtcagtatactcacccccaggcctgaacaactctgggtcctcaggaaccctgaaggtgtgactggcaaagctgaggccctggctcgggagctgcttccctgagaggactgcgcctacagcatccttgacatcttttcataaaccagcacaactaatgggtctgctccttcccctggcactctgcatcctagtcctgtgctgcggagcaatgtctccaccccagctggccctcaacccctcggctctgctctcccggggctgcaatgactcagatgtgctggcagttgcaggctttgccctgcgggatattaacaaagacagaaaggatggctatgtgctgagactcaaccgagtgaacgacgcccaggaatacagacggggtggcctgggatctctgttctatcttacactggatgtgctagagactgactgccatgtgctcagaaagaaggcatggcaagactgtggaatgaggatattttttgaatcagtttatggtcaatgcaaagcaatattttatatgaacaacccaagtagagttctctatttagctgcttataactgtactcttcgcccagtttcaaaaaaaaagatttacatgacgtgccctgactgcccaagctccatacccactgactcttccaatcaccaagtgctggaggctgccaccgagtctcttgcgaaatacaacaatgagaacacatccaagcagtattctctcttcaaagtcaccagggcttctagccagtgggtggtcggcccttcttactttgtggaatacttaattaaagaatcaccatgtactaaatcccaggccagcagctgttcacttcagtcctccgactctgtgcctgttggtctttgcaaaggttctctgactcgaacacactgggaaaagtttgtctctgtgacttgtgacttctttgaatcacaggctccagccactggaagtgaaaactctgctgttaaccagaaacctacaaaccttcccaaggtggaagaatcccagcagaaaaacacccccccaacagactccccctccaaagctgggccaagaggatctgtccaatatcttcctgacttggatgataaaaattcccaggaaaagggccctcaggaggcctttcctgtgcatctggacctaaccacgaatccccagggagaaaccctggatatttccttcctcttcctggagcctatggaggagaagctggtggtcctgcctttccccaaagaaaaagcacgcactgctgagtgcccagggccagcccagaatgccagccctcttgtccttccgccatga

SEQ ID NO: 10737 - DNA, 1441 bp, Homo sapiens
  source 1..1441: mol_type = unassigned DNA
agcatttgtccagccctgctggagagccactaggagaggcatcagtctccagtacaaattaacaaaccggctgctggcttatgtatcagttgcctatgcatagggtcagtatactcacccccaggcctgaacaactctgggtcctcaggaaccctgaaggtgtgactggcaaagctgaggccctggctcgggagctgcttccctgagaggactgcgcctacagcatccttgacatcttttcataaaccagcacaacttttcaaaaaaaaagatttacatgacgtgccctgactgcccaagctccatacccactgactcttccaatcaccaagtgctggaggctgccaccgagtctcttgcgaaatacaacaatgagaacacatccaagcagtattctctcttcaaagtcaccagggcttctagccagtgggtggtcggcccttcttactttgtggaatacttaattaaagaatcaccatgtactaaatcccaggccagcagctgttcacttcagtcctccgactctgtgcctgttggtctttgcaaaggttctctgactcgaacacactgggaaaagtttgtctctgtgacttgtgacttctttgaatcacaggctccagccactggaagtgaaaactctgctgttaaccagaaacctacaaaccttcccaaggtggaagaatcccagcagaaaaacacccccccaacagactccccctccaaagctgggccaagaggatctgtccaatatcttcctgacttggatgataaaaattcccaggaaaagggccctcaggaggcctttcctgtgcatctggacctaaccacgaatccccagggagaaaccctggatatttccttcctcttcctggagcctatggaggagaagctggtggtcctgcctttccccaaagaaaaagcacgcactgctgagtgcccagggccagcccagaatgccagccctcttgtccttccgccatgagaatcacacagagtcttctgtaggggtatggtgcgccgcatgacatgggaggcgatggggacgatggacagagacagagcgtgcacacgtagagtggctagtgaaggacgcctttttgactcttcttggtctcagcatgttgactgggattggaaataatgagactgagccctcggcttgggctgcactctaccctgtacactgccttgtaccctgagctgcatcacctcctaaactgagcagtctcataccatggagagatgcctctcttatgtcttcagccactcacttataaagatacttatcttttcagcagtatatatgtgctgaaatctcagcatgaaagcattgcatgagtaaagatactttccctaacaccgggaggcgtgagcaactaatgcccagcacagtttcagtccctaaattccctttaattccaggacaggtattagctgcgta

SEQ ID NO: 10738 - DNA, 1879 bp, Homo sapiens
  source 1..1879: mol_type = unassigned DNA
gcggcgagtggagcgggagccgactggaagaagggctctagggagggggctgtggctgctggggtccgaggtggggccgggtacaccagccccatcactgtttgcagagagtcagggaggcggaaaagacacgcgctctaggctcccatcagggcacatggcccgggcccatcccccgcgcgtctccccggctgcggggcgcggggggctgccgggtgcgcttggctgtggcgcggcgcgttggagactttattgcgatgggacgataagaggggcgggggcggggtcctgggggccgaggcggcagcgctttaattaaaacggaaattgcggccccgggccgcgcgggggccggagggttccaagcggccccttagctggaagcgtttctccaggacccccccgcaacccccgccacgcccgggctgccccctcccgccaggccctgccggacccggcgccgtcttctcctccttgtcacccgcggtcgcttcgggcggggatcggtgccaccgagcgcaaagcctgcctcgccccccttccccgtcccccccatctcccaccgcccagtccccggcggcgatgagacagagcggcgcctcccagcccctgctgatcaacatgtacctgccagatcccgtcggagacggtctcttcaaggacgggaagaacccgagctgggggccgctgagccccgcggttcagaaaggcagcggacagatccagctgtggcagtttctgctggagctgctggctgaccgcgcgaacgccggctgcatcgcgtgggagggcggtcacggcgagttcaagctcacggacccggacgaggtggcgcggcggtggggcgagcgcaagagcaagcccaacatgaactacgacaagctgagccgcgccctgcgctactactacgacaagaacatcatgagcaaggtgcatggcaagcgctacgcctaccgcttcgacttccagggcctggcgcaggcctgccagccgccgcccgcgcacgctcatgccgccgccgcagctgctgccgccgccgcggccgcccaggacggcgcgctctacaagctgcccgccggcctcgccccgctgcccttccccggcctctccaaactcaacctcatggccgcctcggccggggtcgcgcccgccggcttctcctactggccgggcccgggccccgccgccaccgctgccgccgccaccgccgcgctctaccccagtcccagcttgcagcccccgcccgggcccttcggggccgtggccgcagcctcgcacttggggggccattaccactagacggggcggtcgggtgcctgcggcctcgcccgcacgcctagagtctcgcccgatcccatcggcatcccggggagggcccgggagcctccgtcaaccgtcctctaatccagagtttactccacctgccgcacttagcagggggacgggaccgaagctccctcaatccttgtctggtactagatttgctcctgtcccaccccgcagtcccctgaggagggcgatgtgcgccctctttcactttttttcttctaggtctccaggtcccggaggggatttgtggacctctcttgtctccccaccactccagtgcatttccgcctggctcctagaagccccattcaatatcactactctttaacgagtgccaaatcttttcccacttttgctcttccccaaggaactgctcccacctcagcacgtggaggcctctcacggtcctccttcctgggacctgagcaggtttggtgaaagccaccgtcctccgtgacacacggcccccttcctcctgtccccacactcccaggagaaactcccggtgtgtttctgaccctttcagccccattaaagctcctgagctctc

SEQ ID NO: 10739 - DNA, 2019 bp, Homo sapiens
  source 1..2019: mol_type = unassigned DNA
atggacagtagctgccacaacgcgactaccaaaatgttagcgactgctccagctcggggcaacatgatgagcacgtccaaacccttggctttctccattgaacgaatcatggcgcgcaccccagagcccaaggccctgccagtcccccacttcctgcagggagccttacccaagggggaacccaagcactctctgcatctcaactcgtcgatcccctgcatgatccccttcgtgcctgtggcctacgacacgagccccaaggcaggagtgacgggctccgagccgcggaaggccagtctggaggccccggcggcgcccgcggcggtgccctcggctcccgcattcagctgcagcgacctgctcaactgcgcactgagtctcaagggcgacctggcccgcgacgcgctgccgctgcagcagtacaagctggtaaggccgcgtgtggtcaaccactcttcattccacgccatgggcgccttgtgctacctgaaccgaggtgacggcccatgccacccggcagccggcgtgaacatccacccggtggcctcctacttcctcagttcccctttgcacccgcagccaaaaacgtatttagccgaaaggaataaactggtggtcccggcggtggagaaatacccttctggagtagctttcaaagacctgtcccaggctcagctgcagcattacatgaaagaaagcgcccagcttctgtcggaaaaaatcgcgttcaaaacctcggatttcagccgaggctctcctaatgccaagcccaaagttttcacttgcgaagtctttaatgcgcactataacttaacccgtcacatgccagtgcacacaggagccagacccttcgtttgcaaagtgtgcggaaaaggtttcaggcaagcaagcaccctgtgcaggcacaagatcattcacacgcaggaaaaacctcacaaatgtaaccagtgtggcaaagcatttaatagaagttccactttaaacactcatacccgaatacacgcgggctacaaaccgtttgtgtgtgaattctgtggcaaagggtttcatcaaaaagggaattacaaaaaccacaagttgacccacagcggggagaagcagttcaagtgcaatatctgcaacaaggctttccaccaggtttacaacctcaccttccacatgcacacccacaacgacaagaagcctttcacctgccccacgtgcggcaagggtttctgcaggaactttgacctcaagaagcatgtccgcaagctgcacgacagcagcctggggctggcccgcacgccagctggcgaaccaggcactgaaccgccgcccccgctaccgcagcagccgccgatgacgctgcctcctctgcagccgccgctgccaaccccggggcccctgcagcccgggctccaccagggccaccagtgatcgaggctaagggtcctcccagcctcagccgtgcccccacgctgaggcagcggcagactagagctcctggtccgagttcgtctgcagaccccagggcatgttgggccccacacttcagggccgaccagaagcctctgcatcccctggcctttcgcctcttgcatgcacctgctaaatggttttgtgtattatattctatataggcactaacaattatgaaaaatttggagggttttgcttgttttctgtttttctttttctttttttttaatttggaaagacttttcatcttgggtggagagatggtgtttattttgttttgttttgtttaaacaaatttctgctatatttattgagatctgtattattctacccgggaatgctgcatcattttaattttattattgtatatatttccattgtgttgattctccggtctcaagatgtctgctggatgttgatcatttcctctttccctgaagtaacaaaacactgtgtgtatgtcatatatacacgcatagatgtgtgcgcccataggggtacattccacattcgtgagcacacacccatacacattagataagggtggttcattatggatga

SEQ ID NO: 10740 - DNA, 688 bp, Homo sapiens
  source 1..688: mol_type = unassigned DNA
gcccgaggtcggcgggacctgatcgaaggcagcgccgcgtcgaccaccccgggagccggacgcttgggagccccagcccggcagcggcgcccggtcactgaagttgcgccccaactcccagccgcctccaagcttctcgagctaagtttcctgacccctccaagggagtctcacagagctcggtggccctcggccttgccaacgtcactttaactgtttggaactcgtgagcaagaaccgagaagtggagagcccagccggggagttttcagcttttctgtttcacttcgggcttcttctattcaaatggctctgcgctggccaccgaatcctgaatgaggcggggctcctctgccccaactccagcagcgggaacttggttcccctgggcagccgggggcagggggcgccaaggccgtggcgataatgaaggctgagacggccaaggccagcgggtcggcgcggggcactcccgggccggagtggccatcggccggagttcaggaggtctgtgacaagcagggaacaaggcaacggacggcgcaacccagccccggctgacggacgctggcgactcagacatggacagtagctgccacaacgcgactaccaaaatgttagcgactgctccagctcggggcaacatgatgagcacgtccaaacccttggctttctccattgaacgaat

SEQ ID NO: 10741 - DNA, 1368 bp, Homo sapiens
  source 1..1368: mol_type = unassigned DNA
cagggaacaaggcaacggacggcgcaacccagccccggctgacggacgctggcgactcagacatggacagtagctgccacaacgcgactaccaaaatgttagcgactgctccagctcggggcaacatgatgagcacgtccaaacccttggctttctccattgaacgaatcatggcgcgcaccccagagcccaaggccctgccagtcccccacttcctgcagggagccttacccaagggggaacccaagcactctctgcatctcaactcgtcgatcccctgcatgatccccttcgtgcctgtggcctacgacacgagccccaaggcaggagtgacgggctccgagccgcggaaggccagtctggaggccccggcggcgcccgcggcggtgccctcggctcccgcattcagctgcagcgacctgctcaactgcgcactgagtctcaagggcgacctggcccgcgacgcgctgccgctgcagcagtacaagctgccaaaaacgtatttagccgaaaggaataaactggtggtcccggcggtggagaaatacccttctggagtagctttcaaagacctgtcccaggctcagctgcagcattacatgaaagaaagcgcccagcttctgtcggaaaaaatcgcgttcaaaacctcggatttcagccgaggctctcctaatgccaagcccaaagttttcacttgcgaagtgtgtggaaaggtctttaatgcgcactataacttaacccgtcacatgccagtgcacacaggagccagacccttcgtttgcaaagtgtgcggaaaaggtttcaggcaagcaagcaccctgtgcaggcacaagatcattcacacgcaggaaaaacctcacaaatgtaaccagtgtggcaaagcatttaatagaagttccactttaaacactcatacccgaatacacgcgggctacaaaccgtttgtgtgtgaattctgtggcaaagggtttcatcaaaaagggaattacaaaaaccacaagttgacccacagcggggagaagcagttcaagtgcaatatctgcaacaaggctttccaccaggtttacaacctcaccttccacatgcacacccacaacgacaagaagcctttcacctgccccacgtgcggcaagggtttctgcaggaactttgacctcaagaagcatgtccgcaagctgcacgacagcagcctggggctggcccgcacgccagctggcgaaccaggcactgaaccgccgcccccgctaccgcagcagccgccgatgacgctgcctcctctgcagccgccgctgccaaccccggggcccctgcagcccgggctccaccagggccaccagtgatcgaggctaagggtcctcccagcctcag

SEQ ID NO: 10742 - DNA, 2099 bp, Homo sapiens
  source 1..2099: mol_type = unassigned DNA
gacaagcagggaacaaggcaacggacggcgcaacccagccccggctgacggacgctggcgactcagacatggacagtagctgccacaacgcgactaccaaaatgttagcgactgctccagctcggggcaacatgatgagcacgtccaaacccttggctttctccattgaacgaatcatggcgcgcaccccagagcccaaggccctgccagtcccccacttcctgcagggagccttacccaagggggaacccaagcactctctgcatctcaactcgtcgatcccctgcatgatccccttcgtgcctgtggcctacgacacgagccccaaggcaggagtgacgggctccgagccgcggaaggccagtctggaggccccggcggcgcccgcggcggtgccctcggctcccgcattcagctgcagcgacctgctcaactgcgcactgagtctcaagggcgacctggcccgcgacgcgctgccgctgcagcagtacaagctggtaaggccgcgtgtggtcaaccactcttcattccacgccatgggcgccttgtgctacctgaaccgaggtgacggcccatgccacccggcagccggcgtgaacatccacccggtggcctcctacttcctcagttcccctttgcacccgcagccaaaaacgtatttagccgaaaggaataaactggtggtcccggcggtggagaaatacccttctggagtagctttcaaagacctgtcccaggctcagctgcagcattacatgaaagaaagcgcccagcttctgtcggaaaaaatcgcgttcaaaacctcggatttcagccgaggctctcctaatgccaagcccaaagttttcacttgcgaagtgtgtggaaaggtctttaatgcgcactataacttaacccgtcacatgccagtgcacacaggagccagacccttcgtttgcaaagtgtgcggaaaaggtttcaggcaagcaagcaccctgtgcaggcacaagatcattcacacgcaggaaaaacctcacaaatgtaaccagtgtggcaaagcatttaatagaagttccactttaaacactcatacccgaatacacgcgggctacaaaccgtttgtgtgtgaattctgtggcaaagggtttcatcaaaaagggaattacaaaaaccacaagttgacccacagcggggagaagcagttcaagtgcaatatctgcaacaaggctttccaccaggtttacaacctcaccttccacatgcacacccacaacgacaagaagcctttcacctgccccacgtgcggcaagggtttctgcaggaactttgacctcaagaagcatgtccgcaagctgcacgacagcagcctggggctggcccgcacgccagctggcgaaccaggcactgaaccgccgcccccgctaccgcagcagccgccgatgacgctgcctcctctgcagccgccgctgccaaccccggggcccctgcagcccgggctccaccagggccaccagtgatcgaggctaagggtcctcccagcctcagccgtgcccccacgctgaggcagcggcagactagagctcctggtccgagttcgtctgcagaccccagggcatgttgggccccacacttcagggccgaccagaagcctctgcatcccctggcctttcgcctcttgcatgcacctgctaaatggttttgtgtattatattctatataggcactaacaattatgaaaaatttggagggttttgcttgttttctgtttttctttttctttttttttaatttggaaagacttttcatcttgggtggagagatggtgtttattttgttttgttttgtttaaacaaatttctgctatatttattgagatctgtattattctacccgggaatgctgcatcattttaattttattattgtatatatttccattgtgttgattctccggtctcaagatgtctgctggatgttgatcatttcctctttccctgaagtaacaaaacactgtgtgtatgtcatatatacacgcatagatgtgtgcgcccataggggtacattccacattcgtgagcacacacccatacacattagataagggtggttcattatggatga

SEQ ID NO: 10743 - DNA, 2074 bp, Homo sapiens
  source 1..2074: mol_type = unassigned DNA
cttttaaagtttgaggggcggtggtggcggcggccggcaggcgcgggggaacacaggggccgctacgggagccgcgccgccgcccatgtcattccacttcaagtgacttcatgtgatgtcagctgaatgtaaaagacagtgatctcacgcggaggggaagatgtttgccatcaaaatgtgacagaagagacacgctgcatggctcggaacgcatctccttggtggtgggggaaagagacttagaggagagaggctgcgccctggcccagcctggctcggctcagctccgcgcgccatggcaagctcggcttccctggagaccatggtgcccccggcctgcccgcgcgccggagcgtcgccggccacttccaagacactggccttttccatcgagcgcatcatggccaagacgtcggagccccgtgcgccctttgagccccggcctggagcgctagaggcggacggcagccagggcaagaaactgctcaacctctgctcgccgctgccctgtatgatccccctccagcccctaggctacgaggtgccgtcaaagacactgctcagttactcggagctctggaaaagcagcctccgggcgggcggcggcggaggcggcggcggcggtggcggcggcggcggcgggggggccccagtgtgcggcgccagcggcttgtgcaaaaccaactgtggcgtgtgctgcaaggccgagctgggcctggcgccgtccgcgctgcccgcgggcagggtcatcaagccgcaggtcatcaaccaggctgtggggctgccggccagcggctcgctctactacttcaactacctggactcgaccgcgtacccgccgtctgagctcctcagcggccacctcttcccgtctggcctcctcaatgcgcaggcccccgccgccctggctgctcaccccaagctctttctgctggagaacgccaagctggccggcctggctgcggacaagttcccccacccggctccctatccccataaggagcgcttgccggcgccgctggagcaggtactgaaggaaaactcggccctgactgccgagcgcggaggcgtcaagggccacagcaagctgccaggaggctccgcagatggcaagcccaaaaacttcacctgcgaggtgtgcggcaaggtgtttaacgctcactataatctcacccgccacatgccggtccacaccggagccagaccgttcgtgtgcaaagtctgcggcaaaggctttcgccaggccagcacgctctgcaggcacaaaattatccacacccaggaaaagccacataaatgcaaccagtgcggcaaagcgttcaaccgcagctccacgctcaacacgcatatccgcatccacgcgggctacaagcccttcgtctgcgaattttgcggcaaaggctttcaccaaaaagggaactacaagaaccacaagctgacccacagcggcgagaagcagtacaaatgtaccatctgcaacaaggccttccaccaggtctacaacctaaccttccatatgcacacccacaacgacaagaagcctttcacgtgcgccacttgcggcaaagggttttgcagaaactttgacttaaagaaacatgtgcgcaaactccacgacagcgtgggccctgctgccccctccgcaaaggacctgactaggacagtgcagagctgagagctactgccttgcccttccttccctccctgtaccacctgaaaacagatcacacatataaacttatttctaaaattaaaagaaaaaaaaactatagcagagaggctaaaatctatttatcgaaaccagcatatttttggaaagctaaatgtttcctcgatgactggcagcaaactcgtggcccccacctttgtatattcaggaaacttatttaaatccagtgcgccgaaacgtatttaattccaggcctccgcttctcctggggcagccagttttaaccccagcctgtcaccgtgagcgccccagaagagcgcggcgcccctagccatctttatacagccatgtaaatcctcctgtacaagcgaacacggaatatatacatatataactcaataaaca

SEQ ID NO: 10744 - DNA, 1918 bp, Homo sapiens
  source 1..1918: mol_type = unassigned DNA
cctgttcatttgaatgcaaatgggtgacccgggcccgactaggtgcttattaaattgcagttttcccccctgccttttccggaatgcagacttagaggagagaggctgcgccctggcccagcctggctcggctcagctccgcgcgccatggcaagctcggcttccctggagaccatggtgcccccggcctgcccgcgcgccggagcgtcgccggccacttccaagacactggccttttccatcgagcgcatcatggccaagacgtcggagccccgtgcgccctttgagccccggcctggagcgctagaggcggacggcagccagggcaagaaactgctcaacctctgctcgccgctgccctgtatgatccccctccagcccctaggctacgaggtgccgtcaaagacactgctcagttactcggagctctggaaaagcagcctccgggcgggcggcggcggaggcggcggcggcggtggcggcggcggcggcgggggggccccagtgtgcggcgccagcggcttgtgcaaaaccaactgtggcgtgtgctgcaaggccgagctgggcctggcgccgtccgcgctgcccgcgggcagggtcatcaagccgcaggtcatcaaccaggctgtggggctgccggccagcggctcgctctactacttcaactacctggactcgaccgcgtacccgccgtctgagctcctcagcggccacctcttcccgtctggcctcctcaatgcgcaggcccccgccgccctggctgctcaccccaagctctttctgctggagaacgccaagctggccggcctggctgcggacaagttcccccacccggctccctatccccataaggagcgcttgccggcgccgctggagcaggtactgaaggaaaactcggccctgactgccgagcgcggaggcgtcaagggccacagcaagctgccaggaggctccgcagatggcaagcccaaaaacttcacctgcgaggtgtgcggcaaggtgtttaacgctcactataatctcacccgccacatgccggtccacaccggagccagaccgttcgtgtgcaaagtctgcggcaaaggctttcgccaggccagcacgctctgcaggcacaaaattatccacacccaggaaaagccacataaatgcaaccagtgcggcaaagcgttcaaccgcagctccacgctcaacacgcatatccgcatccacgcgggctacaagcccttcgtctgcgaattttgcggcaaaggctttcaccaaaaagggaactacaagaaccacaagctgacccacagcggcgagaagcagtacaaatgtaccatctgcaacaaggccttccaccaggtctacaacctaaccttccatatgcacacccacaacgacaagaagcctttcacgtgcgccacttgcggcaaagggttttgcagaaactttgacttaaagaaacatgtgcgcaaactccacgacagcgtgggccctgctgccccctccgcaaaggacctgactaggacagtgcagagctgagagctactgccttgcccttccttccctccctgtaccacctgaaaacagatcacacatataaacttatttctaaaattaaaagaaaaaaaaactatagcagagaggctaaaatctatttatcgaaaccagcatatttttggaaagctaaatgtttcctcgatgactggcagcaaactcgtggcccccacctttgtatattcaggaaacttatttaaatccagtgcgccgaaacgtatttaattccaggcctccgcttctcctggggcagccagttttaaccccagcctgtcaccgtgagcgccccagaagagcgcggcgcccctagccatctttatacagccatgtaaatcctcctgtacaagcgaacacggaatatatacatatataactc

SEQ ID NO: 10745 - DNA, 2001 bp, Homo sapiens
  source 1..2001: mol_type = unassigned DNA
gatgggaccttctcaattatacaaacatgacttcatgtgatgtcagctgaatgtaaaagacagtgatctcacgcggaggggaagatgtttgccatcaaaatgtgacagaagagacacgctgcatggctcggaacgcatctccttggtggtgggggaaagagacttagaggagagaggctgcgccctggcccagcctggctcggctcagctccgcgcgccatggcaagctcggcttccctggagaccatggtgcccccggcctgcccgcgcgccggagcgtcgccggccacttccaagacactggccttttccatcgagcgcatcatggccaagacgtcggagccccgtgcgccctttgagccccggcctggagcgctagaggcggacggcagccagggcaagaaactgctcaacctctgctcgccgctgccctgtatgatccccctccagcccctaggctacgaggtgccgtcaaagacactgctcagttactcggagctctggaaaagcagcctccgggcgggcggcggcggaggcggcggcggcggtggcggcggcggcggcgggggggccccagtgtgcggcgccagcggcttgtgcaaaaccaactgtggcgtgtgctgcaaggccgagctgggcctggcgccgtccgcgctgcccgcgggcagggtcatcaagccgcaggtcatcaaccaggctgtggggctgccggccagcggctcgctctactacttcaactacctggactcgaccgcgtacccgccgtctgagctcctcagcggccacctcttcccgtctggcctcctcaatgcgcaggcccccgccgccctggctgctcaccccaagctctttctgctggagaacgccaagctggccggcctggctgcggacaagttcccccacccggctccctatccccataaggagcgcttgccggcgccgctggagcaggtactgaaggaaaactcggccctgactgccgagcgcggaggcgtcaagggccacagcaagctgccaggaggctccgcagatggcaagcccaaaaacttcacctgcgaggtgtgcggcaaggtgtttaacgctcactataatctcacccgccacatgccggtccacaccggagccagaccgttcgtgtgcaaagtctgcggcaaaggctttcgccaggccagcacgctctgcaggcacaaaattatccacacccaggaaaagccacataaatgcaaccagtgcggcaaagcgttcaaccgcagctccacgctcaacacgcatatccgcatccacgcgggctacaagcccttcgtctgcgaattttgcggcaaaggctttcaccaaaaagggaactacaagaaccacaagctgacccacagcggcgagaagcagtacaaatgtaccatctgcaacaaggccttccaccaggtctacaacctaaccttccatatgcacacccacaacgacaagaagcctttcacgtgcgccacttgcggcaaagggttttgcagaaactttgacttaaagaaacatgtgcgcaaactccacgacagcgtgggccctgctgccccctccgcaaaggacctgactaggacagtgcagagctgagagctactgccttgcccttccttccctccctgtaccacctgaaaacagatcacacatataaacttatttctaaaattaaaagaaaaaaaaactatagcagagaggctaaaatctatttatcgaaaccagcatatttttggaaagctaaatgtttcctcgatgactggcagcaaactcgtggcccccacctttgtatattcaggaaacttatttaaatccagtgcgccgaaacgtatttaattccaggcctccgcttctcctggggcagccagttttaaccccagcctgtcaccgtgagcgccccagaagagcgcggcgcccctagccatctttatacagccatgtaaatcctcctgtacaagcgaacacggaatatatacatatataactcaataaacagaa

SEQ ID NO: 10746 - DNA, 1484 bp, Homo sapiens
  source 1..1484: mol_type = unassigned DNA
gcaagatggcggcgacggcggccgcagtggtggccgaggaggacacggagctgcgggacctgctggtgcagacgctggagaacagcggggtcctgaaccgcatcaaggctgaactccgagcagctgtgtttttagcactagaggagcaagaaaaagtagagaacaaaactcctttagttaatgagagcctgaaaaagtttttaaataccaaagacggtcgtttagtggctagtcttgttgcagaatttcttcagttttttaaccttgactttactttggctgtttttcaacctgaaactagcacactgcaaggtctcgaaggtcgagagaatttagcccgagatttaggtataattgaagcagaaggtactgtgggtggacccttattattagaagtgatcaggcgctgtcaacagaaagaaaaagggccaaccactggggaaggtgcacttgatctatctgatgtacattctccaccaaagtcaccagagggaaaaacaagtgcacagacaacaccaagtaagaaggccaatgatgaggccaatcagagtgatacaagtgtctccttgtcagaacccaagagcaaaagcagccttcacttactgtcccatgaaacaaaaattggatcttttctaagcaacagaactttagatggcaaagacaaagctggcctttgtccagatgaagatgatatggaaggagattctttctttgatgatcccattcctaagccagagaaaacttacggtttgaggaaggaacctaggaagcaagcaggaagtctggcctcgctctcggatgcaccccccttaaaaagtggactcagctccctggcgggagccccttctttaaaagactctgagagtaaaaggggaaatacagttttgaaagatctgaaattgatcagtgataaaattggatcacttggattaggaactggagaagatgatgactatgttgatgattttaatagtaccagccatcgctcagagaaaagtgagataagtattggtgaagagatagaagaagacctttctgtggaaatagatgacatcaataccagtgataagcttgatgacctcacacaagatctgactgtatcccagctcagtgatgttgcggattatctggaagatgttgcatagacacgaagaaggaagtattctaattaacaaggacagaggactgaccggttccattttttttttttccagacaatcactcagctggaatgtctgctctctattggtgccttgcatttcaaaaacactgcagatattttttaaaagtaattttcattttactaaacaaaatacttcctatttgagcccatgtgtggaagatttaatattcttaatttaactgtacatttctttatggaaattgattatctacactcagtttcattacagggaaggaacccatgaaaacatcagtgttaagagcatgatgaaaggtgtcaataaagccgtaggatcgcgcaa

SEQ ID NO: 10747 - DNA, 3871 bp, Homo sapiens
  source 1..3871: mol_type = unassigned DNA
cgccgaccctaagtttcggcgctcagtggtccggcgctccccaaggctcggtgtccagcgtcaaccccgaggtctctatgccccgcctcccgacgccagggggcagggccagcgcgctgcgcgtcggggcggggctttggctgcgtcggccgcgtagcccgcgcgcggagcgtaccctgctgcggccgttggccgttagcgcggcttcggcggttgtcttggagaagcaagatggcggcgacggcggccgcagtggtggccgaggaggacacggagctgcgggacctgctggtgcagacgctggagaacagcggggtcctgaaccgcatcaaggctgaactccgagcagctgtgtttttagcactagaggagcaagaaaaagtagagaacaaaactcctttagttaatgagagcctgaaaaagtttttaaataccaaagacggtcgtttagtggctagtcttgttgcagaatttcttcagttttttaaccttgactttactttggctgtttttcaacctgaaactagcacactgcaaggtctcgaaggtcgagagaatttagcccgagatttaggtataattgaagcagaaggtactgtgggtggacccttattattagaagtgatcaggcgctgtcaacagaaagaaaaagggccaaccactggggaaggtgcacttgatctatctgatgtacattctccaccaaagtcaccagagggaaaaacaagtgcacagacaacaccaagtaagataccaaggtataaaggacaaggtaagaagaagacaagcgggcagaaggctggtgacaagaaggccaatgatgaggccaatcagagtgatacaagtgtctccttgtcagaacccaagagcaaaagcagccttcacttactgtcccatgaaacaaaaattggatcttttctaagcaacagaactttagatggcaaagacaaagctggcctttgtccagatgaagatgatatggaaggagattctttctttgatgatcccattcctaagccagagaaaacttacggtttgaggaaggaacctaggaagcaagcaggaagtctggcctcgctctcggatgcaccccccttaaaaagtggactcagctccctggcgggagccccttctttaaaagactctgagagtaaaaggggaaatacagttttgaaagatctgaaattgatcagtgataaaattggatcacttggattaggaactggagaagatgatgactatgttgatgattttaatagtaccagccatcgctcagagaaaagtgagataagtattggtgaagagatagaagaagacctttctgtggaaatagatgacatcaataccagtgataagcttgatgacctcacacaagatctgactgtatcccagctcagtgatgttgcggattatctggaagatgttgcatagacacgaagaaggaagtattctaattaacaaggacagaggactgaccggttccattttttttttttccagacaatcactcagctggaatgtctgctctctattggtgccttgcatttcaaaaacactgcagatattttttaaaagtaattttcattttactaaacaaaatacttcctatttgagcccatgtgtggaagatttaatattcttaatttaactgtacatttctttatggaaattgattatctacactcagtttcattacagggaaggaacccatgaaaacatcagtgttaagagcatgatgaaaggtgtcaataaagccgtaggatcgcgcaaccctttgtgtgtgtggctgctggtacgtgtgatctttgaaaaccttggctttagccctctggaatcagagcttacccaccatagtatattttgatattaggtggttctacacatagttggcaaaatgacttggtaaatttgtaatgctgaagtatattagtataagttaaatttgatgtgtcaactttattttgtatttccttccatttggaaggtttgttagaccattaaggttatattaaagtactcttgtgtgtgctatttagttttgcttgttttaaagaaatctagaagtggttatgagttttaattcatagaattgtcaataacataacatttgcaatcgtcattcctcctgttatccatgtaagcagctttagtcgtaggttctcttcattataatttattatctgtaaagattccttgaaacttaaatgcatctgaaaccattaagcagtgcttttatttcagatctgtaagttaattgtattaaaatccaaattggaatgaaatagtagtaatggcctaagaccatgttcagtttgacaagctttatatactgtacataatttcattgtaacccttaaaaatagagccaataatagaatttccacagtctcatttatacggttaaagcattattgctattatgtaggtcacggatgtttataatactaaagtattttaaaatgtgcaagtagaaaaaacagtagaaagtgatgcatgcatatttatatataagtaaagcaggattgtgctgtttttgcactttataatttcaattaagttgcggctttttactacaagttaactttattagtaaaaggagcaaattagacctaattcattgatctcggttaagtgagcagactgcatgacttgtgtaatgccagtttctcatttcatattagcctaaatattacagaaattactccttgggctctaaaatgtagaggaaatgaaaatgtaaggattaaggctgtgtaacagaatctggctttttaaaatttaagtgaaactaagctgtaaacatcaagaggaagtaggacataaactgggccggtacagcctgggagccctgtgtatttctgccctccgtctgtgagctgctatctcagtctccttcagctcttcatgtcttagtaaacagcaccacgtgcagatgtaatcttgttgcagtcccccagtgtggttgttataaaatgcatttctttgtaagtcatctctgtaaacagtcactttctaaaagcactatagttctggtcccctggaatctggatcacatgtatgatttatttttaatatttgataggaactaggtttcagtgaaatgatttgaaagcatagcaggatgtggctttttaaatttatgaaactttcgaacagtagcaactgaaatttgtcacttttctgttacgcagagaatcagaccttttgataatatttgggagggtaaaagaaatatgccaaatatgaaacttttttgtcagcactacatacatcttttttttgcggggggcgggggggacagagtctcactgtgtcactcagactggagtacagtgatgcgatctcggctcactgcaacctccgcctcctgggttcaagcgattctcctgcttcagcctcctgagtagctgggattacaggtgcacaccaccacgcccggctaatttttgtatttttagtagagatggggtttcaccatgttggtcaggctggtcttgaactcctgacctcgttcctgccttagcctcctaaagtgccgggattacaggcgtgaaccaccgcacctggccagtactacatccattttattgaatgattttgaatgacttaaagttcaactatgaaaaagctttcttttcacatgtactttttgattaggtattatcaacttatgaaacttgaagatgtgaagtgacaggttttgcatgtgatgagtgttttctgttaaaaaataaatattgaaatattaacccattaaatacatttttatggtaacctatgttttacagtggagttttaaaaatgctaggtctttctttcattttattgataactacaaatgaataaaaagcatttattctctttgttgata

SEQ ID NO: 10748 - DNA, 1391 bp, Homo sapiens
  source 1..1391: mol_type = unassigned DNA
ttgtcttggagaagcaagatggcggcgacggcggccgcagtggtggccgaggaggacacggagctgcgggacctgctggtgcagacgctggagaacagcggggtcctgaaccgcatcaaggctgaactccgagcagctgtgtttttagcactagaggagcaagaaaaagtagagaacaaaactcctttagttaatgagagcctgaaaaagtttttaaataccaaagacggtcgtttagtggctagtcttgttgcagaatttcttcagttttttaaccttgactttactttggctgtttttcaacctgaaactagcacactgcaaggtctcgaaggtcgagagaatttagcccgagatttaggtataattgaagcagaaggtactgtgggtggacccttattattagaagtgatcaggcgctgtcaacagaaagaaaaagggccaaccactggggaaaaggccaatgatgaggccaatcagagtgatacaagtgtctccttgtcagaacccaagagcaaaagcagccttcacttactgtcccatgaaacaaaaattggatcttttctaagcaacagaactttagatggcaaagacaaagctggcctttgtccagatgaagatgatatggaaggagattctttctttgatgatcccattcctaagccagagaaaacttacggtttgaggaaggaacctaggaagcaagcaggaagtctggcctcgctctcggatgcaccccccttaaaaagtggactcagctccctggcgggagccccttctttaaaagactctgagagtaaaaggggaaatacagttttgaaagatctgaaattgatcagtgataaaattggatcacttggattaggaactggagaagatgatgactatgttgatgattttaatagtaccagccatcgctcagagaaaagtgagataagtattggtgaagagatagaagaagacctttctgtggaaatagatgacatcaataccagtgataagacaatcactcagctggaatgtctgctctctattggtgccttgcatttcaaaaacactgcagatatttttaaagtaattttcattttactaaacaaaatacttcctatttgagcccatgtgtggaagatttaatattcttaatttaactgtacatttctttatggaaattgattatctacactcagtttcattacagggaaggaacccatgaaaacatcagtgttaagagcatgatgaaaggtgtcaataaagccgtaggatcgcgcaaccctttgtgtgtgtggctgctggtacgtgtgatctttgaaaaccttggctttagccctctggaatcagagcttacccaccatagtatattttgatattaggtggttctacacatagttggc

SEQ ID NO: 10749 - DNA, 1164 bp, Homo sapiens
  source 1..1164: mol_type = unassigned DNA
gcgtcacgcagcgcacgtcgccgcgcgcctgcgctcttttccacgtgcgaaagccccggactcgtggagttgtgaacgccgcggactccggagccgcacaaaccagggctcgccatgaagccaggattcagtccccgtgggggtggctttggcggccgagggggctttggtgaccgtggtggtcgtggaggccgagggggctttggcgggggccgaggtcgaggcggaggctttagaggtcgtggacgaggaggaggtggaggcggcggcggcggtggaggaggaggaagaggtggtggaggcttccattctggtggcaaccggggtcgtggtcggggaggaaaaagaggaaaccagtcggggaagaatgtgatggtggagccgcatcggcatgagggtgtcttcatttgtcgaggaaaggaagatgcactggtcaccaagaacctggtccctggggaatcagtttatggagagaagagagtctcgatttcggaaggagatgacaaaattgagtaccgagcctggaaccccttccgctccaagctagcagcagcaatcctgggtggtgtggaccagatccacatcaaaccgggggctaaggttctctacctcggggctgcctcgggcaccacggtctcccatgtctctgacatcgttggtccggatggtctagtctatgcagtcgagttctcccaccgctctggccgtgacctcattaacttggccaagaagaggaccaacatcattcctgtgatcgaggatgctcgacacccacacaaataccgcatgctcatcgcaatggtggatgtgatctttgctgatgtggcccagccagaccagacccggattgtggccctgaatgcccacaccttcctgcgtaatggaggacactttgtgatttccattaaggccaactgcattgactccacagcctcagccgaggccgtgtttgcctccgaagtgaaaaagatgcaacaggagaacatgaagccgcaggagcagttgacccttgagccatatgaaagagaccatgccgtggtcgtgggagtgtacaggccaccccccaaggtgaagaactgaagttcagcgctgtcaggattgcgagagatgtgtgttgatactgttgcacgtgtgtttttctattaaaagactcatccgtctccc

SEQ ID NO: 10750 - DNA, 11756 bp, Homo sapiens
  source 1..11756: mol_type = unassigned DNA
gtggtgatgagggcgacgaaggagggggtgtcattttctttttctttctttttttaaaaaaagtatttctctcgcgagaaaccgctgcgcggacgatacttgaagaggtggggaaaggagggggctgcgggagccgcggcagagactgtgggtgccacaagcggacaggagccacagctgggacagctgcgagcggagccgagcagtggctgtagcggccacgactgggagcagccgccgccgcctcctcgggagtcggagccgccgcttctccactggcaggggccgcctgaagtgggagcagcgcctggagaaggcgggaggagcccggcccgggggacgggcggcgggatagcgggaccccggcggcgcggtgcgcttcagggcgcagcggcggccgcagaccgagccccgggcgcggcaagaggcggcgggagccggtggcggctcggcatcatgcgtcgagggcgtctgctggagatcgccctgggatttaccgtgcttttagcgtcctacacgagccatggggcggacgccaatttggaggctgggaacgtgaaggaaaccagagccagtcgggccaagagaagaggcggtggaggacacgacgcgcttaaaggacccaatgtctgtggatcacgttataatgcttactgttgccctggatggaaaaccttacctggcggaaatcagtgtattgtccccatttgccggcattcctgtggggatggattttgttcgaggccaaatatgtgcacttgcccatctggtcagatagctccttcctgtggctccagatccatacaacactgcaatattcgctgtatgaatggaggtagctgcagtgacgatcactgtctatgccagaaaggatacatagggactcactgtggacaacctgtttgtgaaagtggctgtctcaatggaggaaggtgtgtggccccaaatcgatgtgcatgcacttacggatttactggaccccagtgtgaaagagattacaggacaggcccatgttttactgtgatcagcaaccagatgtgccagggacaactcagcgggattgtctgcacaaaaacgctctgctgtgccacagtcggccgagcctggggccacccctgtgagatgtgtcctgcccagcctcacccctgccgccgtggcttcattccaaatatccgcacgggagcttgtcaagatgtggatgaatgccaggccatccccgggctctgtcagggaggaaattgcattaatactgttgggtcttttgagtgcaaatgccctgctggacacaaacttaatgaagtgtcacaaaaatgtgaagatattgatgaatgcagcaccattcctggaatctgtgaagggggtgaatgtacaaacacagtcagcagttacttttgcaaatgtccccctggtttttacacctctccagatggtaccagatgcatagatgttcgcccaggatactgttacacagctctgacaaacgggcgctgctctaaccagctgccacagtccataaccaaaatgcagtgctgctgtgatgccggccgatgctggtctccaggggtcactgtcgcccctgagatgtgtcccatcagagcaaccgaggatttcaacaagctgtgctctgttcctatggtaattcctgggagaccagaatatcctcccccaccccttggccccattcctccagttctccctgttcctcctggctttcctcctggacctcaaattccggtccctcgaccaccagtggaatatctgtatccatctcgggagccaccaagggtgctgccagtaaacgttactgattactgccagttggtccgctatctctgtcaaaatggacgctgcattccaactcctgggagttgccggtgtgagtgcaacaaagggttccagctggacctccgtggggagtgtattgatgttgatgaatgtgagaaaaacccctgtgctggtggtgagtgtattaacaaccagggttcgtacacctgtcagtgccgagctggatatcagagcacactcacgcggacagaatgccgagacattgatgagtgtttacagaatggccggatctgcaataatggacgctgcatcaacacagatggcagttttcattgcgtgtgtaatgcgggctttcatgttacacgagatgggaagaactgtgaagatatggatgaatgcagcataaggaacatgtgccttaatggaatgtgtatcaatgaagatggcagttttaaatgtatttgcaaacctggattccagctggcatcagatggacgttattgcaaagacattaacgagtgtgaaacccctgggatctgcatgaatgggcgttgcgtcaacactgatggctcctacagatgtgaatgcttccctggactggctgtgggtctggatggccgtgtgtgtgttgacacacacatgcggagcacatgctatggtggatacaagagaggccagtgtatcaaacctttgtttggtgctgtcactaaatctgaatgctgttgcgccagcactgagtatgcatttggggaaccttgccagccgtgtcctgcacagaattcagcggaatatcaggcactctgcagcagtgggccaggaatgacgtcagcaggcagtgatataaatgaatgtgcactagatcctgatatttgcccaaatggaatctgtgaaaaccttcgtgggacctataaatgtatatgcaattcaggatatgaagtggattcaactgggaaaaactgcgttgatattaatgaatgtgtactgaacagtctcctttgtgacaatggacaatgtagaaatactcctggaagttttgtctgtacctgccccaagggatttatctacaaacctgatctaaaaacatgtgaagacattgatgaatgcgaatcaagtccttgcattaatggagtctgcaagaacagcccaggctcttttatttgtgaatgttcttctgaaagtactttggatccaacaaaaaccatctgcatagaaaccatcaagggcacttgctggcagactgtcattgatgggcgatgtgagatcaacatcaatggagccaccttaaagtcccagtgctgctcctccctcggtgctgcgtggggaagcccgtgcaccctatgccaagttgatcccatatgtggtaaagggtactcaagaattaaaggaacacaatgtgaagatatagatgaatgtgaagtgttcccaggagtgtgtaaaaatggcctgtgtgttaacactagggggtcattcaagtgtcagtgtcccagtggaatgactttggatgccacaggaaggatctgtcttgatatccgcctggaaacctgcttcctgaggtacgaggacgaggagtgcaccctgcctattgctggccgccaccgcatggacgcctgctgctgctccgtcggggcagcctggggtactgaggaatgcgaggagtgtcccatgagaaatactcctgagtacgaggagctgtgtccgagaggacccggatttgccacaaaagaaattacaaatggaaagcctttcttcaaagatatcaatgagtgcaagatgatacccagcctctgcacccacggcaagtgcagaaacaccattggcagctttaagtgcaggtgtgacagcggctttgctcttgattctgaagaaaggaactgcacagacattgacgaatgccgcatatctcctgacctctgtggcagaggccagtgtgtgaacacccctggggactttgaatgcaagtgtgacgaaggctatgaaagtggattcatgatgatgaagaactgcatggatattgatgagtgtcagagagatcctctcctatgccgaggtggtgtttgccataacacagagggaagttaccgctgtgaatgcccgcctggccatcagctgtcccccaacatctccgcgtgtatcgacatcaatgaatgtgagctgagtgcacacctgtgccccaatggccgttgcgtgaacctcatagggaagtatcagtgtgcctgcaaccctggctaccattcaactcccgataggctattttgtgttgacattgatgaatgcagcataatgaatggtggttgtgaaaccttctgcacaaactctgaaggcagctatgaatgtagctgtcagccgggatttgcactaatgcctgaccagagatcatgcaccgacatcgatgagtgtgaagataatcccaatatctgtgatggtggtcagtgcacaaatatccctggagagtacaggtgcttgtgttatgatggattcatggcatctgaagacatgaagacttgtgtagatgtcaatgagtgtgacctgaatccaaatatctgcctaagtgggacctgtgaaaacacgaaaggctcatttatctgccactgtgatatgggctactccggcaaaaaaggaaaaactggctgtacagacatcaatgaatgtgaaattggagcacacaactgtggcaaacatgctgtatgtaccaatacagcaggaagcttcaaatgtagctgcagtcccgggtggattggagatggcattaagtgcactgatctggacgaatgttccaatggaacccatatgtgcagccagcatgcagactgcaagaataccatgggatcttaccgctgtctgtgcaaggaaggatacacaggtgatggcttcacttgtacagaccttgatgagtgctctgagaacctgaatctctgtggcaatggccagtgcctcaatgcaccaggaggataccgctgtgaatgcgacatgggcttcgtgcccagtgctgacgggaaagcctgtgaagatattgatgagtgctcccttccgaacatctgtgtctttggaacttgccacaacctccctggcctgttccgctgtgagtgtgagataggctacgaactggacagaagcggcgggaactgcacagatgtgaatgaatgcctggatccaaccacgtgcatcagtgggaactgtgtcaacactccaggcagctatatctgtgactgcccacctgattttgaactgaacccaactcgagttggctgtgttgatacccgctctggaaattgctatttggatattcgacctcgaggagacaatggagatacagcctgcagcaatgaaattggagttggtgtttccaaagcttcctgctgctgttctctgggtaaagcctggggtactccttgtgagatgtgtcctgctgtgaacacatccgagtacaaaattctttgtcctggaggggaaggtttccgaccaaatcctatcaccgttatattggaagatattgatgagtgccaggagctaccagggctgtgccaaggaggaaaatgtatcaacacctttgggagtttccagtgccgctgtccaaccggctactacctgaatgaagatacacgagtgtgtgatgatgtgaatgaatgtgagactcctggaatctgtggtccagggacatgttacaacaccgttggcaactacacctgtatctgtcctccagactacatgcaagtgaatgggggaaataattgcatggatatgagaagaagtttgtgctacagaaactactatgctgacaaccagacctgtgatggagaattgttattcaacatgaccaagaagatgtgctgctgttcctacaacattggccgggcgtggaacaagccctgtgaacagtgtcccatcccaagtacagatgagtttgctacactctgtggaagtcaaaggccaggctttgtcatcgacatttataccggtttacccgttgatattgatgagtgccgggagatcccaggggtctgtgaaaatggagtgtgtatcaacatggttggcagcttccgatgtgaatgtccagtgggattcttctataatgacaagttgttggtttgtgaagatattgacgagtgtcagaacggcccagtgtgccagcgcaacgccgaatgcatcaacactgcaggcagctaccgctgtgactgtaagcccggctaccgcttcacctccacaggacagtgcaatgatcgtaatgaatgtcaagaaatccccaatatatgcagtcatgggcagtgcattgacacagttggaagcttttattgcctttgccacactggttttaaaacaaatgatgaccaaaccatgtgcttggacataaatgaatgtgaaagagatgcctgtgggaatggaacttgccggaacacaattggttccttcaactgccgctgcaatcatggtttcatcctttctcacaacaatgactgtatagatgttgatgaatgtgcaagtggaaatgggaatctttgcagaaatggccaatgcattaatacagtggggtctttccagtgccagtgcaatgaaggctatgaggtggctccagatgggaggacctgtgtggatatcaatgaatgtcttctagaacccagaaaatgtgcaccaggtacctgtcaaaacttggatgggtcctacagatgcatttgcccacctggatacagtcttcaaaatgagaagtgtgaagatattgatgagtgtgtcgaagagccagaaatttgtgccctgggcacatgcagtaacactgaaggcagcttcaaatgtctgtgtccagaagggttttccttgtcctccagtggaagaaggtgccaagatttgcgaatgagctactgttatgcgaagtttgaaggaggaaagtgttcatcacccaaatccagaaatcactccaagcaggaatgctgctgtgccttgaagggagaaggctggggagacccctgcgagctctgccccacggaacctgatgaggccttccgccagatatgtccttatggaagtgggatcatcgtgggacctgatgattcagcagttgatatggacgaatgcaaagaacccgatgtctgtaaacatggacagtgcatcaatacagatggttcctatcgctgcgagtgtccctttggttatattctagcagggaatgaatgtgtagatactgatgaatgttctgttggcaatccttgtggaaatggaacctgcaagaatgtgattggaggttttgaatgcacctgcgaggagggatttgagcccggtccaatgatgacatgtgaagatataaatgaatgtgcccagaatcctctgctctgtgccttccgatgtgtgaacacttatgggtcatatgaatgcaaatgtcccgtgggatatgtgctcagagaagaccgtaggatgtgcaaagatgaggatgagtgtgaagagggaaaacatgactgtactgaaaaacaaatggaatgcaagaacctcattggcacatatatgtgcatctgtggacccgggtatcagcggagacctgatggagaaggctgtgtagatgagaatgaatgtcagacgaagccagggatctgtgagaatgggcgctgcctcaacacccgtgggagctacacctgtgagtgtaatgatgggtttaccgccagccccaaccaggacgagtgccttgacaatcgggaagggtactgcttcacagaggtgctacaaaacatgtgtcagatcggctccagcaacaggaaccccgtcaccaaatcggaatgctgctgtgacggagggagaggctggggtccccactgtgagatctgccctttccaggggactgtggctttcaagaaactctgtccccatggccgaggattcatgaccaatggagcagatatcgatgaatgcaaggttattcacgatgtttgccgaaatggggaatgtgtcaatgacagaggatcatatcattgcatttgtaaaactgggtacactccagatataactgggacttcctgtgtagatctgaacgagtgcaaccaggctcccaaaccctgcaattttatctgcaaaaacacagaagggagttaccagtgttcatgcccgaaaggctacattctgcaagaggatggaaggagctgcaaagatcttgatgagtgtgcaaccaagcaacacaactgccagttcctatgtgttaacaccattggcggcttcacatgcaaatgtcctcccggatttacccaacaccatacgtcctgcattgataacaatgaatgcacctctgacatcaatctgtgcgggtctaagggcatttgccagaacactcctggaagcttcacctgtgaatgccagcggggattctcacttgatcagaccggctccagctgtgaagacgtggacgagtgtgagggtaaccaccgctgccagcatggctgccagaacatcattgggggctacaggtgcagctgcccccagggctacctccagcactaccagtggaaccagtgtgttgatgaaaacgaatgcctcagcgctcacatctgcggaggagcctcctgtcacaacaccctggggagctacaagtgcatgtgtcccgccggcttccagtatgaacagttcagtggaggatgccaagacatcaatgaatgtggctctgcgcaggccccctgcagctatggctgttccaataccgagggcggttacctgtgtggctgtccacctggttacttccgcataggccaagggcactgtgtttctggaatgggcatgggccgaggaaacccagagccacctgtcagtggtgaaatggatgacaattcactctccccagaggcttgttacgagtgtaagatcaatggctaccccaaacggggcaggaaacggagaagcacaaacgaaactgatgcctccaatatcgaggatcagtctgagacagaagccaatgtgagtcttgcaagttgggatgttgagaagacagccatctttgctttcaatatttcccacgtcagtaacaaggttcgaatcctagaactccttccagctcttacaactctgacgaatcacaacagatacttgatcgaatctggaaatgaagatggcttctttaaaatcaaccaaaaggaagggatcagctacctccacttcacaaagaagaagccagtggctggaacctattcattacaaatcagtagtactccactttataaaaagaaagaacttaaccaactagaagacaaatatgacaaagactacctcagtggtgaactgggtgataatctgaagatgaaaatccaggttttgcttcattaattcaccatccagagaccaaataattaaaagaaaaacaaatatagataggtagaactatattttcccccaatcagaatcatcatatcataggtacaatctttcaccaagtaaatttgtataaataagcactattctttgtattaccaaagcaaggtacaggtgactaccctagttcaaaacaaccactttctcaggcttctcatgtgtgtagctaagctaccttgtcatatgtgttgattcttgaaaactgggacgtgtatttccattgggggttggccatttatgctgacatgccatccttccagcaaacgtacgggaatgtgctttcaattgatggactactctattttttgcaaatttgtaaactttgcttctccaaatacaagtactaggttgtccatttatggtacctatttggtgctagtaaattttcaaactagatttataaatgcactgtaatatgtacacaacttagaaaccaaattacaagtattcagttccaatacttcattaatttcaatcaaccaaagttagttcagtagcttatctcagttatgagtataatacattacatgtaaattaagtgtgtgtatactgtaatcgtgctattttttatcattgaaacatttataaactagaataataatgcccttaatgtgagggtttgtaatggtgcttattaagaccaaagacttgttaaatgtatacaccaagtggtaatgaaatttcggtgactggcccacacgtgcatagaggtctgggaggaccaggaaacagcctcagtggccagaggatcaccagtgcatccttcatcacagcatgtgcaatatgccaagattaccctcggtcattcctgtcaacaaggggtcaatgtcataaatgtcacaataaaacaatctcttcttttttttagtttaccccttggctttgtgttcttgcatggatttggggttggaggggccattccggaggctaaataaagtctcctggatttaaattatcctgggtctcttacttatggcttatgaaagtaccaaatgtataaccactagaagaaaatttaacatatgagtcgatcccttgttttatccattgaaagtagcagagtctggtgtcattaacctgacttgcttgtgagaaatttagattgtagagtcatttctgaaacatgacctaattcatcttgtgacttttaaatagtcttaaataccaagttcagtcattgtcttagagcacatgaatttcattataatagatttatcatgcccccctctcaaatatacacagttttggcaagccttaggtgttctgttccatttttttttcccctaaacatctttcgttagtcaatgctcatctaattacaaagggataatcccagactgtatccaattgctgtaacttttggtttcttaatgtcataatttttaaagtctgttttattttaagtgcaatattgagtatttagctgttaggctcaatccgtcgatatgaaataattttttaaatccctaagggcaggaaagcatttcgtggtagtgaaaataagaggaaataagatggcatgaaggtggtgggcggagaaactaggtaggacacaggaaagtgctctcaaaaatctttgaagagctcagctgaaaaaaatggagtagatttggctcatactattccggaaggcaaaaccagggtcagctgatgtcagccccagtttaatacacacggtcccaattatagagctactcactgaaagaatgggtttccttgcattgtggtgagctccctgtcacaagatagaagagtttcagtctaggcttaatggcaaccattggacaaagatgctttcttccacctaacaggccattaacatcttaaaggtatttttgtatctctaattttgtttataataggtgctcaacagaatgagctgaatggctgttacaaagggggtttgtaccttgggtaagagattaaaatataactcaaaatttccttctaacgctgcacctatggaaccatgtgatagaggtgtattaaaattgttatcgaagaatatatagcatatggtaaacaacagtttgcatatggaaaatgtctttgataatttaaccagaactgcattatattcaataacggattttctttataacaaacaacaggggaaaatggagttggcacacagtggatcactttgatatttttaatagtccaagtctggattttatttattcctgagccaacaattttgaacagcatattttccatgtttctgactgtaacaaaacattttcctcattgttccattgtaaatattcctcttgttggaactctttttaatcctgagatttaaacctgtacctttcaattgtctgtgacctttcaatttcactttcaatagttgaagaacttggctttgtaaatctctcagaagcttgaaaatatcttgtctctaccccctcagcccatttcatttgccaataattattttgtaagtagggttgaaatgaactcagctggccttgtgaaatgtttaaacttgcacaaacaactacatttttgttcaacaaatagcagtttactcagccaaaatcactttggatattgccattacaaatactgttaaacttcagaaatcatgtctgtaaattagatgagccaaaataaaggacaattgggttgatgctgca

SEQ ID NO: 10751 - DNA, 11757 bp, Homo sapiens
  source 1..11757: mol_type = unassigned DNA
agtatttctctcgcgagaaaccgctgcgcggacgatacttgaagaggtggggaaaggagggggctgcgggagccgcggcagagactgtgggtgccacaagcggacaggagccacagctgggacagctgcgagcggagccgagcagtggctgtagcggccacgactgggagcagccgccgccgcctcctcgggagtcggagccgccgcttctccactggcaggggccgcctgaagtgggagcagcgcctggagaaggcgggaggagcccggcccgggggacgggcggcgggatagcgggaccccggcggcgcggtgcgcttcagggcgcagcggcggccgcagaccgagccccgggcgcggcaagaggcggcgggagccggtggcggctcggcatcatgcgtcgagggcgtctgctggagatcgccctgggatttaccgtgcttttagcgtcctacacgagccatggggcggacgccaatttggaggctgggaacgtgaaggaaaccagagccagtcgggccaagagaagaggcggtggaggacacgacgcgcttaaaggacccaatgtctgtggatcacgttataatgcttactgttgccctggatggaaaaccttacctggcggaaatcagtgtattgtccccatttgccggcattcctgtggggatggattttgttcgaggccaaatatgtgcacttgcccatctggtcagatagctccttcctgtggctccagatccatacaacactgcaatattcgctgtatgaatggaggtagctgcagtgacgatcactgtctatgccagaaaggatacatagggactcactgtggacaacctgtttgtgaaagtggctgtctcaatggaggaaggtgtgtggccccaaatcgatgtgcatgcacttacggatttactggaccccagtgtgaaagagattacaggacaggcccatgttttactgtgatcagcaaccagatgtgccagggacaactcagcgggattgtctgcacaaaaacgctctgctgtgccacagtcggccgagcctggggccacccctgtgagatgtgtcctgcccagcctcacccctgccgccgtggcttcattccaaatatccgcacgggagcttgtcaagatgtggatgaatgccaggccatccccgggctctgtcagggaggaaattgcattaatactgttgggtcttttgagtgcaaatgccctgctggacacaaacttaatgaagtgtcacaaaaatgtgaagatattgatgaatgcagcaccattcctggaatctgtgaagggggtgaatgtacaaacacagtcagcagttacttttgcaaatgtccccctggtttttacacctctccagatggtaccagatgcatagatgttcgcccaggatactgttacacagctctgacaaacgggcgctgctctaaccagctgccacagtccataaccaaaatgcagtgctgctgtgatgccggccgatgctggtctccaggggtcactgtcgcccctgagatgtgtcccatcagagcaaccgaggatttcaacaagctgtgctctgttcctatggtaattcctgggagaccagaatatcctcccccaccccttggccccattcctccagttctccctgttcctcctggctttcctcctggacctcaaattccggtccctcgaccaccagtggaatatctgtatccatctcgggagccaccaagggtgctgccagtaaacgttactgattactgccagttggtccgctatctctgtcaaaatggacgctgcattccaactcctgggagttgccggtgtgagtgcaacaaagggttccagctggacctccgtggggagtgtattgatgttgatgaatgtgagaaaaacccctgtgctggtggtgagtgtattaacaaccagggttcgtacacctgtcagtgccgagctggatatcagagcacactcacgcggacagaatgccgagacattgatgagtgtttacagaatggccggatctgcaataatggacgctgcatcaacacagatggcagttttcattgcgtgtgtaatgcgggctttcatgttacacgagatgggaagaactgtgaagatatggatgaatgcagcataaggaacatgtgccttaatggaatgtgtatcaatgaagatggcagttttaaatgtatttgcaaacctggattccagctggcatcagatggacgttattgcaaagacattaacgagtgtgaaacccctgggatctgcatgaatgggcgttgcgtcaacactgatggctcctacagatgtgaatgcttccctggactggctgtgggtctggatggccgtgtgtgtgttgacacacacatgcggagcacatgctatggtggatacaagagaggccagtgtatcaaacctttgtttggtgctgtcactaaatctgaatgctgttgcgccagcactgagtatgcatttggggaaccttgccagccgtgtcctgcacagaattcagcggaatatcaggcactctgcagcagtgggccaggaatgacgtcagcaggcagtgatataaatgaatgtgcactagatcctgatatttgcccaaatggaatctgtgaaaaccttcgtgggacctataaatgtatatgcaattcaggatatgaagtggattcaactgggaaaaactgcgttgatattaatgaatgtgtactgaacagtctcctttgtgacaatggacaatgtagaaatactcctggaagttttgtctgtacctgccccaagggatttatctacaaacctgatctaaaaacatgtgaagacattgatgaatgcgaatcaagtccttgcattaatggagtctgcaagaacagcccaggctcttttatttgtgaatgttcttctgaaagtactttggatccaacaaaaaccatctgcatagaaaccatcaagggcacttgctggcagactgtcattgatgggcgatgtgagatcaacatcaatggagccaccttaaagtcccagtgctgctcctccctcggtgctgcgtggggaagcccgtgcaccctatgccaagttgatcccatatgtggtaaagggtactcaagaattaaaggaacacaatgtgaagatatagatgaatgtgaagtgttcccaggagtgtgtaaaaatggcctgtgtgttaacactagggggtcattcaagtgtcagtgtcccagtggaatgactttggatgccacaggaaggatctgtcttgatatccgcctggaaacctgcttcctgaggtacgaggacgaggagtgcaccctgcctattgctggccgccaccgcatggacgcctgctgctgctccgtcggggcagcctggggtactgaggaatgcgaggagtgtcccatgagaaatactcctgagtacgaggagctgtgtccgagaggacccggatttgccacaaaagaaattacaaatggaaagcctttcttcaaagatatcaatgagtgcaagatgatacccagcctctgcacccacggcaagtgcagaaacaccattggcagctttaagtgcaggtgtgacagcggctttgctcttgattctgaagaaaggaactgcacagacattgacgaatgccgcatatctcctgacctctgtggcagaggccagtgtgtgaacacccctggggactttgaatgcaagtgtgacgaaggctatgaaagtggattcatgatgatgaagaactgcatggatattgatgagtgtcagagagatcctctcctatgccgaggtggtgtttgccataacacagagggaagttaccgctgtgaatgcccgcctggccatcagctgtcccccaacatctccgcgtgtatcgacatcaatgaatgtgagctgagtgcacacctgtgccccaatggccgttgcgtgaacctcatagggaagtatcagtgtgcctgcaaccctggctaccattcaactcccgataggctattttgtgttgacattgatgaatgcagcataatgaatggtggttgtgaaaccttctgcacaaactctgaaggcagctatgaatgtagctgtcagccgggatttgcactaatgcctgaccagagatcatgcaccgacatcgatgagtgtgaagataatcccaatatctgtgatggtggtcagtgcacaaatatccctggagagtacaggtgcttgtgttatgatggattcatggcatctgaagacatgaagacttgtgtagatgtcaatgagtgtgacctgaatccaaatatctgcctaagtgggacctgtgaaaacacgaaaggctcatttatctgccactgtgatatgggctactccggcaaaaaaggaaaaactggctgtacagacatcaatgaatgtgaaattggagcacacaactgtggcaaacatgctgtatgtaccaatacagcaggaagcttcaaatgtagctgcagtcccgggtggattggagatggcattaagtgcactgatctggacgaatgttccaatggaacccatatgtgcagccagcatgcagactgcaagaataccatgggatcttaccgctgtctgtgcaaggaaggatacacaggtgatggcttcacttgtacagaccttgatgagtgctctgagaacctgaatctctgtggcaatggccagtgcctcaatgcaccaggaggataccgctgtgaatgcgacatgggcttcgtgcccagtgctgacgggaaagcctgtgaagatattgatgagtgctcccttccgaacatctgtgtctttggaacttgccacaacctccctggcctgttccgctgtgagtgtgagataggctacgaactggacagaagcggcgggaactgcacagatgtgaatgaatgcctggatccaaccacgtgcatcagtgggaactgtgtcaacactccaggcagctatatctgtgactgcccacctgattttgaactgaacccaactcgagttggctgtgttgatacccgctctggaaattgctatttggatattcgacctcgaggagacaatggagatacagcctgcagcaatgaaattggagttggtgtttccaaagcttcctgctgctgttctctgggtaaagcctggggtactccttgtgagatgtgtcctgctgtgaacacatccgagtacaaaattctttgtcctggaggggaaggtttccgaccaaatcctatcaccgttatattggaagatattgatgagtgccaggagctaccagggctgtgccaaggaggaaaatgtatcaacacctttgggagtttccagtgccgctgtccaaccggctactacctgaatgaagatacacgagtgtgtgatgatgtgaatgaatgtgagactcctggaatctgtggtccagggacatgttacaacaccgttggcaactacacctgtatctgtcctccagactacatgcaagtgaatgggggaaataattgcatggatatgagaagaagtttgtgctacagaaactactatgctgacaaccagacctgtgatggagaattgttattcaacatgaccaagaagatgtgctgctgttcctacaacattggccgggcgtggaacaagccctgtgaacagtgtcccatcccaagtacagatgagtttgctacactctgtggaagtcaaaggccaggctttgtcatcgacatttataccggtttacccgttgatattgatgagtgccgggagatcccaggggtctgtgaaaatggagtgtgtatcaacatggttggcagcttccgatgtgaatgtccagtgggattcttctataatgacaagttgttggtttgtgaagatattgacgagtgtcagaacggcccagtgtgccagcgcaacgccgaatgcatcaacactgcaggcagctaccgctgtgactgtaagcccggctaccgcttcacctccacaggacagtgcaatgatcgtaatgaatgtcaagaaatccccaatatatgcagtcatgggcagtgcattgacacagttggaagcttttattgcctttgccacactggttttaaaacaaatgatgaccaaaccatgtgcttggacataaatgaatgtgaaagagatgcctgtgggaatggaacttgccggaacacaattggttccttcaactgccgctgcaatcatggtttcatcctttctcacaacaatgactgtatagatgttgatgaatgtgcaagtggaaatgggaatctttgcagaaatggccaatgcattaatacagtggggtctttccagtgccagtgcaatgaaggctatgaggtggctccagatgggaggacctgtgtggatatcaatgaatgtcttctagaacccagaaaatgtgcaccaggtacctgtcaaaacttggatgggtcctacagatgcatttgcccacctggatacagtcttcaaaatgagaagtgtgaagatattgatgagtgtgtcgaagagccagaaatttgtgccctgggcacatgcagtaacactgaaggcagcttcaaatgtctgtgtccagaagggttttccttgtcctccagtggaagaaggtgccaagatttgcgaatgagctactgttatgcgaagtttgaaggaggaaagtgttcatcacccaaatccagaaatcactccaagcaggaatgctgctgtgccttgaagggagaaggctggggagacccctgcgagctctgccccacggaacctgatgaggccttccgccagatatgtccttatggaagtgggatcatcgtgggacctgatgattcagcagttgatatggacgaatgcaaagaacccgatgtctgtaaacatggacagtgcatcaatacagatggttcctatcgctgcgagtgtccctttggttatattctagcagggaatgaatgtgtagatactgatgaatgttctgttggcaatccttgtggaaatggaacctgcaagaatgtgattggaggttttgaatgcacctgcgaggagggatttgagcccggtccaatgatgacatgtgaagatataaatgaatgtgcccagaatcctctgctctgtgccttccgatgtgtgaacacttatgggtcatatgaatgcaaatgtcccgtgggatatgtgctcagagaagaccgtaggatgtgcaaagatgaggatgagtgtgaagagggaaaacatgactgtactgaaaaacaaatggaatgcaagaacctcattggcacatatatgtgcatctgtggacccgggtatcagcggagacctgatggagaaggctgtgtagatgagaatgaatgtcagacgaagccagggatctgtgagaatgggcgctgcctcaacacccgtgggagctacacctgtgagtgtaatgatgggtttaccgccagccccaaccaggacgagtgccttgacgtcatcctttctcttttactgctgtctccagctttcccctcttgcttcttctcacccaggacaatcgggaagggtactgcttcacagaggtgctacaaaacatgtgtcagatcggctccagcaacaggaaccccgtcaccaaatcggaatgctgctgtgacggagggagaggctggggtccccactgtgagatctgccctttccaggggactgtggctttcaagaaactctgtccccatggccgaggattcatgaccaatggagcagatatcgatgaatgcaaggttattcacgatgtttgccgaaatggggaatgtgtcaatgacagaggatcatatcattgcatttgtaaaactgggtacactccagatataactgggacttcctgtgtagatctgaacgagtgcaaccaggctcccaaaccctgcaattttatctgcaaaaacacagaagggagttaccagtgttcatgcccgaaaggctacattctgcaagaggatggaaggagctgcaaagatcttgatgagtgtgcaaccaagcaacacaactgccagttcctatgtgttaacaccattggcggcttcacatgcaaatgtcctcccggatttacccaacaccatacgtcctgcattgataacaatgaatgcacctctgacatcaatctgtgcgggtctaagggcatttgccagaacactcctggaagcttcacctgtgaatgccagcggggattctcacttgatcagaccggctccagctgtgaagacgtggacgagtgtgagggtaaccaccgctgccagcatggctgccagaacatcattgggggctacaggtgcagctgcccccagggctacctccagcactaccagtggaaccagtgtgttgatgaaaacgaatgcctcagcgctcacatctgcggaggagcctcctgtcacaacaccctggggagctacaagtgcatgtgtcccgccggcttccagtatgaacagttcagtggaggatgccaagacatcaatgaatgtggctctgcgcaggccccctgcagctatggctgttccaataccgagggcggttacctgtgtggctgtccacctggttacttccgcataggccaagggcactgtgtttctggaatgggcatgggccgaggaaacccagagccacctgtcagtggtgaaatggatgacaattcactctccccagaggcttgttacgagtgtaagatcaatggctaccccaaacggggcaggaaacggagaagcacaaacgaaactgatgcctccaatatcgaggatcagtctgagacagaagccaatgtgagtcttgcaagttgggatgttgagaagacagccatctttgctttcaatatttcccacgtcagtaacaaggttcgaatcctagaactccttccagctcttacaactctgacgaatcacaacagatacttgatcgaatctggaaatgaagatggcttctttaaaatcaaccaaaaggaagggatcagctacctccacttcacaaagaagaagccagtggctggaacctattcattacaaatcagtagtactccactttataaaaagaaagaacttaaccaactagaagacaaatatgacaaagactacctcagtggtgaactgggtgataatctgaagatgaaaatccaggttttgcttcattaattcaccatccagagaccaaataattaaaagaaaaacaaatatagataggtagaactatattttcccccaatcagaatcatcatatcataggtacaatctttcaccaagtaaatttgtataaataagcactattctttgtattaccaaagcaaggtacaggtgactaccctagttcaaaacaaccactttctcaggcttctcatgtgtgtagctaagctaccttgtcatatgtgttgattcttgaaaactgggacgtgtatttccattgggggttggccatttatgctgacatgccatccttccagcaaacgtacgggaatgtgctttcaattgatggactactctattttttgcaaatttgtaaactttgcttctccaaatacaagtactaggttgtccatttatggtacctatttggtgctagtaaattttcaaactagatttataaatgcactgtaatatgtacacaacttagaaaccaaattacaagtattcagttccaatacttcattaatttcaatcaaccaaagttagttcagtagcttatctcagttatgagtataatacattacatgtaaattaagtgtgtgtatactgtaatcgtgctattttttatcattgaaacatttataaactagaataataatgcccttaatgtgagggtttgtaatggtgcttattaagaccaaagacttgttaaatgtatacaccaagtggtaatgaaatttcggtgactggcccacacgtgcatagaggtctgggaggaccaggaaacagcctcagtggccagaggatcaccagtgcatccttcatcacagcatgtgcaatatgccaagattaccctcggtcattcctgtcaacaaggggtcaatgtcataaatgtcacaataaaacaatctcttcttttttttagtttaccccttggctttgtgttcttgcatggatttggggttggaggggccattccggaggctaaataaagtctcctggatttaaattatcctgggtctcttacttatggcttatgaaagtaccaaatgtataaccactagaagaaaatttaacatatgagtcgatcccttgttttatccattgaaagtagcagagtctggtgtcattaacctgacttgcttgtgagaaatttagattgtagagtcatttctgaaacatgacctaattcatcttgtgacttttaaatagtcttaaataccaagttcagtcattgtcttagagcacatgaatttcattataatagatttatcatgcccccctctcaaatatacacagttttggcaagccttaggtgttctgttccatttttttttcccctaaacatctttcgttagtcaatgctcatctaattacaaagggataatcccagactgtatccaattgctgtaacttttggtttcttaatgtcataatttttaaagtctgttttattttaagtgcaatattgagtatttagctgttaggctcaatccgtcgatatgaaataattttttaaatccctaagggcaggaaagcatttcgtggtagtgaaaataagaggaaataagatggcatgaaggtggtgggcggagaaactaggtaggacacaggaaagtgctctcaaaaatctttgaagagctcagctgaaaaaaatggagtagatttggctcatactattccggaaggcaaaaccagggtcagctgatgtcagccccagtttaatacacacggtcccaattatagagctactcactgaaagaatgggtttccttgcattgtggtgagctccctgtcacaagatagaagagtttcagtctaggcttaatggcaaccattggacaaagatgctttcttccacctaacaggccattaacatcttaaaggtatttttgtatctctaattttgtttataataggtgctcaacagaatgagctgaatggctgttacaaagggggtttgtaccttgggtaagagattaaaatataactcaaaatttccttctaacgctgcacctatggaaccatgtgatagaggtgtattaaaattgttatcgaagaatatatagcatatggtaaacaacagtttgcatatggaaaatgtctttgataatttaaccagaactgcattatattcaataacggattttctttataacaaacaacaggggaaaatggagttggcacacagtggatcactttgatatttttaatagtccaagtctggattttatttattcctgagccaacaattttgaacagcatattttccatgtttctgactgtaacaaaacattttcctcattgttccattgtaaatattcctcttgttggaactctttttaatcctgagatttaaacctgtacctttcaattgtctgtgacctttcaatttcactttcaatagttgaagaacttggctttgtaaatctctcagaagcttgaaaatatcttgtctctaccccctcagcccatttcatttgccaataattattttgtaagtagggttgaaatgaactcagctggccttgtgaaatgtttaaacttgcacaaacaactacatttttgttcaacaaatagcagtttactcagccaaaatcactttggatattgccattacaaatactgttaaacttcagaaatcatgtctgtaaattagatgagccaaaataaaggacaattgggttgatgctgca

SEQ ID NO: 10752 - DNA, 8365 bp, Homo sapiens
  source 1..8365: mol_type = unassigned DNA
agtatttctctcgcgagaaaccgctgcgcggacgatacttgaagaggtggggaaaggagggggctgcgggagccgcggcagagactgtgggtgccacaagcggacaggagccacagctgggacagctgcgagcggagccgagcagtggctgtagcggccacgactgggagcagccgccgccgcctcctcgggagtcggagccgccgcttctccactggcaggggccgcctgaagtgggagcagcgcctggagaaggcgggaggagcccggcccgggggacgggcggcgggatagcgggaccccggcggcgcggtgcgcttcagggcgcagcggcggccgcagaccgagccccgggcgcggcaagaggcggcgggagccggtggcggctcggcatcatgcgtcgagggcgtctgctggagatcgccctgggatttaccgtgcttttagcgtcctacacgagccatggggcggacgccaatttggaggctgggaacgtgaaggaaaccagagccagtcgggccaagagaagaggcggtggaggacacgacgcgcttaaaggacccaatgtctgtggatcacgttataatgcttactgttgccctggatggaaaaccttacctggcggaaatcagtgtattgtccccatttgccggcattcctgtggggatggattttgttcgaggccaaatatgtgcacttgcccatctggtcagatagctccttcctgtggctccagatccatacaacactgcaatattcgctgtatgaatggaggtagctgcagtgacgatcactgtctatgccagaaaggatacatagggactcactgtggacaacctgtttgtgaaagtggctgtctcaatggaggaaggtgtgtggccccaaatcgatgtgcatgcacttacggatttactggaccccagtgtgaaagagattacaggacaggcccatgttttactgtgatcagcaaccagatgtgccagggacaactcagcgggattgtctgcacaaaaacgctctgctgcacctacatcaatgaatgtgaaattggagcacacaactgtggcaaacatgctgtatgtaccaatacagcaggaagcttcaaatgtagctgcagtcccgggtggattggagatggcattaagtgcactgatctggacgaatgttccaatggaacccatatgtgcagccagcatgcagactgcaagaataccatgggatcttaccgctgtctgtgcaaggaaggatacacaggtgatggcttcacttgtacagaccttgatgagtgctctgagaacctgaatctctgtggcaatggccagtgcctcaatgcaccaggaggataccgctgtgaatgcgacatgggcttcgtgcccagtgctgacgggaaagcctgtgaagatattgatgagtgctcccttccgaacatctgtgtctttggaacttgccacaacctccctggcctgttccgctgtgagtgtgagataggctacgaactggacagaagcggcgggaactgcacagatgtgaatgaatgcctggatccaaccacgtgcatcagtgggaactgtgtcaacactccaggcagctatatctgtgactgcccacctgattttgaactgaacccaactcgagttggctgtgttgatacccgctctggaaattgctatttggatattcgacctcgaggagacaatggagatacagcctgcagcaatgaaattggagttggtgtttccaaagcttcctgctgctgttctctgggtaaagcctggggtactccttgtgagatgtgtcctgctgtgaacacatccgagtacaaaattctttgtcctggaggggaaggtttccgaccaaatcctatcaccgttatattggaagatattgatgagtgccaggagctaccagggctgtgccaaggaggaaaatgtatcaacacctttgggagtttccagtgccgctgtccaaccggctactacctgaatgaagatacacgagtgtgtgatgatgtgaatgaatgtgagactcctggaatctgtggtccagggacatgttacaacaccgttggcaactacacctgtatctgtcctccagactacatgcaagtgaatgggggaaataattgcatggatatgagaagaagtttgtgctacagaaactactatgctgacaaccagacctgtgatggagaattgttattcaacatgaccaagaagatgtgctgctgttcctacaacattggccgggcgtggaacaagccctgtgaacagtgtcccatcccaagtacagatgagtttgctacactctgtggaagtcaaaggccaggctttgtcatcgacatttataccggtttacccgttgatattgatgagtgccgggagatcccaggggtctgtgaaaatggagtgtgtatcaacatggttggcagcttccgatgtgaatgtccagtgggattcttctataatgacaagttgttggtttgtgaagatattgacgagtgtcagaacggcccagtgtgccagcgcaacgccgaatgcatcaacactgcaggcagctaccgctgtgactgtaagcccggctaccgcttcacctccacaggacagtgcaatgatcgtaatgaatgtcaagaaatccccaatatatgcagtcatgggcagtgcattgacacagttggaagcttttattgcctttgccacactggttttaaaacaaatgatgaccaaaccatgtgcttggacataaatgaatgtgaaagagatgcctgtgggaatggaacttgccggaacacaattggttccttcaactgccgctgcaatcatggtttcatcctttctcacaacaatgactgtatagatgttgatgaatgtgcaagtggaaatgggaatctttgcagaaatggccaatgcattaatacagtggggtctttccagtgccagtgcaatgaaggctatgaggtggctccagatgggaggacctgtgtggatatcaatgaatgtcttctagaacccagaaaatgtgcaccaggtacctgtcaaaacttggatgggtcctacagatgcatttgcccacctggatacagtcttcaaaatgagaagtgtgaagatattgatgagtgtgtcgaagagccagaaatttgtgccctgggcacatgcagtaacactgaaggcagcttcaaatgtctgtgtccagaagggttttccttgtcctccagtggaagaaggtgccaagatttgcgaatgagctactgttatgcgaagtttgaaggaggaaagtgttcatcacccaaatccagaaatcactccaagcaggaatgctgctgtgccttgaagggagaaggctggggagacccctgcgagctctgccccacggaacctgatgaggccttccgccagatatgtccttatggaagtgggatcatcgtgggacctgatgattcagcagttgatatggacgaatgcaaagaacccgatgtctgtaaacatggacagtgcatcaatacagatggttcctatcgctgcgagtgtccctttggttatattctagcagggaatgaatgtgtagatactgatgaatgttctgttggcaatccttgtggaaatggaacctgcaagaatgtgattggaggttttgaatgcacctgcgaggagggatttgagcccggtccaatgatgacatgtgaagatataaatgaatgtgcccagaatcctctgctctgtgccttccgatgtgtgaacacttatgggtcatatgaatgcaaatgtcccgtgggatatgtgctcagagaagaccgtaggatgtgcaaagatgaggatgagtgtgaagagggaaaacatgactgtactgaaaaacaaatggaatgcaagaacctcattggcacatatatgtgcatctgtggacccgggtatcagcggagacctgatggagaaggctgtgtagatgagaatgaatgtcagacgaagccagggatctgtgagaatgggcgctgcctcaacacccgtgggagctacacctgtgagtgtaatgatgggtttaccgccagccccaaccaggacgagtgccttgacaatcgggaagggtactgcttcacagaggtgctacaaaacatgtgtcagatcggctccagcaacaggaaccccgtcaccaaatcggaatgctgctgtgacggagggagaggctggggtccccactgtgagatctgccctttccaggggactgtggctttcaagaaactctgtccccatggccgaggattcatgaccaatggagcagatatcgatgaatgcaaggttattcacgatgtttgccgaaatggggaatgtgtcaatgacagaggatcatatcattgcatttgtaaaactgggtacactccagatataactgggacttcctgtgtagatctgaacgagtgcaaccaggctcccaaaccctgcaattttatctgcaaaaacacagaagggagttaccagtgttcatgcccgaaaggctacattctgcaagaggatggaaggagctgcaaagatcttgatgagtgtgcaaccaagcaacacaactgccagttcctatgtgttaacaccattggcggcttcacatgcaaatgtcctcccggatttacccaacaccatacgtcctgcattgataacaatgaatgcacctctgacatcaatctgtgcgggtctaagggcatttgccagaacactcctggaagcttcacctgtgaatgccagcggggattctcacttgatcagaccggctccagctgtgaagacgtggacgagtgtgagggtaaccaccgctgccagcatggctgccagaacatcattgggggctacaggtgcagctgcccccagggctacctccagcactaccagtggaaccagtgtgttgatgaaaacgaatgcctcagcgctcacatctgcggaggagcctcctgtcacaacaccctggggagctacaagtgcatgtgtcccgccggcttccagtatgaacagttcagtggaggatgccaagacatcaatgaatgtggctctgcgcaggccccctgcagctatggctgttccaataccgagggcggttacctgtgtggctgtccacctggttacttccgcataggccaagggcactgtgtttctggaatgggcatgggccgaggaaacccagagccacctgtcagtggtgaaatggatgacaattcactctccccagaggcttgttacgagtgtaagatcaatggctaccccaaacggggcaggaaacggagaagcacaaacgaaactgatgcctccaatatcgaggatcagtctgagacagaagccaatgtgagtcttgcaagttgggatgttgagaagacagccatctttgctttcaatatttcccacgtcagtaacaaggttcgaatcctagaactccttccagctcttacaactctgacgaatcacaacagatacttgatcgaatctggaaatgaagatggcttctttaaaatcaaccaaaaggaagggatcagctacctccacttcacaaagaagaagccagtggctggaacctattcattacaaatcagtagtactccactttataaaaagaaagaacttaaccaactagaagacaaatatgacaaagactacctcagtggtgaactgggtgataatctgaagatgaaaatccaggttttgcttcattaattcaccatccagagaccaaataattaaaagaaaaacaaatatagataggtagaactatattttcccccaatcagaatcatcatatcataggtacaatctttcaccaagtaaatttgtataaataagcactattctttgtattaccaaagcaaggtacaggtgactaccctagttcaaaacaaccactttctcaggcttctcatgtgtgtagctaagctaccttgtcatatgtgttgattcttgaaaactgggacgtgtatttccattgggggttggccatttatgctgacatgccatccttccagcaaacgtacgggaatgtgctttcaattgatggactactctattttttgcaaatttgtaaactttgcttctccaaatacaagtactaggttgtccatttatggtacctatttggtgctagtaaattttcaaactagatttataaatgcactgtaatatgtacacaacttagaaaccaaattacaagtattcagttccaatacttcattaatttcaatcaaccaaagttagttcagtagcttatctcagttatgagtataatacattacatgtaaattaagtgtgtgtatactgtaatcgtgctattttttatcattgaaacatttataaactagaataataatgcccttaatgtgagggtttgtaatggtgcttattaagaccaaagacttgttaaatgtatacaccaagtggtaatgaaatttcggtgactggcccacacgtgcatagaggtctgggaggaccaggaaacagcctcagtggccagaggatcaccagtgcatccttcatcacagcatgtgcaatatgccaagattaccctcggtcattcctgtcaacaaggggtcaatgtcataaatgtcacaataaaacaatctcttcttttttttagtttaccccttggctttgtgttcttgcatggatttggggttggaggggccattccggaggctaaataaagtctcctggatttaaattatcctgggtctcttacttatggcttatgaaagtaccaaatgtataaccactagaagaaaatttaacatatgagtcgatcccttgttttatccattgaaagtagcagagtctggtgtcattaacctgacttgcttgtgagaaatttagattgtagagtcatttctgaaacatgacctaattcatcttgtgacttttaaatagtcttaaataccaagttcagtcattgtcttagagcacatgaatttcattataatagatttatcatgcccccctctcaaatatacacagttttggcaagccttaggtgttctgttccatttttttttcccctaaacatctttcgttagtcaatgctcatctaattacaaagggataatcccagactgtatccaattgctgtaacttttggtttcttaatgtcataatttttaaagtctgttttattttaagtgcaatattgagtatttagctgttaggctcaatccgtcgatatgaaataattttttaaatccctaagggcaggaaagcatttcgtggtagtgaaaataagaggaaataagatggcatgaaggtggtgggcggagaaactaggtaggacacaggaaagtgctctcaaaaatctttgaagagctcagctgaaaaaaatggagtagatttggctcatactattccggaaggcaaaaccagggtcagctgatgtcagccccagtttaatacacacggtcccaattatagagctactcactgaaagaatgggtttccttgcattgtggtgagctccctgtcacaagatagaagagtttcagtctaggcttaatggcaaccattggacaaagatgctttcttccacctaacaggccattaacatcttaaaggtatttttgtatctctaattttgtttataataggtgctcaacagaatgagctgaatggctgttacaaagggggtttgtaccttgggtaagagattaaaatataactcaaaatttccttctaacgctgcacctatggaaccatgtgatagaggtgtattaaaattgttatcgaagaatatatagcatatggtaaacaacagtttgcatatggaaaatgtctttgataatttaaccagaactgcattatattcaataacggattttctttataacaaacaacaggggaaaatggagttggcacacagtggatcactttgatatttttaatagtccaagtctggattttatttattcctgagccaacaattttgaacagcatattttccatgtttctgactgtaacaaaacattttcctcattgttccattgtaaatattcctcttgttggaactctttttaatcctgagatttaaacctgtacctttcaattgtctgtgacctttcaatttcactttcaatagttgaagaacttggctttgtaaatctctcagaagcttgaaaatatcttgtctctaccccctcagcccatttcatttgccaataattattttgtaagtagggttgaaatgaactcagctggccttgtgaaatgtttaaacttgcacaaacaactacatttttgttcaacaaatagcagtttactcagccaaaatcactttggatattgccattacaaatactgttaaacttcagaaatcatgtctgtaaattagatgagccaaaataaaggacaattgggttgatgctgca

SEQ ID NO: 10753 - DNA, 10724 bp, Homo sapiens
  source 1..10724: mol_type = unassigned DNA
ctttccaatatccgtcttcggagcgcacgggaatccgccgagctctgcgtgcaggcccttttttcttttgaggttcacattttttgaaattttacgccagggcttttgtaatttcctcccccgcccgctgacggtcctggagtcgctcggggctttaggccggttatgcaacgtgtaccgctcggggctgccggctgcacctccgccgcgcctcgccgctcactgcgctagacccggcgccccgcgtctcgcttcgcgggcagtcagggggccggcgctctgtcgaggtctccagctagagcagggagcccgagcccgagggagtccccggagccgacgaagggcttattagaccctgactcttttctgaggcgcgcagattttgtctttgatcactccctctccgcgggtctacggccgcgcgctttcggcgccggcgatggggagaagacggaggctgtgtctccagctctacttcctgtggctgggctgtgtggtgctctgggcgcagggcacggccggccagcctcagcctcctccgcccaagccgccccggccccagccgccgccgcaacaggttcggtccgctacagcaggctctgaaggcgggtttctagcgcccgagtatcgcgaggagggtgccgcagtggccagccgcgtccgccggcgaggacagcaggacgtgctccgagggcccaacgtgtgcggctccagattccactcctactgctgccctggatggaagacgctccctggaggaaaccagtgcattgtcccgatttgtagaaatagttgtggagatggattttgttcccgtcctaacatgtgtacttgttccagtgggcaaatatcatcaacctgtggatcaaaatcaattcagcagtgcagtgtgagatgcatgaatggtgggacctgtgcagatgaccactgccagtgccagaaaggatatattggaacttattgtggacaacctgtctgtgaaaatggatgtcagaatggtggacgttgcatcggacccaaccgctgtgcttgtgtttatgggttcactggtccacagtgtgaaagagattacaggacaggcccgtgtttcactcaggtcaacaaccagatgtgccaagggcagctgacaggcattgtctgcacgaagactctgtgctgtgccaccattggacgggcgtggggccatccctgtgagatgtgtccagcccagcctcagccctgccgacggggtttcatccccaacatccgcactggagcttgccaagatgttgatgaatgccaggctatcccagggatatgccaaggaggaaactgtatcaatacagtgggctcttttgaatgcagatgccctgctggtcacaaacagagtgaaactactcagaaatgtgaagacattgatgagtgcagcatcattcctgggatatgtgaaactggtgaatgttccaacaccgtgggaagctatttttgtgtttgtccacgtggatatgtaacctcaacagatggctctcgatgcatcgatcagagaacaggcatgtgtttctcgggcctggtgaatggccgctgtgcacaagagctcccggggagaatgacgaaaatgcagtgctgctgtgagcctggccgctgctggggcatcggaaccattcctgaagcctgtcctgtcagaggttctgaggaatatcgcagactttgcatggatggacttccaatgggaggaattccagggagtgctggttccagacctggaggcactgggggaaatggctttgccccaagtggcaatggcaatggctatggcccaggagggacaggcttcatccccatccctggaggcaatggcttttctcctggcgttgggggagccggtgtgggggccgggggacagggacctatcatcactggactaacaattctgaaccagacaatagatatctgtaagcatcatgctaacctttgtttaaatggacgctgtataccaactgtctcaagctaccgatgtgaatgcaacatgggttataagcaggatgcaaatggagattgtatagatgttgatgaatgcacatcaaatccctgcactaatggagattgtgttaacacacctggttcctattattgtaaatgtcatgctggattccagaggactcctaccaagcaagcatgcattgatattgatgagtgcatccagaatggggttctttgtaaaaacggtcgatgcgtgaacacagatggaagtttccagtgcatttgcaatgccggctttgaattaactacagatggaaaaaactgtgttgatcatgatgaatgtacaactaccaacatgtgtttgaatggaatgtgcatcaatgaagatggcagcttcaagtgcatctgcaaaccaggatttgtcttggctccaaatgggcgttactgtactgatgttgatgaatgccagaccccaggaatctgcatgaatgggcactgcatcaacagtgaagggtccttccgctgtgactgtcccccaggcctggctgtgggcatggatggacgtgtgtgtgttgatactcacatgcgcagtacctgctatggaggaatcaagaaaggagtgtgtgtgcgtcctttccccggtgcagtgaccaagtccgaatgctgctgtgccaatccagactatggttttggagaaccctgccagccatgccctgcaaaaaattcagctgaattccacggcctttgtagtagtggagtaggtatcactgtggatggaagagatatcaatgaatgtgctttggatcctgatatatgtgccaatgggatttgtgaaaacttacgtggtagttaccgttgtaattgcaacagtggctatgaaccagatgcctctggaagaaactgtattgacattgatgaatgtttagtaaacagactgctttgtgataacggattgtgccgaaacacgccaggaagttacagctgtacgtgcccaccagggtatgtgttcaggactgagacagagacctgtgaagatataaatgaatgtgaaagcaacccatgtgtcaatggggcctgcagaaacaaccttggatctttcaattgtgaatgttcgcccggcagcaaactcagctccacaggattgatctgtattgacagcctgaaggggacctgttggctcaacatccaggacagccgctgtgaggtgaatattaatggagccactctgaaatctgaatgctgtgccaccctcggagccgcctgggggagcccctgtgagcggtgtgaactagatacagcttgcccaagagggcttgccaggattaaaggtgttacgtgtgaagatgttaatgagtgtgaggtgttccctggcgtttgtccaaatggacgctgtgtcaacagtaagggatcttttcattgcgagtgccctgaaggccttacgttggatgggactggccgtgtatgtttggatattcgcatggagcagtgttacttgaagtgggatgaagatgaatgcatccaccccgttcctggaaagttccgcatggatgcctgctgctgtgctgtcggggcggcttggggcaccgagtgtgaggagtgccccaaacctggcaccaaggaatacgagacgctgtgcccccgcggggctggctttgctaaccgaggggatgttcttactgggcggccattttacaaagacatcaatgaatgcaaagcatttcctgggatgtgcacttatgggaagtgcagaaatacaatcggaagcttcaaatgccgttgcaatagtggctttgctctagacatggaggaaagaaactgcacggacatcgacgagtgcaggatttctcctgacctctgtggcagtggaatctgcgtcaatacaccgggcagctttgagtgcgagtgcttcgaaggctatgaaagtggcttcatgatgatgaagaactgcatggacattgacgaatgtgaacgtaaccctctcctttgtaggggtggcacctgtgtgaacactgagggcagctttcagtgtgactgcccactgggacacgagctgtcaccatcccgtgaggactgtgtggatattaatgaatgctccctgagtgacaatctctgcagaaatggaaaatgtgtgaacatgattggaacctatcagtgctcttgcaatcctggatatcaggctacgccagaccgccagggctgtacagatattgatgaatgtatgataatgaacggaggctgtgacacccagtgcacaaattcagagggaagctacgaatgcagctgcagtgagggttatgccctgatgccagatgggagatcgtgtgcagacattgatgaatgtgaaaacaatcctgatatctgtgatggcggccagtgtaccaacattcctggagagtatcgctgcctctgctatgatggcttcatggcttccatggacatgaaaacatgcattgatgtcaatgaatgtgacctaaattcaaatatctgcatgtttggggaatgtgagaacacaaagggatccttcatttgccactgtcagctgggttactcagtgaagaaggggaccacaggatgtacagatgtggatgagtgtgaaattggtgctcataactgcgacatgcatgcctcatgtctgaatatcccaggaagcttcaagtgtagctgcagagaaggctggattggaaacggcatcaagtgtattgatctggacgaatgttctaatggaacccaccagtgtagcatcaatgctcagtgtgtaaataccccgggctcataccgctgtgcctgctccgaaggtttcactggtgatggctttacctgctcagatgttgatgagtgtgcagaaaacataaacctctgtgagaacggacagtgccttaatgtcccgggtgcatatcgctgcgagtgtgagatgggcttcactccagcctcagacagcagatcctgccaagatattgatgaatgctccttccaaaacatttgtgtctttggaacatgtaataacctgcctggaatgtttcattgcatctgcgatgatggttatgaattggacagaacaggagggaactgtacagatattgatgagtgtgcagatcctataaactgtgtcaatggcctatgtgtcaacacgcctggtcgctatgagtgtaactgcccacccgattttcagttgaacccaactggtgtgggttgtgttgacaaccgtgtgggcaactgctacctgaagtttggacctcgaggagatgggagtctgtcttgcaacaccgagatcggggtgggcgtcagtcgctcttcatgctgctgctctctgggaaaggcctggggaaacccctgtgagacatgcccccctgtcaatagcactgaatattacaccctgtgtcccggaggtgaaggcttcagacctaaccccatcacaatcattttagaagacattgacgaatgccaggagttaccaggtctctgccagggtggaaactgcatcaacacttttgggagcttccagtgtgagtgcccacaaggctactacctcagcgaggatacccgcatctgtgaagatattgatgagtgttttgcacatcctggtgtgtgtgggcctgggacctgctataacaccctgggaaattacacctgcatttgcccacctgagtacatgcaggtcaatggaggccacaactgcatggacatgagaaaaagcttttgctaccgaagctataatggaaccacttgtgagaatgagttgcctttcaatgtgacaaaaaggatgtgctgctgcacatataatgtgggcaaagcctggaacaaaccttgtgaaccatgcccaactccaggaacagctgactttaaaaccatatgtggaaatattcctggattcacctttgacattcacacaggaaaagctgttgacattgatgaatgtaaagagattccaggcatttgtgcaaatggtgtgtgcattaaccagattggcagtttccgctgtgaatgccctacaggattcagttacaatgacctgctgttggtttgtgaagatatagatgagtgcagcaatggtgataatctctgccagcggaatgcagactgcatcaatagtcctggtagttaccgctgtgaatgtgccgcgggtttcaaactttcacccaatggggcctgtgtagatcgcaatgaatgtttagaaattcctaacgtttgcagtcatggcttgtgtgttgatctgcaaggaagttaccagtgcatctgccacaatggctttaaggcttctcaggaccagaccatgtgcatggatgttgatgagtgcgagcggcatccatgtggaaatggaacttgtaaaaacaccgttggatcctataactgtctgtgctacccagggtttgaactcactcataataatgattgcctggacatagatgagtgcagttccttttttggtcaggtgtgcagaaatggacgttgttttaatgaaattggttctttcaagtgtctatgtaacgaaggttatgaacttaccccagatggcaaaaactgtatagacactaatgagtgtgtcgcccttcccggctcttgctctcctggtacctgtcagaatttggagggatccttcagatgcatctgtcccccagggtatgaagtaaaaagcgagaactgcattgatataaatgaatgtgatgaagatcccaacatttgtctttttggttcctgtactaatactccagggggcttccagtgcctctgcccccctggctttgtactatctgataatggacggagatgctttgatactcgccagagcttctgcttcacaaattttgaaaatggaaagtgttctgtacccaaagctttcaacaccacaaaagcaaaatgctgctgtagtaagatgccaggagagggctggggggacccctgtgagctgtgccccaaagacgatgaagttgcatttcaggatttgtgtccatatggccatggaactgtccctagtcttcatgatacacgtgaagatgtcaatgagtgtcttgagagcccaggcatttgttcaaatggtcaatgtatcaacaccgacggatcttttcgctgtgaatgtccaatgggctacaaccttgactacactggagtacgctgtgtggatactgatgagtgttcaatcggcaatccgtgtggaaatggtacatgcaccaatgttattgggagttttgaatgcaattgcaatgaaggctttgagccagggcccatgatgaattgtgaagatatcaacgaatgtgcccagaacccactgctgtgtgctttccgctgcatgaacacttttgggtcctatgaatgcacgtgcccgattggctatgccctcagggaagatcaaaagatgtgcaaagatctggatgaatgtgctgaagggttacacgactgtgaatctaggggcatgatgtgtaagaatctaatcggcaccttcatgtgcatctgccctcctggaatggcccgaaggcccgatggagaaggctgtgtagatgaaaatgaatgcaggaccaagccaggaatctgtgaaaatggacgttgtgttaacattattggaagctatagatgtgagtgtaatgaaggattccagtcaagttcttcaggcactgaatgccttgacaatcgacagggtctctgctttgcagaggtactgcagacaatatgtcaaatggcatccagtagtcgcaatctcgtcactaagtcagaatgctgctgtgatggtgggcgaggctggggccaccagtgcgagctttgcccacttcctggaactgcccagtacaaaaagatatgtcctcatggcccaggatatacaactgatggaagagatattgatgaatgtaaggtaatgccaaacctctgcaccaatggtcagtgcatcaataccatgggctcattccgatgcttctgcaaggttggctacaccacagacatcagtggaacctcttgtatagaccttgatgaatgctcccagtccccgaaaccatgcaactacatctgcaagaacactgaggggagttatcagtgttcatgtccgagggggtatgtcctgcaagaggatggaaagacatgcaaagaccttgatgaatgtcaaacaaagcagcataactgccagttcctctgtgtcaacaccctgggggggtttacctgtaaatgtccacctggtttcacacagcatcacactgcttgtatcgacaacaacgaatgtgggtctcaaccttcgctttgtggagcaaagggaatctgtcaaaacactccaggcagtttcagctgtgaatgccaaagagggttctctcttgatgccaccggactgaactgtgaagatgttgatgaatgtgatgggaaccacaggtgccaacacggctgccagaacatcctgggtggctacagatgtggctgcccccaaggctacatccagcactaccagtggaatcagtgtgtcgatgagaatgaatgctccaatcccaatgcctgtggctctgcttcctgctacaacaccctggggagttacaagtgcgcctgcccctcggggttctccttcgaccagttctccagtgcctgccacgacgtgaatgagtgctcgtcctccaagaacccctgcaattacggctgctctaacacggaggggggctacctctgtggctgcccccctgggtattacagagtgggacaaggccactgtgtctcaggaatgggatttaacaaggggcagtacctgtcactggatacagaggtcgatgaggaaaatgctctgtccccagaagcatgctacgagtgcaaaatcaacggctattctaagaaagacagcaggcagaagagaagtattcatgaacctgatcccactgctgttgaacagatcagcctagagagtgtcgacatggacagccccgtcaacatgaagttcaacctctcccacctcggctctaaggagcacatcctggaactaaggcccgccatccagcccctcaacaaccacatccgttatgtcatctctcaagggaacgatgacagcgtcttccgcatccaccaaaggaatgggctcagctacttgcacacggccaagaagaagctcatgcccggcacatacacactggaaatcactagcatccctctctacaagaagaaggagcttaagaaactggaagagagcaatgaggatgactacctcctaggggagcttggggaggctctcagaatgaggctgcagattcagctctattaacccttcacagacttgggcccaggctcaaatcctagcacagccagtctgcagaagcatttgaaaagtcaaggactaattttaaagaggaaaaataataataactcttgtttctttcctccctgtcttagactttgaatgttgaccctcacagggagggataatttagactctggtatggccaaagatttgagcacaaaggcaaccgtggttactgtattttttatataacttcattttaaaatatattaaaagaaacctaaatgttcaagatatcagcatatggcactaaatgcacaaaaataatgtgagctttttttttttttcctgttagcagtctgtaacactttgggtattttgctatagttgctaattaaaaaaatatagatgtttatttatttttaatgcagtaatatatggagaaatgaacaaactatgtaaacaaaaagggaaactcacttgtttttctttagatttataaatttgagctattttttttagaggtgctttttaaaaatccaatagatacaagagatgtttcctttggttttctgccagtcatccagctgatacacacctgatgattttaaagaaagccacacagagctgaatgggcagtgtaatcaataatttaaaaaacatgaatgtcattagatcctttataacgtagatcgaagccaaagcagctcatttgtgacaacatttcatatcaccagacacaccaggcaacagaagttgaagcacaaccactgtagcaaaataccttgactgcttgtgagaccattagcattgcaggccaaaccgtactgtatttccttctcataacctcaaggaaccatatgtgctacccacaacacctcattcttacccagggtgcgctgcgtcctcatggtactgtaggcagctgaagaaccgccgttcccttgaaagggaacacctggcattctgtggtgtttcgtgctgtcttaaataatggtgcatttattatgttcaagttatttcaggattgccatatgtgcaaacaaatcatgcaatgcagccaaggaatatatgttgttgttgttgttttaaacccattttttttttagaattttcattaatactgtagttatacaccatatgcctcattttatcatagcctattgtgtatgaaagatgtttgtacaatgaattgatgtttagtttgctttagtcatttaaaaagatattgtaccaggatgtgctattaagagcacgtatccattattcttctcaacccaagaacctgtttcctggaccagtgaccaaacctcatatgtgaaatggccaaagcacatgcaggctcctggttgttcctctcaaacctgtgctgaccaaagattagtaaccagttatacccagtattttgaggttttattgtttttttaataactaaaaagaaaaaaggaacagtgtaaatttgtaatcaagagtttgtgaggaaaaacttatggtttttggttttgtttgtttttgtaggtctgtgtatcaaatatgacacttttcttgcaataaagcttattttggggta

SEQ ID NO: 10754 - DNA, 11132 bp, Homo sapiens
  source 1..11132: mol_type = unassigned DNA
ggcagttagggcaactggaaggctgggagctgaaatcacctgaagtctcattcactcacatgtctgatggttgatattgtctatcagattcttttttgtctccttctctgcaagaggctggcaccagatcacctcctgagtagagcagacattccaaaggatgtcctgccaacaataatggaaagctggatacaactgaatatgtaaaatgatgttaatgaagaattgaagagcactgtatctagttttctgctctccccttattttgaatcaaacccaggcatcctatcatttcatctataaagactttagttcctaaaagtggaattgctggatcaaagggtaaaggcataggcaattctagagcatttagatttaatgtgatggacaggaatgaaccatgaagccacgagtgtttgatttttaaattgtgatattccactaaatgagaaatgaccaggacttcacagagatttcatgaaaggagggccacaaaggaagaacccagagcaggccggtgagaggcactctaagagctttccaatatccgtcttcggagcgcacgggaatccgccgagctctgcgtgcaggcccttttttcttttgaggttcacattttttgaaattttacgccagggcttttgtaatttcctcccccgcccgctgacggtcctggagtcgctcggggctttaggccggttatgcaacgtgtaccgctcggggctgccggctgcacctccgccgcgcctcgccgctcactgcgctagacccggcgccccgcgtctcgcttcgcgggcagtcagggggccggcgctctgtcgaggtctccagctagagcagggagcccgagcccgagggagtccccggagccgacgaagggcttattagaccctgactcttttctgaggcgcgcagattttgtctttgatcactccctctccgcgggtctacggccgcgcgctttcggcgccggcgatggggagaagacggaggctgtgtctccagctctacttcctgtggctgggctgtgtggtgctctgggcgcagggcacggccggccagcctcagcctcctccgcccaagccgccccggccccagccgccgccgcaacaggttcggtccgctacagcaggctctgaaggcgggtttctagcgcccgagtatcgcgaggagggtgccgcagtggccagccgcgtccgccggcgaggacagcaggacgtgctccgagggcccaacgtgtgcggctccagattccactcctactgctgccctggatggaagacgctccctggaggaaaccagtgcattgtcccgatttgtagaaatagttgtggagatggattttgttcccgtcctaacatgtgtacttgttccagtgggcaaatatcatcaacctgtggatcaaaatcaattcagcagtgcagtgtgagatgcatgaatggtgggacctgtgcagatgaccactgccagtgccagaaaggatatattggaacttattgtggacaacctgtctgtgaaaatggatgtcagaatggtggacgttgcatcggacccaaccgctgtgcttgtgtttatgggttcactggtccacagtgtgaaagagattacaggacaggcccgtgtttcactcaggtcaacaaccagatgtgccaagggcagctgacaggcattgtctgcacgaagactctgtgctgtgccaccattggacgggcgtggggccatccctgtgagatgtgtccagcccagcctcagccctgccgacggggtttcatccccaacatccgcactggagcttgccaagatgttgatgaatgccaggctatcccagggatatgccaaggaggaaactgtatcaatacagtgggctcttttgaatgcagatgccctgctggtcacaaacagagtgaaactactcagaaatgtgaagacattgatgagtgcagcatcattcctgggatatgtgaaactggtgaatgttccaacaccgtgggaagctatttttgtgtttgtccacgtggatatgtaacctcaacagatggctctcgatgcatcgatcagagaacaggcatgtgtttctcgggcctggtgaatggccgctgtgcacaagagctcccggggagaatgacgaaaatgcagtgctgctgtgagcctggccgctgctggggcatcggaaccattcctgaagcctgtcctgtcagaggttctgaggaatatcgcagactttgcatggatggacttccaatgggaggaattccagggagtgctggttccagacctggaggcactgggggaaatggctttgccccaagtggcaatggcaatggctatggcccaggagggacaggcttcatccccatccctggaggcaatggcttttctcctggcgttgggggagccggtgtgggggccgggggacagggacctatcatcactggactaacaattctgaaccagacaatagatatctgtaagcatcatgctaacctttgtttaaatggacgctgtataccaactgtctcaagctaccgatgtgaatgcaacatgggttataagcaggatgcaaatggagattgtatagatgttgatgaatgcacatcaaatccctgcactaatggagattgtgttaacacacctggttcctattattgtaaatgtcatgctggattccagaggactcctaccaagcaagcatgcattgatattgatgagtgcatccagaatggggttctttgtaaaaacggtcgatgcgtgaacacagatggaagtttccagtgcatttgcaatgccggctttgaattaactacagatggaaaaaactgtgttgatcatgatgaatgtacaactaccaacatgtgtttgaatggaatgtgcatcaatgaagatggcagcttcaagtgcatctgcaaaccaggatttgtcttggctccaaatgggcgttactgtactgatgttgatgaatgccagaccccaggaatctgcatgaatgggcactgcatcaacagtgaagggtccttccgctgtgactgtcccccaggcctggctgtgggcatggatggacgtgtgtgtgttgatactcacatgcgcagtacctgctatggaggaatcaagaaaggagtgtgtgtgcgtcctttccccggtgcagtgaccaagtccgaatgctgctgtgccaatccagactatggttttggagaaccctgccagccatgccctgcaaaaaattcagctgaattccacggcctttgtagtagtggagtaggtatcactgtggatggaagagatatcaatgaatgtgctttggatcctgatatatgtgccaatgggatttgtgaaaacttacgtggtagttaccgttgtaattgcaacagtggctatgaaccagatgcctctggaagaaactgtattgacattgatgaatgtttagtaaacagactgctttgtgataacggattgtgccgaaacacgccaggaagttacagctgtacgtgcccaccagggtatgtgttcaggactgagacagagacctgtgaagatataaatgaatgtgaaagcaacccatgtgtcaatggggcctgcagaaacaaccttggatctttcaattgtgaatgttcgcccggcagcaaactcagctccacaggattgatctgtattgacagcctgaaggggacctgttggctcaacatccaggacagccgctgtgaggtgaatattaatggagccactctgaaatctgaatgctgtgccaccctcggagccgcctgggggagcccctgtgagcggtgtgaactagatacagcttgcccaagagggcttgccaggattaaaggtgttacgtgtgaagatgttaatgagtgtgaggtgttccctggcgtttgtccaaatggacgctgtgtcaacagtaagggatcttttcattgcgagtgccctgaaggccttacgttggatgggactggccgtgtatgtttggatattcgcatggagcagtgttacttgaagtgggatgaagatgaatgcatccaccccgttcctggaaagttccgcatggatgcctgctgctgtgctgtcggggcggcttggggcaccgagtgtgaggagtgccccaaacctggcaccaaggaatacgagacgctgtgcccccgcggggctggctttgctaaccgaggggatgttcttactgggcggccattttacaaagacatcaatgaatgcaaagcatttcctgggatgtgcacttatgggaagtgcagaaatacaatcggaagcttcaaatgccgttgcaatagtggctttgctctagacatggaggaaagaaactgcacggacatcgacgagtgcaggatttctcctgacctctgtggcagtggaatctgcgtcaatacaccgggcagctttgagtgcgagtgcttcgaaggctatgaaagtggcttcatgatgatgaagaactgcatggacattgacgaatgtgaacgtaaccctctcctttgtaggggtggcacctgtgtgaacactgagggcagctttcagtgtgactgcccactgggacacgagctgtcaccatcccgtgaggactgtgtggatattaatgaatgctccctgagtgacaatctctgcagaaatggaaaatgtgtgaacatgattggaacctatcagtgctcttgcaatcctggatatcaggctacgccagaccgccagggctgtacagatattgatgaatgtatgataatgaacggaggctgtgacacccagtgcacaaattcagagggaagctacgaatgcagctgcagtgagggttatgccctgatgccagatgggagatcgtgtgcagacattgatgaatgtgaaaacaatcctgatatctgtgatggcggccagtgtaccaacattcctggagagtatcgctgcctctgctatgatggcttcatggcttccatggacatgaaaacatgcattgatgtcaatgaatgtgacctaaattcaaatatctgcatgtttggggaatgtgagaacacaaagggatccttcatttgccactgtcagctgggttactcagtgaagaaggggaccacaggatgtacagatgtggatgagtgtgaaattggtgctcataactgcgacatgcatgcctcatgtctgaatatcccaggaagcttcaagtgtagctgcagagaaggctggattggaaacggcatcaagtgtattgatctggacgaatgttctaatggaacccaccagtgtagcatcaatgctcagtgtgtaaataccccgggctcataccgctgtgcctgctccgaaggtttcactggtgatggctttacctgctcagatgttgatgagtgtgcagaaaacataaacctctgtgagaacggacagtgccttaatgtcccgggtgcatatcgctgcgagtgtgagatgggcttcactccagcctcagacagcagatcctgccaagatattgatgaatgctccttccaaaacatttgtgtctttggaacatgtaataacctgcctggaatgtttcattgcatctgcgatgatggttatgaattggacagaacaggagggaactgtacagatattgatgagtgtgcagatcctataaactgtgtcaatggcctatgtgtcaacacgcctggtcgctatgagtgtaactgcccacccgattttcagttgaacccaactggtgtgggttgtgttgacaaccgtgtgggcaactgctacctgaagtttggacctcgaggagatgggagtctgtcttgcaacaccgagatcggggtgggcgtcagtcgctcttcatgctgctgctctctgggaaaggcctggggaaacccctgtgagacatgcccccctgtcaatagcactgaatattacaccctgtgtcccggaggtgaaggcttcagacctaaccccatcacaatcattttagaagacattgacgaatgccaggagttaccaggtctctgccagggtggaaactgcatcaacacttttgggagcttccagtgtgagtgcccacaaggctactacctcagcgaggatacccgcatctgtgaagatattgatgagtgttttgcacatcctggtgtgtgtgggcctgggacctgctataacaccctgggaaattacacctgcatttgcccacctgagtacatgcaggtcaatggaggccacaactgcatggacatgagaaaaagcttttgctaccgaagctataatggaaccacttgtgagaatgagttgcctttcaatgtgacaaaaaggatgtgctgctgcacatataatgtgggcaaagcctggaacaaaccttgtgaaccatgcccaactccaggaacagctgactttaaaaccatatgtggaaatattcctggattcacctttgacattcacacaggaaaagctgttgacattgatgaatgtaaagagattccaggcatttgtgcaaatggtgtgtgcattaaccagattggcagtttccgctgtgaatgccctacaggattcagttacaatgacctgctgttggtttgtgaagatatagatgagtgcagcaatggtgataatctctgccagcggaatgcagactgcatcaatagtcctggtagttaccgctgtgaatgtgccgcgggtttcaaactttcacccaatggggcctgtgtagatcgcaatgaatgtttagaaattcctaacgtttgcagtcatggcttgtgtgttgatctgcaaggaagttaccagtgcatctgccacaatggctttaaggcttctcaggaccagaccatgtgcatggatgttgatgagtgcgagcggcatccatgtggaaatggaacttgtaaaaacaccgttggatcctataactgtctgtgctacccagggtttgaactcactcataataatgattgcctggacatagatgagtgcagttccttttttggtcaggtgtgcagaaatggacgttgttttaatgaaattggttctttcaagtgtctatgtaacgaaggttatgaacttaccccagatggcaaaaactgtatagacactaatgagtgtgtcgcccttcccggctcttgctctcctggtacctgtcagaatttggagggatccttcagatgcatctgtcccccagggtatgaagtaaaaagcgagaactgcattgatataaatgaatgtgatgaagatcccaacatttgtctttttggttcctgtactaatactccagggggcttccagtgcctctgcccccctggctttgtactatctgataatggacggagatgctttgatactcgccagagcttctgcttcacaaattttgaaaatggaaagtgttctgtacccaaagctttcaacaccacaaaagcaaaatgctgctgtagtaagatgccaggagagggctggggggacccctgtgagctgtgccccaaagacgatgaagttgcatttcaggatttgtgtccatatggccatggaactgtccctagtcttcatgatacacgtgaagatgtcaatgagtgtcttgagagcccaggcatttgttcaaatggtcaatgtatcaacaccgacggatcttttcgctgtgaatgtccaatgggctacaaccttgactacactggagtacgctgtgtggatactgatgagtgttcaatcggcaatccgtgtggaaatggtacatgcaccaatgttattgggagttttgaatgcaattgcaatgaaggctttgagccagggcccatgatgaattgtgaagatatcaacgaatgtgcccagaacccactgctgtgtgctttccgctgcatgaacacttttgggtcctatgaatgcacgtgcccgattggctatgccctcagggaagatcaaaagatgtgcaaagatctggatgaatgtgctgaagggttacacgactgtgaatctaggggcatgatgtgtaagaatctaatcggcaccttcatgtgcatctgccctcctggaatggcccgaaggcccgatggagaaggctgtgtagatgaaaatgaatgcaggaccaagccaggaatctgtgaaaatggacgttgtgttaacattattggaagctatagatgtgagtgtaatgaaggattccagtcaagttcttcaggcactgaatgccttgacaatcgacagggtctctgctttgcagaggtactgcagacaatatgtcaaatggcatccagtagtcgcaatctcgtcactaagtcagaatgctgctgtgatggtgggcgaggctggggccaccagtgcgagctttgcccacttcctggaactgcccagtacaaaaagatatgtcctcatggcccaggatatacaactgatggaagagatattgatgaatgtaaggtaatgccaaacctctgcaccaatggtcagtgcatcaataccatgggctcattccgatgcttctgcaaggttggctacaccacagacatcagtggaacctcttgtatagaccttgatgaatgctcccagtccccgaaaccatgcaactacatctgcaagaacactgaggggagttatcagtgttcatgtccgagggggtatgtcctgcaagaggatggaaagacatgcaaagaccttgatgaatgtcaaacaaagcagcataactgccagttcctctgtgtcaacaccctgggggggtttacctgtaaatgtccacctggtttcacacagcatcacactgcttgtatcgacaacaacgaatgtgggtctcaaccttcgctttgtggagcaaagggaatctgtcaaaacactccaggcagtttcagctgtgaatgccaaagagggttctctcttgatgccaccggactgaactgtgaagatgttgatgaatgtgatgggaaccacaggtgccaacacggctgccagaacatcctgggtggctacagatgtggctgcccccaaggctacatccagcactaccagtggaatcagtgtgtcgatgagaatgaatgctccaatcccaatgcctgtggctctgcttcctgctacaacaccctggggagttacaagtgcgcctgcccctcggggttctccttcgaccagttctccagtgcctgccacgacgtgaatgagtgctcgtcctccaagaacccctgcaattacggctgctctaacacggaggggggctacctctgtggctgcccccctgggtattacagagtgggacaaggccactgtgtctcaggaatgggatttaacaaggggcagtacctgtcactggatacagaggtcgatgaggaaaatgctctgtccccagaagcatgctacgagtgcaaaatcaacggctattctaagaaagacagcaggcagaagagaagtattcatgaacctgatcccactgctgttgaacagatcagcctagagagtgtcgacatggacagccccgtcaacatgaagttcaacctctcccacctcggctctaaggagcacatcctggaactaaggcccgccatccagcccctcaacaaccacatccgttatgtcatctctcaagggaacgatgacagcgtcttccgcatccaccaaaggaatgggctcagctacttgcacacggccaagaagaagctcatgcccggcacatacacactggaaatcactagcatccctctctacaagaagaaggagcttaagaaactggaagagagcaatgaggatgactacctcctaggggagcttggggaggctctcagaatgaggctgcagattcagctctattaacccttcacagacttgggcccaggctcaaatcctagcacagccagtctgcagaagcatttgaaaagtcaaggactaattttaaagaggaaaaataataataactcttgtttctttcctccctgtcttagactttgaatgttgaccctcacagggagggataatttagactctggtatggccaaagatttgagcacaaaggcaaccgtggttactgtattttttatataacttcattttaaaatatattaaaagaaacctaaatgttcaagatatcagcatatggcactaaatgcacaaaaataatgtgagctttttttttttttcctgttagcagtctgtaacactttgggtattttgctatagttgctaattaaaaaaatatagatgtttatttatttttaatgcagtaatatatggagaaatgaacaaactatgtaaacaaaaagggaaactcacttgtttttctttagatttataaatttgagctattttttttagaggtgctttttaaaaatccaatagatacaagagatgtttcctttggttttctgccagtcatccagctgatacacacctgatgattttaaagaaagccacacagagctgaatgggcagtgtaatcaataatttaaaaaacatgaatgtcattagatcctttataacgtagatcgaagccaaagcagctcatttgtgacaacatttcatatcaccagacacaccaggcaacagaagttgaagcacaaccactgtagcaaaataccttgactgcttgtgagaccattagcattgcaggccaaaccgtactgtatttccttctcataacctcaaggaaccatatgtgctacccacaacacctcattcttacccagggtgcgctgcgtcctcatggtactgtaggcagctgaagaaccgccgttcccttgaaagggaacacctggcattctgtggtgtttcgtgctgtcttaaataatggtgcatttattatgttcaagttatttcaggattgccatatgtgcaaacaaatcatgcaatgcagccaaggaatatatgttgttgttgttgttttaaacccattttttttttagaattttcattaatactgtagttatacaccatatgcctcattttatcatagcctattgtgtatgaaagatgtttgtacaatgaattgatgtttagtttgctttagtcatttaaaaagatattgtaccaggatgtgctattaagagcacgtatccattattcttctcaacccaagaacctgtttcctggaccagtgaccaaacctcatatgtgaaatggccaaagcacatgcaggctcctggttgttcctctcaaacctgtgctgaccaaagattagtaaccagttatacccagtattttgaggttttattgtttttttaataactaaaaagaaa

SEQ ID NO: 10755 - DNA, 1316 bp, Homo sapiens
  source 1..1316: mol_type = unassigned DNA
gcgcgcagcgcgagcggcgggcgttgggctggcggctttcgcgctcccgctcctgctcccgcccgcacacagcggcgcgctcatcctcacacgcccgcccgctcccgggccgccccggcgcggggcacagaggcggggacccggcggacagagcgcgccccgcgcccgcgcccgcgcccaccccgtctcctttgcgctccgcagcggcgcgcctcgcccggcgcccccgccagtcctgccggaagatggtcaacgaccggtggaagaccatgggcggcgctgcccaacttgaggaccggccgcgcgacaagccgcagcggccgagctgcggctacgtgctgtgcaccgtgctgctggccctggctgtgctgctggctgtagctgtcaccggtgccgtgctcttcctgaaccacgcccacgcgccgggcacggcgcccccacctgtcgtcagcactggggctgccagcgccaacagcgccctggtcactgtggaaagggcggacagctcgcacctcagcatcctcattgacccgcgctgccccgacctcaccgacagcttcgcacgcctggagagcgcccaggcctcggtgctgcaggcgctgacagagcaccaggcccagccacggctggtgggcgaccaggagcaggagctgctggacacgctggccgaccagctgccccggctgctggcccgagcctcagagctgcagacggagtgcatggggctgcggaaggggcatggcacgctgggccagggcctcagcgccctgcagagtgagcagggccgcctcatccagcttctctctgagagccagggccacatggctcacctggtgaactccgtcagcgacatcctggatgccctgcagagggaccgggggctgggccggccccgcaacaaggccgaccttcagagagcgcctgcccggggaacccggccccggggctgtgccactggctcccggccccgagactgtctggacgtcctcctaagcggacagcaggacgatggcgtctactctgtctttcccacccactacccggccggcttccaggtgtactgtgacatgcgcacggacggcggcggctggacggtgtttcagcgccgggaggacggctccgtgaacttcttccggggctgggatgcgtaccgagacggctttggcaggctcaccggggagcactggctaggaccgctagactggtgcaccttgtccttggccctgctggtccctgtcgccccatccccgaccccacctcactctttcgtgaatgttctccacccacctgtgcctggcggacccactctccagtag

SEQ ID NO: 10756 - DNA, 3104 bp, Homo sapiens
  source 1..3104: mol_type = unassigned DNA
tttgaagcttcagacaagaggcaaggcctttcctgtggccactgtcagaagaaagagagaacactgcttgccctggttcccttgggcctgccctctcctgggccagccttctctcctcccttgtggccaggtttgtctcacccactgacatgctgtgtggccctggcggccgagctgcggctacgtgctgtgcaccgtgctgctggccctggctgtgctgctggctgtagctgtcaccggtgccgtgctcttcctgaaccacgcccacgcgccgggcacggcgcccccacctgtcgtcagcactggggctgccagcgccaacagcgccctggtcactgtggaaagggcggacagctcgcacctcagcatcctcattgacccgcgctgccccgacctcaccgacagcttcgcacgcctggagagcgcccaggcctcggtgctgcaggcgctgacagagcaccaggcccagccacggctggtgggcgaccaggagcaggagctgctggacacgctggccgaccagctgccccggctgctggcccgagcctcagagctgcagacggagtgcatggggctgcggaaggggcatggcacgctgggccagggcctcagcgccctgcagagtgagcagggccgcctcatccagcttctctctgagagccagggccacatggctcacctggtgaactccgtcagcgacatcctggatgccctgcagagggaccgggggctgggccggccccgcaacaaggccgaccttcagagagcgcctgcccggggaacccggccccggggctgtgccactggctcccggccccgagactgtctggacgtcctcctaagcggacagcaggacgatggcgtctactctgtctttcccacccactacccggccggcttccaggtgtactgtgacatgcgcacggacggcggcggctggacggtgtttcagcgccgggaggacggctccgtgaacttcttccggggctgggatgcgtaccgagacggctttggcaggctcaccggggagcactggctagggctcaagaggatccacgccctgaccacacaggctgcctacgagctgcacgtggacctggaggactttgagaatggcacggcctatgcccgctacgggagcttcggcgtgggcttgttctccgtggaccctgaggaagacgggtacccgctcaccgtggctgactattccggcactgcaggcgactccctcctgaagcacagcggcatgaggttcaccaccaaggaccgtgacagcgaccattcagagaacaactgtgccgccttctaccgcggtgcctggtggtaccgcaactgccacacgtccaacctcaatgggcagtacctgcgcggtgcgcacgcctcctatgccgacggcgtggagtggtcctcctggaccggctggcagtactcactcaagttctctgagatgaagatccggccggtccgggaggaccgctagactggtgcaccttgtccttggccctgctggtccctgtcgccccatccccgaccccacctcactctttcgtgaatgttctccacccacctgtgcctggcggacccactctccagtagggaggggccgggccatccctgacacgaagctccctgggccggtgaagtcacacatcgccttctcgccgtccccaccccctccatttggcagctcactgatctcttgcctctgctgatgggggctggcaaacttgacgaccccaactcctgcctgcccccactgtgactccggtgctgtttgccgtcccctggccaggatggtggagtctgccccaggcaccctctgccctgcccggccaaatacccggcattatggggacagagagcagggggcagacagcacccctggagtcctcctagcagatcgtggggaacgtcaggtctctctgaggtcaggtctgaggccagtatcctccagccctcccaatgccaacccccaccccgtttccctggtgcccagagaacccacctctcccccaagggcctcagcctggctgtgggctgggtggccccatcctaccaggccctgaggtcaggatggggagctgctgcctttggggacccacgctccaaggctgagaccagttccctggaggccacccaccctgtgccccggcaggcctggggtctgcagtcctcttacctgctgtgcccacctgctctctgtctcaaatgaggcccaacccatcccccacccagctcccggccgtcctcctacctggggcagctggggctgccatcccatttctcctgcctctggaaggtgggtggggccctgcaccgtggggctggactgcgctaatgggaagctcttggttttctgggctggggcctaggcagggctgggatgaggcttgtacaacccccaccaccaatttcccagggactccagggtcctgaggcctcccaggagggccttgggggtgatgaccccttccctgaggtggctgtctccatgaggaggccaacccttgccattgaccgtggccacctggacccaggccaggcccggcccggcgagtggtcaagggacagggaccacctcaccgggcaaatggggtcggggggactggggcaccagaccaggcaccacctggacactttcttgttgaatcctcccaacacccagcacgctgtcatccccactccttgtgtgcacacatgcagaggtgagacccgcaggctcccaggaccagcagccacaagggcagggctggagccgggtcctcagctgtctgctcagcagccctggacccgcgtgcgttacgtcaggcccagatgcagggcggcttttccaaggcctcctgatggggggcctccgaaagggctggagtcagccttggggagctgcctagcagcctctcctcgggcaggaggggaggtggcttcctccaaaggacacccgatggcaggtgcctagggggtgtggggttccgttctcccttcccctcccactgaagtttgtgcttaaaaaacaataaatttgacttggcaccactgggggttggtgggagaggccgtgtgacctggctctctgtcccagtgccaccaggtcatccacatgcgca

SEQ ID NO: 10757 - DNA, 3253 bp, Homo sapiens
  source 1..3253: mol_type = unassigned DNA
gcgcagcgcgagcggcgggcgttgggctggcggctttcgcgctcccgctcctgctcccgcccgcacacagcggcgcgctcatcctcacacgcccgcccgctcccgggccgccccggcgcggggcacagaggcggggacccggcggacagagcgcgccccgcgcccgcgcccgcgcccaccccgtctcctttgcgctccgcagcggcgcgcctcgcccggcgcccccgccagtcctgccggaagatggtcaacgaccggtggaagaccatgggcggcgctgcccaacttgaggaccggccgcgcgacaagccgcagcggccgagctgcggctacgtgctgtgcaccgtgctgctggccctggctgtgctgctggctgtagctgtcaccggtgccgtgctcttcctgaaccacgcccacgcgccgggcacggcgcccccacctgtcgtcagcactggggctgccagcgccaacagcgccctggtcactgtggaaagggcggacagctcgcacctcagcatcctcattgacccgcgctgccccgacctcaccgacagcttcgcacgcctggagagcgcccaggcctcggtgctgcaggcgctgacagagcaccaggcccagccacggctggtgggcgaccaggagcaggagctgctggacacgctggccgaccagctgccccggctgctggcccgagcctcagagctgcagacggagtgcatggggctgcggaaggggcatggcacgctgggccagggcctcagcgccctgcagagtgagcagggccgcctcatccagcttctctctgagagccagggccacatggctcacctggtgaactccgtcagcgacatcctggatgccctgcagagggaccgggggctgggccggccccgcaacaaggccgaccttcagagagcgcctgcccggggaacccggccccggggctgtgccactggctcccggccccgagactgtctggacgtcctcctaagcggacagcaggacgatggcgtctactctgtctttcccacccactacccggccggcttccaggtgtactgtgacatgcgcacggacggcggcggctggacggtgtttcagcgccgggaggacggctccgtgaacttcttccggggctgggatgcgtaccgagacggctttggcaggctcaccggggagcactggctagggctcaagaggatccacgccctgaccacacaggctgcctacgagctgcacgtggacctggaggactttgagaatggcacggcctatgcccgctacgggagcttcggcgtgggcttgttctccgtggaccctgaggaagacgggtacccgctcaccgtggctgactattccggcactgcaggcgactccctcctgaagcacagcggcatgaggttcaccaccaaggaccgtgacagcgaccattcagagaacaactgtgccgccttctaccgcggtgcctggtggtaccgcaactgccacacgtccaacctcaatgggcagtacctgcgcggtgcgcacgcctcctatgccgacggcgtggagtggtcctcctggaccggctggcagtactcactcaagttctctgagatgaagatccggccggtccgggaggaccgctagactggtgcaccttgtccttggccctgctggtccctgtcgccccatccccgaccccacctcactctttcgtgaatgttctccacccacctgtgcctggcggacccactctccagtagggaggggccgggccatccctgacacgaagctccctgggccggtgaagtcacacatcgccttctcgccgtccccaccccctccatttggcagctcactgatctcttgcctctgctgatgggggctggcaaacttgacgaccccaactcctgcctgcccccactgtgactccggtgctgtttgccgtcccctggccaggatggtggagtctgccccaggcaccctctgccctgcccggccaaatacccggcattatggggacagagagcagggggcagacagcacccctggagtcctcctagcagatcgtggggaacgtcaggtctctctgaggtcaggtctgaggccagtatcctccagccctcccaatgccaacccccaccccgtttccctggtgcccagagaacccacctctcccccaagggcctcagcctggctgtgggctgggtggccccatcctaccaggccctgaggtcaggatggggagctgctgcctttggggacccacgctccaaggctgagaccagttccctggaggccacccaccctgtgccccggcaggcctggggtctgcagtcctcttacctgctgtgcccacctgctctctgtctcaaatgaggcccaacccatcccccacccagctcccggccgtcctcctacctggggcagctggggctgccatcccatttctcctgcctctggaaggtgggtggggccctgcaccgtggggctggactgcgctaatgggaagctcttggttttctgggctggggcctaggcagggctgggatgaggcttgtacaacccccaccaccaatttcccagggactccagggtcctgaggcctcccaggagggccttgggggtgatgaccccttccctgaggtggctgtctccatgaggaggccaacccttgccattgaccgtggccacctggacccaggccaggcccggcccggcgagtggtcaagggacagggaccacctcaccgggcaaatggggtcggggggactggggcaccagaccaggcaccacctggacactttcttgttgaatcctcccaacacccagcacgctgtcatccccactccttgtgtgcacacatgcagaggtgagacccgcaggctcccaggaccagcagccacaagggcagggctggagccgggtcctcagctgtctgctcagcagccctggacccgcgtgcgttacgtcaggcccagatgcagggcggcttttccaaggcctcctgatggggggcctccgaaagggctggagtcagccttggggagctgcctagcagcctctcctcgggcaggaggggaggtggcttcctccaaaggacacccgatggcaggtgcctagggggtgtggggttccgttctcccttcccctcccactgaagtttgtgcttaaaaaacaataaatttgacttggcaccactgggggttggtgggagaggccgtgtgacctggctctctgtcccagtgccaccaggtcatccacatgcgca

SEQ ID NO: 10758 - DNA, 2440 bp, Homo sapiens
  source 1..2440: mol_type = unassigned DNA
tcaccggtgccgtgctcttcctgaaccacgcccacgcgccgggcacggcgcccccacctgtcgtcagcactggggctgccagcgccaacagcgccctggtcactgtggaaagggcggacagctcgcacctcagcatcctcattgacccgcgctgccccgacctcaccgacagcttcgcacgcctggagagcgcccaggcctcggtgctgcaggcgctgacagagcaccaggcccagccacggctggtgggcgaccaggagcaggagctgctggacacgctggccgaccagctgccccggctgctggcccgagcctcagagctgcagacggagtgcatggggctgcggaaggggcatggcacgctgggccagggcctcagcgccctgcagagtgagcagggccgcctcatccagcttctctctgagagccagggccacatggctcacctggtgaactccgtcagcgacatcctggatgccctgcagagggaccgggggctgggccggccccgcaacaaggccgaccttcagagagcgcctgcccggggaacccggccccggggctgtgccactggctcccggccccgagactgtctggacgtcctcctaagcggacagcaggacgatggcgtctactctgtctttcccacccactacccggccggcttccaggtgtactgtgacatgcgcacggacggcggcggctggacggtgtttcagcgccgggaggacggctccgtgaacttcttccggggctgggatgcgtaccgagacggctttggcaggctcaccggggagcactggctaggaccgctagactggtgcaccttgtccttggccctgctggtccctgtcgccccatccccgaccccacctcactctttcgtgaatgttctccacccacctgtgcctggcggacccactctccagtagggaggggccgggccatccctgacacgaagctccctgggccggtgaagtcacacatcgccttctcgccgtccccaccccctccatttggcagctcactgatctcttgcctctgctgatgggggctggcaaacttgacgaccccaactcctgcctgcccccactgtgactccggtgctgtttgccgtcccctggccaggatggtggagtctgccccaggcaccctctgccctgcccggccaaatacccggcattatggggacagagagcagggggcagacagcacccctggagtcctcctagcagatcgtggggaacgtcaggtctctctgaggtcaggtctgaggccagtatcctccagccctcccaatgccaacccccaccccgtttccctggtgcccagagaacccacctctcccccaagggcctcagcctggctgtgggctgggtggccccatcctaccaggccctgaggtcaggatggggagctgctgcctttggggacccacgctccaaggctgagaccagttccctggaggccacccaccctgtgccccggcaggcctggggtctgcagtcctcttacctgctgtgcccacctgctctctgtctcaaatgaggcccaacccatcccccacccagctcccggccgtcctcctacctggggcagctggggctgccatcccatttctcctgcctctggaaggtgggtggggccctgcaccgtggggctggactgcgctaatgggaagctcttggttttctgggctggggcctaggcagggctgggatgaggcttgtacaacccccaccaccaatttcccagggactccagggtcctgaggcctcccaggagggccttgggggtgatgaccccttccctgaggtggctgtctccatgaggaggccaacccttgccattgaccgtggccacctggacccaggccaggcccggcccggcgagtggtcaagggacagggaccacctcaccgggcaaatggggtcggggggactggggcaccagaccaggcaccacctggacactttcttgttgaatcctcccaacacccagcacgctgtcatccccactccttgtgtgcacacatgcagaggtgagacccgcaggctcccaggaccagcagccacaagggcagggctggagccgggtcctcagctgtctgctcagcagccctggacccgcgtgcgttacgtcaggcccagatgcagggcggcttttccaaggcctcctgatggggggcctccgaaagggctggagtcagccttggggagctgcctagcagcctctcctcgggcaggaggggaggtggcttcctccaaaggacacccgatggcaggtgcctagggggtgtggggttccgttctcccttcccctcccactgaagtttgtgcttaaaaaacaataaatttgacttggcaccactgggggttggtgggagaggccgtgtgacctggctctctgtcccagtgccaccaggtcatccacatgcgca

SEQ ID NO: 10759 - DNA, 3119 bp, Homo sapiens
  source 1..3119: mol_type = unassigned DNA
ttccctaggtcttttcggaggcggagtttagtatccaagtccgcgggtgtgagcgcgcgcgtgtgtcggcgcgcctcgcccggcgcccccgccagtcctgccggaagatggtcaacgaccggtggaagaccatgggcggcgctgcccaacttgaggaccggccgcgcgacaagccgcagcggccgagctgcggctacgtgctgtgcaccgtgctgctggccctggctgtgctgctggctgtagctgtcaccggtgccgtgctcttcctgaaccacgcccacgcgccgggcacggcgcccccacctgtcgtcagcactggggctgccagcgccaacagcgccctggtcactgtggaaagggcggacagctcgcacctcagcatcctcattgacccgcgctgccccgacctcaccgacagcttcgcacgcctggagagcgcccaggcctcggtgctgcaggcgctgacagagcaccaggcccagccacggctggtgggcgaccaggagcaggagctgctggacacgctggccgaccagctgccccggctgctggcccgagcctcagagctgcagacggagtgcatggggctgcggaaggggcatggcacgctgggccagggcctcagcgccctgcagagtgagcagggccgcctcatccagcttctctctgagagccagggccacatggctcacctggtgaactccgtcagcgacatcctggatgccctgcagagggaccgggggctgggccggccccgcaacaaggccgaccttcagagagcgcctgcccggggaacccggccccggggctgtgccactggctcccggccccgagactgtctggacgtcctcctaagcggacagcaggacgatggcgtctactctgtctttcccacccactacccggccggcttccaggtgtactgtgacatgcgcacggacggcggcggctggacggtgtttcagcgccgggaggacggctccgtgaacttcttccggggctgggatgcgtaccgagacggctttggcaggctcaccggggagcactggctagggctcaagaggatccacgccctgaccacacaggctgcctacgagctgcacgtggacctggaggactttgagaatggcacggcctatgcccgctacgggagcttcggcgtgggcttgttctccgtggaccctgaggaagacgggtacccgctcaccgtggctgactattccggcactgcaggcgactccctcctgaagcacagcggcatgaggttcaccaccaaggaccgtgacagcgaccattcagagaacaactgtgccgccttctaccgcggtgcctggtggtaccgcaactgccacacgtccaacctcaatgggcagtacctgcgcggtgcgcacgcctcctatgccgacggcgtggagtggtcctcctggaccggctggcagtactcactcaagttctctgagatgaagatccggccggtccgggaggaccgctagactggtgcaccttgtccttggccctgctggtccctgtcgccccatccccgaccccacctcactctttcgtgaatgttctccacccacctgtgcctggcggacccactctccagtagggaggggccgggccatccctgacacgaagctccctgggccggtgaagtcacacatcgccttctcgccgtccccaccccctccatttggcagctcactgatctcttgcctctgctgatgggggctggcaaacttgacgaccccaactcctgcctgcccccactgtgactccggtgctgtttgccgtcccctggccaggatggtggagtctgccccaggcaccctctgccctgcccggccaaatacccggcattatggggacagagagcagggggcagacagcacccctggagtcctcctagcagatcgtggggaacgtcaggtctctctgaggtcaggtctgaggccagtatcctccagccctcccaatgccaacccccaccccgtttccctggtgcccagagaacccacctctcccccaagggcctcagcctggctgtgggctgggtggccccatcctaccaggccctgaggtcaggatggggagctgctgcctttggggacccacgctccaaggctgagaccagttccctggaggccacccaccctgtgccccggcaggcctggggtctgcagtcctcttacctgctgtgcccacctgctctctgtctcaaatgaggcccaacccatcccccacccagctcccggccgtcctcctacctggggcagctggggctgccatcccatttctcctgcctctggaaggtgggtggggccctgcaccgtggggctggactgcgctaatgggaagctcttggttttctgggctggggcctaggcagggctgggatgaggcttgtacaacccccaccaccaatttcccagggactccagggtcctgaggcctcccaggagggccttgggggtgatgaccccttccctgaggtggctgtctccatgaggaggccaacccttgccattgaccgtggccacctggacccaggccaggcccggcccggcgagtggtcaagggacagggaccacctcaccgggcaaatggggtcggggggactggggcaccagaccaggcaccacctggacactttcttgttgaatcctcccaacacccagcacgctgtcatccccactccttgtgtgcacacatgcagaggtgagacccgcaggctcccaggaccagcagccacaagggcagggctggagccgggtcctcagctgtctgctcagcagccctggacccgcgtgcgttacgtcaggcccagatgcagggcggcttttccaaggcctcctgatggggggcctccgaaagggctggagtcagccttggggagctgcctagcagcctctcctcgggcaggaggggaggtggcttcctccaaaggacacccgatggcaggtgcctagggggtgtggggttccgttctcccttcccctcccactgaagtttgtgcttaaaaaacaataaatttgacttggcaccactgggggttggtgggagaggccgtgtgacctggctctctgtcccagtgccaccaggtcatccacatgcgcaga

SEQ ID NO: 10760 - DNA, 1046 bp, Homo sapiens
  source 1..1046: mol_type = unassigned DNA
ggagccgggccgcccgcggctgtttgctgccctccggccggccgcgttatctgggggccagttcggcctcctttccctaggtcttttcggaggcggagtttagtatccaagtccgcgggtgtgagcgcgcgcgtgtgtcggcgcgcctcgcccggcgcccccgccagtcctgccggaagatggtcaacgaccggtggaagaccatgggcggcgctgcccaacttgaggaccggccgcgcgacaagccgcagcggccgagctgcggctacgtgctgtgcaccgtgctgctggccctggctgtgctgctggctgtagctgtcaccggtgccgtgctcttcctgaaccacgcccacgcgccgggcacggcgcccccacctgtcgtcagcactggggctgccagcgccaacagcgccctggtcactgtggaaagggcggacagctcgcacctcagcatcctcattgacccgcgctgccccgacctcaccgacagcttcgcacgcctggagagcgcccaggcctcggtgctgcaggcgctgacagagcaccaggcccagccacggctggtgggcgaccaggagcaggagctgctggacacgctggccgaccagctgccccggctgctggcccgagcctcagagctgcagacggagtgcatggggctgcggaaggggcatggcacgctgggccagggcctcagcgccctgcagagtgagcagggccgcctcatccagcttctctctgagagccagggccacatggctcacctggtgaactccgtcagcgacatcctggatgccctgcagagggaccgggggctgggccggccccgcaacaaggccgaccttcagagagcgcctgcccggggaacccggccccggggctgtgccactggctcccggccccgagactgtctggacgtcctcctaagcggacagcaggacgatggcgtctactctgtctttcccacccactacccggccggcttccaggtgtactgtgacatgcgcacggacggcggcggctggacggtgtttcagcgccgggag

SEQ ID NO: 10761 - DNA, 3281 bp, Homo sapiens
  source 1..3281: mol_type = unassigned DNA
gcgcgcagcgcgagcggcgggcgttgggctggcggctttcgcgctcccgctcctgctcccgcccgcacacagcggcgcgctcatcctcacacgcccgcccgctcccgggccgccccggcgcggggcacagaggcggggacccggcggacagagcgcgccccgcgcccgcgcccgcgcccaccccgtctcctttgcgctccgcagcggcgcgcctcgcccggcgcccccgccagtcctgccggaagatggtcaacgaccggtggaagaccatgggcggcgctgcccaacttgaggaccggccgcgcgacaagccgcaggcgaggaaactgaggctcagagagcggccgagctgcggctacgtgctgtgcaccgtgctgctggccctggctgtgctgctggctgtagctgtcaccggtgccgtgctcttcctgaaccacgcccacgcgccgggcacggcgcccccacctgtcgtcagcactggggctgccagcgccaacagcgccctggtcactgtggaaagggcggacagctcgcacctcagcatcctcattgacccgcgctgccccgacctcaccgacagcttcgcacgcctggagagcgcccaggcctcggtgctgcaggcgctgacagagcaccaggcccagccacggctggtgggcgaccaggagcaggagctgctggacacgctggccgaccagctgccccggctgctggcccgagcctcagagctgcagacggagtgcatggggctgcggaaggggcatggcacgctgggccagggcctcagcgccctgcagagtgagcagggccgcctcatccagcttctctctgagagccagggccacatggctcacctggtgaactccgtcagcgacatcctggatgccctgcagagggaccgggggctgggccggccccgcaacaaggccgaccttcagagagcgcctgcccggggaacccggccccggggctgtgccactggctcccggccccgagactgtctggacgtcctcctaagcggacagcaggacgatggcgtctactctgtctttcccacccactacccggccggcttccaggtgtactgtgacatgcgcacggacggcggcggctggacggtgtttcagcgccgggaggacggctccgtgaacttcttccggggctgggatgcgtaccgagacggctttggcaggctcaccggggagcactggctagggctcaagaggatccacgccctgaccacacaggctgcctacgagctgcacgtggacctggaggactttgagaatggcacggcctatgcccgctacgggagcttcggcgtgggcttgttctccgtggaccctgaggaagacgggtacccgctcaccgtggctgactattccggcactgcaggcgactccctcctgaagcacagcggcatgaggttcaccaccaaggaccgtgacagcgaccattcagagaacaactgtgccgccttctaccgcggtgcctggtggtaccgcaactgccacacgtccaacctcaatgggcagtacctgcgcggtgcgcacgcctcctatgccgacggcgtggagtggtcctcctggaccggctggcagtactcactcaagttctctgagatgaagatccggccggtccgggaggaccgctagactggtgcaccttgtccttggccctgctggtccctgtcgccccatccccgaccccacctcactctttcgtgaatgttctccacccacctgtgcctggcggacccactctccagtagggaggggccgggccatccctgacacgaagctccctgggccggtgaagtcacacatcgccttctcgccgtccccaccccctccatttggcagctcactgatctcttgcctctgctgatgggggctggcaaacttgacgaccccaactcctgcctgcccccactgtgactccggtgctgtttgccgtcccctggccaggatggtggagtctgccccaggcaccctctgccctgcccggccaaatacccggcattatggggacagagagcagggggcagacagcacccctggagtcctcctagcagatcgtggggaacgtcaggtctctctgaggtcaggtctgaggccagtatcctccagccctcccaatgccaacccccaccccgtttccctggtgcccagagaacccacctctcccccaagggcctcagcctggctgtgggctgggtggccccatcctaccaggccctgaggtcaggatggggagctgctgcctttggggacccacgctccaaggctgagaccagttccctggaggccacccaccctgtgccccggcaggcctggggtctgcagtcctcttacctgctgtgcccacctgctctctgtctcaaatgaggcccaacccatcccccacccagctcccggccgtcctcctacctggggcagctggggctgccatcccatttctcctgcctctggaaggtgggtggggccctgcaccgtggggctggactgcgctaatgggaagctcttggttttctgggctggggcctaggcagggctgggatgaggcttgtacaacccccaccaccaatttcccagggactccagggtcctgaggcctcccaggagggccttgggggtgatgaccccttccctgaggtggctgtctccatgaggaggccaacccttgccattgaccgtggccacctggacccaggccaggcccggcccggcgagtggtcaagggacagggaccacctcaccgggcaaatggggtcggggggactggggcaccagaccaggcaccacctggacactttcttgttgaatcctcccaacacccagcacgctgtcatccccactccttgtgtgcacacatgcagaggtgagacccgcaggctcccaggaccagcagccacaagggcagggctggagccgggtcctcagctgtctgctcagcagccctggacccgcgtgcgttacgtcaggcccagatgcagggcggcttttccaaggcctcctgatggggggcctccgaaagggctggagtcagccttggggagctgcctagcagcctctcctcgggcaggaggggaggtggcttcctccaaaggacacccgatggcaggtgcctagggggtgtggggttccgttctcccttcccctcccactgaagtttgtgcttaaaaaacaataaatttgacttggcaccactgggggttggtgggagaggccgtgtgacctggctctctgtcccagtgccaccaggtcatccacatgcgcaga

SEQ ID NO: 10762 - DNA, 1630 bp, Homo sapiens
  source 1..1630: mol_type = unassigned DNA
gagatgacatattaattcatatttttgtgggtaaaatgttattacccttaatacaaagcaaagtttcagctggacttcgtttttacttaatcttcaatggaacattattgaagttacagtacaaaaattctctgaatgaacataataataagttgtaaaatatatatatctttataaagatatattattggatctttcacaaaaagtcatacaagtggggaaaaaagaaaaatatcagagtattgggatttgtccttgaatcttctcttttagctttctttcagttaaacctgtgtccacatgtttgtttctggattgaagccagaatcaacattgtccctatttctaatcaaataatggagaaataattacaaattcccaatgcagttacaggatcctgggaagcagagtgtctggatggaacctgagctgggtctctgactcacttctgactttaggcaattttttcaagggggaacatggcaaaggtgttcagtttcatccttgttaccaccgctctgacaatgggcagggaaatttcggcgctcgaggactgtgcccaggagcagatgcggctcagagcccaggtgcgcctgcttgagacccgggtcaaacagcaacaggtcaagatcaagcagcttttgcaggagaatgaagtccagttccttgataaaggagatgagaatactgtcattgatcttggaagcaagaggcagtatgcagattgttcagagattttcaatgatgggtataagctcagtggattttacaaaatcaaacctctccagagcccagcagaattttctgtttattgtgacatgtccgatggaggaggatggactgtaattcagagacgatctgatggcagtgaaaactttaacagaggatggaaagactatgaaaatggctttggaaattttgtccaaaaacatggtgaatattggctgggcaataaaaatcttcacttcttgaccactcaagaagactacactttaaaaatcgaccttgcagattttgaaaaaaatagccgttatgcacaatataagaatttcaaagttggagatgaaaagaatttctacgagttgaatattggggaatattctggaacagctggagattcccttgcggggaattttcatcctgaggtgcagtggtgggctagtcaccaaagaatgaaattcagcacgtgggacagagatcatgacaactatgaagggaactgcgcagaagaagatcagtctggctggtggtttaacaggtgtcactctgcaaacctgaatggtgtatactacagcggcccctacacggctaaaacagacaatgggattgtctggtacacctggcatgggtggtggtattctctgaaatctgtggttatgaaaattaggccaaatgattttattccaaatgtaatttaattgctgctgttgggctttcgtttctgcaattcagctttgtttaaagtgatttgaaaaatactcattctgaacatatccatgcgcaatcatgataactgttgtgagtagtgcttttcattcttctcacttgcctttgttacttaatgtgctttcagtacagcagatatgcaatattcaccaaataaatgtagactgtgttaatatttattgaa

SEQ ID NO: 10763 - DNA, 1335 bp, Homo sapiens
  source 1..1335: mol_type = unassigned DNA
aatgctaatttatttcacaggtatgatagtaaccaaaactcaggtaacaaccattagcttttgcaagaagtcaggttgactagcaaggagtctgcttctgctacttggagaagagatttagaattatgtatcttttgttacagatatacagatatacaaatatacagatatacaaataagttttttcaagggggaacatggcaaaggtgttcagtttcatccttgttaccaccgctctgacaatgggcagggaaatttcggcgctcgaggactgtgcccaggagcagatgcggctcagagcccaggtgcgcctgcttgagacccgggtcaaacagcaacaggtcaagatcaagcagcttttgcaggagaatgaagtccagttccttgataaaggagatgagaatactgtcattgatcttggaagcaagaggcagtatgcagattgttcagagattttcaatgatgggtataagctcagtggattttacaaaatcaaacctctccagagcccagcagaattttctgtttattgtgacatgtccgatggaggaggatggactgtaattcagagacgatctgatggcagtgaaaactttaacagaggatggaaagactatgaaaatggctttggaaattttgtccaaaaacatggtgaatattggctgggcaataaaaatcttcacttcttgaccactcaagaagactacactttaaaaatcgaccttgcagattttgaaaaaaatagccgttatgcacaatataagaatttcaaagttggagatgaaaagaatttctacgagttgaatattggggaatattctggaacagctggagattcccttgcggggaattttcatcctgaggtgcagtggtgggctagtcaccaaagaatgaaattcagcacgtgggacagagatcatgacaactatgaagggaactgcgcagaagaagatcagtctggctggtggtttaacaggtgtcactctgcaaacctgaatggtgtatactacagcggcccctacacggctaaaacagacaatgggattgtctggtacacctggcatgggtggtggtattctctgaaatctgtggttatgaaaattaggccaaatgattttattccaaatgtaatttaattgctgctgttgggctttcgtttctgcaattcagctttgtttaaagtgatttgaaaaatactcattctgaacatatccatgcgcaatcatgataactgttgtgagtagtgcttttcattcttctcacttgcctttgttacttaatgtgctttcagtacagcagatatgcaatattcaccaaataaatgtagactgtgtt

SEQ ID NO: 10764 - DNA, 1374 bp, Homo sapiens
  source 1..1374: mol_type = unassigned DNA
aattacaaattcccaatgcagttacaggatcctgggaagcagagtgtctggatggaacctgagctgggtctctgactcacttctgactttagggtgaagatggagggaatctgataaagacatcttataaattcaacagacacaaaagaatttgatctcccataagcaactgtgaaattacaataacagatcctgggaagttctacaattctaattcagttttttcaagggggaacatggcaaaggtgttcagtttcatccttgttaccaccgctctgacaatgggcagggaaatttcggcgctcgaggactgtgcccaggagcagatgcggctcagagcccaggtgcgcctgcttgagacccgggtcaaacagcaacaggtcaagatcaagcagcttttgcaggagaatgaagtccagttccttgataaaggagatgagaatactgtcattgatcttggaagcaagaggcagtatgcagattgttcagagattttcaatgatgggtataagctcagtggattttacaaaatcaaacctctccagagcccagcagaattttctgtttattgtgacatgtccgatggaggaggatggactgtaattcagagacgatctgatggcagtgaaaactttaacagaggatggaaagactatgaaaatggctttggaaattttgtccaaaaacatggtgaatattggctgggcaataaaaatcttcacttcttgaccactcaagaagactacactttaaaaatcgaccttgcagattttgaaaaaaatagccgttatgcacaatataagaatttcaaagttggagatgaaaagaatttctacgagttgaatattggggaatattctggaacagctggagattcccttgcggggaattttcatcctgaggtgcagtggtgggctagtcaccaaagaatgaaattcagcacgtgggacagagatcatgacaactatgaagggaactgcgcagaagaagatcagtctggctggtggtttaacaggtgtcactctgcaaacctgaatggtgtatactacagcggcccctacacggctaaaacagacaatgggattgtctggtacacctggcatgggtggtggtattctctgaaatctgtggttatgaaaattaggccaaatgattttattccaaatgtaatttaattgctgctgttgggctttcgtttctgcaattcagctttgtttaaagtgatttgaaaaatactcattctgaacatatccatgcgcaatcatgataactgttgtgagtagtgcttttcattcttctcacttgcctttgttacttaatgtgctttcagtacagcagatatgcaatattcaccaaataaatgtagactgtgtt

SEQ ID NO: 10765 - DNA, 1462 bp, Homo sapiens
  source 1..1462: mol_type = unassigned DNA
aatgctaatttatttcacaggtatgatagtaaccaaaactcaggtaacaaccattagcttttgcaagaagtcaggttgactagcaaggagtctgcttctgctacttggagaagagatttagaattatgtatcttttgttacagatatacagatatacaaatatacagatatacaaataagggtgaagatggagggaatctgataaagacatcttataaattcaacagacacaaaagaatttgatctcccataagcaactgtgaaattacaataacagatcctgggaagttctacaattctaattcagttttttcaagggggaacatggcaaaggtgttcagtttcatccttgttaccaccgctctgacaatgggcagggaaatttcggcgctcgaggactgtgcccaggagcagatgcggctcagagcccaggtgcgcctgcttgagacccgggtcaaacagcaacaggtcaagatcaagcagcttttgcaggagaatgaagtccagttccttgataaaggagatgagaatactgtcattgatcttggaagcaagaggcagtatgcagattgttcagagattttcaatgatgggtataagctcagtggattttacaaaatcaaacctctccagagcccagcagaattttctgtttattgtgacatgtccgatggaggaggatggactgtaattcagagacgatctgatggcagtgaaaactttaacagaggatggaaagactatgaaaatggctttggaaattttgtccaaaaacatggtgaatattggctgggcaataaaaatcttcacttcttgaccactcaagaagactacactttaaaaatcgaccttgcagattttgaaaaaaatagccgttatgcacaatataagaatttcaaagttggagatgaaaagaatttctacgagttgaatattggggaatattctggaacagctggagattcccttgcggggaattttcatcctgaggtgcagtggtgggctagtcaccaaagaatgaaattcagcacgtgggacagagatcatgacaactatgaagggaactgcgcagaagaagatcagtctggctggtggtttaacaggtgtcactctgcaaacctgaatggtgtatactacagcggcccctacacggctaaaacagacaatgggattgtctggtacacctggcatgggtggtggtattctctgaaatctgtggttatgaaaattaggccaaatgattttattccaaatgtaatttaattgctgctgttgggctttcgtttctgcaattcagctttgtttaaagtgatttgaaaaatactcattctgaacatatccatgcgcaatcatgataactgttgtgagtagtgcttttcattcttctcacttgcctttgttacttaatgtgctttcagtacagcagatatgcaatattcaccaaataaatgtagactgtgtt

SEQ ID NO: 10766 - DNA, 1967 bp, Homo sapiens
  source 1..1967: mol_type = unassigned DNA
gatcaggtctccacagcagcggaacaacacttttctggacagaaagttaatttacatgaaggaaaaacggtctggtggaaggataccagaactaaaacttgggaattaagaaaaattatgacgcggggaagggcttttgcttgtgtttcaccaggagacaatcaaacacccatttagatacccaatagacatttgaaattctgcaatgaaccctacaccgaccggacagaagaaagggaagaatccaaagaggaagaagactggtccctccgacctgtcctttcgggagctgagaaagatgacgaagctgagcgtctcagagaaacaacagaagacggagaagacccgccaggctacaccaccgacatgagaacagataaagaagctgactcaaatggcagagggcagcctaaaggagaaacaactggcaattatcccgggtaatatgatcttggctgccttgatggtaattaccgcggcgtaaatcaacaggattacctttcccttaataatcttcaaaatgtccacgtgaaggacaggaagatgtttaatgggaagaccaaacatcgtcagtgctcaagtccagtagataacaaagaacagaaagaaaacaaaactttggtattttactggaatctgagtgaataaatagggaccacaggacaaatggcaaacaactgcttgagttacatcagaaggaaagaagaaatgatgaacccagatttccattacaggatcctgggaagcagagtgtctggatggaacctgagctgggtctctgactcacttctgactttagttttttcaagggggaacatggcaaaggtgttcagtttcatccttgttaccaccgctctgacaatgggcagggaaatttcggcgctcgaggactgtgcccaggagcagatgcggctcagagcccaggtgcgcctgcttgagacccgggtcaaacagcaacaggtcaagatcaagcagcttttgcaggagaatgaagtccagttccttgataaaggagatgagaatactgtcattgatcttggaagcaagaggcagtatgcagattgttcagagattttcaatgatgggtataagctcagtggattttacaaaatcaaacctctccagagcccagcagaattttctgtttattgtgacatgtccgatggaggaggatggactgtaattcagagacgatctgatggcagtgaaaactttaacagaggatggaaagactatgaaaatggctttggaaattttgtccaaaaacatggtgaatattggctgggcaataaaaatcttcacttcttgaccactcaagaagactacactttaaaaatcgaccttgcagattttgaaaaaaatagccgttatgcacaatataagaatttcaaagttggagatgaaaagaatttctacgagttgaatattggggaatattctggaacagctggagattcccttgcggggaattttcatcctgaggtgcagtggtgggctagtcaccaaagaatgaaattcagcacgtgggacagagatcatgacaactatgaagggaactgcgcagaagaagatcagtctggctggtggtttaacaggtgtcactctgcaaacctgaatggtgtatactacagcggcccctacacggctaaaacagacaatgggattgtctggtacacctggcatgggtggtggtattctctgaaatctgtggttatgaaaattaggccaaatgattttattccaaatgtaatttaattgctgctgttgggctttcgtttctgcaattcagctttgtttaaagtgatttgaaaaatactcattctgaacatatccatgcgcaatcatgataactgttgtgagtagtgcttttcattcttctcacttgcctttgttacttaatgtgctttcagtacagcagatatgcaatattcaccaaataaatgtagactgtgttaatatttattgaa

SEQ ID NO: 10767 - DNA, 1247 bp, Homo sapiens
  source 1..1247: mol_type = unassigned DNA
aattacaaattcccaatgcagttacaggatcctgggaagcagagtgtctggatggaacctgagctgggtctctgactcacttctgactttagttttttcaagggggaacatggcaaaggtgttcagtttcatccttgttaccaccgctctgacaatgggcagggaaatttcggcgctcgaggactgtgcccaggagcagatgcggctcagagcccaggtgcgcctgcttgagacccgggtcaaacagcaacaggtcaagatcaagcagcttttgcaggagaatgaagtccagttccttgataaaggagatgagaatactgtcattgatcttggaagcaagaggcagtatgcagattgttcagagattttcaatgatgggtataagctcagtggattttacaaaatcaaacctctccagagcccagcagaattttctgtttattgtgacatgtccgatggaggaggatggactgtaattcagagacgatctgatggcagtgaaaactttaacagaggatggaaagactatgaaaatggctttggaaattttgtccaaaaacatggtgaatattggctgggcaataaaaatcttcacttcttgaccactcaagaagactacactttaaaaatcgaccttgcagattttgaaaaaaatagccgttatgcacaatataagaatttcaaagttggagatgaaaagaatttctacgagttgaatattggggaatattctggaacagctggagattcccttgcggggaattttcatcctgaggtgcagtggtgggctagtcaccaaagaatgaaattcagcacgtgggacagagatcatgacaactatgaagggaactgcgcagaagaagatcagtctggctggtggtttaacaggtgtcactctgcaaacctgaatggtgtatactacagcggcccctacacggctaaaacagacaatgggattgtctggtacacctggcatgggtggtggtattctctgaaatctgtggttatgaaaattaggccaaatgattttattccaaatgtaatttaattgctgctgttgggctttcgtttctgcaattcagctttgtttaaagtgatttgaaaaatactcattctgaacatatccatgcgcaatcatgataactgttgtgagtagtgcttttcattcttctcacttgcctttgttacttaatgtgctttcagtacagcagatatgcaatattcaccaaataaatgtagactgtgtt

SEQ ID NO: 10768 - DNA, 1093 bp, Homo sapiens
  source 1..1093: mol_type = unassigned DNA
agggtgaagatggagggaatctgataaagacatcttataaattcaacagacacaaaagaatttgatctcccataagcaactgtgaaattacaataacagatcctgggaagttctacaattctaattcagttttttcaagggggaacatggcaaaggtgttcagtttcatccttgttaccaccgctctgacaatgggcagggaaatttcggcgctcgaggactgtgcccaggagcagatgcggctcagagcccaggtgcgcctgcttgagacccgggtcaaacagcaacaggtcaagatcaagcagcttttgcaggagaatgaagtccagttccttgataaaggagatgagaatactgtcattgatcttggaagcaagaggcagtatgcagattgttcagagattttcaatgatgggtataagctcagtggattttacaaaatcaaacctctccagagcccagcagaattttctgtttattgtgacatgtccgatggaggaggatggactgtaattcagagacgatctgatggcagtgaaaactttaacagaggatggaaagactatgaaaatggctttggaaattttgtccaaaaacatggtgaatattggctgggcaataaaaatcttcacttcttgaccactcaagaagactacactttaaaaatcgaccttgcagattttgaaaaaaatagccgttatgcacaatataagaatttcaaagttggagatgaaaagaatttctacgagttgaatattggggaatattctggaacagctggagattcccttgcggggaattttcatcctgaggtgcagtggtgggctagtcaccaaagaatgaaattcagcacgtgggacagagatcatgacaactatgaagggaactgcgcagaagaagatcagtctggctggtggtttaacaggtgtcactctgcaaacctgaatggtgtatactacagcggcccctacacggctaaaacagacaatgggattgtctggtacacctggcatgggtggtggtattctctgaaatctgtggttatgaaaattaggccaaatgattttattccaaatgtaatttaattgctgct

SEQ ID NO: 10769 - DNA, 1713 bp, Homo sapiens
  source 1..1713: mol_type = unassigned DNA
gaaagatgacgaagctgagcgtctcagagaaacaacagaagacggagaagacccgccaggctacaccaccgacatgagaacagataaagaagctgactcaaatggcagagggcagcctaaaggagaaacaactggcaattatcccgggtaatatgatcttggctgccttgatggtaattaccgcggcgtaaatcaacaggattacctttcccttaataatcttcaaaatgtccacgtgaaggacaggaagatgtttaatgggaagaccaaacatcgtcagtgctcaagtccagtagataacaaagaacagaaagaaaacaaaactttggtattttactggaatctgagtgaataaatagggaccacaggacaaatggcaaacaactgcttgagttacatcagaaggaaagaagaaatgatgaacccagatttccattacaggatcctgggaagcagagtgtctggatggaacctgagctgggtctctgactcacttctgactttaggcaaatggagggaatctgataaagacatcttataaattcaacagacacaaaagaatttgatctcccataagcaactgtgaaattacaataacagatcctgggaagttctacaattctaattcaggcgctcgaggactgtgcccaggagcagatgcggctcagagcccaggtgcgcctgcttgagacccgggtcaaacagcaacaggtcaagatcaagcagcttttgcaggagaatgaagtccagttccttgataaaggagatgagaatactgtcattgatcttggaagcaagaggcagtatgcagattgttcagagattttcaatgatgggtataagctcagtggattttacaaaatcaaacctctccagagcccagcagaattttctgtttattgtgacatgtccgatggaggaggatggactgtaattcagagacgatctgatggcagtgaaaactttaacagaggatggaaagactatgaaaatggctttggaaattttgtccaaaaacatggtgaatattggctgggcaataaaaatcttcacttcttgaccactcaagaagactacactttaaaaatcgaccttgcagattttgaaaaaaatagccgttatgcacaatataagaatttcaaagttggagatgaaaagaatttctacgagttgaatattggggaatattctggaacagctggagattcccttgcggggaattttcatcctgaggtgcagtggtgggctagtcaccaaagaatgaaattcagcacgtgggacagagatcatgacaactatgaagggaactgcgcagaagaagatcagtctggctggtggtttaacaggtgtcactctgcaaacctgaatggtgtatactacagcggcccctacacggctaaaacagacaatgggattgtctggtacacctggcatgggtggtggtattctctgaaatctgtggttatgaaaattaggccaaatgattttattccaaatgtaatttaattgctgctgttgggctttcgtttctgcaattcagctttgtttaaagtgatttgaaaaatactcattctgaacatatccatgcgcaatcatgataactgttgtgagtagtgcttttcattcttctcacttgcctttgttacttaatgtgctttcagtacagcagatatgcaatattcaccaaataaatgtagactgtgttaatattta

SEQ ID NO: 10770 - DNA, 1367 bp, Homo sapiens
  source 1..1367: mol_type = unassigned DNA
gtgatgaaacagattcaattctagttaacactcagtgtcattctgtgtggtgagaggctgggaaagtctgggagaatttcctcggcgactctaagattagggatggcctgcggctgcatccgacttcctggagctactgaagtctgaactctggtctcatgaaaaattcaaggttgatacatttataaaattctttttgttcttgcagttttttcaagggggaacatggcaaaggtgttcagtttcatccttgttaccaccgctctgacaatgggcagggaaatttcggcgctcgaggactgtgcccaggagcagatgcggctcagagcccaggtgcgcctgcttgagacccgggtcaaacagcaacaggtcaagatcaagcagcttttgcaggagaatgaagtccagttccttgataaaggagatgagaatactgtcattgatcttggaagcaagaggcagtatgcagattgttcagagattttcaatgatgggtataagctcagtggattttacaaaatcaaacctctccagagcccagcagaattttctgtttattgtgacatgtccgatggaggaggatggactgtaattcagagacgatctgatggcagtgaaaactttaacagaggatggaaagactatgaaaatggctttggaaattttgtccaaaaacatggtgaatattggctgggcaataaaaatcttcacttcttgaccactcaagaagactacactttaaaaatcgaccttgcagattttgaaaaaaatagccgttatgcacaatataagaatttcaaagttggagatgaaaagaatttctacgagttgaatattggggaatattctggaacagctggagattcccttgcggggaattttcatcctgaggtgcagtggtgggctagtcaccaaagaatgaaattcagcacgtgggacagagatcatgacaactatgaagggaactgcgcagaagaagatcagtctggctggtggtttaacaggtgtcactctgcaaacctgaatggtgtatactacagcggcccctacacggctaaaacagacaatgggattgtctggtacacctggcatgggtggtggtattctctgaaatctgtggttatgaaaattaggccaaatgattttattccaaatgtaatttaattgctgctgttgggctttcgtttctgcaattcagctttgtttaaagtgatttgaaaaatactcattctgaacatatccatgcgcaatcatgataactgttgtgagtagtgcttttcattcttctcacttgcctttgttacttaatgtgctttcagtacagcagatatgcaatattcaccaaataaatgtagactgtgttaata

SEQ ID NO: 10771 - DNA, 4261 bp, Homo sapiens
  source 1..4261: mol_type = unassigned DNA
gcactccctgctggggtgagcagcactgtaaagatgaagctggctaactggtactggctgagctcagctgttcttgccacttacggttttttggttgtggcaaacaatgaaacagaggaaattaaagatgaaagagcaaaggatgtctgcccagtgagactagaaagcagagggaaatgcgaagaggcaggggagtgcccctaccaggtaagcctgccccccttgactattcagctcccgaagcaattcagcaggatcgaggaggtgttcaaagaagtccaaaacctcaaggaaatcgtaaatagtctaaagaaatcttgccaagactgcaagctgcaggctgatgacaacggagacccaggcagaaacggactgttgttacccagtacaggagccccgggagaggttggtgataacagagttagagaattagagagtgaggttaacaagctgtcctctgagctaaagaatgccaaagaggagatcaatgtacttcatggtcgcctggagaagctgaatcttgtaaatatgaacaacatagaaaattatgttgacagcaaagtggcaaatctaacatttgttgtcaatagtttggatggcaaatgttcaaagtgtcccagccaagaacaaatacagtcacgtccagttcaacatctaatatataaagattgctctgactactacgcaataggcaaaagaagcagtgagacctacagagttacacctgatcccaaaaatagtagctttgaagtttactgtgacatggagaccatggggggaggctggacagtgctgcaggcacgtctcgatgggagcaccaacttcaccagaacatggcaagactacaaagcaggctttggaaacctcagaagggaattttggctggggaacgataaaattcatcttctgaccaagagtaaggaaatgattctgagaatagatcttgaagactttaatggtgtcgaactatatgccttgtatgatcagttttatgtggctaatgagtttctcaaatatcgtttacacgttggtaactataatggcacagctggagatgcattacgtttcaacaaacattacaaccacgatctgaagtttttcaccactccagataaagacaatgatcgatatccttctgggaactgtgggctgtactacagttcaggctggtggtttgatgcatgtctttctgcaaacttaaatggcaaatattatcaccaaaaatacagaggtgtccgtaatgggattttctggggtacctggcctggtgtaagtgaggcacaccctggtggctacaagtcctccttcaaagaggctaagatgatgatcagacccaagcactttaagccataaatcactctgttcattcctccaggtattcgttatctaatagggcaattaattccttcagcactttagaatatgccttgtttcatatttttcatagctaaaaaatgatgtctgacggctaggttcttatgctacacagcatttgaaataaagctgaaaaacaatgcattttaaaggagtcctttgttgttatgctgttatccaatgaacacttgcaagcaattagcaatattgagaattatacattagatttacaattcttttaatttctattgaaactttttctattgcttgtattacttgctgtatttaaaaaataattgttggctgggtgtggtagctcacgcctgtaatcccagcactttggaatgtcaaggcaggcagatcacttgaggtcaggagtttgagaccagcctggccaaacatgtgaaacgctgtctctattaaaaatacaaaaattagccgggcatggtggtacatgcctgtaatcctagctacttgggaggctgaggcaggagaatcgcttgaacctgagaggaagaggttgcagtgagccaagactgagccactgcactccagcatgggtgacagagaaaactctgtctcaaacaaaaaaataataaaatttattcagtaggctggattctacacaaagtaatctgtatttgggccatgatttaagcacatctgaaggtatatcactcttttcaggctataattatttgggtaatcttcattctgagacaaacttaatctatatcatttactttgcaacagaacaaccctacagcattttggttcccagactaagggaactaatatctatataattaaacttgttcatttatcattcatgaaatataaaatacttgtcatttaaaccgtttaaaaatgtggtagcataatgtcaccccaaaaagcattcagaaagcaatgtaactgtgaagaccagggtttaaaggtaattcatttatagtttataactccttagatgtttgatgttgaaaactgctttaacatgaaaattatcttcctctgctctgtgtgaacaatagcttttaatttaagattgctcactactgtactagactactggtaggtttttttggggggggtgggtagggatatgtgggtaatgaagcatttacttacaggctatcatactctgaggccaattttatctccaaagcaataatatcattaagtgattcacttcatagaaggctaagtttctctaggacagatagaaaacatgaattttgaaatatatagaacagtagttaaaatactatatatttcaaccctggctggtagattgcttattttactatcagaaactaaaagatagatttttacccaaacagaagtatctgtaatttttataattcatcaattctggaatgctatatataatatttaaaagactttttaaatgtgtttaatttcatcatcgtaaaaagggatcatctcagagagaacagcagtattctgcgtatttttaaaaatgctctagagtaacatttgaagtaattcactgtagtgtatgccagtcctagaaataatttttttaatttctggtgtctgtttctaatacactaaccaagttttcaaaatatatttacaaagatgcatctttacccattattttaaaatgattaaggaggatagttgcttcaggtaacaagctaatttttcaaatattaggcccttacagaactatttagtcaaaaagtaagatattcctttaaaatatataacccaaagctttcagttaaacatgatatatcacaaatactattaaaatgttaaagagaaatgcaaatagcattaaatgatgaccaaaatgtaaaatattgtagatttcaaaagctgtgtctctattaggtgggataccaaatgtaaatgatgtaactgacgttgttttttactttttactttttaaaaaagactaaaaacgttttgatattatacaatgtatttgtttcagataaggtcattgtcatttagtatatataattaatatatgtacaagtttaagtaaattcctgtgagtaaaaatggacttatcacaaaacatagttctaaagaaaggtatatgctcatatacacggtgtccattaatttaatgggaactaggtataacttcaggagaatttggcaaataattcattaatccatgtaaatattcaaaagcttgttctatccacattatttcaagggatcactttatttttcattatactttcacagcacttttctagtaaattctgtaacacagaaattccattttggaatcatttcatgttaccaataattctagacttttataacatttaacatgttgatggaaatagattacatctgctagaaccttttgccttaactattcaccaatatatgctaatattcataaatatggattgactgtttacaaacattagaatcttgtcttggttccattttgatggctaatatttgttatcttaattaagactatttctgaggtcatgattacttgaaaatattgactaaaactgggtccttagaaattccaggtggagctgatttacctatgactgaggggaaaaaaaaatcaaattttactgataatagtaatgctccaaatgaattaatgacacatctgttcaataaataaagagcttaaatatacaaaacataagaaatctgggcaacaaaacttgtggtctttacttttgaatagctacccaagaaaaggttttaaaggtaaaagttatgagtaatgtcatcacaataagctcttgtttaaaattcttttcttttatgtataattaggtttatgtttcatgtctttttaaaaccttataaaagatttaattatcacatctattcttcaatgtggaaatattaaatattgttggttgtaaaataa

SEQ ID NO: 10772 - DNA, 1261 bp, Homo sapiens
  source 1..1261: mol_type = unassigned DNA
ggtcccgatgccgcgagcggaatctcggcgctcccggaagtggcctgaaggcggcgcgccagtcccgagcagtgctcgctcctgctcggggcgctgcggccccgggcgtcgccatgaccagtgagctggacatcttcgtggggaacacgacccttatcgacgaggacgtgtatcgcctctggctcgatggttactcggtgaccgacgcggtggccctgcgggtgcgctcgggaatcctggagcagactggcgccacggcagcggtgctgcagagcgacaccatggaccattaccgcaccttccacatgctcgagcggctgctgcatgcgccgcccaagctactgcaccagctcatcttccagattccgccctcccggcaggcactactcatcgagaggtactatgcctttgatgaggcctttgttcgggaggtgctgggcaagaagctgtccaaaggcaccaagaaagacctggatgacatcagcaccaaaacaggcatcaccctcaagagctgccggagacagtttgacaactttaaacgggtcttcaaggtggtagaggaaatgcggggctccctggtggacaatattcagcaacacttcctcctctctgaccggttggccagggactatgcagccatcgtcttctttgctaacaaccgctttgagacagggaagaaaaaactgcagtatctgagcttcggtgactttgccttctgcgctgagctcatgatccaaaactggacccttggagccgtcggtgaggcccccactgacccagactcacagatggatgacatggacatggacttagacaaggaatttctccaggacttgaaggagctcaaggtgctagtggctgacaaggaccttctggacctgcacaagagcctggtgtgcactgctctccggggaaagctgggcgtcttctctgagatggaagccaacttcaagaacctgtcccgggggctggtgaacgtggccgccaagctgacccacaataaagatgtcagagacctgtttgtggacctcgtggagaagtttgtggaaccctgccgctccgaccactggccactcagcgacgtgcggttcttcctgaatcagtattcagcgtctgtccactccctcgatggcttccgacaccaggccctctgggaccgctacatgggcaccctccgcggctgcctcctgcgcctgtatcatgactgaggtgcctcccaacgctccgcccacgctgacaataaagttgctctgagtttgga

SEQ ID NO: 10773 - DNA, 1248 bp, Homo sapiens
  source 1..1248: mol_type = unassigned DNA
ataagctgggtcccgatgccgcgagcggaatctcggcgctcccggaagtggcctgaaggcggcgcgccagtcccgagcagtgctcgctcctgctcggggcgctgcggccccgggcgtcgccatgaccagtgagctggacatcttcgtggggaacacgacccttatcgacgaggacgtgtatcgcctctggctcgatggttactcggtgaccgacgcggtggccctgcgggtgcgctcgggaatcctggagcagactggcgccacggcagcggtgctgcagagcgacaccatggaccattaccgcaccttccacatgctcgagcggctgctgcatgcgccgcccaagctactgcaccagctcatcttccagattccgccctcccggcaggcactactcatcgagaggtactatgcctttgatgaggcctttgttcgggaggtgctgggcaagaagctgtccaaaggcaccaagaaagacctggatgacatcagcaccaaaacaggcatcaccctcaagagctgccggagacagtttgacaactttaaacgggtcttcaaggtggtagaggaaatgcggggctccctggtggacaatattcagcaacacttcctcctctctgaccggttggccagggactatgcagccatcgtcttctttgctaacaaccgctttgagacagggaagaaaaaactgcagtatctgagcttcggtgactttgccttctgcgctgagctcatgatccaaaactggacccttggagccgtcgactcacagatggatgacatggacatggacttagacaaggaatttctccaggacttgaaggagctcaaggtgctagtggctgacaaggaccttctggacctgcacaagagcctggtgtgcactgctctccggggaaagctgggcgtcttctctgagatggaagccaacttcaagaacctgtcccgggggctggtgaacgtggccgccaagctgacccacaataaagatgtcagagacctgtttgtggacctcgtggagaagtttgtggaaccctgccgctccgaccactggccactcagcgacgtgcggttcttcctgaatcagtattcagcgtctgtccactccctcgatggcttccgacaccaggccctctgggaccgctacatgggcaccctccgcggctgcctcctgcgcctgtatcatgactgaggtgcctcccaacgctccgcccacgctgacaataaagttgctctgagtttgga

SEQ ID NO: 10774 - DNA, 5925 bp, Homo sapiens
  source 1..5925: mol_type = unassigned DNA
agatgcaggggcgcaaacgccaaaggagaccaggctgtaggaagagaagggcagagcgccggacagctcggcccgctccccgtcctttggggccgcggctggggaactacaaggcccagcaggcagctgcagggggcggaggcggaggagggaccagcgcgggtgggagtgagagagcgagccctcgcgccccgccggcgcatagcgctcggagcgctcttgcggccacaggcgcggcgtcctcggcggcgggcggcagctagcgggagccgggacgccggtgcagccgcagcgcgcggaggaacccgggtgtgccgggagctgggcggccacgtccggacgggaccgagacccctcgtagcgcattgcggcgacctcgccttccccggccgcgagcgcgccgctgcttgaaaagccgcggaacccaaggacttttctccggtccgagctcggggcgccccgcagggcgcacggtacccgtgctgcagtcgggcacgccgcggcgccggggcctccgcagggcgatggagcccggtctgcaaggaaagtgaggcgccgccgctgcgttctggaggaggggggcacaaggtctggagaccccgggtggcggacgggagccctccccccgccccgcctccggggcaccagctccggctccattgttcccgcccgggctggaggcgccgagcaccgagcgccgccgggagtcgagcgccggccgcggagctcttgcgaccccgccaggacccgaacagagcccgggggcggcgggccggagccggggacgcgggcacacgcccgctcgcacaagccacggcggactctcccgaggcggaacctccacgccgagcgagggtcagtttgaaaaggaggatcgagctcactgtggagtatccatggagatgtggagccttgtcaccaacctctaactgcagaactgggatgtggagctggaagtgcctcctcttctgggctgtgctggtcacagccacactctgcaccgctaggccgtccccgaccttgcctgaacaagcccagccctggggagcccctgtggaagtggagtccttcctggtccaccccggtgacctgctgcagcttcgctgtcggctgcgggacgatgtgcagagcatcaactggctgcgggacggggtgcagctggcggaaagcaaccgcacccgcatcacaggggaggaggtggaggtgcaggactccgtgcccgcagactccggcctctatgcttgcgtaaccagcagcccctcgggcagtgacaccacctacttctccgtcaatgtttcagatgctctcccctcctcggaggatgatgatgatgatgatgactcctcttcagaggagaaagaaacagataacaccaaaccaaaccgtatgcccgtagctccatattggacatccccagaaaagatggaaaagaaattgcatgcagtgccggctgccaagacagtgaagttcaaatgcccttccagtgggaccccaaaccccacactgcgctggttgaaaaatggcaaagaattcaaacctgaccacagaattggaggctacaaggtccgttatgccacctggagcatcataatggactctgtggtgccctctgacaagggcaactacacctgcattgtggagaatgagtacggcagcatcaaccacacataccagctggatgtcgtggagcggtcccctcaccggcccatcctgcaagcagggttgcccgccaacaaaacagtggccctgggtagcaacgtggagttcatgtgtaaggtgtacagtgacccgcagccgcacatccagtggctaaagcacatcgaggtgaatgggagcaagattggcccagacaacctgccttatgtccagatcttgaagactgctggagttaataccaccgacaaagagatggaggtgcttcacttaagaaatgtctcctttgaggacgcaggggagtatacgtgcttggcgggtaactctatcggactctcccatcactctgcatggttgaccgttctggaagccctggaagagaggccggcagtgatgacctcgcccctgtacctggagatcatcatctattgcacaggggccttcctcatctcctgcatggtggggtcggtcatcgtctacaagatgaagagtggtaccaagaagagtgacttccacagccagatggctgtgcacaagctggccaagagcatccctctgcgcagacaggtaacagtgtctgctgactccagtgcatccatgaactctggggttcttctggttcggccatcacggctctcctccagtgggactcccatgctagcaggggtctctgagtatgagcttcccgaagaccctcgctgggagctgcctcgggacagactggtcttaggcaaacccctgggagagggctgctttgggcaggtggtgttggcagaggctatcgggctggacaaggacaaacccaaccgtgtgaccaaagtggctgtgaagatgttgaagtcggacgcaacagagaaagacttgtcagacctgatctcagaaatggagatgatgaagatgatcgggaagcataagaatatcatcaacctgctgggggcctgcacgcaggatggtcccttgtatgtcatcgtggagtatgcctccaagggcaacctgcgggagtacctgcaggcccggaggcccccagggctggaatactgctacaaccccagccacaacccagaggagcagctctcctccaaggacctggtgtcctgcgcctaccaggtggcccgaggcatggagtatctggcctccaagaaggtgtggaacctgaaggctcccctggtgcatacaccgagacctggcagccaggaatgtcctggtgacagaggacaatgtgatgaagatagcagactttggcctcgcacgggacattcaccacatcgactactataaaaagacaaccaacggccgactgcctgtgaagtggatggcacccgaggcattatttgaccggatctacacccaccagagtgatgtgtggtctttcggggtgctcctgtgggagatcttcactctgggcggctccccataccccggtgtgcctgtggaggaacttttcaagctgctgaaggagggtcaccgcatggacaagcccagtaactgcaccaacgagctgtacatgatgatgcgggactgctggcatgcagtgccctcacagagacccaccttcaagcagctggtggaagacctggaccgcatcgtggccttgacctccaaccaggagtacctggacctgtccatgcccctggaccagtactcccccagctttcccgacacccggagctctacgtgctcctcaggggaggattccgtcttctctcatgagccgctgcccgaggagccctgcctgccccgacacccagcccagcttgccaatggcggactcaaacgccgctgactgccacccacacgccctccccagactccaccgtcagctgtaaccctcacccacagcccctgctgggcccaccacctgtccgtccctgtcccctttcctgctggcaggagccggctgcctaccaggggccttcctgtgtggcctgccttcaccccactcagctcacctctccctccacctcctctccacctgctggtgagaggtgcaaagaggcagatctttgctgccagccacttcatcccctcccagatgttggaccaacacccctccctgccaccaggcactgcctggagggcagggagtgggagccaatgaacaggcatgcaagtgagagcttcctgagctttctcctgtcggtttggtctgttttgccttcacccataagcccctcgcactctggtggcaggtgccttgtcctcagggctacagcagtagggaggtcagtgcttcgtgcctcgattgaaggtgacctctgccccagataggtggtgccagtggcttattaattccgatactagtttgctttgctgaccaaatgcctggtaccagaggatggtgaggcgaaggccaggttgggggcagtgttgtggccctggggcccagccccaaactgggggctctgtatatagctatgaagaaaacacaaagtgtataaatctgagtatatatttacatgtctttttaaaagggtcgttaccagagatttacccatcgggtaagatgctcctggtggctgggaggcatcagttgctatatattaaaaacaaaaaagaaaaaaaaggaaaatgtttttaaaaaggtcatatattttttgctacttttgctgttttatttttttaaattatgttctaaacctattttcagtttaggtccctcaataaaaattgctgctgcttcatttatctatgggctgtatgaaaagggtgggaatgtccactggaaagaagggacacccacgggccctggggctaggtctgtcccgagggcaccgcatgctcccggcgcaggttccttgtaacctcttcttcctaggtcctgcacccagacctcacgacgcacctcctgcctctccgctgcttttggaaagtcagaaaaagaagatgtctgcttcgagggcaggaaccccatccatgcagtagaggcgctgggcagagagtcaaggcccagcagccatcgaccatggatggtttcctccaaggaaaccggtggggttgggctggggagggggcacctacctaggaatagccacggggtagagctacagtgattaagaggaaagcaagggcgcggttgctcacgcctgtaatcccagcactttgggacaccgaggtgggcagatcacttcaggtcaggagtttgagaccagcctggccaacttagtgaaaccccatctctactaaaaatgcaaaaattatccaggcatggtggcacacgcctgtaatcccagctccacaggaggctgaggcagaatcccttgaagctgggaggcggaggttgcagtgagccgagattgcgccattgcactccagcctgggcaacagagaaaacaaaaaggaaaacaaatgatgaaggtctgcagaaactgaaacccagacatgtgtctgccccctctatgtgggcatggttttgccagtgcttctaagtgcaggagaacatgtcacctgaggctagttttgcattcaggtccctggcttcgtttcttgttggtatgcctccccagatcgtccttcctgtatccatgtgaccagactgtatttgttgggactgtcgcagatcttggcttcttacagttcttcctgtccaaactccatcctgtccctcaggaacggggggaaaattctccgaatgtttttggttttttggctgcttggaatttacttctgccacctgctggtcatcactgtcctcactaagtggattctggctcccccgtacctcatggctcaaactaccactcctcagtcgctatattaaagcttatattttgctggattactgctaaatacaaaagaaagttcaatatgttttcatttctgtagggaaaatgggattgctgctttaaatttctgagctagggattttttggcagctgcagtgttggcgactattgtaaaattctctttgtttctctctgtaaatagcacctgctaacattacaatttgtatttatgtttaaagaaggcatcatttggtgaacagaactaggaaatgaatttttagctcttaaaagcatttgctttgagaccgcacaggagtgtctttccttgtaaaacagtgatgataatttctgccttggccctaccttgaagcaatgttgtgtgaagggatgaagaatctaaaagtcttcataagtccttgggagaggtgctagaaaaatataaggcactatcataattacagtgatgtccttgctgttactactcaaatcacccacaaatttccccaaagactgcgctagctgtcaaataaaagacagtgaaattgacctg

SEQ ID NO: 10775 - DNA, 2380 bp, Homo sapiens
  source 1..2380: mol_type = unassigned DNA
agatgcaggggcgcaaacgccaaaggagaccaggctgtaggaagagaagggcagagcgccggacagctcggcccgctccccgtcctttggggccgcggctggggaactacaaggcccagcaggcagctgcagggggcggaggcggaggagggaccagcgcgggtgggagtgagagagcgagccctcgcgccccgccggcgcatagcgctcggagcgctcttgcggccacaggcgcggcgtcctcggcggcgggcggcagctagcgggagccgggacgccggtgcagccgcagcgcgcggaggaacccgggtgtgccgggagctgggcggccacgtccggacgggaccgagacccctcgtagcgcattgcggcgacctcgccttccccggccgcgagcgcgccgctgcttgaaaagccgcggaacccaaggacttttctccggtccgagctcggggcgccccgcagggcgcacggtacccgtgctgcagtcgggcacgccgcggcgccggggcctccgcagggcgatggagcccggtctgcaaggaaagtgaggcgccgccgctgcgttctggaggaggggggcacaaggtctggagaccccgggtggcggacgggagccctccccccgccccgcctccggggcaccagctccggctccattgttcccgcccgggctggaggcgccgagcaccgagcgccgccgggagtcgagcgccggccgcggagctcttgcgaccccgccaggacccgaacagagcccgggggcggcgggccggagccggggacgcgggcacacgcccgctcgcacaagccacggcggactctcccgaggcggaacctccacgccgagcgagggtcagtttgaaaaggaggatcgagctcactgtggagtatccatggagatgtggagccttgtcaccaacctctaactgcagaactgggatgtggagctggaagtgcctcctcttctgggctgtgctggtcacagccacactctgcaccgctaggccgtccccgaccttgcctgaacaagcccagccctggggagcccctgtggaagtggagtccttcctggtccaccccggtgacctgctgcagcttcgctgtcggctgcgggacgatgtgcagagcatcaactggctgcgggacggggtgcagctggcggaaagcaaccgcacccgcatcacaggggaggaggtggaggtgcaggactccgtgcccgcagactccggcctctatgcttgcgtaaccagcagcccctcgggcagtgacaccacctacttctccgtcaatgtttcagttcccatagatgctctcccctcctcggaggatgatgatgatgatgatgactcctcttcagaggagaaagaaacagataacaccaaaccaaaccccgtagctccatattggacatccccagaaaagatggaaaagaaattgcatgcagtgccggctgccaagacagtgaagttcaaatgcccttccagtgggaccccaaaccccacactgcgctggttgaaaaatggcaaagaattcaaacctgaccacagaattggaggctacaaggtccgttatgccacctggagcatcataatggactctgtggtgccctctgacaagggcaactacacctgcattgtggagaatgagtacggcagcatcaaccacacataccagctggatgtcgtggagcggtcccctcaccggcccatcctgcaagcagggttgcccgccaacaaaacagtggccctgggtagcaacgtggagttcatgtgtaaggtgtacagtgacccgcagccgcacatccagtggctaaagcacatcgaggtgaatgggagcaagattggcccagacaacctgccttatgtccagatcttgaagcattcggggattaatagctcggatgcggaggtgctgaccctgttcaatgtgacagaggcccagagcggggagtatgtgtgtaaggtttccaattatattggtgaagctaaccagtctgcgtggctcactgtcaccagacctgtggcaaaagactgctggagttaataccaccgacaaagagatggaggtgcttcacttaagaaatgtctcctttgaggacgcaggggagtatacgtgcttggcgggtaactctatcggactctcccatcactctgcatggttgaccgttctggaagccctggaagagaggccggcagtgatgacctcgcccctgtacctggagatcatcatctattgcacaggggccttcctcatctcctgcatggtggggtcggtcatcgtctacaagatgaagagtggtaccaagaagagtgacttccacagccagatggctgtgcacaagctggccaagagcatccctctgcgcagacaggtaaca

SEQ ID NO: 10776 - DNA, 3816 bp, Homo sapiens
  source 1..3816: mol_type = unassigned DNA
cttgcggccacaggcgcggcgtcctcggcggcgggcggcagctagcgggagccgggacgccggtgcagccgcagcgcgcggaggaacccgggtgtgccgggagctgggcggccacgtccggacgggaccgagacccctcgtagcgcattgcggcgacctcgccttccccggccgcgagcgcgccgctgcttgaaaagccgcggaacccaaggacttttctccggtccgagctcggggcgccccgcagggcgcacggtacccgtgctgcagtcgggcacgccgcggcgccggggcctccgcagggcgatggagcccggtctgcaaggaaagtgaggcgccgccgctgcgttctggaggaggggggcacaaggtctggagaccccgggtggcggacgggagccctccccccgccccgcctccggggcaccagctccggctccattgttcccgcccgggctggaggcgccgagcaccgagcgccgccgggagtcgagcgccggccgcggagctcttgcgaccccgccaggacccgaacagagcccgggggcggcgggccggagccggggacgcgggcacacgcccgctcgcacaagccacggcggactctcccgaggcggaacctccacgccgagcgagggtcagtttgaaaaggaggatcgagctcactgtggagtatccatggagatgtggagccttgtcaccaacctctaactgcagaactgggatgtggagctggaagtgcctcctcttctgggctgtgctggtcacagccacactctgcaccgctaggccgtccccgaccttgcctgaacaagatgctctcccctcctcggaggatgatgatgatgatgatgactcctcttcagaggagaaagaaacagataacaccaaaccaaaccccgtagctccatattggacatccccagaaaagatggaaaagaaattgcatgcagtgccggctgccaagacagtgaagttcaaatgcccttccagtgggaccccaaaccccacactgcgctggttgaaaaatggcaaagaattcaaacctgaccacagaattggaggctacaaggtccgttatgccacctggagcatcataatggactctgtggtgccctctgacaagggcaactacacctgcattgtggagaatgagtacggcagcatcaaccacacataccagctggatgtcgtggagcggtcccctcaccggcccatcctgcaagcagggttgcccgccaacaaaacagtggccctgggtagcaacgtggagttcatgtgtaaggtgtacagtgacccgcagccgcacatccagtggctaaagcacatcgaggtgaatgggagcaagattggcccagacaacctgccttatgtccagatcttgaagactgctggagttaataccaccgacaaagagatggaggtgcttcacttaagaaatgtctcctttgaggacgcaggggagtatacgtgcttggcgggtaactctatcggactctcccatcactctgcatggttgaccgttctggaagccctggaagagaggccggcagtgatgacctcgcccctgtacctggagatcatcatctattgcacaggggccttcctcatctcctgcatggtggggtcggtcatcgtctacaagatgaagagtggtaccaagaagagtgacttccacagccagatggctgtgcacaagctggccaagagcatccctctgcgcagacaggtaacagtgtctgctgactccagtgcatccatgaactctggggttcttctggttcggccatcacggctctcctccagtgggactcccatgctagcaggggtctctgagtatgagcttcccgaagaccctcgctgggagctgcctcgggacagactggtcttaggcaaacccctgggagagggctgctttgggcaggtggtgttggcagaggctatcgggctggacaaggacaaacccaaccgtgtgaccaaagtggctgtgaagatgttgaagtcggacgcaacagagaaagacttgtcagacctgatctcagaaatggagatgatgaagatgatcgggaagcataagaatatcatcaacctgctgggggcctgcacgcaggatggtcccttgtatgtcatcgtggagtatgcctccaagggcaacctgcgggagtacctgcaggcccggaggcccccagggctggaatactgctacaaccccagccacaacccagaggagcagctctcctccaaggacctggtgtcctgcgcctaccaggtggcccgaggcatggagtatctggcctccaagaagtgcatacaccgagacctggcagccaggaatgtcctggtgacagaggacaatgtgatgaagatagcagactttggcctcgcacgggacattcaccacatcgactactataaaaagacaaccaacggccgactgcctgtgaagtggatggcacccgaggcattatttgaccggatctacacccaccagagtgatgtgtggtctttcggggtgctcctgtgggagatcttcactctgggcggctccccataccccggtgtgcctgtggaggaacttttcaagctgctgaaggagggtcaccgcatggacaagcccagtaactgcaccaacgagctgtacatgatgatgcgggactgctggcatgcagtgccctcacagagacccaccttcaagcagctggtggaagacctggaccgcatcgtggccttgacctccaaccaggagtacctggacctgtccatgcccctggaccagtactcccccagctttcccgacacccggagctctacgtgctcctcaggggaggattccgtcttctctcatgagccgctgcccgaggagccctgcctgccccgacacccagcccagcttgccaatggcggactcaaacgccgctgactgccacccacacgccctccccagactccaccgtcagctgtaaccctcacccacagcccctgctgggcccaccacctgtccgtccctgtcccctttcctgctggcaggagccggctgcctaccaggggccttcctgtgtggcctgccttcaccccactcagctcacctctccctccacctcctctccacctgctggtgagaggtgcaaagaggcagatctttgctgccagccacttcatcccctcccagatgttggaccaacacccctccctgccaccaggcactgcctggagggcagggagtgggagccaatgaacaggcatgcaagtgagagcttcctgagctttctcctgtcggtttggtctgttttgccttcacccataagcccctcgcactctggtggcaggtgccttgtcctcagggctacagcagtagggaggtcagtgcttcgtgcctcgattgaaggtgacctctgccccagataggtggtgccagtggcttattaattccgatactagtttgctttgctgaccaaatgcctggtaccagaggatggtgaggcgaaggccaggttgggggcagtgttgtggccctggggcccagccccaaactgggggctctgtatatagctatgaagaaaacacaaagtgtataaatctgagtatatatttacatgtctttttaaaagggtcgttaccagagatttacccatcgggtaagatgctcctggtggctgggaggcatcagttgctatatattaaaaacaaaaaagaaaaaaaaggaaaatgtttttaaaaaggtcatatattttttgctacttttgctgttttatttttttaaattatgttctaaacctattttcagtttaggtccctcaataaaaattgctgctgctt

SEQ ID NO: 10777 - DNA, 4157 bp, Homo sapiens
  source 1..4157: mol_type = unassigned DNA
gcgctcttgcggccacaggcgcggcgtcctcggcggcgggcggcagctagcgggagccgggacgccggtgcagccgcagcgcgcggaggaacccgggtgtgccgggagctgggcggccacgtccggacgggaccgagacccctcgtagcgcattgcggcgacctcgccttccccggccgcgagcgcgccgctgcttgaaaagccgcggaacccaaggacttttctccggtccgagctcggggcgccccgcagggcgcacggtacccgtgctgcagtcgggcacgccgcggcgccggggcctccgcagggcgatggagcccggtctgcaaggaaagtgaggcgccgccgctgcgttctggaggaggggggcacaaggtctggagaccccgggtggcggacgggagccctccccccgccccgcctccggggcaccagctccggctccattgttcccgcccgggctggaggcgccgagcaccgagcgccgccgggagtcgagcgccggccgcggagctcttgcgaccccgccaggacccgaacagagcccgggggcggcgggccggagccggggacgcgggcacacgcccgctcgcacaagccacggcggactctcccgaggcggaacctccacgccgagcgagggtcagtttgaaaaggaggatcgagctcactgtggagtatccatggagatgtggagccttgtcaccaacctctaactgcagaactgggatgtggagctggaagtgcctcctcttctgggctgtgctggtcacagccacactctgcaccgctaggccgtccccgaccttgcctgaacaaggatggcagctgtgacccgggatttcggtgagatgcttctgcactctggccgggtcctgccagccgaagcccagccctggggagcccctgtggaagtggagtccttcctggtccaccccggtgacctgctgcagcttcgctgtcggctgcgggacgatgtgcagagcatcaactggctgcgggacggggtgcagctggcggaaagcaaccgcacccgcatcacaggggaggaggtggaggtgcaggactccgtgcccgcagactccggcctctatgcttgcgtaaccagcagcccctcgggcagtgacaccacctacttctccgtcaatgtttcagatgctctcccctcctcggaggatgatgatgatgatgatgactcctcttcagaggagaaagaaacagataacaccaaaccaaaccgtatgcccgtagctccatattggacatccccagaaaagatggaaaagaaattgcatgcagtgccggctgccaagacagtgaagttcaaatgcccttccagtgggaccccaaaccccacactgcgctggttgaaaaatggcaaagaattcaaacctgaccacagaattggaggctacaaggtccgttatgccacctggagcatcataatggactctgtggtgccctctgacaagggcaactacacctgcattgtggagaatgagtacggcagcatcaaccacacataccagctggatgtcgtggagcggtcccctcaccggcccatcctgcaagcagggttgcccgccaacaaaacagtggccctgggtagcaacgtggagttcatgtgtaaggtgtacagtgacccgcagccgcacatccagtggctaaagcacatcgaggtgaatgggagcaagattggcccagacaacctgccttatgtccagatcttgaagactgctggagttaataccaccgacaaagagatggaggtgcttcacttaagaaatgtctcctttgaggacgcaggggagtatacgtgcttggcgggtaactctatcggactctcccatcactctgcatggttgaccgttctggaagccctggaagagaggccggcagtgatgacctcgcccctgtacctggagatcatcatctattgcacaggggccttcctcatctcctgcatggtggggtcggtcatcgtctacaagatgaagagtggtaccaagaagagtgacttccacagccagatggctgtgcacaagctggccaagagcatccctctgcgcagacaggtgtctgctgactccagtgcatccatgaactctggggttcttctggttcggccatcacggctctcctccagtgggactcccatgctagcaggggtctctgagtatgagcttcccgaagaccctcgctgggagctgcctcgggacagactggtcttaggcaaacccctgggagagggctgctttgggcaggtggtgttggcagaggctatcgggctggacaaggacaaacccaaccgtgtgaccaaagtggctgtgaagatgttgaagtcggacgcaacagagaaagacttgtcagacctgatctcagaaatggagatgatgaagatgatcgggaagcataagaatatcatcaacctgctgggggcctgcacgcaggatggtcccttgtatgtcatcgtggagtatgcctccaagggcaacctgcgggagtacctgcaggcccggaggcccccagggctggaatactgctacaaccccagccacaacccagaggagcagctctcctccaaggacctggtgtcctgcgcctaccaggtggcccgaggcatggagtatctggcctccaagaagtgcatacaccgagacctggcagccaggaatgtcctggtgacagaggacaatgtgatgaagatagcagactttggcctcgcacgggacattcaccacatcgactactataaaaagacaaccaacggccgactgcctgtgaagtggatggcacccgaggcattatttgaccggatctacacccaccagagtgatgtgtggtctttcggggtgctcctgtgggagatcttcactctgggcggctccccataccccggtgtgcctgtggaggaacttttcaagctgctgaaggagggtcaccgcatggacaagcccagtaactgcaccaacgagctgtacatgatgatgcgggactgctggcatgcagtgccctcacagagacccaccttcaagcagctggtggaagacctggaccgcatcgtggccttgacctccaaccaggagtacctggacctgtccatgcccctggaccagtactcccccagctttcccgacacccggagctctacgtgctcctcaggggaggattccgtcttctctcatgagccgctgcccgaggagccctgcctgccccgacacccagcccagcttgccaatggcggactcaaacgccgctgactgccacccacacgccctccccagactccaccgtcagctgtaaccctcacccacagcccctgctgggcccaccacctgtccgtccctgtcccctttcctgctggcaggagccggctgcctaccaggggccttcctgtgtggcctgccttcaccccactcagctcacctctccctccacctcctctccacctgctggtgagaggtgcaaagaggcagatctttgctgccagccacttcatcccctcccagatgttggaccaacacccctccctgccaccaggcactgcctggagggcagggagtgggagccaatgaacaggcatgcaagtgagagcttcctgagctttctcctgtcggtttggtctgttttgccttcacccataagcccctcgcactctggtggcaggtgccttgtcctcagggctacagcagtagggaggtcagtgcttcgtgcctcgattgaaggtgacctctgccccagataggtggtgccagtggcttattaattccgatactagtttgctttgctgaccaaatgcctggtaccagaggatggtgaggcgaaggccaggttgggggcagtgttgtggccctggggcccagccccaaactgggggctctgtatatagctatgaagaaaacacaaagtgtataaatctgagtatatatttacatgtctttttaaaagggtcgttaccagagatttacccatcgggtaagatgctcctggtggctgggaggcatcagttgctatatattaaaaacaaaaaagaaaaaaaaggaaaatgtttttaaaaaggtcatatattttttgctacttttgctgttttatttttttaaattatgttctaaacctattttcagtttaggtccctcaataaaaattgctgctgcttc

SEQ ID NO: 10778 - DNA, 5900 bp, Homo sapiens
  source 1..5900: mol_type = unassigned DNA
agatgcaggggcgcaaacgccaaaggagaccaggctgtaggaagagaagggcagagcgccggacagctcggcccgctccccgtcctttggggccgcggctggggaactacaaggcccagcaggcagctgcagggggcggaggcggaggagggaccagcgcgggtgggagtgagagagcgagccctcgcgccccgccggcgcatagcgctcggagcgctcttgcggccacaggcgcggcgtcctcggcggcgggcggcagctagcgggagccgggacgccggtgcagccgcagcgcgcggaggaacccgggtgtgccgggagctgggcggccacgtccggacgggaccgagacccctcgtagcgcattgcggcgacctcgccttccccggccgcgagcgcgccgctgcttgaaaagccgcggaacccaaggacttttctccggtccgagctcggggcgccccgcagggcgcacggtacccgtgctgcagtcgggcacgccgcggcgccggggcctccgcagggcgatggagcccggtctgcaaggaaagtgaggcgccgccgctgcgttctggaggaggggggcacaaggtctggagaccccgggtggcggacgggagccctccccccgccccgcctccggggcaccagctccggctccattgttcccgcccgggctggaggcgccgagcaccgagcgccgccgggagtcgagcgccggccgcggagctcttgcgaccccgccaggacccgaacagagcccgggggcggcgggccggagccggggacgcgggcacacgcccgctcgcacaagccacggcggactctcccgaggcggaacctccacgccgagcgagggtcagtttgaaaaggaggatcgagctcactgtggagtatccatggagatgtggagccttgtcaccaacctctaactgcagaactgggatgtggagctggaagtgcctcctcttctgggctgtgctggtcacagccacactctgcaccgctaggccgtccccgaccttgcctgaacaagcccagccctggggagcccctgtggaagtggagtccttcctggtccaccccggtgacctgctgcagcttcgctgtcggctgcgggacgatgtgcagagcatcaactggctgcgggacggggtgcagctggcggaaagcaaccgcacccgcatcacaggggaggaggtggaggtgcaggactccgtgcccgcagactccggcctctatgcttgcgtaaccagcagcccctcgggcagtgacaccacctacttctccgtcaatgtttcagttcccatagatgctctcccctcctcggaggatgatgatgatgatgatgactcctcttcagaggagaaagaaacagataacaccaaaccaaaccccgtagctccatattggacatccccagaaaagatggaaaagaaattgcatgcagtgccggctgccaagacagtgaagttcaaatgcccttccagtgggaccccaaaccccacactgcgctggttgaaaaatggcaaagaattcaaacctgaccacagaattggaggctacaaggtccgttatgccacctggagcatcataatggactctgtggtgccctctgacaagggcaactacacctgcattgtggagaatgagtacggcagcatcaaccacacataccagctggatgtcgtggagcggtcccctcaccggcccatcctgcaagcagggttgcccgccaacaaaacagtggccctgggtagcaacgtggagttcatgtgtaaggtgtacagtgacccgcagccgcacatccagtggctaaagcacatcgaggtgaatgggagcaagattggcccagacaacctgccttatgtccagatcttgaagcattcggggattaatagctcggatgcggaggtgctgaccctgttcaatgtgacagaggcccagagcggggagtatgtgtgtaaggtttccaattatattggtgaagctaaccagtctgcgtggctcactgtcaccagacctgtgctggaagagaggccggcagtgatgacctcgcccctgtacctggagatcatcatctattgcacaggggccttcctcatctcctgcatggtggggtcggtcatcgtctacaagatgaagagtggtaccaagaagagtgacttccacagccagatggctgtgcacaagctggccaagagcatccctctgcgcagacaggtaacagtgtctgctgactccagtgcatccatgaactctggggttcttctggttcggccatcacggctctcctccagtgggactcccatgctagcaggggtctctgagtatgagcttcccgaagaccctcgctgggagctgcctcgggacagactggtcttaggcaaacccctgggagagggctgctttgggcaggtggtgttggcagaggctatcgggctggacaaggacaaacccaaccgtgtgaccaaagtggctgtgaagatgttgaagtcggacgcaacagagaaagacttgtcagacctgatctcagaaatggagatgatgaagatgatcgggaagcataagaatatcatcaacctgctgggggcctgcacgcaggatggtcccttgtatgtcatcgtggagtatgcctccaagggcaacctgcgggagtacctgcaggcccggaggcccccagggctggaatactgctacaaccccagccacaacccagaggagcagctctcctccaaggacctggtgtcctgcgcctaccaggtggcccgaggcatggagtatctggcctccaagaagtgcatacaccgagacctggcagccaggaatgtcctggtgacagaggacaatgtgatgaagatagcagactttggcctcgcacgggacattcaccacatcgactactataaaaagacaaccaacggccgactgcctgtgaagtggatggcacccgaggcattatttgaccggatctacacccaccagagtgatgtgtggtctttcggggtgctcctgtgggagatcttcactctgggcggctccccataccccggtgtgcctgtggaggaacttttcaagctgctgaaggagggtcaccgcatggacaagcccagtaactgcaccaacgagctgtacatgatgatgcgggactgctggcatgcagtgccctcacagagacccaccttcaagcagctggtggaagacctggaccgcatcgtggccttgacctccaaccaggagtacctggacctgtccatgcccctggaccagtactcccccagctttcccgacacccggagctctacgtgctcctcaggggaggattccgtcttctctcatgagccgctgcccgaggagccctgcctgccccgacacccagcccagcttgccaatggcggactcaaacgccgctgactgccacccacacgccctccccagactccaccgtcagctgtaaccctcacccacagcccctgctgggcccaccacctgtccgtccctgtcccctttcctgctggcaggagccggctgcctaccaggggccttcctgtgtggcctgccttcaccccactcagctcacctctccctccacctcctctccacctgctggtgagaggtgcaaagaggcagatctttgctgccagccacttcatcccctcccagatgttggaccaacacccctccctgccaccaggcactgcctggagggcagggagtgggagccaatgaacaggcatgcaagtgagagcttcctgagctttctcctgtcggtttggtctgttttgccttcacccataagcccctcgcactctggtggcaggtgccttgtcctcagggctacagcagtagggaggtcagtgcttcgtgcctcgattgaaggtgacctctgccccagataggtggtgccagtggcttattaattccgatactagtttgctttgctgaccaaatgcctggtaccagaggatggtgaggcgaaggccaggttgggggcagtgttgtggccctggggcccagccccaaactgggggctctgtatatagctatgaagaaaacacaaagtgtataaatctgagtatatatttacatgtctttttaaaagggtcgttaccagagatttacccatcgggtaagatgctcctggtggctgggaggcatcagttgctatatattaaaaacaaaaaagaaaaaaaaggaaaatgtttttaaaaaggtcatatattttttgctacttttgctgttttatttttttaaattatgttctaaacctattttcagtttaggtccctcaataaaaattgctgctgcttcatttatctatgggctgtatgaaaagggtgggaatgtccactggaaagaagggacacccacgggccctggggctaggtctgtcccgagggcaccgcatgctcccggcgcaggttccttgtaacctcttcttcctaggtcctgcacccagacctcacgacgcacctcctgcctctccgctgcttttggaaagtcagaaaaagaagatgtctgcttcgagggcaggaaccccatccatgcagtagaggcgctgggcagagagtcaaggcccagcagccatcgaccatggatggtttcctccaaggaaaccggtggggttgggctggggagggggcacctacctaggaatagccacggggtagagctacagtgattaagaggaaagcaagggcgcggttgctcacgcctgtaatcccagcactttgggacaccgaggtgggcagatcacttcaggtcaggagtttgagaccagcctggccaacttagtgaaaccccatctctactaaaaatgcaaaaattatccaggcatggtggcacacgcctgtaatcccagctccacaggaggctgaggcagaatcccttgaagctgggaggcggaggttgcagtgagccgagattgcgccattgcactccagcctgggcaacagagaaaacaaaaaggaaaacaaatgatgaaggtctgcagaaactgaaacccagacatgtgtctgccccctctatgtgggcatggttttgccagtgcttctaagtgcaggagaacatgtcacctgaggctagttttgcattcaggtccctggcttcgtttcttgttggtatgcctccccagatcgtccttcctgtatccatgtgaccagactgtatttgttgggactgtcgcagatcttggcttcttacagttcttcctgtccaaactccatcctgtccctcaggaacggggggaaaattctccgaatgtttttggttttttggctgcttggaatttacttctgccacctgctggtcatcactgtcctcactaagtggattctggctcccccgtacctcatggctcaaactaccactcctcagtcgctatattaaagcttatattttgctggattactgctaaatacaaaagaaagttcaatatgttttcatttctgtagggaaaatgggattgctgctttaaatttctgagctagggattttttggcagctgcagtgttggcgactattgtaaaattctctttgtttctctctgtaaatagcacctgctaacattacaatttgtatttatgtttaaagaaggcatcatttggtgaacagaactaggaaatgaatttttagctcttaaaagcatttgctttgagaccgcacaggagtgtctttccttgtaaaacagtgatgataatttctgccttggccctaccttgaagcaatgttgtgtgaagggatgaagaatctaaaagtcttcataagtccttgggagaggtgctagaaaaatataaggcactatcataattacagtgatgtccttgctgttactactcaaatcacccacaaatttccccaaagactgcgctagctgtcaaataaaagacagtgaaattgacctg

SEQ ID NO: 10779 - DNA, 3824 bp, Homo sapiens
  source 1..3824: mol_type = unassigned DNA
cttgcggccacaggcgcggcgtcctcggcggcgggcggcagctagcgggagccgggacgccggtgcagccgcagcgcgcggaggaacccgggtgtgccgggagctgggcggccacgtccggacgggaccgagacccctcgtagcgcattgcggcgacctcgccttccccggccgcgagcgcgccgctgcttgaaaagccgcggaacccaaggacttttctccggtccgagctcggggcgccccgcagggcgcacggtacccgtgctgcagtcgggcacgccgcggcgccggggcctccgcagggcgatggagcccggtctgcaaggaaagtgaggcgccgccgctgcgttctggaggaggggggcacaaggtctggagaccccgggtggcggacgggagccctccccccgccccgcctccggggcaccagctccggctccattgttcccgcccgggctggaggcgccgagcaccgagcgccgccgggagtcgagcgccggccgcggagctcttgcgaccccgccaggacccgaacagagcccgggggcggcgggccggagccggggacgcgggcacacgcccgctcgcacaagccacggcggactctcccgaggcggaacctccacgccgagcgagggtcagtttgaaaaggaggatcgagctcactgtggagtatccatggagatgtggagccttgtcaccaacctctaactgcagaactgggatgtggagctggaagtgcctcctcttctgggctgtgctggtcacagccacactctgcaccgctaggccgtccccgaccttgcctgaacaagatgctctcccctcctcggaggatgatgatgatgatgatgactcctcttcagaggagaaagaaacagataacaccaaaccaaaccgtatgcccgtagctccatattggacatccccagaaaagatggaaaagaaattgcatgcagtgccggctgccaagacagtgaagttcaaatgcccttccagtgggaccccaaaccccacactgcgctggttgaaaaatggcaaagaattcaaacctgaccacagaattggaggctacaaggtccgttatgccacctggagcatcataatggactctgtggtgccctctgacaagggcaactacacctgcattgtggagaatgagtacggcagcatcaaccacacataccagctggatgtcgtggagcggtcccctcaccggcccatcctgcaagcagggttgcccgccaacaaaacagtggccctgggtagcaacgtggagttcatgtgtaaggtgtacagtgacccgcagccgcacatccagtggctaaagcacatcgaggtgaatgggagcaagattggcccagacaacctgccttatgtccagatcttgaagactgctggagttaataccaccgacaaagagatggaggtgcttcacttaagaaatgtctcctttgaggacgcaggggagtatacgtgcttggcgggtaactctatcggactctcccatcactctgcatggttgaccgttctggaagccctggaagagaggccggcagtgatgacctcgcccctgtacctggagatcatcatctattgcacaggggccttcctcatctcctgcatggtggggtcggtcatcgtctacaagatgaagagtggtaccaagaagagtgacttccacagccagatggctgtgcacaagctggccaagagcatccctctgcgcagacaggtaacagtgtctgctgactccagtgcatccatgaactctggggttcttctggttcggccatcacggctctcctccagtgggactcccatgctagcaggggtctctgagtatgagcttcccgaagaccctcgctgggagctgcctcgggacagactggtcttaggcaaacccctgggagagggctgctttgggcaggtggtgttggcagaggctatcgggctggacaaggacaaacccaaccgtgtgaccaaagtggctgtgaagatgttgaagtcggacgcaacagagaaagacttgtcagacctgatctcagaaatggagatgatgaagatgatcgggaagcataagaatatcatcaacctgctgggggcctgcacgcaggatggtcccttgtatgtcatcgtggagtatgcctccaagggcaacctgcgggagtacctgcaggcccggaggcccccagggctggaatactgctacaaccccagccacaacccagaggagcagctctcctccaaggacctggtgtcctgcgcctaccaggtggcccgaggcatggagtatctggcctccaagaagtgcatacaccgagacctggcagccaggaatgtcctggtgacagaggacaatgtgatgaagatagcagactttggcctcgcacgggacattcaccacatcgactactataaaaagacaaccaacggccgactgcctgtgaagtggatggcacccgaggcattatttgaccggatctacacccaccagagtgatgtgtggtctttcggggtgctcctgtgggagatcttcactctgggcggctccccataccccggtgtgcctgtggaggaacttttcaagctgctgaaggagggtcaccgcatggacaagcccagtaactgcaccaacgagctgtacatgatgatgcgggactgctggcatgcagtgccctcacagagacccaccttcaagcagctggtggaagacctggaccgcatcgtggccttgacctccaaccaggagtacctggacctgtccatgcccctggaccagtactcccccagctttcccgacacccggagctctacgtgctcctcaggggaggattccgtcttctctcatgagccgctgcccgaggagccctgcctgccccgacacccagcccagcttgccaatggcggactcaaacgccgctgactgccacccacacgccctccccagactccaccgtcagctgtaaccctcacccacagcccctgctgggcccaccacctgtccgtccctgtcccctttcctgctggcaggagccggctgcctaccaggggccttcctgtgtggcctgccttcaccccactcagctcacctctccctccacctcctctccacctgctggtgagaggtgcaaagaggcagatctttgctgccagccacttcatcccctcccagatgttggaccaacacccctccctgccaccaggcactgcctggagggcagggagtgggagccaatgaacaggcatgcaagtgagagcttcctgagctttctcctgtcggtttggtctgttttgccttcacccataagcccctcgcactctggtggcaggtgccttgtcctcagggctacagcagtagggaggtcagtgcttcgtgcctcgattgaaggtgacctctgccccagataggtggtgccagtggcttattaattccgatactagtttgctttgctgaccaaatgcctggtaccagaggatggtgaggcgaaggccaggttgggggcagtgttgtggccctggggcccagccccaaactgggggctctgtatatagctatgaagaaaacacaaagtgtataaatctgagtatatatttacatgtctttttaaaagggtcgttaccagagatttacccatcgggtaagatgctcctggtggctgggaggcatcagttgctatatattaaaaacaaaaaagaaaaaaaaggaaaatgtttttaaaaaggtcatatattttttgctacttttgctgttttatttttttaaattatgttctaaacctattttcagtttaggtccctcaataaaaattgctgctgcttca

SEQ ID NO: 10780 - DNA, 5702 bp, Homo sapiens
  source 1..5702: mol_type = unassigned DNA
gccggcgcatagcgctcggagcgctcttgcggccacaggcgcggcgtcctcggcggcgggcggcagctagcgggagccgggacgccggtgcagccgcagcgcgcggaggaacccgggtgtgccgggagctgggcggccacgtccggacgggaccgagacccctcgtagcgcattgcggcgacctcgccttccccggccgcgagcgcgccgctgcttgaaaagccgcggaacccaaggacttttctccggtccgagctcggggcgccccgcagggcgcacggtacccgtgctgcagtcgggcacgccgcggcgccggggcctccgcagggcgatggagcccggtctgcaaggaaagtgaggcgccgccgctgcgttctggaggaggggggcacaaggtctggagaccccgggtggcggacgggagccctccccccgccccgcctccggggcaccagctccggctccattgttcccgcccgggctggaggcgccgagcaccgagcgccgccgggagtcgagcgccggccgcggagctcttgcgaccccgccaggacccgaacagagcccgggggcggcgggccggagccggggacgcgggcacacgcccgctcgcacaagccacggcggactctcccgaggcggaacctccacgccgagcgagggtcagtttgaaaaggaggatcgagctcactgtggagtatccatggagatgtggagccttgtcaccaacctctaactgcagaactgggatgtggagctggaagtgcctcctcttctgggctgtgctggtcacagccacactctgcaccgctaggccgtccccgaccttgcctgaacaagcccagccctggggagcccctgtggaagtggagtccttcctggtccaccccggtgacctgctgcagcttcgctgtcggctgcgggacgatgtgcagagcatcaactggctgcgggacggggtgcagctggcggaaagcaaccgcacccgcatcacaggggaggaggtggaggtgcaggactccgtgcccgcagactccggcctctatgcttgcgtaaccagcagcccctcgggcagtgacaccacctacttctccgtcaatgtttcagatgctctcccctcctcggaggatgatgatgatgatgatgactcctcttcagaggagaaagaaacagataacaccaaaccaaaccccgtagctccatattggacatccccagaaaagatggaaaagaaattgcatgcagtgccggctgccaagacagtgaagttcaaatgcccttccagtgggaccccaaaccccacactgcgctggttgaaaaatggcaaagaattcaaacctgaccacagaattggaggctacaaggtccgttatgccacctggagcatcataatggactctgtggtgccctctgacaagggcaactacacctgcattgtggagaatgagtacggcagcatcaaccacacataccagctggatgtcgtggagcggtcccctcaccggcccatcctgcaagcagggttgcccgccaacaaaacagtggccctgggtagcaacgtggagttcatgtgtaaggtgtacagtgacccgcagccgcacatccagtggctaaagcacatcgaggtgaatgggagcaagattggcccagacaacctgccttatgtccagatcttgaagactgctggagttaataccaccgacaaagagatggaggtgcttcacttaagaaatgtctcctttgaggacgcaggggagtatacgtgcttggcgggtaactctatcggactctcccatcactctgcatggttgaccgttctggaagccctggaagagaggccggcagtgatgacctcgcccctgtacctggagatcatcatctattgcacaggggccttcctcatctcctgcatggtggggtcggtcatcgtctacaagatgaagagtggtaccaagaagagtgacttccacagccagatggctgtgcacaagctggccaagagcatccctctgcgcagacaggtaacagtgtctgctgactccagtgcatccatgaactctggggttcttctggttcggccatcacggctctcctccagtgggactcccatgctagcaggggtctctgagtatgagcttcccgaagaccctcgctgggagctgcctcgggacagactggtcttaggcaaacccctgggagagggctgctttgggcaggtggtgttggcagaggctatcgggctggacaaggacaaacccaaccgtgtgaccaaagtggctgtgaagatgttgaagtcggacgcaacagagaaagacttgtcagacctgatctcagaaatggagatgatgaagatgatcgggaagcataagaatatcatcaacctgctgggggcctgcacgcaggatggtcccttgtatgtcatcgtggagtatgcctccaagggcaacctgcgggagtacctgcaggcccggaggcccccagggctggaatactgctacaaccccagccacaacccagaggagcagctctcctccaaggacctggtgtcctgcgcctaccaggtggcccgaggcatggagtatctggcctccaagaagtgcatacaccgagacctggcagccaggaatgtcctggtgacagaggacaatgtgatgaagatagcagactttggcctcgcacgggacattcaccacatcgactactataaaaagacaaccaacggccgactgcctgtgaagtggatggcacccgaggcattatttgaccggatctacacccaccagagtgatgtgtggtctttcggggtgctcctgtgggagatcttcactctgggcggctccccataccccggtgtgcctgtggaggaacttttcaagctgctgaaggagggtcaccgcatggacaagcccagtaactgcaccaacgagctgtacatgatgatgcgggactgctggcatgcagtgccctcacagagacccaccttcaagcagctggtggaagacctggaccgcatcgtggccttgacctccaaccaggagtacctggacctgtccatgcccctggaccagtactcccccagctttcccgacacccggagctctacgtgctcctcaggggaggattccgtcttctctcatgagccgctgcccgaggagccctgcctgccccgacacccagcccagcttgccaatggcggactcaaacgccgctgactgccacccacacgccctccccagactccaccgtcagctgtaaccctcacccacagcccctgctgggcccaccacctgtccgtccctgtcccctttcctgctggcaggagccggctgcctaccaggggccttcctgtgtggcctgccttcaccccactcagctcacctctccctccacctcctctccacctgctggtgagaggtgcaaagaggcagatctttgctgccagccacttcatcccctcccagatgttggaccaacacccctccctgccaccaggcactgcctggagggcagggagtgggagccaatgaacaggcatgcaagtgagagcttcctgagctttctcctgtcggtttggtctgttttgccttcacccataagcccctcgcactctggtggcaggtgccttgtcctcagggctacagcagtagggaggtcagtgcttcgtgcctcgattgaaggtgacctctgccccagataggtggtgccagtggcttattaattccgatactagtttgctttgctgaccaaatgcctggtaccagaggatggtgaggcgaaggccaggttgggggcagtgttgtggccctggggcccagccccaaactgggggctctgtatatagctatgaagaaaacacaaagtgtataaatctgagtatatatttacatgtctttttaaaagggtcgttaccagagatttacccatcgggtaagatgctcctggtggctgggaggcatcagttgctatatattaaaaacaaaaaagaaaaaaaaggaaaatgtttttaaaaaggtcatatattttttgctacttttgctgttttatttttttaaattatgttctaaacctattttcagtttaggtccctcaataaaaattgctgctgcttcatttatctatgggctgtatgaaaagggtgggaatgtccactggaaagaagggacacccacgggccctggggctaggtctgtcccgagggcaccgcatgctcccggcgcaggttccttgtaacctcttcttcctaggtcctgcacccagacctcacgacgcacctcctgcctctccgctgcttttggaaagtcagaaaaagaagatgtctgcttcgagggcaggaaccccatccatgcagtagaggcgctgggcagagagtcaaggcccagcagccatcgaccatggatggtttcctccaaggaaaccggtggggttgggctggggagggggcacctacctaggaatagccacggggtagagctacagtgattaagaggaaagcaagggcgcggttgctcacgcctgtaatcccagcactttgggacaccgaggtgggcagatcacttcaggtcaggagtttgagaccagcctggccaacttagtgaaaccccatctctactaaaaatgcaaaaattatccaggcatggtggcacacgcctgtaatcccagctccacaggaggctgaggcagaatcccttgaagctgggaggcggaggttgcagtgagccgagattgcgccattgcactccagcctgggcaacagagaaaacaaaaaggaaaacaaatgatgaaggtctgcagaaactgaaacccagacatgtgtctgccccctctatgtgggcatggttttgccagtgcttctaagtgcaggagaacatgtcacctgaggctagttttgcattcaggtccctggcttcgtttcttgttggtatgcctccccagatcgtccttcctgtatccatgtgaccagactgtatttgttgggactgtcgcagatcttggcttcttacagttcttcctgtccaaactccatcctgtccctcaggaacggggggaaaattctccgaatgtttttggttttttggctgcttggaatttacttctgccacctgctggtcatcactgtcctcactaagtggattctggctcccccgtacctcatggctcaaactaccactcctcagtcgctatattaaagcttatattttgctggattactgctaaatacaaaagaaagttcaatatgttttcatttctgtagggaaaatgggattgctgctttaaatttctgagctagggattttttggcagctgcagtgttggcgactattgtaaaattctctttgtttctctctgtaaatagcacctgctaacattacaatttgtatttatgtttaaagaaggcatcatttggtgaacagaactaggaaatgaatttttagctcttaaaagcatttgctttgagaccgcacaggagtgtctttccttgtaaaacagtgatgataatttctgccttggccctaccttgaagcaatgttgtgtgaagggatgaagaatctaaaagtcttcataagtccttgggagaggtgctagaaaaatataaggcactatcataattacagtgatgtccttgctgttactactcaaatcacccacaaatttccccaaagactgcgctagctgtcaaataaaagacagtgaaattgacctga

SEQ ID NO: 10781 - DNA, 2953 bp, Homo sapiens
  source 1..2953: mol_type = unassigned DNA
gtggagtatccatggagatgtggagccttgtcaccaacctctaactgcagaactgggatgtggagctggaagtgcctcctcttctgggctgtgctggtcacagccacactctgcaccgctaggccgtccccgaccttgcctgaacaagatgctctcccctcctcggaggatgatgatgatgatgatgactcctcttcagaggagaaagaaacagataacaccaaaccaaaccccgtagctccatattggacatccccagaaaagatggaaaagaaattgcatgcagtgccggctgccaagacagtgaagttcaaatgcccttccagtgggaccccaaaccccacactgcgctggttgaaaaatggcaaagaattcaaacctgaccacagaattggaggctacaaggtccgttatgccacctggagcatcataatggactctgtggtgccctctgacaagggcaactacacctgcattgtggagaatgagtacggcagcatcaaccacacataccagctggatgtcgtggagcggtcccctcaccggcccatcctgcaagcagggttgcccgccaacaaaacagtggccctgggtagcaacgtggagttcatgtgtaaggtgtacagtgacccgcagccgcacatccagtggctaaagcacatcgaggtgaatgggagcaagattggcccagacaacctgccttatgtccagatcttgaagcattcggggattaatagctcggatgcggaggtgctgaccctgttcaatgtgacagaggcccagagcggggagtatgtgtgtaaggtttccaattatattggtgaagctaaccagtctgcgtggctcactgtcaccagacctgtggcaaaagccctggaagagaggccggcagtgatgacctcgcccctgtacctggagatcatcatctattgcacaggggccttcctcatctcctgcatggtggggtcggtcatcgtctacaagatgaagagtggtaccaagaagagtgacttccacagccagatggctgtgcacaagctggccaagagcatccctctgcgcagacaggtaacagtgtctgctgactccagtgcatccatgaactctggggttcttctggttcggccatcacggctctcctccagtgggactcccatgctagcaggggtctctgagtatgagcttcccgaagaccctcgctgggagctgcctcgggacagactggtcttaggcaaacccctgggagagggctgctttgggcaggtggtgttggcagaggctatcgggctggacaaggacaaacccaaccgtgtgaccaaagtggctgtgaagatgttgaagtcggacgcaacagagaaagacttgtcagacctgatctcagaaatggagatgatgaagatgatcgggaagcataagaatatcatcaacctgctgggggcctgcacgcaggatggtcccttgtatgtcatcgtggagtatgcctccaagggcaacctgcgggagtacctgcaggcccggaggcccccagggctggaatactgctacaaccccagccacaacccagaggagcagctctcctccaaggacctggtgtcctgcgcctaccaggtggcccgaggcatggagtatctggcctccaagaagtgcatacaccgagacctggcagccaggaatgtcctggtgacagaggacaatgtgatgaagatagcagactttggcctcgcacgggacattcaccacatcgactactataaaaagacaaccaacggccgactgcctgtgaagtggatggcacccgaggcattatttgaccggatctacacccaccagagtgatgtgtggtctttcggggtgctcctgtgggagatcttcactctgggcggctccccataccccggtgtgcctgtggaggaacttttcaagctgctgaaggagggtcaccgcatggacaagcccagtaactgcaccaacgagctgtacatgatgatgcgggactgctggcatgcagtgccctcacagagacccaccttcaagcagctggtggaagacctggaccgcatcgtggccttgacctccaaccaggagtacctggacctgtccatgcccctggaccagtactcccccagctttcccgacacccggagctctacgtgctcctcaggggaggattccgtcttctctcatgagccgctgcccgaggagccctgcctgccccgacacccagcccagcttgccaatggcggactcaaacgccgctgactgccacccacacgccctccccagactccaccgtcagctgtaaccctcacccacagcccctgctgggcccaccacctgtccgtccctgtcccctttcctgctggcaggagccggctgcctaccaggggccttcctgtgtggcctgccttcaccccactcagctcacctctccctccacctcctctccacctgctggtgagaggtgcaaagaggcagatctttgctgccagccacttcatcccctcccagatgttggaccaacacccctccctgccaccaggcactgcctggagggcagggagtgggagccaatgaacaggcatgcaagtgagagcttcctgagctttctcctgtcggtttggtctgttttgccttcacccataagcccctcgcactctggtggcaggtgccttgtcctcagggctacagcagtagggaggtcagtgcttcgtgcctcgattgaaggtgacctctgccccagataggtggtgccagtggcttattaattccgatactagtttgctttgctgaccaaatgcctggtaccagaggatggtgaggcgaaggccaggttgggggcagtgttgtggccctggggcccagccccaaactgggggctctgtatatagctatgaagaaaacacaaagtgtataaatctgagtatatatttacatgtctttttaaaagggtcgt

SEQ ID NO: 10782 - DNA, 2870 bp, Homo sapiens
  source 1..2870: mol_type = unassigned DNA
aacttttcctccaactcgcgctcgggagctggcgaggcggcggcggctcctcaaagtgggagagcttcaaggtcacgtggtccgtccagcccctgctatctcaccagacactgtccaccctgtatgttggatcagtactccagtgagaagacagcaggcactttcacccatgcagcccattcagtcttcataaccacctgtgatggaggcaagggtcagtttgaaaaggaggatcgagctcactgtggagtatccatggagatgtggagccttgtcaccaacctctaactgcagaactgggatgtggagctggaagtgcctcctcttctgggctgtgctggtcacagccacactctgcaccgctaggccgtccccgaccttgcctgaacaagcccagccctggggagcccctgtggaagtggagtccttcctggtccaccccggtgacctgctgcagcttcgctgtcggctgcgggacgatgtgcagagcatcaactggctgcgggacggggtgcagctggcggaaagcaaccgcacccgcatcacaggggaggaggtggaggtgcaggactccgtgcccgcagactccggcctctatgcttgcgtaaccagcagcccctcgggcagtgacaccacctacttctccgtcaatgtttcagatgctctcccctcctcggaggatgatgatgatgatgatgactcctcttcagaggagaaagaaacagataacaccaaaccaaaccccgtagctccatattggacatccccagaaaagatggaaaagaaattgcatgcagtgccggctgccaagacagtgaagttcaaatgcccttccagtgggaccccaaaccccacactgcgctggttgaaaaatggcaaagaattcaaacctgaccacagaattggaggctacaaggtccgttatgccacctggagcatcataatggactctgtggtgccctctgacaagggcaactacacctgcattgtggagaatgagtacggcagcatcaaccacacataccagctggatgtcgtggagcggtcccctcaccggcccatcctgcaagcagggttgcccgccaacaaaacagtggccctgggtagcaacgtggagttcatgtgtaaggtgtacagtgacccgcagccgcacatccagtggctaaagcacatcgaggtgaatgggagcaagattggcccagacaacctgccttatgtccagatcttgaagactgctggagttaataccaccgacaaagagatggaggtgcttcacttaagaaatgtctcctttgaggacgcaggggagtatacgtgcttggcgggtaactctatcggactctcccatcactctgcatggttgaccgttctggaagccctggaagagaggccggcagtgatgacctcgcccctgtacctggagatcatcatctattgcacaggggccttcctcatctcctgcatggtggggtcggtcatcgtctacaagatgaagagtggtaccaagaagagtgacttccacagccagatggctgtgcacaagctggccaagagcatccctctgcgcagacaggtaacagtgtctgctgactccagtgcatccatgaactctggggttcttctggttcggccatcacggctctcctccagtgggactcccatgctagcaggggtctctgagtatgagcttcccgaagaccctcgctgggagctgcctcgggacagactggtcttaggcaaacccctgggagagggctgctttgggcaggtggtgttggcagaggctatcgggctggacaaggacaaacccaaccgtgtgaccaaagtggctgtgaagatgttgaagtcggacgcaacagagaaagacttgtcagacctgatctcagaaatggagatgatgaagatgatcgggaagcataagaatatcatcaacctgctgggggcctgcacgcaggatggtcccttgtatgtcatcgtggagtatgcctccaagggcaacctgcgggagtacctgcaggcccggaggcccccagggctggaatactgctacaaccccagccacaacccagaggagcagctctcctccaaggacctggtgtcctgcgcctaccaggtggcccgaggcatggagtatctggcctccaagaagtgcatacaccgagacctggcagccaggaatgtcctggtgacagaggacaatgtgatgaagatagcagactttggcctcgcacgggacattcaccacatcgactactataaaaagacaaccaacggccgactgcctgtgaagtggatggcacccgaggcattatttgaccggatctacacccaccagagtgatgtgtggtctttcggggtgctcctgtgggagatcttcactctgggcggctccccataccccggtgtgcctgtggaggaacttttcaagctgctgaaggagggtcaccgcatggacaagcccagtaactgcaccaacgagctgtacatgatgatgcgggactgctggcatgcagtgccctcacagagacccaccttcaagcagctggtggaagacctggaccgcatcgtggccttgacctccaaccaggagtacctggacctgtccatgcccctggaccagtactcccccagctttcccgacacccggagctctacgtgctcctcaggggaggattccgtcttctctcatgagccgctgcccgaggagccctgcctgccccgacacccagcccagcttgccaatggcggactcaaacgccgctgactgccacccacacgccctccccagactccaccgtcagctgtaaccctcacccacagcccctgctgggcccaccacctgtccgtccctgtcccctttcctgctggca

SEQ ID NO: 10783 - DNA, 3680 bp, Homo sapiens
  source 1..3680: mol_type = unassigned DNA
gctttgcccgccgcagcccagccggggccggcgcctccctccgctcgccgcccgcccctttcacctcctggctccctcccgggcgatccgcgccccttgggtctcccctcccttccctccgtccgcgtctcctgcgccccctccctgcgctcgtcccgccgctcttcccgccgcccaacttttcctccaactcgcgctcgggagctggcgaggcggcggcggctcctcaggtcagtttgaaaaggaggatcgagctcactgtggagtatccatggagatgtggagccttgtcaccaacctctaactgcagaactgggatgtggagctggaagtgcctcctcttctgggctgtgctggtcacagccacactctgcaccgctaggccgtccccgaccttgcctgaacaagcccagccctggggagcccctgtggaagtggagtccttcctggtccaccccggtgacctgctgcagcttcgctgtcggctgcgggacgatgtgcagagcatcaactggctgcgggacggggtgcagctggcggaaagcaaccgcacccgcatcacaggggaggaggtggaggtgcaggactccgtgcccgcagactccggcctctatgcttgcgtaaccagcagcccctcgggcagtgacaccacctacttctccgtcaatgtttcagatgctctcccctcctcggaggatgatgatgatgatgatgactcctcttcagaggagaaagaaacagataacaccaaaccaaaccccgtagctccatattggacatccccagaaaagatggaaaagaaattgcatgcagtgccggctgccaagacagtgaagttcaaatgcccttccagtgggaccccaaaccccacactgcgctggttgaaaaatggcaaagaattcaaacctgaccacagaattggaggctacaaggtccgttatgccacctggagcatcataatggactctgtggtgccctctgacaagggcaactacacctgcattgtggagaatgagtacggcagcatcaaccacacataccagctggatgtcgtggagcggtcccctcaccggcccatcctgcaagcagggttgcccgccaacaaaacagtggccctgggtagcaacgtggagttcatgtgtaaggtgtacagtgacccgcagccgcacatccagtggctaaagcacatcgaggtgaatgggagcaagattggcccagacaacctgccttatgtccagatcttgaagactgctggagttaataccaccgacaaagagatggaggtgcttcacttaagaaatgtctcctttgaggacgcaggggagtatacgtgcttggcgggtaactctatcggactctcccatcactctgcatggttgaccgttctggaagccctggaagagaggccggcagtgatgacctcgcccctgtacctggagatcatcatctattgcacaggggccttcctcatctcctgcatggtggggtcggtcatcgtctacaagatgaagagtggtaccaagaagagtgacttccacagccagatggctgtgcacaagctggccaagagcatccctctgcgcagacaggtaacagtgtctgctgactccagtgcatccatgaactctggggttcttctggttcggccatcacggctctcctccagtgggactcccatgctagcaggggtctctgagtatgagcttcccgaagaccctcgctgggagctgcctcgggacagactggtcttaggcaaacccctgggagagggctgctttgggcaggtggtgttggcagaggctatcgggctggacaaggacaaacccaaccgtgtgaccaaagtggctgtgaagatgttgaagtcggacgcaacagagaaagacttgtcagacctgatctcagaaatggagatgatgaagatgatcgggaagcataagaatatcatcaacctgctgggggcctgcacgcaggatggtcccttgtatgtcatcgtggagtatgcctccaagggcaacctgcgggagtacctgcaggcccggaggcccccagggctggaatactgctacaaccccagccacaacccagaggagcagctctcctccaaggacctggtgtcctgcgcctaccaggtggcccgaggcatggagtatctggcctccaagaagtgcatacaccgagacctggcagccaggaatgtcctggtgacagaggacaatgtgatgaagatagcagactttggcctcgcacgggacattcaccacatcgactactataaaaagacaaccaacggccgactgcctgtgaagtggatggcacccgaggcattatttgaccggatctacacccaccagagtgatgtgtggtctttcggggtgctcctgtgggagatcttcactctgggcggctccccataccccggtgtgcctgtggaggaacttttcaagctgctgaaggagggtcaccgcatggacaagcccagtaactgcaccaacgagctgtacatgatgatgcgggactgctggcatgcagtgccctcacagagacccaccttcaagcagctggtggaagacctggaccgcatcgtggccttgacctccaaccaggagtacctggacctgtccatgcccctggaccagtactcccccagctttcccgacacccggagctctacgtgctcctcaggggaggattccgtcttctctcatgagccgctgcccgaggagccctgcctgccccgacacccagcccagcttgccaatggcggactcaaacgccgctgactgccacccacacgccctccccagactccaccgtcagctgtaaccctcacccacagcccctgctgggcccaccacctgtccgtccctgtcccctttcctgctggcaggagccggctgcctaccaggggccttcctgtgtggcctgccttcaccccactcagctcacctctccctccacctcctctccacctgctggtgagaggtgcaaagaggcagatctttgctgccagccacttcatcccctcccagatgttggaccaacacccctccctgccaccaggcactgcctggagggcagggagtgggagccaatgaacaggcatgcaagtgagagcttcctgagctttctcctgtcggtttggtctgttttgccttcacccataagcccctcgcactctggtggcaggtgccttgtcctcagggctacagcagtagggaggtcagtgcttcgtgcctcgattgaaggtgacctctgccccagataggtggtgccagtggcttattaattccgatactagtttgctttgctgaccaaatgcctggtaccagaggatggtgaggcgaaggccaggttgggggcagtgttgtggccctggggcccagccccaaactgggggctctgtatatagctatgaagaaaacacaaagtgtataaatctgagtatatatttacatgtctttttaaaagggtcgttaccagagatttacccatcgggtaagatgctcctggtggctgggaggcatcagttgctatatattaaaaacaaaaaagaaaaaaaaggaaaatgtttttaaaaaggtcatatattttttgctacttttgctgttttatttttttaaattatgttctaaacctattttcagtttaggtccctcaataaaaattgctgctgcttcatt

SEQ ID NO: 10784 - DNA, 587 bp, Homo sapiens
  source 1..587: mol_type = unassigned DNA
aactcgcgctcgggagctggcgaggcggcggcggctcctcaaccttgattctgcagtgggacctcccaggcccccttgccccccgcaacttctggactcatatccgtcagacatcacttgtcaccttccagcatcagggagaactggatccctcctggctccacactcttaggctctttggtcagtttgaaaaggaggatcgagctcactgtggagtatccatggagatgtggagccttgtcaccaacctctaactgcagaactgggatgtggagctggaagtgcctcctcttctgggctgtgctggtcacagccacactctgcaccgctaggccgtccccgaccttgcctgaacaagcccagccctggggagcccctgtggaagtggagtccttcctggtccaccccggtgacctgctgcagcttcgctgtcggctgcgggacgatgtgcagagcatcaactggctgcgggacggggtgcagctggcggaaagcaaccgcacccgcatcacaggggaggaggtggaggtgcaggactccgtgcccgcagactccggcctctatgcttgcgtaaccagcagcccctc

SEQ ID NO: 10785 - DNA, 5375 bp, Homo sapiens
  source 1..5375: mol_type = unassigned DNA
ccctttcacctcctggctccctcccgggcgatccgcgccccttgggtctcccctcccttccctccgtccgcgtctcctgcgccccctccctgcgctcgtcccgccgctcttcccgccgcccaacttttcctccaactcgcgctcgggagctggcgaggcggcggcggctcctcaaagtgggagagcttcaaggtcacgtggtccgtccagcccctgctatctcaccagacactgtccaccctgtatgttggatcagtactccagtgagaagacagcaggcactttcacccatgcagcccattcagtcttcataaccacctgtgatggaggcaagggtcagtttgaaaaggaggatcgagctcactgtggagtatccatggagatgtggagccttgtcaccaacctctaactgcagaactgggatgtggagctggaagtgcctcctcttctgggctgtgctggtcacagccacactctgcaccgctaggccgtccccgaccttgcctgaacaagcccagccctggggagcccctgtggaagtggagtccttcctggtccaccccggtgacctgctgcagcttcgctgtcggctgcgggacgatgtgcagagcatcaactggctgcgggacggggtgcagctggcggaaagcaaccgcacccgcatcacaggggaggaggtggaggtgcaggactccgtgcccgcagactccggcctctatgcttgcgtaaccagcagcccctcgggcagtgacaccacctacttctccgtcaatgtttcagatgctctcccctcctcggaggatgatgatgatgatgatgactcctcttcagaggagaaagaaacagataacaccaaaccaaaccccgtagctccatattggacatccccagaaaagatggaaaagaaattgcatgcagtgccggctgccaagacagtgaagttcaaatgcccttccagtgggaccccaaaccccacactgcgctggttgaaaaatggcaaagaattcaaacctgaccacagaattggaggctacaaggtccgttatgccacctggagcatcataatggactctgtggtgccctctgacaagggcaactacacctgcattgtggagaatgagtacggcagcatcaaccacacataccagctggatgtcgtggagcggtcccctcaccggcccatcctgcaagcagggttgcccgccaacaaaacagtggccctgggtagcaacgtggagttcatgtgtaaggtgtacagtgacccgcagccgcacatccagtggctaaagcacatcgaggtgaatgggagcaagattggcccagacaacctgccttatgtccagatcttgaagactgctggagttaataccaccgacaaagagatggaggtgcttcacttaagaaatgtctcctttgaggacgcaggggagtatacgtgcttggcgggtaactctatcggactctcccatcactctgcatggttgaccgttctggaagccctggaagagaggccggcagtgatgacctcgcccctgtacctggagatcatcatctattgcacaggggccttcctcatctcctgcatggtggggtcggtcatcgtctacaagatgaagagtggtaccaagaagagtgacttccacagccagatggctgtgcacaagctggccaagagcatccctctgcgcagacaggtaacagtgtctgctgactccagtgcatccatgaactctggggttcttctggttcggccatcacggctctcctccagtgggactcccatgctagcaggggtctctgagtatgagcttcccgaagaccctcgctgggagctgcctcgggacagactggtcttaggcaaacccctgggagagggctgctttgggcaggtggtgttggcagaggctatcgggctggacaaggacaaacccaaccgtgtgaccaaagtggctgtgaagatgttgaagtcggacgcaacagagaaagacttgtcagacctgatctcagaaatggagatgatgaagatgatcgggaagcataagaatatcatcaacctgctgggggcctgcacgcaggatggtcccttgtatgtcatcgtggagtatgcctccaagggcaacctgcgggagtacctgcaggcccggaggcccccagggctggaatactgctacaaccccagccacaacccagaggagcagctctcctccaaggacctggtgtcctgcgcctaccaggtggcccgaggcatggagtatctggcctccaagaagtgcatacaccgagacctggcagccaggaatgtcctggtgacagaggacaatgtgatgaagatagcagactttggcctcgcacgggacattcaccacatcgactactataaaaagacaaccaacggccgactgcctgtgaagtggatggcacccgaggcattatttgaccggatctacacccaccagagtgatgtgtggtctttcggggtgctcctgtgggagatcttcactctgggcggctccccataccccggtgtgcctgtggaggaacttttcaagctgctgaaggagggtcaccgcatggacaagcccagtaactgcaccaacgagctgtacatgatgatgcgggactgctggcatgcagtgccctcacagagacccaccttcaagcagctggtggaagacctggaccgcatcgtggccttgacctccaaccaggagtacctggacctgtccatgcccctggaccagtactcccccagctttcccgacacccggagctctacgtgctcctcaggggaggattccgtcttctctcatgagccgctgcccgaggagccctgcctgccccgacacccagcccagcttgccaatggcggactcaaacgccgctgactgccacccacacgccctccccagactccaccgtcagctgtaaccctcacccacagcccctgctgggcccaccacctgtccgtccctgtcccctttcctgctggcaggagccggctgcctaccaggggccttcctgtgtggcctgccttcaccccactcagctcacctctccctccacctcctctccacctgctggtgagaggtgcaaagaggcagatctttgctgccagccacttcatcccctcccagatgttggaccaacacccctccctgccaccaggcactgcctggagggcagggagtgggagccaatgaacaggcatgcaagtgagagcttcctgagctttctcctgtcggtttggtctgttttgccttcacccataagcccctcgcactctggtggcaggtgccttgtcctcagggctacagcagtagggaggtcagtgcttcgtgcctcgattgaaggtgacctctgccccagataggtggtgccagtggcttattaattccgatactagtttgctttgctgaccaaatgcctggtaccagaggatggtgaggcgaaggccaggttgggggcagtgttgtggccctggggcccagccccaaactgggggctctgtatatagctatgaagaaaacacaaagtgtataaatctgagtatatatttacatgtctttttaaaagggtcgttaccagagatttacccatcgggtaagatgctcctggtggctgggaggcatcagttgctatatattaaaaacaaaaaagaaaaaaaaggaaaatgtttttaaaaaggtcatatattttttgctacttttgctgttttatttttttaaattatgttctaaacctattttcagtttaggtccctcaataaaaattgctgctgcttcatttatctatgggctgtatgaaaagggtgggaatgtccactggaaagaagggacacccacgggccctggggctaggtctgtcccgagggcaccgcatgctcccggcgcaggttccttgtaacctcttcttcctaggtcctgcacccagacctcacgacgcacctcctgcctctccgctgcttttggaaagtcagaaaaagaagatgtctgcttcgagggcaggaaccccatccatgcagtagaggcgctgggcagagagtcaaggcccagcagccatcgaccatggatggtttcctccaaggaaaccggtggggttgggctggggagggggcacctacctaggaatagccacggggtagagctacagtgattaagaggaaagcaagggcgcggttgctcacgcctgtaatcccagcactttgggacaccgaggtgggcagatcacttcaggtcaggagtttgagaccagcctggccaacttagtgaaaccccatctctactaaaaatgcaaaaattatccaggcatggtggcacacgcctgtaatcccagctccacaggaggctgaggcagaatcccttgaagctgggaggcggaggttgcagtgagccgagattgcgccattgcactccagcctgggcaacagagaaaacaaaaaggaaaacaaatgatgaaggtctgcagaaactgaaacccagacatgtgtctgccccctctatgtgggcatggttttgccagtgcttctaagtgcaggagaacatgtcacctgaggctagttttgcattcaggtccctggcttcgtttcttgttggtatgcctccccagatcgtccttcctgtatccatgtgaccagactgtatttgttgggactgtcgcagatcttggcttcttacagttcttcctgtccaaactccatcctgtccctcaggaacggggggaaaattctccgaatgtttttggttttttggctgcttggaatttacttctgccacctgctggtcatcactgtcctcactaagtggattctggctcccccgtacctcatggctcaaactaccactcctcagtcgctatattaaagcttatattttgctggattactgctaaatacaaaagaaagttcaatatgttttcatttctgtagggaaaatgggattgctgctttaaatttctgagctagggattttttggcagctgcagtgttggcgactattgtaaaattctctttgtttctctctgtaaatagcacctgctaacattacaatttgtatttatgtttaaagaaggcatcatttggtgaacagaactaggaaatgaatttttagctcttaaaagcatttgctttgagaccgcacaggagtgtctttccttgtaaaacagtgatgataatttctgccttggccctaccttgaagcaatgttgtgtgaagggatgaagaatctaaaagtcttcataagtccttgggagaggtgctagaaaaatataaggcactatcataattacagtgatgtccttgctgttactactcaaatcacccacaaatttccccaaagactgcgctagctgtcaaataaaagacagtgaaattgacctga

SEQ ID NO: 10786 - DNA, 529 bp, Homo sapiens
  source 1..529: mol_type = unassigned DNA
aaattaaaactcagattcttcagcctgtcttgaccacctccctccttaacatttctggagacttggagatgcggcgttgagattcgggggagaaaagaaagttcccttggatcccgagttatttaagatctcaccaagttattcgccgccgctgtgggacctcccaggcccccttgccccccgcaacttctggactcatatccgtcagacatcacttgtcaccttccagcatcagggagaactggatccctcctggctccacactcttaggctctttggtcagtttgaaaaggaggatcgagctcactgtggagtatccatggagatgtggagccttgtcaccaacctctaactgcagaactgggatgtggagctggaagtgcctcctcttctgggctgtgctggtcacagccacactctgcaccgctaggccgtccccgaccttgcctgaacaagatgctctcccctcctcggaggatgatgatgatgatgatgactcctcttcagaggagaaagaaacagataacac

SEQ ID NO: 10787 - DNA, 389 bp, Homo sapiens
  source 1..389: mol_type = unassigned DNA
caaatttggaggaatgaaattctccagctagaaggcccaagaaagtcttatggaagaaacagcttcttaaggtggggttcagagaaaagggaagggctggcctgttgcagaacaaggaatggcatgaagaaagtcttgcacagaggcatggatgttgcttcgagctgtggcgccctatagaaatagaacatgagcagctggtcacagtggctcatgcctgtaatcccagcactttgggaggccaaggcaggcggattgcttgagcccatgagatggagatgagcctggacaacatgggtcagtttgaaaaggaggatcgagctcactgtggagtatccatggagatgtggagccttgtcaccaacctctaactgcagaactgggatgtg

SEQ ID NO: 10788 - DNA, 5900 bp, Homo sapiens
  source 1..5900: mol_type = unassigned DNA
agatgcaggggcgcaaacgccaaaggagaccaggctgtaggaagagaagggcagagcgccggacagctcggcccgctccccgtcctttggggccgcggctggggaactacaaggcccagcaggcagctgcagggggcggaggcggaggagggaccagcgcgggtgggagtgagagagcgagccctcgcgccccgccggcgcatagcgctcggagcgctcttgcggccacaggcgcggcgtcctcggcggcgggcggcagctagcgggagccgggacgccggtgcagccgcagcgcgcggaggaacccgggtgtgccgggagctgggcggccacgtccggacgggaccgagacccctcgtagcgcattgcggcgacctcgccttccccggccgcgagcgcgccgctgcttgaaaagccgcggaacccaaggacttttctccggtccgagctcggggcgccccgcagggcgcacggtacccgtgctgcagtcgggcacgccgcggcgccggggcctccgcagggcgatggagcccggtctgcaaggaaagtgaggcgccgccgctgcgttctggaggaggggggcacaaggtctggagaccccgggtggcggacgggagccctccccccgccccgcctccggggcaccagctccggctccattgttcccgcccgggctggaggcgccgagcaccgagcgccgccgggagtcgagcgccggccgcggagctcttgcgaccccgccaggacccgaacagagcccgggggcggcgggccggagccggggacgcgggcacacgcccgctcgcacaagccacggcggactctcccgaggcggaacctccacgccgagcgagggtcagtttgaaaaggaggatcgagctcactgtggagtatccatggagatgtggagccttgtcaccaacctctaactgcagaactgggatgtggagctggaagtgcctcctcttctgggctgtgctggtcacagccacactctgcaccgctaggccgtccccgaccttgcctgaacaagcccagccctggggagcccctgtggaagtggagtccttcctggtccaccccggtgacctgctgcagcttcgctgtcggctgcgggacgatgtgcagagcatcaactggctgcgggacggggtgcagctggcggaaagcaaccgcacccgcatcacaggggaggaggtggaggtgcaggactccgtgcccgcagactccggcctctatgcttgcgtaaccagcagcccctcgggcagtgacaccacctacttctccgtcaatgtttcagatgctctcccctcctcggaggatgatgatgatgatgatgactcctcttcagaggagaaagaaacagataacaccaaaccaaaccgtatgcccgtagctccatattggacatccccagaaaagatggaaaagaaattgcatgcagtgccggctgccaagacagtgaagttcaaatgcccttccagtgggaccccaaaccccacactgcgctggttgaaaaatggcaaagaattcaaacctgaccacagaattggaggctacaaggtccgttatgccacctggagcatcataatggactctgtggtgccctctgacaagggcaactacacctgcattgtggagaatgagtacggcagcatcaaccacacataccagctggatgtcgtggagcggtcccctcaccggcccatcctgcaagcagggttgcccgccaacaaaacagtggccctgggtagcaacgtggagttcatgtgtaaggtgtacagtgacccgcagccgcacatccagtggctaaagcacatcgaggtgaatgggagcaagattggcccagacaacctgccttatgtccagatcttgaagactgctggagttaataccaccgacaaagagatggaggtgcttcacttaagaaatgtctcctttgaggacgcaggggagtatacgtgcttggcgggtaactctatcggactctcccatcactctgcatggttgaccgttctggaagccctggaagagaggccggcagtgatgacctcgcccctgtacctggagatcatcatctattgcacaggggccttcctcatctcctgcatggtggggtcggtcatcgtctacaagatgaagagtggtaccaagaagagtgacttccacagccagatggctgtgcacaagctggccaagagcatccctctgcgcagacaggtaacagtgtctgctgactccagtgcatccatgaactctggggttcttctggttcggccatcacggctctcctccagtgggactcccatgctagcaggggtctctgagtatgagcttcccgaagaccctcgctgggagctgcctcgggacagactggtcttaggcaaacccctgggagagggctgctttgggcaggtggtgttggcagaggctatcgggctggacaaggacaaacccaaccgtgtgaccaaagtggctgtgaagatgttgaagtcggacgcaacagagaaagacttgtcagacctgatctcagaaatggagatgatgaagatgatcgggaagcataagaatatcatcaacctgctgggggcctgcacgcaggatggtcccttgtatgtcatcgtggagtatgcctccaagggcaacctgcgggagtacctgcaggcccggaggcccccagggctggaatactgctacaaccccagccacaacccagaggagcagctctcctccaaggacctggtgtcctgcgcctaccaggtggcccgaggcatggagtatctggcctccaagaagtgcatacaccgagacctggcagccaggaatgtcctggtgacagaggacaatgtgatgaagatagcagactttggcctcgcacgggacattcaccacatcgactactataaaaagacaaccaacggccgactgcctgtgaagtggatggcacccgaggcattatttgaccggatctacacccaccagagtgatgtgtggtctttcggggtgctcctgtgggagatcttcactctgggcggctccccataccccggtgtgcctgtggaggaacttttcaagctgctgaaggagggtcaccgcatggacaagcccagtaactgcaccaacgagctgtacatgatgatgcgggactgctggcatgcagtgccctcacagagacccaccttcaagcagctggtggaagacctggaccgcatcgtggccttgacctccaaccaggagtacctggacctgtccatgcccctggaccagtactcccccagctttcccgacacccggagctctacgtgctcctcaggggaggattccgtcttctctcatgagccgctgcccgaggagccctgcctgccccgacacccagcccagcttgccaatggcggactcaaacgccgctgactgccacccacacgccctccccagactccaccgtcagctgtaaccctcacccacagcccctgctgggcccaccacctgtccgtccctgtcccctttcctgctggcaggagccggctgcctaccaggggccttcctgtgtggcctgccttcaccccactcagctcacctctccctccacctcctctccacctgctggtgagaggtgcaaagaggcagatctttgctgccagccacttcatcccctcccagatgttggaccaacacccctccctgccaccaggcactgcctggagggcagggagtgggagccaatgaacaggcatgcaagtgagagcttcctgagctttctcctgtcggtttggtctgttttgccttcacccataagcccctcgcactctggtggcaggtgccttgtcctcagggctacagcagtagggaggtcagtgcttcgtgcctcgattgaaggtgacctctgccccagataggtggtgccagtggcttattaattccgatactagtttgctttgctgaccaaatgcctggtaccagaggatggtgaggcgaaggccaggttgggggcagtgttgtggccctggggcccagccccaaactgggggctctgtatatagctatgaagaaaacacaaagtgtataaatctgagtatatatttacatgtctttttaaaagggtcgttaccagagatttacccatcgggtaagatgctcctggtggctgggaggcatcagttgctatatattaaaaacaaaaaagaaaaaaaaggaaaatgtttttaaaaaggtcatatattttttgctacttttgctgttttatttttttaaattatgttctaaacctattttcagtttaggtccctcaataaaaattgctgctgcttcatttatctatgggctgtatgaaaagggtgggaatgtccactggaaagaagggacacccacgggccctggggctaggtctgtcccgagggcaccgcatgctcccggcgcaggttccttgtaacctcttcttcctaggtcctgcacccagacctcacgacgcacctcctgcctctccgctgcttttggaaagtcagaaaaagaagatgtctgcttcgagggcaggaaccccatccatgcagtagaggcgctgggcagagagtcaaggcccagcagccatcgaccatggatggtttcctccaaggaaaccggtggggttgggctggggagggggcacctacctaggaatagccacggggtagagctacagtgattaagaggaaagcaagggcgcggttgctcacgcctgtaatcccagcactttgggacaccgaggtgggcagatcacttcaggtcaggagtttgagaccagcctggccaacttagtgaaaccccatctctactaaaaatgcaaaaattatccaggcatggtggcacacgcctgtaatcccagctccacaggaggctgaggcagaatcccttgaagctgggaggcggaggttgcagtgagccgagattgcgccattgcactccagcctgggcaacagagaaaacaaaaaggaaaacaaatgatgaaggtctgcagaaactgaaacccagacatgtgtctgccccctctatgtgggcatggttttgccagtgcttctaagtgcaggagaacatgtcacctgaggctagttttgcattcaggtccctggcttcgtttcttgttggtatgcctccccagatcgtccttcctgtatccatgtgaccagactgtatttgttgggactgtcgcagatcttggcttcttacagttcttcctgtccaaactccatcctgtccctcaggaacggggggaaaattctccgaatgtttttggttttttggctgcttggaatttacttctgccacctgctggtcatcactgtcctcactaagtggattctggctcccccgtacctcatggctcaaactaccactcctcagtcgctatattaaagcttatattttgctggattactgctaaatacaaaagaaagttcaatatgttttcatttctgtagggaaaatgggattgctgctttaaatttctgagctagggattttttggcagctgcagtgttggcgactattgtaaaattctctttgtttctctctgtaaatagcacctgctaacattacaatttgtatttatgtttaaagaaggcatcatttggtgaacagaactaggaaatgaatttttagctcttaaaagcatttgctttgagaccgcacaggagtgtctttccttgtaaaacagtgatgataatttctgccttggccctaccttgaagcaatgttgtgtgaagggatgaagaatctaaaagtcttcataagtccttgggagaggtgctagaaaaatataaggcactatcataattacagtgatgtccttgctgttactactcaaatcacccacaaatttccccaaagactgcgctagctgtcaaataaaagacagtgaaattgacctg

SEQ ID NO: 10789 - DNA, 1155 bp, Homo sapiens
  source 1..1155: mol_type = unassigned DNA
tttcacctcctggctccctcccgggcgatccgcgccccttgggtctcccctcccttccctccgtccgcgtctcctgcgccccctccctgcgctcgtcccgccgctcttcccgccgcccaacttttcctccaactcgcgctcgggagctggcgaggcggcggcggctcctcaggtcagtttgaaaaggaggatcgagctcactgtggagtatccatggagatgtggagccttgtcaccaacctctaactgcagaactgggatgtggagctggaagtgcctcctcttctgggctgtgctggtcacagccacactctgcaccgctaggccgtccccgaccttgcctgaacaagcccagccctggggagcccctgtggaagtggagtccttcctggtccaccccggtgacctgctgcagcttcgctgtcggctgcgggacgatgtgcagagcatcaactggctgcgggacggggtgcagctggcggaaagcaaccgcacccgcatcacaggggaggaggtggaggtgcaggactccgtgcccgcagactccggcctctatgcttgcgtaaccagcagcccctcgggcagtgacaccacctacttctccgtcaatgtttcagatgctctcccctcctcggaggatgatgatgatgatgatgactcctcttcagaggagaaagaaacagataacaccaaaccaaaccgtatgcccgtagctccatattggacatccccagaaaagatggaaaagaaattgcatgcagtgccggctgccaagacagtgaagttcaaatgcccttccagtgggaccccaaaccccacactgcgctggttgaaaaatggcaaagaattcaaacctgaccacagaattggaggctacaaggtccgttatgccacctggagcatcataatggactctgtggtgccctctgacaagggcaactacacctgcattgtggagaatgagtacggcagcatcaaccacacataccagctggatgtcgtggagcggtcccctcaccggcccatcctgcaagcagggttgcccgccaacaaaacagtggccctgggtagcaacgtggagttcatgtgtaaggtgtacagtgacccgcagccgcacatccagtggctaaagcacatcgaggtgaatgggagcaa

SEQ ID NO: 10790 - DNA, 657 bp, Homo sapiens
  source 1..657: mol_type = unassigned DNA
ttgggtctcccctcccttccctccgtccgcgtctcctgcgccccctccctgcgctcgtcccgccgctcttcccgccgcccaacttttcctccaactcgcgctcgggagctggcgaggcggcggcggctcctcaggtcagtttgaaaaggaggatcgagctcactgtggagtatccatggagatgtggagccttgtcaccaacctctaactgcagaactgggatgtggagctggaagtgcctcctcttctgggctgtgctggtcacagccacactctgcaccgctaggccgtccccgaccttgcctgaacaagatgctctcccctcctcggaggatgatgatgatgatgatgactcctcttcagaggagaaagaaacagataacaccaaaccaaaccccgtagctccatattggacatccccagaaaagatggaaaagaaattgcatgcagtgccggctgccaagacagtgaagttcaaatgcccttccagtgggaccccaaaccccacactgcgctggttgaaaaatggcaaagaattcaaacctgaccacagaattggaggctacaaggtccgttatgccacctggagcatcataatggactctgtggtgccctctgacaagggcaactacacctgcattgtggagaatgagtacg

SEQ ID NO: 10791 - DNA, 688 bp, Homo sapiens
  source 1..688: mol_type = unassigned DNA
ccctttcacctcctggctccctcccgggcgatccgcgccccttgggtctcccctcccttccctccgtccgcgtctcctgcgccccctccctgcgctcgtcccgccgctcttcccgccgcccaacttttcctccaactcgcgctcgggagctggcgaggcggcggcggctcctcaggtcagtttgaaaaggaggatcgagctcactgtggagtatccatggagatgtggagccttgtcaccaacctctaactgcagaactgggatgtggagctggaagtgcctcctcttctgggctgtgctggtcacagccacactctgcaccgctaggccgtccccgaccttgcctgaacaagatgctctcccctcctcggaggatgatgatgatgatgatgactcctcttcagaggagaaagaaacagataacaccaaaccaaaccgtatgcccgtagctccatattggacatccccagaaaagatggaaaagaaattgcatgcagtgccggctgccaagacagtgaagttcaaatgcccttccagtgggaccccaaaccccacactgcgctggttgaaaaatggcaaagaattcaaacctgaccacagaattggaggctacaaggtccgttatgccacctggagcatcataatggactctgtggtgccctctgacaagggcaactacacctgcatt

SEQ ID NO: 10792 - DNA, 467 bp, Homo sapiens
  source 1..467: mol_type = unassigned DNA
accacctccctccttaacatttctggagacttggagatgcggcgttgagattcgggggagaaaagaaagttcccttggatcccgagttatttaagatctcaccaagttattcgccgccgctgggtcagtttgaaaaggaggatcgagctcactgtggagtatccatggagatgtggagccttgtcaccaacctctaactgcagaactgggatgtggagctggaagtgcctcctcttctgggctgtgctggtcacagccacactctgcaccgctaggccgtccccgaccttgcctgaacaagatgctctcccctcctcggaggatgatgatgatgatgatgactcctcttcagaggagaaagaaacagataacaccaaaccaaaccccgtagctccatattggacatccccagaaaagatggaaaagaaattgcatgcagtgccggctgccaagacagtgaagttcaa

SEQ ID NO: 10793 - DNA, 5590 bp, Homo sapiens
  source 1..5590: mol_type = unassigned DNA
agcgctcttgcggccacaggcgcggcgtcctcggcggcgggcggcagctagcgggagccgggacgccggtgcagccgcagcgcgcggaggaacccgggtgtgccgggagctgggcggccacgtccggacgggaccgagacccctcgtagcgcattgcggcgacctcgccttccccggccgcgagcgcgccgctgcttgaaaagccgcggaacccaaggacttttctccggtccgagctcggggcgccccgcagggcgcacggtacccgtgctgcagtcgggcacgccgcggcgccggggcctccgcagggcgatggagcccggtctgcaaggaaagtgaggcgccgccgctgcgttctggaggaggggggcacaaggtctggagaccccgggtggcggacgggagccctccccccgccccgcctccggggcaccagctccggctccattgttcccgcccgggctggaggcgccgagcaccgagcgccgccgggagtcgagcgccggccgcggagctcttgcgaccccgccaggacccgaacagagcccgggggcggcgggccggagccggggacgcgggcacacgcccgctcgcacaagccacggcggactctcccgaggcggaacctccacgccgagcgagggtcagtttgaaaaggaggatcgagctcactgtggagtatccatggagatgtggagccttgtcaccaacctctaactgcagaactgggatgtggagctggaagtgcctcctcttctgggctgtgctggtcacagccacactctgcaccgctaggccgtccccgaccttgcctgaacaagcccagccctggggagcccctgtggaagtggagtccttcctggtccaccccggtgacctgctgcagcttcgctgtcggctgcgggacgatgtgcagagcatcaactggctgcgggacggggtgcagctggcggaaagcaaccgcacccgcatcacaggggaggaggtggaggtgcaggactccgtgcccgcagactccggcctctatgcttgcgtaaccagcagcccctcgggcagtgacaccacctacttctccgtcaatgtttcagatgctctcccctcctcggaggatgatgatgatgatgatgactcctcttcagaggagaaagaaacagataacaccaaaccaaaccgtatgcccgtagctccatattggacatccccagaaaagatggaaaagaaattgcatgcagtgccggctgccaagacagtgaagttcaaatgcccttccagtgggaccccaaaccccacactgcgctggttgaaaaatggcaaagaattcaaacctgaccacagaattggaggctacaaggtccgttatgccacctggagcatcataatggactctgtggtgccctctgacaagggcaactacacctgcattgtggagaatgagtacggcagcatcaaccacacataccagctggatgtcgtggagcggtcccctcaccggcccatcctgcaagcagggttgcccgccaacaaaacagtggccctgggtagcaacgtggagttcatgtgtaaggtgtacagtgacccgcagccgcacatccagtggctaaagcacatcgaggtgaatgggagcaagattggcccagacaacctgccttatgtccagatcttgaagactgctggagttaataccaccgacaaagagatggaggtgcttcacttaagaaatgtctcctttgaggacgcaggggagtatacgtgcttggcgggtaactctatcggactctcccatcactctgcatggttgaccgttctggaagccctggaagagaggccggcagtgatgacctcgcccctgtacctggagatcatcatctattgcacaggggccttcctcatctcctgcatggtggggtcggtcatcgtctacaagatgaagagtggtaccaagaagagtgacttccacagccagatggctgtgcacaagctggccaagagcatccctctgcgcagacaggtgtctgctgactccagtgcatccatgaactctggggttcttctggttcggccatcacggctctcctccagtgggactcccatgctagcaggggtctctgagtatgagcttcccgaagaccctcgctgggagctgcctcgggacagactggtcttaggcaaacccctgggagagggctgctttgggcaggtggtgttggcagaggctatcgggctggacaaggacaaacccaaccgtgtgaccaaagtggctgtgaagatgttgaagtcggacgcaacagagaaagacttgtcagacctgatctcagaaatggagatgatgaagatgatcgggaagcataagaatatcatcaacctgctgggggcctgcacgcaggatggtcccttgtatgtcatcgtggagtatgcctccaagggcaacctgcgggagtacctgcaggcccggaggcccccagggctggaatactgctacaaccccagccacaacccagaggagcagctctcctccaaggacctggtgtcctgcgcctaccaggtggcccgaggcatggagtatctggcctccaagaagtgcatacaccgagacctggcagccaggaatgtcctggtgacagaggacaatgtgatgaagatagcagactttggcctcgcacgggacattcaccacatcgactactataaaaagacaaccaacggccgactgcctgtgaagtggatggcacccgaggcattatttgaccggatctacacccaccagagtgatgtgtggtctttcggggtgctcctgtgggagatcttcactctgggcggctccccataccccggtgtgcctgtggaggaacttttcaagctgctgaaggagggtcaccgcatggacaagcccagtaactgcaccaacgagctgtacatgatgatgcgggactgctggcatgcagtgccctcacagagacccaccttcaagcagctggtggaagacctggaccgcatcgtggccttgacctccaaccaggagtacctggacctgtccatgcccctggaccagtactcccccagctttcccgacacccggagctctacgtgctcctcaggggaggattccgtcttctctcatgagccgctgcccgaggagccctgcctgccccgacacccagcccagcttgccaatggcggactcaaacgccgctgactgccacccacacgccctccccagactccaccgtcagctgtaaccctcacccacagcccctgctgggcccaccacctgtccgtccctgtcccctttcctgctggcaggagccggctgcctaccaggggccttcctgtgtggcctgccttcaccccactcagctcacctctccctccacctcctctccacctgctggtgagaggtgcaaagaggcagatctttgctgccagccacttcatcccctcccagatgttggaccaacacccctccctgccaccaggcactgcctggagggcagggagtgggagccaatgaacaggcatgcaagtgagagcttcctgagctttctcctgtcggtttggtctgttttgccttcacccataagcccctcgcactctggtggcaggtgccttgtcctcagggctacagcagtagggaggtcagtgcttcgtgcctcgattgaaggtgacctctgccccagataggtggtgccagtggcttattaattccgatactagtttgctttgctgaccaaatgcctggtaccagaggatggtgaggcgaaggccaggttgggggcagtgttgtggccctggggcccagccccaaactgggggctctgtatatagctatgaagaaaacacaaagtgtataaatctgagtatatatttacatgtctttttaaaagggtcgttaccagagatttacccatcgggtaagatgctcctggtggctgggaggcatcagttgctatatattaaaaacaaaaaagaaaaaaaaggaaaatgtttttaaaaaggtcatatattttttgctacttttgctgttttatttttttaaattatgttctaaacctattttcagtttaggtccctcaataaaaattgctgctgcttcatttatctatgggctgtatgaaaagggtgggaatgtccactggaaagaagggacacccacgggccctggggctaggtctgtcccgagggcaccgcatgctcccggcgcaggttccttgtaacctcttcttcctaggtcctgcacccagacctcacgacgcacctcctgcctctccgctgcttttggaaagtcagaaaaagaagatgtctgcttcgagggcaggaaccccatccatgcagtagaggcgctgggcagagagtcaaggcccagcagccatcgaccatggatggtttcctccaaggaaaccggtggggttgggctggggagggggcacctacctaggaatagccacggggtagagctacagtgattaagaggaaagcaagggcgcggttgctcacgcctgtaatcccagcactttgggacaccgaggtgggcagatcacttcaggtcaggagtttgagaccagcctggccaacttagtgaaaccccatctctactaaaaatgcaaaaattatccaggcatggtggcacacgcctgtaatcccagctccacaggaggctgaggcagaatcccttgaagctgggaggcggaggttgcagtgagccgagattgcgccattgcactccagcctgggcaacagagaaaacaaaaaggaaaacaaatgatgaaggtctgcagaaactgaaacccagacatgtgtctgccccctctatgtgggcatggttttgccagtgcttctaagtgcaggagaacatgtcacctgaggctagttttgcattcaggtccctggcttcgtttcttgttggtatgcctccccagatcgtccttcctgtatccatgtgaccagactgtatttgttgggactgtcgcagatcttggcttcttacagttcttcctgtccaaactccatcctgtccctcaggaacggggggaaaattctccgaatgtttttggttttttggctgcttggaatttacttctgccacctgctggtcatcactgtcctcactaagtggattctggctcccccgtacctcatggctcaaactaccactcctcagtcgctatattaaagcttatattttgctggattactgctaaatacaaaagaaagttcaatatgttttcatttctgtagggaaaatgggattgctgctttaaatttctgagctagggattttttggcagctgcagtgttggcgactattgtaaaattctctttgtttctctctgtaaatagcacctgctaacattacaatttgtatttatgtttaaagaaggcatcatttggtgaacagaactaggaaatgaatttttagctcttaaaagcatttgctttgagaccgcacaggagtgtctttccttgtaaaacagtgatgataatttctgccttggccctaccttgaagcaatgttgtgtgaagggatgaagaatctaaaagtcttcataagtccttgggagaggtgctagaaaaatataaggcactatcataatta

SEQ ID NO: 10794 - DNA, 2593 bp, Homo sapiens
  source 1..2593: mol_type = unassigned DNA
cgagggagcgcgcgcggccgccacaaagctcgggcgccgcggggctgcatgcggcgtacctggcccggcgcggcgactgctctccgggctggcgggggccggccgcgagccccgggggccccgaggccgcagcttgcctgcgcgctctgagccttcgcaactcgcgagcaaagtttggtggaggcaacgccaagcctgagtcctttcttcctctcgttccccaaatccgagggcagcccgcgggcgtcatgcccgcgctcctccgcagcctggggtacgcgtgaagcccgggaggcttggcgccggcgaagacccaaggaccactcttctgcgtttggagttgctccccgcaaccccgggctcgtcgctttctccatcccgacccacgcggggcgcggggacaacacaggtcgcggaggagcgttgccattcaagtgactgcagcagcagcggcagcgcctcggttcctgagcccaccgcaggctgaaggcattgcgcgtagtccatgcccgtagaggaagtgtgcagatgggattaacgtccacatggagatatggaagaggaccggggattggtaccgtaaccatggtcagctggggtcgtttcatctgcctggtcgtggtcaccatggcaaccttgtccctggcccggccctccttcagtttagttgaggataccacattagagccagaagatgccatctcatccggagatgatgaggatgacaccgatggtgcggaagattttgtcagtgagaacagtaacaacaagagagcaccatactggaccaacacagaaaagatggaaaagcggctccatgctgtgcctgcggccaacactgtcaagtttcgctgcccagccggggggaacccaatgccaaccatgcggtggctgaaaaacgggaaggagtttaagcaggagcatcgcattggaggctacaaggtacgaaaccagcactggagcctcattatggaaagtgtggtcccatctgacaagggaaattatacctgtgtagtggagaatgaatacgggtccatcaatcacacgtaccacctggatgttgtggagcgatcgcctcaccggcccatcctccaagccggactgccggcaaatgcctccacagtggtcggaggagacgtagagtttgtctgcaaggtttacagtgatgcccagccccacatccagtggatcaagcacgtggaaaagaacggcagtaaatacgggcccgacgggctgccctacctcaaggttctcaaggccgccggtgttaacaccacggacaaagagattgaggttctctatattcggaatgtaacttttgaggacgctggggaatatacgtgcttggcgggtaattctattgggatatcctttcactctgcatggttgacagttctgccagcgcctggaagagaaaaggagattacagcttccccagactacctggagatagccatttactgcataggggtcttcttaatcgcctgtatggtggtaacagtcatcctgtgccgaatgaagaacacgaccaagaagccagacttcagcagccagccggctgtgcacaagctgaccaaacgtatccccctgcggagacaggtttcggctgagtccagctcctccatgaactccaacaccccgctggtgaggataacaacacgcctctcttcaacggcagacacccccatgctggcaggggtctccgagtatgaacttccagaggacccaaaatgggagtttccaagagataagctgacactgggcaagcccctgggagaaggttgctttgggcaagtggtcatggcggaagcagtgggaattgacaaagacaagcccaaggaggcggtcaccgtggccgtgaagatgttgaaagatgatgccacagagaaagacctttctgatctggtgtcagagatggagatgatgaagatgattgggaaacacaagaatatcataaatcttcttggagcctgcacacaggatgggcctctctatgtcatagttgagtatgcctctaaaggcaacctccgagaatacctccgagcccggaggccacccgggatggagtactcctatgacattaaccgtgttcctgaggagcagatgaccttcaaggacttggtgtcatgcacctaccagctggccagaggcatggagtacttggcttcccaaaaatgtattcatcgagatttagcagccagaaatgttttggtaacagaaaacaatgtgatgaaaatagcagactttggactcgccagagatatcaacaatatagactattacaaaaagaccaccaatgggcggcttccagtcaagtggatggctccagaagccctgtttgatagagtatacactcatcagagtgatgtctggtccttcggggtgttaatgtgggagatcttcactttagggggctcgccctacccagggattcccgtggaggaactttttaagctgctgaaggaaggacacagaatggataagccagccaactgcaccaacgaactgtacatgatgatgagggactgttggcatgcagtgccctcccagagaccaacgttcaagcagttggtagaagacttggatcgaattc

SEQ ID NO: 10795 - DNA, 2472 bp, Homo sapiens
  source 1..2472: mol_type = unassigned DNA
ggtaccgtaaccatggtcagctggggtcgtttcatctgcctggtcgtggtcaccatggcaaccttgtccctggcccggccctccttcagtttagttgaggataccacattagagccagaagagccaccaaccaaataccaaatctctcaaccagaagtgtacgtggctgcgccaggggagtcgctagaggtgcgctgcctgttgaaagatgccgccgtgatcagttggactaaggatggggtgcacttggggcccaacaataggacagtgcttattggggagtacttgcagataaagggcgccacgcctagagactccggcctctatgcttgtactgccagtaggactgtagacagtgaaacttggtacttcatggtgaatgtcacagatgccatctcatccggagatgatgaggatgacaccgatggtgcggaagattttgtcagtgagaacagtaacaacaagagagcaccatactggaccaacacagaaaagatggaaaagcggctccatgctgtgcctgcggccaacactgtcaagtttcgctgcccagccggggggaacccaatgccaaccatgcggtggctgaaaaacgggaaggagtttaagcaggagcatcgcattggaggctacaaggtacgaaaccagcactggagcctcattatggaaagtgtggtcccatctgacaagggaaattatacctgtgtagtggagaatgaatacgggtccatcaatcacacgtaccacctggatgttgtggagcgatcgcctcaccggcccatcctccaagccggactgccggcaaatgcctccacagtggtcggaggagacgtagagtttgtctgcaaggtttacagtgatgcccagccccacatccagtggatcaagcacgtggaaaagaacggcagtaaatacgggcccgacgggctgccctacctcaaggttctcaaggccgccggtgttaacaccacggacaaagagattgaggttctctatattcggaatgtaacttttgaggacgctggggaatatacgtgcttggcgggtaattctattgggatatcctttcactctgcatggttgacagttctgccagcgcctggaagagaaaaggagattacagcttccccagactacctggagatagccatttactgcataggggtcttcttaatcgcctgtatggtggtaacagtcatcctgtgccgaatgaagaacacgaccaagaagccagacttcagcagccagccggctgtgcacaagctgaccaaacgtatccccctgcggagacaggtttcggctgagtccagctcctccatgaactccaacaccccgctggtgaggataacaacacgcctctcttcaacggcagacacccccatgctggcaggggtctccgagtatgaacttccagaggacccaaaatgggagtttccaagagataagctgacactgggcaagcccctgggagaaggttgctttgggcaagtggtcatggcggaagcagtgggaattgacaaagacaagcccaaggaggcggtcaccgtggccgtgaagatgttgaaagatgatgccacagagaaagacctttctgatctggtgtcagagatggagatgatgaagatgattgggaaacacaagaatatcataaatcttcttggagcctgcacacaggatgggcctctctatgtcatagttgagtatgcctctaaaggcaacctccgagaatacctccgagcccggaggccacccgggatggagtactcctatgacattaaccgtgttcctgaggagcagatgaccttcaaggacttggtgtcatgcacctaccagctggccagaggcatggagtacttggcttcccaaaaatgtattcatcgagatttagcagccagaaatgttttggtaacagaaaacaatgtgatgaaaatagcagactttggactcgccagagatatcaacaatatagactattacaaaaagaccaccaatgggcggcttccagtcaagtggatggctccagaagccctgtttgatagagtatacactcatcagagtgatgtctggtccttcggggtgttaatgtgggagatcttcactttagggggctcgccctacccagggattcccgtggaggaactttttaagctgctgaaggaaggacacagaatggataagccagccaactgcaccaacgaactgtacatgatgatgagggactgttggcatgcagtgccctcccagagaccaacgttcaagcagttggtagaagacttggatcgaattctcactctcacaaccaatgaggaatacttggacctcagccaacctctcgaacagtattcacctagttaccctgacacaagaagttcttgttcttcaggagatgattctgttttttctccagaccccatgccttacgaaccatgccttcctcagtatccacacataaacggcagtgttaaaacatga

SEQ ID NO: 10796 - DNA, 3005 bp, Homo sapiens
  source 1..3005: mol_type = unassigned DNA
ggcggcggctggaggagagcgcggtggagagccgagcgggcgggcggcgggtgcggagcgggcgagggagcgcgcgcggccgccacaaagctcgggcgccgcggggctgcatgcggcgtacctggcccggcgcggcgactgctctccgggctggcgggggccggccgcgagccccgggggccccgaggccgcagcttgcctgcgcgctctgagccttcgcaactcgcgagcaaagtttggtggaggcaacgccaagcctgagtcctttcttcctctcgttccccaaatccgagggcagcccgcgggcgtcatgcccgcgctcctccgcagcctggggtacgcgtgaagcccgggaggcttggcgccggcgaagacccaaggaccactcttctgcgtttggagttgctccccgcaaccccgggctcgtcgctttctccatcccgacccacgcggggcgcggggacaacacaggtcgcggaggagcgttgccattcaagtgactgcagcagcagcggcagcgcctcggttcctgagcccaccgcaggctgaaggcattgcgcgtagtccatgcccgtagaggaagtgtgcagatgggattaacgtccacatggagatatggaagaggaccggggattggtaccgtaaccatggtcagctggggtcgtttcatctgcctggtcgtggtcaccatggcaaccttgtccctggcccggccctccttcagtttagttgaggataccacattagagccagaagagccaccaaccaaataccaaatctctcaaccagaagtgtacgtggctgcgccaggggagtcgctagaggtgcgctgcctgttgaaagatgccgccgtgatcagttggactaaggatggggtgcacttggggcccaacaataggacagtgcttattggggagtacttgcagataaagggcgccacgcctagagactccggcctctatgcttgtactgccagtaggactgtagacagtgaaacttggtacttcatggtgaatgtcacagatgccatctcatccggagatgatgaggatgacaccgatggtgcggaagattttgtcagtgagaacagtaacaacaagagagcaccatactggaccaacacagaaaagatggaaaagcggctccatgctgtgcctgcggccaacactgtcaagtttcgctgcccagccggggggaacccaatgccaaccatgcggtggctgaaaaacgggaaggagtttaagcaggagcatcgcattggaggctacaaggtacgaaaccagcactggagcctcattatggaaagtgtggtcccatctgacaagggaaattatacctgtgtagtggagaatgaatacgggtccatcaatcacacgtaccacctggatgttgtggagcgatcgcctcaccggcccatcctccaagccggactgccggcaaatgcctccacagtggtcggaggagacgtagagtttgtctgcaaggtttacagtgatgcccagccccacatccagtggatcaagcacgtggaaaagaacggcagtaaatacgggcccgacgggctgccctacctcaaggttctcaaggccgccggtgttaacaccacggacaaagagattgaggttctctatattcggaatgtaacttttgaggacgctggggaatatacgtgcttggcgggtaattctattgggatatcctttcactctgcatggttgacagttctgccagcgcctggaagagaaaaggagattacagcttccccagactacctggagatagccatttactgcataggggtcttcttaatcgcctgtatggtggtaacagtcatcctgtgccgaatgaagaacacgaccaagaagccagacttcagcagccagccggctgtgcacaagctgaccaaacgtatccccctgcggagacaggtttcggctgagtccagctcctccatgaactccaacaccccgctggtgaggataacaacacgcctctcttcaacggcagacacccccatgctggcaggggtctccgagtatgaacttccagaggacccaaaatgggagtttccaagagataagctgacactgggcaagcccctgggagaaggttgctttgggcaagtggtcatggcggaagcagtgggaattgacaaagacaagcccaaggaggcggtcaccgtggccgtgaagatgttgaaagatgatgccacagagaaagacctttctgatctggtgtcagagatggagatgatgaagatgattgggaaacacaagaatatcataaatcttcttggagcctgcacacaggatgggcctctctatgtcatagttgagtatgcctctaaaggcaacctccgagaatacctccgagcccggaggccacccgggatggagtactcctatgacattaaccgtgttcctgaggagcagatgaccttcaaggacttggtgtcatgcacctaccagctggccagaggcatggagtacttggcttcccaaaaatgtattcatcgagatttagcagccagaaatgttttggtaacagaaaacaatgtgatgaaaatagcagactttggactcgccagagatatcaacaatatagactattacaaaaagaccaccaatgggcggcttccagtcaagtggatggctccagaagccctgtttgatagagtatacactcatcagagtgatgtctggtccttcggggtgttaatgtgggagatcttcactttagggggctcgccctacccagggattcccgtggaggaactttttaagctgctgaaggaaggacacagaatggataagccagccaactgcaccaacgaactgtacatgatgatgagggactgttggcatgcagtgccctcccagagaccaacgttcaagcagttggtagaagacttggatcgaattctcactctcacaaccaatgaggaatacttggacctcagtcagcctctcgaaccgtattcaccttgttatcctgacccaagatga

SEQ ID NO: 10797 - DNA, 3547 bp, Homo sapiens
  source 1..3547: mol_type = unassigned DNA
ggcggcggctggaggagagcgcggtggagagccgagcgggcgggcggcgggtgcggagcgggcgagggagcgcgcgcggccgccacaaagctcgggcgccgcggggctgcatgcggcgtacctggcccggcgcggcgactgctctccgggctggcgggggccggccgcgagccccgggggccccgaggccgcagcttgcctgcgcgctctgagccttcgcaactcgcgagcaaagtttggtggaggcaacgccaagcctgagtcctttcttcctctcgttccccaaatccgagggcagcccgcgggcgtcatgcccgcgctcctccgcagcctggggtacgcgtgaagcccgggaggcttggcgccggcgaagacccaaggaccactcttctgcgtttggagttgctccccgcaaccccgggctcgtcgctttctccatcccgacccacgcggggcgcggggacaacacaggtcgcggaggagcgttgccattcaagtgactgcagcagcagcggcagcgcctcggttcctgagcccaccgcaggctgaaggcattgcgcgtagtccatgcccgtagaggaagtgtgcagatgggattaacgtccacatggagatatggaagaggaccggggattggtaccgtaaccatggtcagctggggtcgtttcatctgcctggtcgtggtcaccatggcaaccttgtccctggcccggccctccttcagtttagttgaggataccacattagagccagaaggagcaccatactggaccaacacagaaaagatggaaaagcggctccatgctgtgcctgcggccaacactgtcaagtttcgctgcccagccggggggaacccaatgccaaccatgcggtggctgaaaaacgggaaggagtttaagcaggagcatcgcattggaggctacaaggtacgaaaccagcactggagcctcattatggaaagtgtggtcccatctgacaagggaaattatacctgtgtagtggagaatgaatacgggtccatcaatcacacgtaccacctggatgttgtggagcgatcgcctcaccggcccatcctccaagccggactgccggcaaatgcctccacagtggtcggaggagacgtagagtttgtctgcaaggtttacagtgatgcccagccccacatccagtggatcaagcacgtggaaaagaacggcagtaaatacgggcccgacgggctgccctacctcaaggttctcaaggccgccggtgttaacaccacggacaaagagattgaggttctctatattcggaatgtaacttttgaggacgctggggaatatacgtgcttggcgggtaattctattgggatatcctttcactctgcatggttgacagttctgccagcgcctggaagagaaaaggagattacagcttccccagactacctggagatagccatttactgcataggggtcttcttaatcgcctgtatggtggtaacagtcatcctgtgccgaatgaagaacacgaccaagaagccagacttcagcagccagccggctgtgcacaagctgaccaaacgtatccccctgcggagacaggtttcggctgagtccagctcctccatgaactccaacaccccgctggtgaggataacaacacgcctctcttcaacggcagacacccccatgctggcaggggtctccgagtatgaacttccagaggacccaaaatgggagtttccaagagataagctgacactgggcaagcccctgggagaaggttgctttgggcaagtggtcatggcggaagcagtgggaattgacaaagacaagcccaaggaggcggtcaccgtggccgtgaagatgttgaaagatgatgccacagagaaagacctttctgatctggtgtcagagatggagatgatgaagatgattgggaaacacaagaatatcataaatcttcttggagcctgcacacaggatgggcctctctatgtcatagttgagtatgcctctaaaggcaacctccgagaatacctccgagcccggaggccacccgggatggagtactcctatgacattaaccgtgttcctgaggagcagatgaccttcaaggacttggtgtcatgcacctaccagctggccagaggcatggagtacttggcttcccaaaaatgtattcatcgagatttagcagccagaaatgttttggtaacagaaaacaatgtgatgaaaatagcagactttggactcgccagagatatcaacaatatagactattacaaaaagaccaccaatgggcggcttccagtcaagtggatggctccagaagccctgtttgatagagtatacactcatcagagtgatgtctggtccttcggggtgttaatgtgggagatcttcactttagggggctcgccctacccagggattcccgtggaggaactttttaagctgctgaaggaaggacacagaatggataagccagccaactgcaccaacgaactgtacatgatgatgagggactgttggcatgcagtgccctcccagagaccaacgttcaagcagttggtagaagacttggatcgaattctcactctcacaaccaatgaggaatacttggacctcagccaacctctcgaacagtattcacctagttaccctgacacaagaagttcttgttcttcaggagatgattctgttttttctccagaccccatgccttacgaaccatgccttcctcagtatccacacataaacggcagtgttaaaacatgaatgactgtgtctgcctgtccccaaacaggacagcactgggaacctagctacactgagcagggagaccatgcctcccagagcttgttgtctccacttgtatatatggatcagaggagtaaataattggaaaagtaatcagcatatgtgtaaagatttatacagttgaaaacttgtaatcttccccaggaggagaagaaggtttctggagcagtggactgccacaagccaccatgtaacccctctcacctgccgtgcgtactggctgtggaccagtaggactcaaggtggacgtgcgttctgccttccttgttaattttgtaataattggagaagatttatgtcagcacacacttacagagcacaaatgcagtatataggtgctggatgtatgtaaatatattcaaattatgtataaatatatattatatatttacaaggagttattttttgtattgattttaaatggatgtcccaatgcacctagaaaattggtctctctttttttaatagctatttgctaaatgctgttcttacacataatttcttaattttcaccgagcagaggtggaaaaatacttttgctttcagggaaaatggtataacgttaatttattaataaattggtaatatacaaaacaattaatcatttatagttttttttgtaatttaagtggcatttctatgcaggcagcacagcagactagttaatctattgcttggacttaactagttatcagatcctttgaaaagagaatatttacaatatatgactaatttggggaaaa

SEQ ID NO: 10798 - DNA, 3690 bp, Homo sapiens
  source 1..3690: mol_type = unassigned DNA
aatttgttgaggaatttccccctagccttgaccccttgacagctcccgctcctactcagtgctggggagaagtagggaggccttaagcgaagagatgggtctgcactttggaggagccggacactgttgactttcctgatgtgaaatctacccaggaacaaaacaccagtgactgcagcagcagcggcagcgcctcggttcctgagcccaccgcaggctgaaggcattgcgcgtagtccatgcccgtagaggaagtgtgcagatgggattaacgtccacatggagatatggaagaggaccggggattggtaccgtaaccatggtcagctggggtcgtttcatctgcctggtcgtggtcaccatggcaaccttgtccctggcccggccctccttcagtttagttgaggataccacattagagccagaagatgccatctcatccggagatgatgaggatgacaccgatggtgcggaagattttgtcagtgagaacagtaacaacaagagagcaccatactggaccaacacagaaaagatggaaaagcggctccatgctgtgcctgcggccaacactgtcaagtttcgctgcccagccggggggaacccaatgccaaccatgcggtggctgaaaaacgggaaggagtttaagcaggagcatcgcattggaggctacaaggtacgaaaccagcactggagcctcattatggaaagtgtggtcccatctgacaagggaaattatacctgtgtagtggagaatgaatacgggtccatcaatcacacgtaccacctggatgttgtggagcgatcgcctcaccggcccatcctccaagccggactgccggcaaatgcctccacagtggtcggaggagacgtagagtttgtctgcaaggtttacagtgatgcccagccccacatccagtggatcaagcacgtggaaaagaacggcagtaaatacgggcccgacgggctgccctacctcaaggttctcaaggccgccggtgttaacaccacggacaaagagattgaggttctctatattcggaatgtaacttttgaggacgctggggaatatacgtgcttggcgggtaattctattgggatatcctttcactctgcatggttgacagttctgccagcgcctggaagagaaaaggagattacagcttccccagactacctggagatagccatttactgcataggggtcttcttaatcgcctgtatggtggtaacagtcatcctgtgccgaatgaagaacacgaccaagaagccagacttcagcagccagccggctgtgcacaagctgaccaaacgtatccccctgcggagacaggtaacagtttcggctgagtccagctcctccatgaactccaacaccccgctggtgaggataacaacacgcctctcttcaacggcagacacccccatgctggcaggggtctccgagtatgaacttccagaggacccaaaatgggagtttccaagagataagctgacactgggcaagcccctgggagaaggttgctttgggcaagtggtcatggcggaagcagtgggaattgacaaagacaagcccaaggaggcggtcaccgtggccgtgaagatgttgaaagatgatgccacagagaaagacctttctgatctggtgtcagagatggagatgatgaagatgattgggaaacacaagaatatcataaatcttcttggagcctgcacacaggatgggcctctctatgtcatagttgagtatgcctctaaaggcaacctccgagaatacctccgagcccggaggccacccgggatggagtactcctatgacattaaccgtgttcctgaggagcagatgaccttcaaggacttggtgtcatgcacctaccagctggccagaggcatggagtacttggcttcccaaaaatgtattcatcgagatttagcagccagaaatgttttggtaacagaaaacaatgtgatgaaaatagcagactttggactcgccagagatatcaacaatatagactattacaaaaagaccaccaatgggcggcttccagtcaagtggatggctccagaagccctgtttgatagagtatacactcatcagagtgatgtctggtccttcggggtgttaatgtgggagatcttcactttagggggctcgccctacccagggattcccgtggaggaactttttaagctgctgaaggaaggacacagaatggataagccagccaactgcaccaacgaactgtacatgatgatgagggactgttggcatgcagtgccctcccagagaccaacgttcaagcagttggtagaagacttggatcgaattctcactctcacaaccaatgaggaggagaagaaggtttctggagcagtggactgccacaagccaccatgtaacccctctcacctgccgtgcgtactggctgtggaccagtaggactcaaggtggacgtgcgttctgccttccttgttaattttgtaataattggagaagatttatgtcagcacacacttacagagcacaaatgcagtatataggtgctggatgtatgtaaatatattcaaattatgtataaatatatattatatatttacaaggagttattttttgtattgattttaaatggatgtcccaatgcacctagaaaattggtctctctttttttaatagctatttgctaaatgctgttcttacacataatttcttaattttcaccgagcagaggtggaaaaatacttttgctttcagggaaaatggtataacgttaatttattaataaattggtaatatacaaaacaattaatcatttatagttttttttgtaatttaagtggcatttctatgcaggcagcacagcagactagttaatctattgcttggacttaactagttatcagatcctttgaaaagagaatatttacaatatatgactaatttggggaaaatgaagttttgatttatttgtgtttaaatgctgctgtcagacgattgttcttagacctcctaaatgccccatattaaaagaactcattcataggaaggtgtttcattttggtgtgcaaccctgtcattacgtcaacgcaacgtctaactggacttcccaagataaatggtaccagcgtcctcttaaaagatgccttaatccattccttgaggacagaccttagttgaaatgatagcagaatgtgcttctctctggcagctggccttctgcttctgagttgcacattaatcagattagcctgtattctcttcagtgaattttgataatggcttccagactctttggcgttggagacgcctgttaggatcttcaagtcccatcatagaaaattgaaacacagagttgttctgctgatagttttggggatacgtccatctttttaagggattgctttcatctaattctggcaggacctcaccaaaagatccagcctcatacctacatcagacaaaatatcgccgttgttccttctgtactaaagtattgtgttttgctttggaaacacccactcactttgcaatagccgtgcaagatgaatgcagattacactgatcttatgtgttacaaaattggagaaagtatttaataaaacctgttaatttttatactgacaataaaaatgtttctacagatattaatgttaacaagacaaaataaatgtcacgcaacttattttttt

SEQ ID NO: 10799 - DNA, 4255 bp, Homo sapiens
  source 1..4255: mol_type = unassigned DNA
cccaaggaccactcttctgcgtttggagttgctccccgcaaccccgggctcgtcgctttctccatcccgacccacgcggggcgcggggacaacacaggtcgcggaggagcgttgccattcaagtgactgcagcagcagcggcagcgcctcggttcctgagcccaccgcaggctgaaggcattgcgcgtagtccatgcccgtagaggaagtgtgcagatgggattaacgtccacatggagatatggaagaggaccggggattggtaccgtaaccatggtcagctggggtcgtttcatctgcctggtcgtggtcaccatggcaaccttgtccctggcccggccctccttcagtttagttgaggataccacattagagccagaagagccaccaaccaaataccaaatctctcaaccagaagtgtacgtggctgcgccaggggagtcgctagaggtgcgctgcctgttgaaagatgccgccgtgatcagttggactaaggatggggtgcacttggggcccaacaataggacagtgcttattggggagtacttgcagataaagggcgccacgcctagagactccggcctctatgcttgtactgccagtaggactgtagacagtgaaacttggtacttcatggtgaatgtcacagatgccatctcatccggagatgatgaggatgacaccgatggtgcggaagattttgtcagtgagaacagtaacaacaagagagcaccatactggaccaacacagaaaagatggaaaagcggctccatgctgtgcctgcggccaacactgtcaagtttcgctgcccagccggggggaacccaatgccaaccatgcggtggctgaaaaacgggaaggagtttaagcaggagcatcgcattggaggctacaaggtacgaaaccagcactggagcctcattatggaaagtgtggtcccatctgacaagggaaattatacctgtgtagtggagaatgaatacgggtccatcaatcacacgtaccacctggatgttgtggagcgatcgcctcaccggcccatcctccaagccggactgccggcaaatgcctccacagtggtcggaggagacgtagagtttgtctgcaaggtttacagtgatgcccagccccacatccagtggatcaagcacgtggaaaagaacggcagtaaatacgggcccgacgggctgccctacctcaaggttctcaaggccgccggtgttaacaccacggacaaagagattgaggttctctatattcggaatgtaacttttgaggacgctggggaatatacgtgcttggcgggtaattctattgggatatcctttcactctgcatggttgacagttctgccagcgcctggaagagaaaaggagattacagcttccccagactacctggagatagccatttactgcataggggtcttcttaatcgcctgtatggtggtaacagtcatcctgtgccgaatgaagaacacgaccaagaagccagacttcagcagccagccggctgtgcacaagctgaccaaacgtatccccctgcggagacaggtaacagtttcggctgagtccagctcctccatgaactccaacaccccgctggtgaggataacaacacgcctctcttcaacggcagacacccccatgctggcaggggtctccgagtatgaacttccagaggacccaaaatgggagtttccaagagataagctgacactgggcaagcccctgggagaaggttgctttgggcaagtggtcatggcggaagcagtgggaattgacaaagacaagcccaaggaggcggtcaccgtggccgtgaagatgttgaaagatgatgccacagagaaagacctttctgatctggtgtcagagatggagatgatgaagatgattgggaaacacaagaatatcataaatcttcttggagcctgcacacaggatgggcctctctatgtcatagttgagtatgcctctaaaggcaacctccgagaatacctccgagcccggaggccacccgggatggagtactcctatgacattaaccgtgttcctgaggagcagatgaccttcaaggacttggtgtcatgcacctaccagctggccagaggcatggagtacttggcttcccaaaaatgtattcatcgagatttagcagccagaaatgttttggtaacagaaaacaatgtgatgaaaatagcagactttggactcgccagagatatcaacaatatagactattacaaaaagaccaccaatgggcggcttccagtcaagtggatggctccagaagccctgtttgatagagtatacactcatcagagtgatgtctggtccttcggggtgttaatgtgggagatcttcactttagggggctcgccctacccagggattcccgtggaggaactttttaagctgctgaaggaaggacacagaatggataagccagccaactgcaccaacgaactgtacatgatgatgagggactgttggcatgcagtgccctcccagagaccaacgttcaagcagttggtagaagacttggatcgaattctcactctcacaaccaatgaggaatacttggacctcagccaacctctcgaacagtattcacctagttaccctgacacaagaagttcttgttcttcaggagatgattctgttttttctccagaccccatgccttacgaaccatgccttcctcagtatccacacataaacggcagtgttaaaacatgaatgactgtgtctgcctgtccccaaacaggacagcactgggaacctagctacactgagcagggagaccatgcctcccagagcttgttgtctccacttgtatatatggatcagaggagtaaataattggaaaagtaatcagcatatgtgtaaagatttatacagttgaaaacttgtaatcttccccaggaggagaagaaggtttctggagcagtggactgccacaagccaccatgtaacccctctcacctgccgtgcgtactggctgtggaccagtaggactcaaggtggacgtgcgttctgccttccttgttaattttgtaataattggagaagatttatgtcagcacacacttacagagcacaaatgcagtatataggtgctggatgtatgtaaatatattcaaattatgtataaatatatattatatatttacaaggagttattttttgtattgattttaaatggatgtcccaatgcacctagaaaattggtctctctttttttaatagctatttgctaaatgctgttcttacacataatttcttaattttcaccgagcagaggtggaaaaatacttttgctttcagggaaaatggtataacgttaatttattaataaattggtaatatacaaaacaattaatcatttatagttttttttgtaatttaagtggcatttctatgcaggcagcacagcagactagttaatctattgcttggacttaactagttatcagatcctttgaaaagagaatatttacaatatatgactaatttggggaaaatgaagttttgatttatttgtgtttaaatgctgctgtcagacgattgttcttagacctcctaaatgccccatattaaaagaactcattcataggaaggtgtttcattttggtgtgcaaccctgtcattacgtcaacgcaacgtctaactggacttcccaagataaatggtaccagcgtcctcttaaaagatgccttaatccattccttgaggacagaccttagttgaaatgatagcagaatgtgcttctctctggcagctggccttctgcttctgagttgcacattaatcagattagcctgtattctcttcagtgaattttgataatggcttccagactctttggcgttggagacgcctgttaggatcttcaagtcccatcatagaaaattgaaacacagagttgttctgctgatagttttggggatacgtccatctttttaagggattgctttcatctaattctggcaggacctcaccaaaagatccagcctcatacctacatcagacaaaatatcgccgttgttccttctgtactaaagtattgtgttttgctttggaaacacccactcactttgcaatagccgtgcaagatgaatgcagattacactgatcttatgtgttacaaaattggagaaagtatttaataaaacctgttaatttttatactgacaataaaaatgtttctacagatattaatgttaacaagacaaaataaatgtcacgcaactta

SEQ ID NO: 10800 - DNA, 1680 bp, Homo sapiens
  source 1..1680: mol_type = unassigned DNA
ccggccgcgagccccgggggccccgaggccgcagcttgcctgcgcgctctgagccttcgcaactcgcgagcaaagtttggtggaggcaacgccaagcctgagtcctttcttcctctcgttccccaaatccgagggcagcccgcgggcgtcatgcccgcgctcctccgcagcctggggtacgcgtgaagcccgggaggcttggcgccggcgaagacccaaggaccactcttctgcgtttggagttgctccccgcaaccccgggctcgtcgctttctccatcccgacccacgcggggcgcggggacaacacaggtcgcggaggagcgttgccattcaagtgactgcagcagcagcggcagcgcctcggttcctgagcccaccgcaggctgaaggcattgcgcgtagtccatgcccgtagaggaagtgtgcagatgggattaacgtccacatggagatatggaagaggaccggggattggtaccgtaaccatggtcagctggggtcgtttcatctgcctggtcgtggtcaccatggcaaccttgtccctggcccggccctccttcagtttagttgaggataccacattagagccagaagagccaccaaccaaataccaaatctctcaaccagaagtgtacgtggctgcgccaggggagtcgctagaggtgcgctgcctgttgaaagatgccgccgtgatcagttggactaaggatggggtgcacttggggcccaacaataggacagtgcttattggggagtacttgcagataaagggcgccacgcctagagactccggcctctatgcttgtactgccagtaggactgtagacagtgaaacttggtacttcatggtgaatgtcacagatgccatctcatccggagatgatgaggatgacaccgatggtgcggaagattttgtcagtgagaacagtaacaacaagagagcaccatactggaccaacacagaaaagatggaaaagcggctccatgctgtgcctgcggccaacactgtcaagtttcgctgcccagccggggggaacccaatgccaaccatgcggtggctgaaaaacgggaaggagtttaagcaggagcatcgcattggaggctacaaggtacgaaaccagcactggagcctcattatggaaagtgtggtcccatctgacaagggaaattatacctgtgtagtggagaatgaatacgggtccatcaatcacacgtaccacctggatgttgtgggcagccagggtttatgagctttgcatgatcctcatggttcccaagcgtcatctgtgtaaagtggacgtggtatgaaatgtctgacattttggaagctgagattactctgaaaatgttaattgggcaggtgaaaagggtacagatgtgctgtagcagacctttggttttaaaagagaagcatcatttccccaacagggcaactgtagaaggccagctgaagagtaaaggaaaaggtctgaggactgagcctgtggctggctggaaaaaggtgaatgttgagggcccttcacttccatcacaagaaagtcattagacggtaccaattcagtgtctgttcctggcatctatttcctctgtgcaaagggaaccatgtatatgagcttataaatacatttttgtcagagtgcacagataagtaggccattttaattaaacattgaagacc

SEQ ID NO: 10801 - DNA, 3001 bp, Homo sapiens
  source 1..3001: mol_type = unassigned DNA
gagagccgagcgggcgggcggcgggtgcggagcgggcgagggagcgcgcgcggccgccacaaagctcgggcgccgcggggctgcatgcggcgtacctggcccggcgcggcgactgctctccgggctggcgggggccggccgcgagccccgggggccccgaggccgcagcttgcctgcgcgctctgagccttcgcaactcgcgagcaaagtttggtggaggcaacgccaagcctgagtcctttcttcctctcgttccccaaatccgagggcagcccgcgggcgtcatgcccgcgctcctccgcagcctggggtacgcgtgaagcccgggaggcttggcgccggcgaagacccaaggaccactcttctgcgtttggagttgctccccgcaaccccgggctcgtcgctttctccatcccgacccacgcggggcgcggggacaacacaggtcgcggaggagcgttgccattcaagtgactgcagcagcagcggcagcgcctcggttcctgagcccaccgcaggctgaaggcattgcgcgtagtccatgcccgtagaggaagtgtgcagatgggattaacgtccacatggagatatggaagaggaccggggattggtaccgtaaccatggtcagctggggtcgtttcatctgcctggtcgtggtcaccatggcaaccttgtccctggcccggccctccttcagtttagttgaggataccacattagagccagaagatgccatctcatccggagatgatgaggatgacaccgatggtgcggaagattttgtcagtgagaacagtaacaacaagagagcaccatactggaccaacacagaaaagatggaaaagcggctccatgctgtgcctgcggccaacactgtcaagtttcgctgcccagccggggggaacccaatgccaaccatgcggtggctgaaaaacgggaaggagtttaagcaggagcatcgcattggaggctacaaggtacgaaaccagcactggagcctcattatggaaagtgtggtcccatctgacaagggaaattatacctgtgtagtggagaatgaatacgggtccatcaatcacacgtaccacctggatgttgtggagcgatcgcctcaccggcccatcctccaagccggactgccggcaaatgcctccacagtggtcggaggagacgtagagtttgtctgcaaggtttacagtgatgcccagccccacatccagtggatcaagcacgtggaaaagaacggcagtaaatacgggcccgacgggctgccctacctcaaggttctcaagcactcggggataaatagttccaatgcagaagtgctggctctgttcaatgtgaccgaggcggatgctggggaatatatatgtaaggtctccaattatatagggcaggccaaccagtctgcctggctcactgtcctgccaaaacagcaagcgcctggaagagaaaaggagattacagcttccccagactacctggagatagccatttactgcataggggtcttcttaatcgcctgtatggtggtaacagtcatcctgtgccgaatgaagaacacgaccaagaagccagacttcagcagccagccggctgtgcacaagctgaccaaacgtatccccctgcggagacaggtaacagtttcggctgagtccagctcctccatgaactccaacaccccgctggtgaggataacaacacgcctctcttcaacggcagacacccccatgctggcaggggtctccgagtatgaacttccagaggacccaaaatgggagtttccaagagataagctgacactgggcaagcccctgggagaaggttgctttgggcaagtggtcatggcggaagcagtgggaattgacaaagacaagcccaaggaggcggtcaccgtggccgtgaagatgttgaaagatgatgccacagagaaagacctttctgatctggtgtcagagatggagatgatgaagatgattgggaaacacaagaatatcataaatcttcttggagcctgcacacaggatgggcctctctatgtcatagttgagtatgcctctaaaggcaacctccgagaatacctccgagcccggaggccacccgggatggagtactcctatgacattaaccgtgttcctgaggagcagatgaccttcaaggacttggtgtcatgcacctaccagctggccagaggcatggagtacttggcttcccaaaaatgtattcatcgagatttagcagccagaaatgttttggtaacagaaaacaatgtgatgaaaatagcagactttggactcgccagagatatcaacaatatagactattacaaaaagaccaccaatgggcggcttccagtcaagtggatggctccagaagccctgtttgatagagtatacactcatcagagtgatgtctggtccttcggggtgttaatgtgggagatcttcactttagggggctcgccctacccagggattcccgtggaggaactttttaagctgctgaaggaaggacacagaatggataagccagccaactgcaccaacgaactgtacatgatgatgagggactgttggcatgcagtgccctcccagagaccaacgttcaagcagttggtagaagacttggatcgaattctcactctcacaaccaatgagatctgaaagtttatggcttcattgagaaactgggaaaagttggtcaggcgcagtggctcatgcctgtaatcccagcactttgggaggccgaggcaggcggatcatgaggtcaggagttccagaccagcctggccaacatggtgaaaccctgtctctactaaagatacaaaaaattagccgggcgtgttggtgtgcacctgtaatcccagctactccgggaggctgaggcaggagagtcacttgaaccggggaggcggaggttgcagtgagccgagatcatgccattgcattccagccttggcgacagagcgagactccgtctcaaaaaaaaaaaaaataaaaa

SEQ ID NO: 10802 - DNA, 2650 bp, Homo sapiens
  source 1..2650: mol_type = unassigned DNA
ggaccggggattggtaccgtaaccatggtcagctggggtcgtttcatctgcctggtcgtggtcaccatggcaaccttgtccctggcccggccctccttcagtttagttgaggataccacattagagccagaagagccaccaaccaaataccaaatctctcaaccagaagtgtacgtggctgcgccaggggagtcgctagaggtgcgctgcctgttgaaagatgccgccgtgatcagttggactaaggatggggtgcacttggggcccaacaataggacagtgcttattggggagtacttgcagataaagggcgccacgcctagagactccggcctctatgcttgtactgccagtaggactgtagacagtgaaacttggtacttcatggtgaatgtcacagatgccatctcatccggagatgatgaggatgacaccgatggtgcggaagattttgtcagtgagaacagtaacaacaagagagcaccatactggaccaacacagaaaagatggaaaagcggctccatgctgtgcctgcggccaacactgtcaagtttcgctgcccagccggggggaacccaatgccaaccatgcggtggctgaaaaacgggaaggagtttaagcaggagcatcgcattggaggctacaaggtacgaaaccagcactggagcctcattatggaaagtgtggtcccatctgacaagggaaattatacctgtgtagtggagaatgaatacgggtccatcaatcacacgtaccacctggatgttgtggagcgatcgcctcaccggcccatcctccaagccggactgccggcaaatgcctccacagtggtcggaggagacgtagagtttgtctgcaaggtttacagtgatgcccagccccacatccagtggatcaagcacgtggaaaagaacggcagtaaatacgggcccgacgggctgccctacctcaaggttctcaagcactcggggataaatagttccaatgcagaagtgctggctctgttcaatgtgaccgaggcggatgctggggaatatatatgtaaggtctccaattatatagggcaggccaaccagtctgcctggctcactgtcctgccaaaacagcaagcgcctggaagagaaaaggagattacagcttccccagactacctggagatagccatttactgcataggggtcttcttaatcgcctgtatggtggtaacagtcatcctgtgccgaatgaagaacacgaccaagaagccagacttcagcagccagccggctgtgcacaagctgaccaaacgtatccccctgcggagacaggtaacagtttcggctgagtccagctcctccatgaactccaacaccccgctggtgaggataacaacacgcctctcttcaacggcagacacccccatgctggcaggggtctccgagtatgaacttccagaggacccaaaatgggagtttccaagagataagctgacactgggcaagcccctgggagaaggttgctttgggcaagtggtcatggcggaagcagtgggaattgacaaagacaagcccaaggaggcggtcaccgtggccgtgaagatgttgaaagatgatgccacagagaaagacctttctgatctggtgtcagagatggagatgatgaagatgattgggaaacacaagaatatcataaatcttcttggagcctgcacacaggatgggcctctctatgtcatagttgagtatgcctctaaaggcaacctccgagaatacctccgagcccggaggccacccgggatggagtactcctatgacattaaccgtgttcctgaggagcagatgaccttcaaggacttggtgtcatgcacctaccagctggccagaggcatggagtacttggcttcccaaaaatgtattcatcgagatttagcagccagaaatgttttggtaacagaaaacaatgtgatgaaaatagcagactttggactcgccagagatatcaacaatatagactattacaaaaagaccaccaatgggcggcttccagtcaagtggatggctccagaagccctgtttgatagagtatacactcatcagagtgatgtctggtccttcggggtgttaatgtgggagatcttcactttagggggctcgccctacccagggattcccgtggaggaactttttaagctgctgaaggaaggacacagaatggataagccagccaactgcaccaacgaactgtacatgatgatgagggactgttggcatgcagtgccctcccagagaccaacgttcaagcagttggtagaagacttggatcgaattctcactctcacaaccaatgagatctgaaagtttatggcttcattgagaaactgggaaaagttggtcaggcgcagtggctcatgcctgtaatcccagcactttgggaggccgaggcaggcggatcatgaggtcaggagttccagaccagcctggccaacatggtgaaaccctgtctctactaaagatacaaaaaattagccgggcgtgttggtgtgcacctgtaatcccagctactccgggaggctgaggcaggagagtcacttgaaccggggaggcggaggttgcagtgagccgagatcatgccattgcattccagccttggcgacagagcgagactccgtct

SEQ ID NO: 10803 - DNA, 2727 bp, Homo sapiens
  source 1..2727: mol_type = unassigned DNA
cgcgagcaaagtttggtggaggcaacgccaagcctgagtcctttcttcctctcgttccccaaatccgagggcagcccgcgggcgtcatgcccgcgctcctccgcagcctggggtacgcgtgaagcccgggaggcttggcgccggcgaagacccaaggaccactcttctgcgtttggagttgctccccgcaaccccgggctcgtcgctttctccatcccgacccacgcggggcgcggggacaacacaggtcgcggaggagcgttgccattcaagtgactgcagcagcagcggcagcgcctcggttcctgagcccaccgcaggctgaaggcattgcgcgtagtccatgcccgtagaggaagtgtgcagatgggattaacgtccacatggagatatggaagaggaccggggattggtaccgtaaccatggtcagctggggtcgtttcatctgcctggtcgtggtcaccatggcaaccttgtccctggcccggccctccttcagtttagttgaggataccacattagagccagaagagccaccaaccaaataccaaatctctcaaccagaagtgtacgtggctgcgccaggggagtcgctagaggtgcgctgcctgttgaaagatgccgccgtgatcagttggactaaggatggggtgcacttggggcccaacaataggacagtgcttattggggagtacttgcagataaagggcgccacgcctagagactccggcctctatgcttgtactgccagtaggactgtagacagtgaaacttggtacttcatggtgaatgtcacagatgccatctcatccggagatgatgaggatgacaccgatggtgcggaagattttgtcagtgagaacagtaacaacaagagagcaccatactggaccaacacagaaaagatggaaaagcggctccatgctgtgcctgcggccaacactgtcaagtttcgctgcccagccggggggaacccaatgccaaccatgcggtggctgaaaaacgggaaggagtttaagcaggagcatcgcattggaggctacaaggtacgaaaccagcactggagcctcattatggaaagtgtggtcccatctgacaagggaaattatacctgtgtagtggagaatgaatacgggtccatcaatcacacgtaccacctggatgttgtggagcgatcgcctcaccggcccatcctccaagccggactgccggcaaatgcctccacagtggtcggaggagacgtagagtttgtctgcaaggtttacagtgatgcccagccccacatccagtggatcaagcacgtggaaaagaacggcagtaaatacgggcccgacgggctgccctacctcaaggttctcaagcactcggggataaatagttccaatgcagaagtgctggctctgttcaatgtgaccgaggcggatgctggggaatatatatgtaaggtctccaattatatagggcaggccaaccagtctgcctggctcactgtcctgccaaaacagcaagcgcctggaagagaaaaggagattacagcttccccagactacctggagatagccatttactgcataggggtcttcttaatcgcctgtatggtggtaacagtcatcctgtgccgaatgaagaacacgaccaagaagccagacttcagcagccagccggctgtgcacaagctgaccaaacgtatccccctgcggagacaggtaacagtttcggctgagtccagctcctccatgaactccaacaccccgctggtgaggataacaacacgcctctcttcaacggcagacacccccatgctggcaggggtctccgagtatgaacttccagaggacccaaaatgggagtttccaagagataagctgacactgggcaagcccctgggagaaggttgctttgggcaagtggtcatggcggaagcagtgggaattgacaaagacaagcccaaggaggcggtcaccgtggccgtgaagatgttgaaagatgatgccacagagaaagacctttctgatctggtgtcagagatggagatgatgaagatgattgggaaacacaagaatatcataaatcttcttggagcctgcacacaggatgggcctctctatgtcatagttgagtatgcctctaaaggcaacctccgagaatacctccgagcccggaggccacccgggatggagtactcctatgacattaaccgtgttcctgaggagcagatgaccttcaaggacttggtgtcatgcacctaccagctggccagaggcatggagtacttggcttcccaaaaatgtattcatcgagatttagcagccagaaatgttttggtaacagaaaacaatgtgatgaaaatagcagactttggactcgccagagatatcaacaatatagactattacaaaaagaccaccaatgggcggcttccagtcaagtggatggctccagaagccctgtttgatagagtatacactcatcagagtgatgtctggtccttcggggtgttaatgtgggagatcttcactttagggggctcgccctacccagggattcccgtggaggaactttttaagctgctgaaggaaggacacagaatggataagccagccaactgcaccaacgaactgtacatgatgatgagggactgttggcatgcagtgccctcccagagaccaacgttcaagcagttggtagaagacttggatcgaattctcactctcacaaccaatgag

SEQ ID NO: 10804 - DNA, 3003 bp, Homo sapiens
  source 1..3003: mol_type = unassigned DNA
ggctggaggagagcgcggtggagagccgagcgggcgggcggcgggtgcggagcgggcgagggagcgcgcgcggccgccacaaagctcgggcgccgcggggctgcatgcggcgtacctggcccggcgcggcgactgctctccgggctggcgggggccggccgcgagccccgggggccccgaggccgcagcttgcctgcgcgctctgagccttcgcaactcgcgagcaaagtttggtggaggcaacgccaagcctgagtcctttcttcctctcgttccccaaatccgagggcagcccgcgggcgtcatgcccgcgctcctccgcagcctggggtacgcgtgaagcccgggaggcttggcgccggcgaagacccaaggaccactcttctgcgtttggagttgctccccgcaaccccgggctcgtcgctttctccatcccgacccacgcggggcgcggggacaacacaggtcgcggaggagcgttgccattcaagtgactgcagcagcagcggcagcgcctcggttcctgagcccaccgcaggctgaaggcattgcgcgtagtccatgcccgtagaggaagtgtgcagatgggattaacgtccacatggagatatggaagaggaccggggattggtaccgtaaccatggtcagctggggtcgtttcatctgcctggtcgtggtcaccatggcaaccttgtccctggcccggccctccttcagtttagttgaggataccacattagagccagaaggagcaccatactggaccaacacagaaaagatggaaaagcggctccatgctgtgcctgcggccaacactgtcaagtttcgctgcccagccggggggaacccaatgccaaccatgcggtggctgaaaaacgggaaggagtttaagcaggagcatcgcattggaggctacaaggtacgaaaccagcactggagcctcattatggaaagtgtggtcccatctgacaagggaaattatacctgtgtagtggagaatgaatacgggtccatcaatcacacgtaccacctggatgttgtggagcgatcgcctcaccggcccatcctccaagccggactgccggcaaatgcctccacagtggtcggaggagacgtagagtttgtctgcaaggtttacagtgatgcccagccccacatccagtggatcaagcacgtggaaaagaacggcagtaaatacgggcccgacgggctgccctacctcaaggttctcaagcactcggggataaatagttccaatgcagaagtgctggctctgttcaatgtgaccgaggcggatgctggggaatatatatgtaaggtctccaattatatagggcaggccaaccagtctgcctggctcactgtcctgccaaaacagcaagcgcctggaagagaaaaggagattacagcttccccagactacctggagatagccatttactgcataggggtcttcttaatcgcctgtatggtggtaacagtcatcctgtgccgaatgaagaacacgaccaagaagccagacttcagcagccagccggctgtgcacaagctgaccaaacgtatccccctgcggagacaggtaacagtttcggctgagtccagctcctccatgaactccaacaccccgctggtgaggataacaacacgcctctcttcaacggcagacacccccatgctggcaggggtctccgagtatgaacttccagaggacccaaaatgggagtttccaagagataagctgacactgggcaagcccctgggagaaggttgctttgggcaagtggtcatggcggaagcagtgggaattgacaaagacaagcccaaggaggcggtcaccgtggccgtgaagatgttgaaagatgatgccacagagaaagacctttctgatctggtgtcagagatggagatgatgaagatgattgggaaacacaagaatatcataaatcttcttggagcctgcacacaggatgggcctctctatgtcatagttgagtatgcctctaaaggcaacctccgagaatacctccgagcccggaggccacccgggatggagtactcctatgacattaaccgtgttcctgaggagcagatgaccttcaaggacttggtgtcatgcacctaccagctggccagaggcatggagtacttggcttcccaaaaatgtattcatcgagatttagcagccagaaatgttttggtaacagaaaacaatgtgatgaaaatagcagactttggactcgccagagatatcaacaatatagactattacaaaaagaccaccaatgggcggcttccagtcaagtggatggctccagaagccctgtttgatagagtatacactcatcagagtgatgtctggtccttcggggtgttaatgtgggagatcttcactttagggggctcgccctacccagggattcccgtggaggaactttttaagctgctgaaggaaggacacagaatggataagccagccaactgcaccaacgaactgtacatgatgatgagggactgttggcatgcagtgccctcccagagaccaacgttcaagcagttggtagaagacttggatcgaattctcactctcacaaccaatgaggaatacttggacctcagccaacctctcgaacagtattcacctagttaccctgacacaagaagttcttgttcttcaggagatgattctgttttttctccagaccccatgccttacgaaccatgccttcctcagtatccacacataaacggcagtgttaaaacatgaatgactgtgtctgcctgtccccaaacaggacagcactgggaacctagctacactgagcagggagaccatgcctcccagagcttgttgtctccacttgtatatatggatcagaggagtaaataattggaaaagtaatcagcatatgtgtaaagatttatacagttgaaaacttgtaatcttccccaggaggagaagaaggtttctggagcagtggactgccacaagccaccatgtaacc

SEQ ID NO: 10805 - DNA, 3244 bp, Homo sapiens
  source 1..3244: mol_type = unassigned DNA
ccggccgcgagccccgggggccccgaggccgcagcttgcctgcgcgctctgagccttcgcaactcgcgagcaaagtttggtggaggcaacgccaagcctgagtcctttcttcctctcgttccccaaatccgagggcagcccgcgggcgtcatgcccgcgctcctccgcagcctggggtacgcgtgaagcccgggaggcttggcgccggcgaagacccaaggaccactcttctgcgtttggagttgctccccgcaaccccgggctcgtcgctttctccatcccgacccacgcggggcgcggggacaacacaggtcgcggaggagcgttgccattcaagtgactgcagcagcagcggcagcgcctcggttcctgagcccaccgcaggctgaaggcattgcgcgtagtccatgcccgtagaggaagtgtgcagatgggattaacgtccacatggagatatggaagaggaccggggattggtaccgtaaccatggtcagctggggtcgtttcatctgcctggtcgtggtcaccatggcaaccttgtccctggcccggccctccttcagtttagttgaggataccacattagagccagaagagccaccaaccaaataccaaatctctcaaccagaagtgtacgtggctgcgccaggggagtcgctagaggtgcgctgcctgttgaaagatgccgccgtgatcagttggactaaggatggggtgcacttggggcccaacaataggacagtgcttattggggagtacttgcagataaagggcgccacgcctagagactccggcctctatgcttgtactgccagtaggactgtagacagtgaaacttggtacttcatggtgaatgtcacagatgccatctcatccggagatgatgaggatgacaccgatggtgcggaagattttgtcagtgagaacagtaacaacaagagagcaccatactggaccaacacagaaaagatggaaaagcggctccatgctgtgcctgcggccaacactgtcaagtttcgctgcccagccggggggaacccaatgccaaccatgcggtggctgaaaaacgggaaggagtttaagcaggagcatcgcattggaggctacaaggtacgaaaccagcactggagcctcattatggaaagtgtggtcccatctgacaagggaaattatacctgtgtagtggagaatgaatacgggtccatcaatcacacgtaccacctggatgttgtggagcgatcgcctcaccggcccatcctccaagccggactgccggcaaatgcctccacagtggtcggaggagacgtagagtttgtctgcaaggtttacagtgatgcccagccccacatccagtggatcaagcacgtggaaaagaacggcagtaaatacgggcccgacgggctgccctacctcaaggttctcaaggtttcggctgagtccagctcctccatgaactccaacaccccgctggtgaggataacaacacgcctctcttcaacggcagacacccccatgctggcaggggtctccgagtatgaacttccagaggacccaaaatgggagtttccaagagataagctgacactgggcaagcccctgggagaaggttgctttgggcaagtggtcatggcggaagcagtgggaattgacaaagacaagcccaaggaggcggtcaccgtggccgtgaagatgttgaaagatgatgccacagagaaagacctttctgatctggtgtcagagatggagatgatgaagatgattgggaaacacaagaatatcataaatcttcttggagcctgcacacaggatgggcctctctatgtcatagttgagtatgcctctaaaggcaacctccgagaatacctccgagcccggaggccacccgggatggagtactcctatgacattaaccgtgttcctgaggagcagatgaccttcaaggacttggtgtcatgcacctaccagctggccagaggcatggagtacttggcttcccaaaaatgtattcatcgagatttagcagccagaaatgttttggtaacagaaaacaatgtgatgaaaatagcagactttggactcgccagagatatcaacaatatagactattacaaaaagaccaccaatgggcggcttccagtcaagtggatggctccagaagccctgtttgatagagtatacactcatcagagtgatgtctggtccttcggggtgttaatgtgggagatcttcactttagggggctcgccctacccagggattcccgtggaggaactttttaagctgctgaaggaaggacacagaatggataagccagccaactgcaccaacgaactgtacatgatgatgagggactgttggcatgcagtgccctcccagagaccaacgttcaagcagttggtagaagacttggatcgaattctcactctcacaaccaatgaggaatacttggacctcagccaacctctcgaacagtattcacctagttaccctgacacaagaagttcttgttcttcaggagatgattctgttttttctccagaccccatgccttacgaaccatgccttcctcagtatccacacataaacggcagtgttaaaacatgaatgactgtgtctgcctgtccccaaacaggacagcactgggaacctagctacactgagcagggagaccatgcctcccagagcttgttgtctccacttgtatatatggatcagaggagtaaataattggaaaagtaatcagcatatgtgtaaagatttatacagttgaaaacttgtaatcttccccaggaggagaagaaggtttctggagcagtggactgccacaagccaccatgtaacccctctcacctgccgtgcgtactggctgtggaccagtaggactcaaggtggacgtgcgttctgccttccttgttaattttgtaataattggagaagatttatgtcagcacacacttacagagcacaaatgcagtatataggtgctggatgtatgtaaatatattcaaattatgtataaatatatattatatatttacaaggagttattttttgtattgattttaaatggatgtcccaatgcacctagaaaattggtctctctttttttaatagctatttgctaaatgctgttcttacacataatttcttaattttcaccgagcagaggtggaaaaatacttttgctttcagggaaaatggtataacgttaatttattaataaattggtaatatacaaaacaa

SEQ ID NO: 10806 - DNA, 3803 bp, Homo sapiens
  source 1..3803: mol_type = unassigned DNA
tgactgcagcagcagcggcagcgcctcggttcctgagcccaccgcaggctgaaggcattgcgcgtagtccatgcccgtagaggaagtgtgcagatgggattaacgtccacatggagatatggaagaggaccggggattggtaccgtaaccatggtcagctggggtcgtttcatctgcctggtcgtggtcaccatggcaaccttgtccctggcccggccctccttcagtttagttgaggataccacattagagccagaagagccaccaaccaaataccaaatctctcaaccagaagtgtacgtggctgcgccaggggagtcgctagaggtgcgctgcctgttgaaagatgccgccgtgatcagttggactaaggatggggtgcacttggggcccaacaataggacagtgcttattggggagtacttgcagataaagggcgccacgcctagagactccggcctctatgcttgtactgccagtaggactgtagacagtgaaacttggtacttcatggtgaatgtcacagatgccatctcatccggagatgatgaggatgacaccgatggtgcggaagattttgtcagtgagaacagtaacaacaagagagcaccatactggaccaacacagaaaagatggaaaagcggctccatgctgtgcctgcggccaacactgtcaagtttcgctgcccagccggggggaacccaatgccaaccatgcggtggctgaaaaacgggaaggagtttaagcaggagcatcgcattggaggctacaaggtacgaaaccagcactggagcctcattatggaaagtgtggtcccatctgacaagggaaattatacctgtgtagtggagaatgaatacgggtccatcaatcacacgtaccacctggatgttgtggcgcctggaagagaaaaggagattacagcttccccagactacctggagatagccatttactgcataggggtcttcttaatcgcctgtatggtggtaacagtcatcctgtgccgaatgaagaacacgaccaagaagccagacttcagcagccagccggctgtgcacaagctgaccaaacgtatccccctgcggagacaggtaacagtttcggctgagtccagctcctccatgaactccaacaccccgctggtgaggataacaacacgcctctcttcaacggcagacacccccatgctggcaggggtctccgagtatgaacttccagaggacccaaaatgggagtttccaagagataagctgacactgggcaagcccctgggagaaggttgctttgggcaagtggtcatggcggaagcagtgggaattgacaaagacaagcccaaggaggcggtcaccgtggccgtgaagatgttgaaagatgatgccacagagaaagacctttctgatctggtgtcagagatggagatgatgaagatgattgggaaacacaagaatatcataaatcttcttggagcctgcacacaggatgggcctctctatgtcatagttgagtatgcctctaaaggcaacctccgagaatacctccgagcccggaggccacccgggatggagtactcctatgacattaaccgtgttcctgaggagcagatgaccttcaaggacttggtgtcatgcacctaccagctggccagaggcatggagtacttggcttcccaaaaatgtattcatcgagatttagcagccagaaatgttttggtaacagaaaacaatgtgatgaaaatagcagactttggactcgccagagatatcaacaatatagactattacaaaaagaccaccaatgggcggcttccagtcaagtggatggctccagaagccctgtttgatagagtatacactcatcagagtgatgtctggtccttcggggtgttaatgtgggagatcttcactttagggggctcgccctacccagggattcccgtggaggaactttttaagctgctgaaggaaggacacagaatggataagccagccaactgcaccaacgaactgtacatgatgatgagggactgttggcatgcagtgccctcccagagaccaacgttcaagcagttggtagaagacttggatcgaattctcactctcacaaccaatgaggaatacttggacctcagccaacctctcgaacagtattcacctagttaccctgacacaagaagttcttgttcttcaggagatgattctgttttttctccagaccccatgccttacgaaccatgccttcctcagtatccacacataaacggcagtgttaaaacatgaatgactgtgtctgcctgtccccaaacaggacagcactgggaacctagctacactgagcagggagaccatgcctcccagagcttgttgtctccacttgtatatatggatcagaggagtaaataattggaaaagtaatcagcatatgtgtaaagatttatacagttgaaaacttgtaatcttccccaggaggagaagaaggtttctggagcagtggactgccacaagccaccatgtaacccctctcacctgccgtgcgtactggctgtggaccagtaggactcaaggtggacgtgcgttctgccttccttgttaattttgtaataattggagaagatttatgtcagcacacacttacagagcacaaatgcagtatataggtgctggatgtatgtaaatatattcaaattatgtataaatatatattatatatttacaaggagttattttttgtattgattttaaatggatgtcccaatgcacctagaaaattggtctctctttttttaatagctatttgctaaatgctgttcttacacataatttcttaattttcaccgagcagaggtggaaaaatacttttgctttcagggaaaatggtataacgttaatttattaataaattggtaatatacaaaacaattaatcatttatagttttttttgtaatttaagtggcatttctatgcaggcagcacagcagactagttaatctattgcttggacttaactagttatcagatcctttgaaaagagaatatttacaatatatgactaatttggggaaaatgaagttttgatttatttgtgtttaaatgctgctgtcagacgattgttcttagacctcctaaatgccccatattaaaagaactcattcataggaaggtgtttcattttggtgtgcaaccctgtcattacgtcaacgcaacgtctaactggacttcccaagataaatggtaccagcgtcctcttaaaagatgccttaatccattccttgaggacagaccttagttgaaatgatagcagaatgtgcttctctctggcagctggccttctgcttctgagttgcacattaatcagattagcctgtattctcttcagtgaattttgataatggcttccagactctttggcgttggagacgcctgttaggatcttcaagtcccatcatagaaaattgaaacacagagttgttctgctgatagttttggggatacgtccatctttttaagggattgctttcatctaattctggcaggacctcaccaaaagatccagcctcatacctacatcagacaaaatatcgccgttgttccttctgtactaaagtattgtgttttgctttggaaacacccactcactttgcaatagccgtgcaagatgaatgcagattacactgatcttatgtgttacaaaattggagaaagtatttaataaaacctgttaatttttatactgacaataaaaatgtttctacagatattaatgttaacaagacaaaataaatgtcacgcaacttattttttt

SEQ ID NO: 10807 - DNA, 4639 bp, Homo sapiens
  source 1..4639: mol_type = unassigned DNA
ggcggcggctggaggagagcgcggtggagagccgagcgggcgggcggcgggtgcggagcgggcgagggagcgcgcgcggccgccacaaagctcgggcgccgcggggctgcatgcggcgtacctggcccggcgcggcgactgctctccgggctggcgggggccggccgcgagccccgggggccccgaggccgcagcttgcctgcgcgctctgagccttcgcaactcgcgagcaaagtttggtggaggcaacgccaagcctgagtcctttcttcctctcgttccccaaatccgagggcagcccgcgggcgtcatgcccgcgctcctccgcagcctggggtacgcgtgaagcccgggaggcttggcgccggcgaagacccaaggaccactcttctgcgtttggagttgctccccgcaaccccgggctcgtcgctttctccatcccgacccacgcggggcgcggggacaacacaggtcgcggaggagcgttgccattcaagtgactgcagcagcagcggcagcgcctcggttcctgagcccaccgcaggctgaaggcattgcgcgtagtccatgcccgtagaggaagtgtgcagatgggattaacgtccacatggagatatggaagaggaccggggattggtaccgtaaccatggtcagctggggtcgtttcatctgcctggtcgtggtcaccatggcaaccttgtccctggcccggccctccttcagtttagttgaggataccacattagagccagaagagccaccaaccaaataccaaatctctcaaccagaagtgtacgtggctgcgccaggggagtcgctagaggtgcgctgcctgttgaaagatgccgccgtgatcagttggactaaggatggggtgcacttggggcccaacaataggacagtgcttattggggagtacttgcagataaagggcgccacgcctagagactccggcctctatgcttgtactgccagtaggactgtagacagtgaaacttggtacttcatggtgaatgtcacagatgccatctcatccggagatgatgaggatgacaccgatggtgcggaagattttgtcagtgagaacagtaacaacaagagagcaccatactggaccaacacagaaaagatggaaaagcggctccatgctgtgcctgcggccaacactgtcaagtttcgctgcccagccggggggaacccaatgccaaccatgcggtggctgaaaaacgggaaggagtttaagcaggagcatcgcattggaggctacaaggtacgaaaccagcactggagcctcattatggaaagtgtggtcccatctgacaagggaaattatacctgtgtagtggagaatgaatacgggtccatcaatcacacgtaccacctggatgttgtggagcgatcgcctcaccggcccatcctccaagccggactgccggcaaatgcctccacagtggtcggaggagacgtagagtttgtctgcaaggtttacagtgatgcccagccccacatccagtggatcaagcacgtggaaaagaacggcagtaaatacgggcccgacgggctgccctacctcaaggttctcaaggttaccaaggccgccggtgttaacaccacggacaaagagattgaggttctctatattcggaatgtaacttttgaggacgctggggaatatacgtgcttggcgggtaattctattgggatatcctttcactctgcatggttgacagttctgccagcgcctggaagagaaaaggagattacagcttccccagactacctggagatagccatttactgcataggggtcttcttaatcgcctgtatggtggtaacagtcatcctgtgccgaatgaagaacacgaccaagaagccagacttcagcagccagccggctgtgcacaagctgaccaaacgtatccccctgcggagacaggtttcggctgagtccagctcctccatgaactccaacaccccgctggtgaggataacaacacgcctctcttcaacggcagacacccccatgctggcaggggtctccgagtatgaacttccagaggacccaaaatgggagtttccaagagataagctgacactgggcaagcccctgggagaaggttgctttgggcaagtggtcatggcggaagcagtgggaattgacaaagacaagcccaaggaggcggtcaccgtggccgtgaagatgttgaaagatgatgccacagagaaagacctttctgatctggtgtcagagatggagatgatgaagatgattgggaaacacaagaatatcataaatcttcttggagcctgcacacaggatgggcctctctatgtcatagttgagtatgcctctaaaggcaacctccgagaatacctccgagcccggaggccacccgggatggagtactcctatgacattaaccgtgttcctgaggagcagatgaccttcaaggacttggtgtcatgcacctaccagctggccagaggcatggagtacttggcttcccaaaaatgtattcatcgagatttagcagccagaaatgttttggtaacagaaaacaatgtgatgaaaatagcagactttggactcgccagagatatcaacaatatagactattacaaaaagaccaccaatgggcggcttccagtcaagtggatggctccagaagccctgtttgatagagtatacactcatcagagtgatgtctggtccttcggggtgttaatgtgggagatcttcactttagggggctcgccctacccagggattcccgtggaggaactttttaagctgctgaaggaaggacacagaatggataagccagccaactgcaccaacgaactgtacatgatgatgagggactgttggcatgcagtgccctcccagagaccaacgttcaagcagttggtagaagacttggatcgaattctcactctcacaaccaatgaggaatacttggacctcagccaacctctcgaacagtattcacctagttaccctgacacaagaagttcttgttcttcaggagatgattctgttttttctccagaccccatgccttacgaaccatgccttcctcagtatccacacataaacggcagtgttaaaacatgaatgactgtgtctgcctgtccccaaacaggacagcactgggaacctagctacactgagcagggagaccatgcctcccagagcttgttgtctccacttgtatatatggatcagaggagtaaataattggaaaagtaatcagcatatgtgtaaagatttatacagttgaaaacttgtaatcttccccaggaggagaagaaggtttctggagcagtggactgccacaagccaccatgtaacccctctcacctgccgtgcgtactggctgtggaccagtaggactcaaggtggacgtgcgttctgccttccttgttaattttgtaataattggagaagatttatgtcagcacacacttacagagcacaaatgcagtatataggtgctggatgtatgtaaatatattcaaattatgtataaatatatattatatatttacaaggagttattttttgtattgattttaaatggatgtcccaatgcacctagaaaattggtctctctttttttaatagctatttgctaaatgctgttcttacacataatttcttaattttcaccgagcagaggtggaaaaatacttttgctttcagggaaaatggtataacgttaatttattaataaattggtaatatacaaaacaattaatcatttatagttttttttgtaatttaagtggcatttctatgcaggcagcacagcagactagttaatctattgcttggacttaactagttatcagatcctttgaaaagagaatatttacaatatatgactaatttggggaaaatgaagttttgatttatttgtgtttaaatgctgctgtcagacgattgttcttagacctcctaaatgccccatattaaaagaactcattcataggaaggtgtttcattttggtgtgcaaccctgtcattacgtcaacgcaacgtctaactggacttcccaagataaatggtaccagcgtcctcttaaaagatgccttaatccattccttgaggacagaccttagttgaaatgatagcagaatgtgcttctctctggcagctggccttctgcttctgagttgcacattaatcagattagcctgtattctcttcagtgaattttgataatggcttccagactctttggcgttggagacgcctgttaggatcttcaagtcccatcatagaaaattgaaacacagagttgttctgctgatagttttggggatacgtccatctttttaagggattgctttcatctaattctggcaggacctcaccaaaagatccagcctcatacctacatcagacaaaatatcgccgttgttccttctgtactaaagtattgtgttttgctttggaaacacccactcactttgcaatagccgtgcaagatgaatgcagattacactgatcttatgtgttacaaaattggagaaagtatttaataaaacctgttaatttttatactgacaataaaaatgtttctacagatattaatgttaacaagacaaaataaatgtcacgcaacttattttttt

SEQ ID NO: 10808 - DNA, 3061 bp, Homo sapiens
  source 1..3061: mol_type = unassigned DNA
gagcgggcgagggagcgcgcgcggccgccacaaagctcgggcgccgcggggctgcatgcggcgtacctggcccggcgcggcgactgctctccgggctggcgggggccggccgcgagccccgggggccccgaggccgcagcttgcctgcgcgctctgagccttcgcaactcgcgagcaaagtttggtggaggcaacgccaagcctgagtcctttcttcctctcgttccccaaatccgagggcagcccgcgggcgtcatgcccgcgctcctccgcagcctggggtacgcgtgaagcccgggaggcttggcgccggcgaagacccaaggaccactcttctgcgtttggagttgctccccgcaaccccgggctcgtcgctttctccatcccgacccacgcggggcgcggggacaacacaggtcgcggaggagcgttgccattcaagtgactgcagcagcagcggcagcgcctcggttcctgagcccaccgcaggctgaaggcattgcgcgtagtccatgcccgtagaggaagtgtgcagatgggattaacgtccacatggagatatggaagaggaccggggattggtaccgtaaccatggtcagctggggtcgtttcatctgcctggtcgtggtcaccatggcaaccttgtccctggcccggccctccttcagtttagttgaggataccacattagagccagaagagccaccaaccaaataccaaatctctcaaccagaagtgtacgtggctgcgccaggggagtcgctagaggtgcgctgcctgttgaaagatgccgccgtgatcagttggactaaggatggggtgcacttggggcccaacaataggacagtgcttattggggagtacttgcagataaagggcgccacgcctagagactccggcctctatgcttgtactgccagtaggactgtagacagtgaaacttggtacttcatggtgaatgtcacagatgccatctcatccggagatgatgaggatgacaccgatggtgcggaagattttgtcagtgagaacagtaacaacaagagagcaccatactggaccaacacagaaaagatggaaaagcggctccatgctgtgcctgcggccaacactgtcaagtttcgctgcccagccggggggaacccaatgccaaccatgcggtggctgaaaaacgggaaggagtttaagcaggagcatcgcattggaggctacaaggtacgaaaccagcactggagcctcattatggaaagtgtggtcccatctgacaagggaaattatacctgtgtagtggagaatgaatacgggtccatcaatcacacgtaccacctggatgttgtggagcgatcgcctcaccggcccatcctccaagccggactgccggcaaatgcctccacagtggtcggaggagacgtagagtttgtctgcaaggtttacagtgatgcccagccccacatccagtggatcaagcacgtggaaaagaacggcagtaaatacgggcccgacgggctgccctacctcaaggttctcaagcactcggggataaatagttccaatgcagaagtgctggctctgttcaatgtgaccgaggcggatgctggggaatatatatgtaaggtctccaattatatagggcaggccaaccagtctgcctggctcactgtcctgccaaaacagcaagcgcctggaagagaaaaggagattacagcttccccagactacctggagatagccatttactgcataggggtcttcttaatcgcctgtatggtggtaacagtcatcctgtgccgaatgaagaacacgaccaagaagccagacttcagcagccagccggctgtgcacaagctgaccaaacgtatccccctgcggagacaggtaacagtttcggctgagtccagctcctccatgaactccaacaccccgctggtgaggataacaacacgcctctcttcaacggcagacacccccatgctggcaggggtctccgagtatgaacttccagaggacccaaaatgggagtttccaagagataagctgacactgggcaagcccctgggagaaggttgctttgggcaagtggtcatggcggaagcagtgggaattgacaaagacaagcccaaggaggcggtcaccgtggccgtgaagatgttgaaagatgatgccacagagaaagacctttctgatctggtgtcagagatggagatgatgaagatgattgggaaacacaagaatatcataaatcttcttggagcctgcacacaggatgggcctctctatgtcatagttgagtatgcctctaaaggcaacctccgagaatacctccgagcccggaggccacccgggatggagtactcctatgacattaaccgtgttcctgaggagcagatgaccttcaaggacttggtgtcatgcacctaccagctggccagaggcatggagtacttggcttcccaaaaatgtattcatcgagatttagcagccagaaatgttttggtaacagaaaacaatgtgatgaaaatagcagactttggactcgccagagatatcaacaatatagactattacaaaaagaccaccaatgggcggcttccagtcaagtggatggctccagaagccctgtttgatagagtatacactcatcagagtgatgtctggtccttcggggtgttaatgtgggagatcttcactttagggggctcgccctacccagggattcccgtggaggaactttttaagctgctgaaggaaggacacagaatggataagccagccaactgcaccaacgaactgtacatgatgatgagggactgttggcatgcagtgccctcccagagaccaacgttcaagcagttggtagaagacttggatcgaattctcactctcacaaccaatgaggaatacttggacctcagccaacctctcgaacagtattcacctagttaccctgacacaagaagttcttgttcttcaggagatgattctgttttttctccagaccccatgccttacgaaccatgccttcctcagtatccacacataaacggcagtgttaaaacatga

SEQ ID NO: 10809 - DNA, 3100 bp, Homo sapiens
  source 1..3100: mol_type = unassigned DNA
gcgcccccaatgtccccaggtccggacaggccgagatgacgccgagccccctgttgctgctcctgctgccgccgctgctgctgggggccttcccgccggccgccgccgcccgaggccccccaaagatggcggacaaggtggtcccacggcaggtggcccggctgggccgcactgtgcggctgcagtgcccagtggagggggacccgccgccgctgaccatgtggaccaaggatggccgcaccatccacagcggctggagccgcttccgcgtgctgccgcaggggctgaaggtgaagcaggtggagcgggaggatgccggcgtgtacgtgtgcaaggccaccaacggcttcggcagcctgagcgtcaactacaccctcgtcgtgctggatgacattagcccagggaaggagagcctggggcccgacagctcctctgggggtcaagaggaccccgccagccagcagtgggcacgaccgcgcttcacacagccctccaagatgaggcgccgggtgatcgcacggcccgtgggtagctccgtgcggctcaagtgcgtggccagcgggcaccctcggcccgacatcacgtggatgaaggacgaccaggccttgacgcgcccagaggccgctgagcccaggaagaagaagtggacactgagcctgaagaacctgcggccggaggacagcggcaaatacacctgccgcgtgtcgaaccgcgcgggcgccatcaacgccacctacaaggtggatgtgatccagcggacccgttccaagcccgtgctcacaggcacgcaccccgtgaacacgacggtggacttcggggggaccacgtccttccagtgcaaggtgcgcagcgacgtgaagccggtgatccagtggctgaagcgcgtggagtacggcgccgagggccgccacaactccaccatcgatgtgggcggccagaagtttgtggtgctgcccacgggtgacgtgtggtcgcggcccgacggctcctacctcaataagctgctcatcacccgtgcccgccaggacgatgcgggcatgtacatctgccttggcgccaacaccatgggctacagcttccgcagcgccttcctcaccgtgctgccagacccaaaaccgccagggccacctgtggcctcctcgtcctcggccactagcctgccgtggcccgtggtcatcggcatcccagccggcgctgtcttcatcctgggcaccctgctcctgtggctttgccaggcccagaagaagccgtgcacccccgcgcctgcccctcccctgcctgggcaccgcccgccggggacggcccgcgaccgcagcggagacaaggaccttccctcgttggccgccctcagcgctggccctggtgtggggctgtgtgaggagcatgggtctccggcagccccccagcacttactgggcccaggcccagttgctggccctaagttgtaccccaaactctacacagacatccacacacacacacacacacactctcacacacactcacacgtggagggcaaggtccaccagcacatccactatcagtgctagacggcaccgtatctgcagtgggcacgggggggccggccagacaggcagactgggaggatggaggacggagctgcagacgaaggcaggggacccatggcgaggaggaatggccagcaccccaggcagtctgtgtgtgaggcatagcccctggacacacacacacagacacacacactgcctggatgcatgtatgcacacacatgcgcgcacacgtgctccctgaaggcacacgtacgcacacacgcacatgcacagatatgccgcctgggcacacagataagctgcccaaatgcacgcacacgcacagagacatgccagaacatacaaggacatgctgcctgaacatacacacgcacacccatgcgcagatgtgctgcctggacacacacacacacacggatatgctgtctggacgcacacacgtgcagatatggtatccggacacacacgtgcacagatatgctgcctggacacacagataatgctgccttgacacacacatgcacggatattgcctggacacacacacacacacgtgtgcacagatatgctgtctggacacgcacacacatgcagatatgctgcctggacacacacttccagacacacgtgcacaggcgcagatatgctgcctggacacacgcagatatgctgtctagtcacacacacacgcagacatgctgtccggacacacacacgcatgcacagatatgctgtccggacacacacacgcacgcagatatgctgcctggacacacacacagataatgctgcctcaacactcacacacgtgcagatattgcctggacacacacatgtgcacagatatgctgtctggacatgcacacacgtgcagatatgctgtccggatacacacgcacgcacacatgcagatatgctgcctgggcacacacttccggacacacatgcacacacaggtgcagatatgctgcctggacacacgcagactgacgtgcttttgggagggtgtgccgtgaagcctgcagtacgtgtgccgtgaggctcatagttgatgagggactttccctgctccaccgtcactcccccaactctgcccgcctctgtccccgcctcagtccccgcctccatccccgcctctgtcccctggccttggcggctatttttgccacctgccttgggtgcccaggagtcccctactgctgtgggctggggttgggggcacagcagccccaagcctgagaggctggagcccatggctagtggctcatccccactgcattctccccctgacacagagaaggggccttggtatttatatttaagaaatgaagataatattaataatgatggaaggaagactgggttgcagggactgtggtctctcctggggcccgggacccgcctggtctttcagccatgctgatgaccacaccccgtccaggccagacaccaccccccaccccactgtcgtggtggccccagatctctgtaattttatgtagagtttgagctgaagccccgtatatttaatttattttgttaaacatgaaagtgcatcctttccctcc

SEQ ID NO: 10810 - DNA, 3639 bp, Homo sapiens
  source 1..3639: mol_type = unassigned DNA
actttgcacgctcgcagccacgtttccgcacacctgtcccctttccacgcacctgtgtccggcagcccgcacatctgtgggagcgctgcctcctcgccagctgtccgggaagttcagcgccgctctcccacgggcgtgagaccgccccacccacctgtccgtgactgcagctccggccgggagggcggcagcaggtgagaggctgggaggcctcaggtgggaacatacctttggccaaaggcaccaggtaacccgaacgccccggggaggacccctgcctgcatcgccgcggccgtccccccctaccccgtccccagcagctccggctgggcgaggccctgcttctcccttctgctcccgaagaccccccggggcgcagacctggaagcctcgaagctcccgcggccgtccagtccgcccccttctgagcaaccagagagcggtctgggcccggcccggggctgcgcagaggtcagactgccgcgggcagggccggagcctgctctgggggtcgcggaggtgtctcgagagttgaggacccgacccgggcgcgcgcgggcgcaggtccggacaggccgagatgacgccgagccccctgttgctgctcctgctgccgccgctgctgctgggggccttcccgccggccgccgccgcccgaggccccccaaagatggcggacaaggtggtcccacggcaggtggcccggctgggccgcactgtgcggctgcagtgcccagtggagggggacccgccgccgctgaccatgtggaccaaggatggccgcaccatccacagcggctggagccgcttccgcgtgctgccgcaggggctgaaggtgaagcaggtggagcgggaggatgccggcgtgtacgtgtgcaaggccaccaacggcttcggcagcctgagcgtcaactacaccctcgtcgtgctggatgacattagcccagggaaggagagcctggggcccgacagctcctctgggggtcaagaggaccccgccagccagcagtgggcacgaccgcgcttcacacagccctccaagatgaggcgccgggtgatcgcacggcccgtgggtagctccgtgcggctcaagtgcgtggccagcgggcaccctcggcccgacatcacgtggatgaaggacgaccaggccttgacgcgcccagaggccgctgagcccaggaagaagaagtggacactgagcctgaagaacctgcggccggaggacagcggcaaatacacctgccgcgtgtcgaaccgcgcgggcgccatcaacgccacctacaaggtggatgtgatccagcggacccgttccaagcccgtgctcacaggcacgcaccccgtgaacacgacggtggacttcggggggaccacgtccttccagtgcaaggtgcgcagcgacgtgaagccggtgatccagtggctgaagcgcgtggagtacggcgccgagggccgccacaactccaccatcgatgtgggcggccagaagtttgtggtgctgcccacgggtgacgtgtggtcgcggcccgacggctcctacctcaataagctgctcatcacccgtgcccgccaggacgatgcgggcatgtacatctgccttggcgccaacaccatgggctacagcttccgcagcgccttcctcaccgtgctgccagacccaaaaccgccagggccacctgtggcctcctcgtcctcggccactagcctgccgtggcccgtggtcatcggcatcccagccggcgctgtcttcatcctgggcaccctgctcctgtggctttgccaggcccagaagaagccgtgcacccccgcgcctgcccctcccctgcctgggcaccgcccgccggggacggcccgcgaccgcagcggagacaaggaccttccctcgttggccgccctcagcgctggccctggtgtggggctgtgtgaggagcatgggtctccggcagccccccagcacttactgggcccaggcccagttgctggccctaagttgtaccccaaactctacacagacatccacacacacacacacacacactctcacacacactcacacgtggagggcaaggtccaccagcacatccactatcagtgctagacggcaccgtatctgcagtgggcacgggggggccggccagacaggcagactgggaggatggaggacggagctgcagacgaaggcaggggacccatggcgaggaggaatggccagcaccccaggcagtctgtgtgtgaggcatagcccctggacacacacacacagacacacacactgcctggatgcatgtatgcacacacatgcgcgcacacgtgctccctgaaggcacacgtacgcacacacgcacatgcacagatatgccgcctgggcacacagataagctgcccaaatgcacgcacacgcacagagacatgccagaacatacaaggacatgctgcctgaacatacacacgcacacccatgcgcagatgtgctgcctggacacacacacacacacggatatgctgtctggacgcacacacgtgcagatatggtatccggacacacacgtgcacagatatgctgcctggacacacagataatgctgccttgacacacacatgcacggatattgcctggacacacacacacacacgtgtgcacagatatgctgtctggacacgcacacacatgcagatatgctgcctggacacacacttccagacacacgtgcacaggcgcagatatgctgcctggacacacgcagatatgctgtctagtcacacacacacgcagacatgctgtccggacacacacacgcatgcacagatatgctgtccggacacacacacgcacgcagatatgctgcctggacacacacacagataatgctgcctcaacactcacacacgtgcagatattgcctggacacacacatgtgcacagatatgctgtctggacatgcacacacgtgcagatatgctgtccggatacacacgcacgcacacatgcagatatgctgcctgggcacacacttccggacacacatgcacacacaggtgcagatatgctgcctggacacacgcagactgacgtgcttttgggagggtgtgccgtgaagcctgcagtacgtgtgccgtgaggctcatagttgatgagggactttccctgctccaccgtcactcccccaactctgcccgcctctgtccccgcctcagtccccgcctccatccccgcctctgtcccctggccttggcggctatttttgccacctgccttgggtgcccaggagtcccctactgctgtgggctggggttgggggcacagcagccccaagcctgagaggctggagcccatggctagtggctcatccccactgcattctccccctgacacagagaaggggccttggtatttatatttaagaaatgaagataatattaataatgatggaaggaagactgggttgcagggactgtggtctctcctggggcccgggacccgcctggtctttcagccatgctgatgaccacaccccgtccaggccagacaccaccccccaccccactgtcgtggtggccccagatctctgtaattttatgtagagtttgagctgaagccccgtatatttaatttattttgttaaacatgaaagtgcatccttt

SEQ ID NO: 10811 - DNA, 1663 bp, Homo sapiens
  source 1..1663: mol_type = unassigned DNA
aaatttgtccgctaatggcgcaggcgattatctgcggggcgctgagtgttgtgtgtcctgcgggcagggccggagttacaagcgccaggaatccagacggtgtttggagagggggggcggcgggggagcccggtccggacaggccgagatgacgccgagccccctgttgctgctcctgctgccgccgctgctgctgggggccttcccgccggccgccgccgcccgaggccccccaaagatggcggacaaggtggtcccacggcaggtggcccggctgggccgcactgtgcggctgcagtgcccagtggagggggacccgccgccgctgaccatgtggaccaaggatggccgcaccatccacagcggctggagccgcttccgcgtgctgccgcaggggctgaaggtgaagcaggtggagcgggaggatgccggcgtgtacgtgtgcaaggccaccaacggcttcggcagcctgagcgtcaactacaccctcgtcgtgctggatgacattagcccagggaaggagagcctggggcccgacagctcctctgggggtcaagaggaccccgccagccagcagtgggcacgaccgcgcttcacacagccctccaagatgaggcgccgggtgatcgcacggcccgtgggtagctccgtgcggctcaagtgcgtggccagcgggcaccctcggcccgacatcacgtggatgaaggacgaccaggccttgacgcgcccagaggccgctgagcccaggaagaagaagtggacactgagcctgaagaacctgcggccggaggacagcggcaaatacacctgccgcgtgtcgaaccgcgcgggcgccatcaacgccacctacaaggtggatgtgatccagcggacccgttccaagcccgtgctcacaggcacgcaccccgtgaacacgacggtggacttcggggggaccacgtccttccagtgcaaggtgcgcagcgacgtgaagccggtgatccagtggctgaagcgcgtggagtacggcgccgagggccgccacaactccaccatcgatgtgggcggccagaagtttgtggtgctgcccacgggtgacgtgtggtcgcggcccgacggctcctacctcaataagctgctcatcacccgtgcccgccaggacgatgcgggcatgtacatctgccttggcgccaacaccatgggctacagcttccgcagcgccttcctcaccgtgctgccagacccaaaaccgccagggccacctgtggcctcctcgtcctcggccactagcctgccgtggcccgtggtcatcggcatcccagccggcgctgtcttcatcctgggcaccctgctcctgtggctttgccaggcccagaagaagccgtgcacccccgcgcctgcccctcccctgcctgggcaccgcccgccggggacggcccgcgaccgcagcggagacaaggaccttccctcgttggccgccctcagcgctggccctggtgtggggctgtgtgaggagcatgggtctccggcagccccccagcacttactgggcccaggcccagttgctggccctaagttgtaccccaaactctacacagacatccacacacacacacacacacactctcacacacactcacacgtggagggcaaggtccaccagcacatccactatcagtgctag

SEQ ID NO: 10812 - DNA, 562 bp, Homo sapiens
  source 1..562: mol_type = unassigned DNA
gctaatggcgcaggcgattatctgcggggcgctgagtgttgtgtgtcctgcgggcagggccggagttacaagcgccaggaatccagacggtccggacaggccgagatgacgccgagccccctgttgctgctcctgctgccgccgctgctgctgggggccttcccgccggccgccgccgcccgaggccccccaaagatggcggacaaggtggtcccacggcaggtggcccggctgggccgcactgtgcggctgcagtgcccagtggagggggacccgccgccgctgaccatgtggaccaaggatggccgcaccatccacagcggctggagccgcttccgcgtgctgccgcaggggctgaaggtgaagcaggtggagcgggaggatgccggcgtgtacgtgtgcaaggccaccaacggcttcggcagcctgagcgtcaactacaccctcgtcgtgctggatgacattagcccagggaaggagagcctggggcccgacagctcctctgggggtcaagaggaccccgccagccagcagtgggcacgaccgcgcttcacacagccct

SEQ ID NO: 10813 - DNA, 2304 bp, Homo sapiens
  source 1..2304: mol_type = unassigned DNA
gccgccccgccccgagaccgggcccgggggcgcggggcggcgggatgcggcgcccggggcggcgatgaccgcggagcgcacgccgcgggcccggccctgaccccgccgcccgcccgctgagccccccgccgaggtccggacaggccgagatgacgccgagccccctgttgctgctcctgctgccgccgctgctgctgggggccttcccgccggccgccgccgcccgaggccccccaaagatggcggacaaggtggtcccacggcaggtggcccggctgggccgcactgtgcggctgcagtgcccagtggagggggacccgccgccgctgaccatgtggaccaaggatggccgcaccatccacagcggctggagccgcttccgcgtgctgccgcaggggctgaaggtgaagcaggtggagcgggaggatgccggcgtgtacgtgtgcaaggccaccaacggcttcggcagcctgagcgtcaactacaccctcgtcgtgctggatgacattagcccagggaaggagagcctggggcccgacagctcctctgggggtcaagaggaccccgccagccagcagtgggcacgaccgcgcttcacacagccctccaagatgaggcgccgggtgatcgcacggcccgtgggtagctccgtgcggctcaagtgcgtggccagcgggcaccctcggcccgacatcacgtggatgaaggacgaccaggccttgacgcgcccagaggccgctgagcccaggaagaagaagtggacactgagcctgaagaacctgcggccggaggacagcggcaaatacacctgccgcgtgtcgaaccgcgcgggcgccatcaacgccacctacaaggtggatgtgatccagcggacccgttccaagcccgtgctcacaggcacgcaccccgtgaacacgacggtggacttcggggggaccacgtccttccagtgcaaggtgcgcagcgacgtgaagccggtgatccagtggctgaagcgcgtggagtacggcgccgagggccgccacaactccaccatcgatgtgggcggccagaagtttgtggtgctgcccacgggtgacgtgtggtcgcggcccgacggctcctacctcaataagctgctcatcacccgtgcccgccaggacgatgcgggcatgtacatctgccttggcgccaacaccatgggctacagcttccgcagcgccttcctcaccgtgctgccagacccaaaaccgccagggccacctgtggcctcctcgtcctcggccactagcctgccgtggcccgtggtcatcggcatcccagccggcgctgtcttcatcctgggcaccctgctcctgtggctttgccaggcccagaagaagccgtgcacccccgcgcctgcccctcccctgcctgggcaccgcccgccggggacggcccgcgaccgcagcggagacaaggaccttccctcgttggccgccctcagcgctggccctggtgtggggctgtgtgaggagcatgggtctccggcagccccccagcacttactgggcccaggcccagttgctggccctaagttgtaccccaaactctacacagacatccacacacacacacacacacactctcacacacactcacacgtggagggcaaggtccaccagcacatccactatcagtgctagacggcaccgtatctgcagtgggcacgggggggccggccagacaggcagactgggaggatggaggacggagctgcagacgaaggcaggggacccatggcgaggaggaatggccagcaccccaggcagtctgtgtgtgaggcatagcccctggacacacacacacagacacacacactgcctggatgcatgtatgcacacacatgcgcgcacacgtgctccctgaaggcacacgtacgcacacacgcacatgcacagatatgccgcctgggcacacagataagctgcccaaatgcacgcacacgcacagagacatgccagaacatacaaggacatgctgcctgaacatacacacgcacacccatgcgcagatgtgctgcctggacacacacacacacacggatatgctgtctggacgcacacacgtgcagatatggtatccggacacacacgtgcacagatatgctgcctggacacacagataatgctgccttgacacacacatgcacggatattgcctggacacacacacacacacgtgtgcacagatatgctgtctggacacgcacacacatgcagatatgctgcctggacacacacttccagacacacgtgcacaggcgcagatatgctgcctggacac

SEQ ID NO: 10814 - DNA, 571 bp, Homo sapiens
  source 1..571: mol_type = unassigned DNA
cgctaatggcgcaggcgattatctgcggggcgctgagtgttgtgtgtcctgcgggcagggccggagttacaagcgccaggaatccagacggtgtttggagagggggggcggcgggggagcccggtaattagtgtaaaccctttgtctgcctttgatacccacagcttctccccgctgcggcttcctccgcctggagcgcgggcggggagggcctgtggggagggcggccagacccctgatccccgcggcccgggaccggggagggcggtatctcccagttccacgtgttagtgacggcgcccccaatgtccccaggtccggacaggccgagatgacgccgagccccctgttgctgctcctgctgccgccgctgctgctgggggccttcccgccggccgccgccgcccgaggccccccaaagatggcggacaaggtggtcccacggcaggtggcccggctgggccgcactgtgcggctgcagtgcccagtggagggggacccgccgccgctgaccatgtggaccaaggatggccgcaccatccacagcggctggagccgcttccgcgtgctg

SEQ ID NO: 10815 - DNA, 1475 bp, Homo sapiens
  source 1..1475: mol_type = unassigned DNA
gctcgctccgggagagttgacaaagccccgcagggaaggacgcctcgcggcgcggcgccccgggcccctcgccccgccgccccgggccccccaaagatggcggacaaggtggtcccacggcaggtggcccggctgggccgcactgtgcggctgcagtgcccagtggagggggacccgccgccgctgaccatgtggaccaaggatggccgcaccatccacagcggctggagccgcttccgcgtgctgccgcaggggctgaaggtgaagcaggtggagcgggaggatgccggcgtgtacgtgtgcaaggccaccaacggcttcggcagcctgagcgtcaactacaccctcgtcgtgctggatgacattagcccagggaaggagagcctggggcccgacagctcctctgggggtcaagaggaccccgccagccagcagtgggcacgaccgcgcttcacacagccctccaagatgaggcgccgggtgatcgcacggcccgtgggtagctccgtgcggctcaagtgcgtggccagcgggcaccctcggcccgacatcacgtggatgaaggacgaccaggccttgacgcgcccagaggccgctgagcccaggaagaagaagtggacactgagcctgaagaacctgcggccggaggacagcggcaaatacacctgccgcgtgtcgaaccgcgcgggcgccatcaacgccacctacaaggtggatgtgatccagcggacccgttccaagcccgtgctcacaggcacgcaccccgtgaacacgacggtggacttcggggggaccacgtccttccagtgcaaggtgcgcagcgacgtgaagccggtgatccagtggctgaagcgcgtggagtacggcgccgagggccgccacaactccaccatcgatgtgggcggccagaagtttgtggtgctgcccacgggtgacgtgtggtcgcggcccgacggctcctacctcaataagctgctcatcacccgtgcccgccaggacgatgcgggcatgtacatctgccttggcgccaacaccatgggctacagcttccgcagcgccttcctcaccgtgctgccagacccaaaaccgccagggccacctgtggcctcctcgtcctcggccactagcctgccgtggcccgtggtcatcggcatcccagccggcgctgtcttcatcctgggcaccctgctcctgtggctttgccaggcccagaagaagccgtgcacccccgcgcctgcccctcccctgcctgggcaccgcccgccggggacggcccgcgaccgcagcggagacaaggaccttccctcgttggccgccctcagcgctggccctggtgtggggctgtgtgaggagcatgggtctccggcagccccccagcaccccactgtcgtggtggccccagatctctgtaattttatgtagagtttgagctgaagccccgtatatttaatttattttgttaaacatgaaagtgc

SEQ ID NO: 10816 - DNA, 3310 bp, Homo sapiens
  source 1..3310: mol_type = unassigned DNA
ttaagatgtctcttaccaaaccctggccctccccatccctgcatctgcctttgtggctttaatgagaaatccaggcgcttcataagagactgtacaaataacttctagggcgccactaactcattcagcagaaagggacccagggctgccaatgtttcagggaagataagtgagtggaaaaaaggtggtttttatagcgtcaggcggaccgaaggatttgcgtggttgagcgtgaactccgcccctgcagcagagctgaaaaaaaccaggatccgggttcctcagccccttttcacaatatttgattaggaatttggggcgggaccctggtctggcacaggcacgcacactctcagtagactctttcactcctctctctcttcctctctcacacgttctccaacccaaggaggccagacagagggacgtggtcactctctgaaaagttcaacttgagagacaaaatgcagtggacctccctcctgctgctggcagggctcttctccctctcccaggcccagtatgaagatgaccctcattggtggttccactacctccgcagccagcagtccacctactacgatccctatgacccttacccgtatgagacctacgagccttacccctatggggtggatgaagggccagcctacacctacggctctccatcccctccagatccccgcgactgcccccaggagtgcgactgcccacccaacttccccacggccatgtactgtgacaatcgcaacctcaagtacctgcccttcgttccctcccgcatgaagtatgtgtacttccagaacaaccagatcacctccatccaggaaggcgtctttgacaatgccacagggctgctctggattgctctccacggcaaccagatcaccagtgataaggtgggcaggaaggtcttctccaagctgaggcacctggagaggctgtacctggaccacaacaacctgacccggatgcccggtcccctgcctcgatccctgagagagctccatctcgaccacaaccagatctcacgggtccccaacaatgctctggaggggctggagaacctcacggccttgtacctccaacacaatgagatccaggaagtgggcagttccatgaggggcctccggtcactgatcttgctggacctgagttataaccaccttcggaaggtgcctgatgggctgccctcagctcttgagcagctgtacatggagcacaacaatgtctacaccgtccccgatagctacttccggggggcgcccaagctgctgtatgtgcggctgtcccacaacagtctaaccaacaatggcctggcctccaacaccttcaattccagcagcctccttgagctagacctctcctacaaccagctgcagaagatccccccagtcaacaccaacctggagaacctctacctccaaggcaataggatcaatgagttctccatcagcagcttctgcaccgtggtggacgtcgtgaacttctccaagctgcaggtgctgcgcctggacgggaacgagatcaagcgcagcgccatgcctgccgacgcgcccctctgcctgcgccttgccagcctcatcgagatctgagcagccctggcaccgggtactgggcggagagcccccgtggcatttggcttgatggtttggtttggcttttgctggaaggtccaggatggaccatgtgacagaagtccacgggcaccctctgtagtcttctttcctgtaggtggggttagggggggcgatcagggacaggcagccttctgctgaggacataggcagaagctcactcttttccagggacagaagtggtggtagatggaaggatccctggatgttccaaccccataaatctcacggctcttaagttcttcccaatgatctgaggtcatggaacttcaaaagtggcatgggcaatagtatataaccatacttttctaacaatccctggctgtctgtgagcagcacttgacagctctccctctgtgctgggctggtcgtgcagttactctgggctcccatttgttgcttctcaaaatatacctcttgcccagctgcctcttctgaaatccacttcacccactccactttcctccacagatgcctcttctgtgccttaagcagagtcaggagaccccaaggcatgtgagcatctgcccagcaacctgtggagacaacccacactgtgtctgagggtgaaaggacaccaggagtcacttctatacctccctaacctcacccctggaaagccaccagattggaggtcaccagcatgatgataatattcatgacctgatgtgggaggagacagccaacctcaggcttagatcaatgtatagggctatattttggcagctgggtagctctttgaaggtggataagacttcagaagaggaaaggccagactttgcttaccatcagcatctgcaatgggccaaacacacctcaaattggctgagttgagaaagcagccccagtagttccattcttgcccagcactttctgcattccaaacagcatcctacctgggtttttatccacaaaggtagcggccacatggtttttaaagtatgagaaacacagtttgtcctctccttttatccaagcaggaagattctatatcctgatggtagagacagactccaggcagccctggacttgctagcccaaagaaggaggatgtggttaatctgtttcacctggtttgtcctaaggccatagttaaaaagtaccagctctggctggggtccgtgaagcccaggccaggcagccaaatcttgcctgtgctgggcatacaaccctctgctttcacatctctgagctatatcctcattagtgaaggtggcttttgctttatagtttggctggggagcacttaattcttcccatttcaaaaggtaatgttgcctggggcttaacccacctgccctttgggcaaggttgggacaaagccatctgggcagtcaggggcaaggactgttggaggagagttagcccaagtataggctctgcccagatgccatcacatccctgatactgtgtatgctttgaagcaccttccctgagaagggaagaggggatctttggactacgttcttggctccagacctggaatccacaaaagccaaaccagctcatttcaacaaaggagctccgatgtgaggggcaaggctgccccctgccccagggctcttcagaaagcatctgcatgtgaacaccatcatgcctttataaaggatccttattacaggaaaagcatgagtggtggctaacctgaccaataaagttattttatgattgca

SEQ ID NO: 10817 - DNA, 2810 bp, Homo sapiens
  source 1..2810: mol_type = unassigned DNA
atgcagtggacctccctcctgctgctggcagggctcttctccctctcccaggcccagtatgaagatgaccctcattggtggttccactacctccgcagccagcagtccacctactacgatccctatgacccttacccgtatgagacctacgagccttacccctatggggtggatgaagggccagcctacacctacggctctccatcccctccagatccccgcgactgcccccaggagtgcgactgcccacccaacttcccccccttcgttccctcccgcatgaagtatgtgtacttccagaacaaccagatcacctccatccaggaaggcgtctttgacaatgccacagggctgctctggattgctctccacggcaaccagatcaccagtgataaggtgggcaggaaggtcttctccaagctgaggcacctggagaggctgtacctggaccacaacaacctgacccggatgcccggtcccctgcctcgatccctgagagagctccatctcgaccacaaccagatctcacgggtccccaacaatgctctggaggggctggagaacctcacggccttgtacctccaacacaatgagatccaggaagtgggcagttccatgaggggcctccggtcactgatcttgctggacctgagttataaccaccttcggaaggtgcctgatgggctgccctcagctcttgagcagctgtacatggagcacaacaatgtctacaccgtccccgatagctacttccggggggcgcccaagctgctgtatgtgcggctgtcccacaacagtctaaccaacaatggcctggcctccaacaccttcaattccagcagcctccttgagctagacctctcctacaaccagctgcagaagatccccccagtcaacaccaacctggagaacctctacctccaaggcaataggatcaatgagttctccatcagcagcttctgcaccgtggtggacgtcgtgaacttctccaagctgcaggtgctgcgcctggacgggaacgagatcaagcgcagcgccatgcctgccgacgcgcccctctgcctgcgccttgccagcctcatcgagatctgagcagccctggcaccgggtactgggcggagagcccccgtggcatttggcttgatggtttggtttggcttttgctggaaggtccaggatggaccatgtgacagaagtccacgggcaccctctgtagtcttctttcctgtaggtggggttagggggggcgatcagggacaggcagccttctgctgaggacataggcagaagctcactcttttccagggacagaagtggtggtagatggaaggatccctggatgttccaaccccataaatctcacggctcttaagttcttcccaatgatctgaggtcatggaacttcaaaagtggcatgggcaatagtatataaccatacttttctaacaatccctggctgtctgtgagcagcacttgacagctctccctctgtgctgggctggtcgtgcagttactctgggctcccatttgttgcttctcaaaatatacctcttgcccagctgcctcttctgaaatccacttcacccactccactttcctccacagatgcctcttctgtgccttaagcagagtcaggagaccccaaggcatgtgagcatctgcccagcaacctgtggagacaacccacactgtgtctgagggtgaaaggacaccaggagtcacttctatacctccctaacctcacccctggaaagccaccagattggaggtcaccagcatgatgataatattcatgacctgatgtgggaggagacagccaacctcaggcttagatcaatgtatagggctatattttggcagctgggtagctctttgaaggtggataagacttcagaagaggaaaggccagactttgcttaccatcagcatctgcaatgggccaaacacacctcaaattggctgagttgagaaagcagccccagtagttccattcttgcccagcactttctgcattccaaacagcatcctacctgggtttttatccacaaaggtagcggccacatggtttttaaagtatgagaaacacagtttgtcctctccttttatccaagcaggaagattctatatcctgatggtagagacagactccaggcagccctggacttgctagcccaaagaaggaggatgtggttaatctgtttcacctggtttgtcctaaggccatagttaaaaagtaccagctctggctggggtccgtgaagcccaggccaggcagccaaatcttgcctgtgctgggcatacaaccctctgctttcacatctctgagctatatcctcattagtgaaggtggcttttgctttatagtttggctggggagcacttaattcttcccatttcaaaaggtaatgttgcctggggcttaacccacctgccctttgggcaaggttgggacaaagccatctgggcagtcaggggcaaggactgttggaggagagttagcccaagtataggctctgcccagatgccatcacatccctgatactgtgtatgctttgaagcaccttccctgagaagggaagaggggatctttggactacgttcttggctccagacctggaatccacaaaagccaaaccagctcatttcaacaaaggagctccgatgtgaggggcaaggctgccccctgccccagggctcttcagaaagcatctgcatgtgaacaccatcatgcctttataaaggatccttattacaggaaaagcatgagtggtggctaacctgaccaataaagttattttatgattgcatct

SEQ ID NO: 10818 - DNA, 594 bp, Homo sapiens
  source 1..594: mol_type = unassigned DNA
atgaagatgaccctcattggtggttccactacctccgcagccagcagtccacctactacgatccctatgacccttacccgtatgagacctacgagccttacccctatggggtggatgaagggccagcctacacctacggctctccatcccctccagatccccgcgactgcccccaggagtgcgactgcccacccaacttccacggccatgtactgtgacaatcgcaacctcaagtacctgcccttcgttccctcccgcatgaagtatgtgtacttccagaacaaccagatcacctccatccaggaaggcgtctttgacaatgccacagggctgctctggattgctctccacggcaaccagatcaccagtgataaggtgggcaggaaggtcttctccaagctgaggcacctggagaggctgtacctggaccacaacaacctgacccggatgcccggtcccctgcctcgatccctgagagagctccatctcgaccacaaccagatctcacgggtccccaacaatgctctggaggggagaacctcacggccttgtacctccaacacaatgagatccaggaagtgggcagttccatga

SEQ ID NO: 10819 - DNA, 3949 bp, Homo sapiens
  source 1..3949: mol_type = unassigned DNA
tggcaggtgaggaagcaggcagtgggcgagaagatggattcctttttggacagacaagaccagagagtgaagcgggaataactcatcctccctacctccccagcaaggaaacctctacaaacaggagcagccaagcaggactgaggcccttgccccccaagcatcttctcaaagaagggcatgtgggggcctgacagctcagctgcatgtgtcagcagctccagccccaccatgaacatctgaactcctcagcggggtaatggaccccctcctttcccccggagacacagcctgagtggcaggaatacagagcctttggagagtggctccctctcagctccgtcatgcaagaacactctctgcacccagcccattctgccaagtgacttaaaggaattaaaaaaaaaaaaagccttggtaaacaaaaagggggtaaaagccacgcagaggcccttcagaagaggtggcgggctgcagacaaaagggcaagagttgaaaagggctgtggaggtagcaagcagcagaggccaccctgctcagggctgggtgccaggccacagggcatgcccgacgaacagggagtcggaaccccctcaggccaccctcgggagtcctggggtccagaggggtgtccctgtaccccttgcacacaggaccctcactctgcagggataagccagctgcgcctgcagcctagggtgccaaggaggctgctgattgtggcccacagcctcatctgaacgccaggagaccaggataccgaggcaccggatcccctctctgtgccctggggagccccagtgctgcccagtcaccccagggctgaggtctgcgtccctagtggtgcaaggcctggtaggaccacggggcagggaatgtgagcgccatctgagctcacggtgtcctgagtcgcggcttcgtgactttggcaggggcctccggaccagtgaccccagtcaaacccagagggtcttgggcggcagcgacgaaggaggtattcaggctccaggccaggtggggccggacgcccccagccatccaccatggtggtggcacaccccaccgccactgccaccaccacgcccactgccactgtcacggccaccgttgtgatgaccacggccaccatggacctgcgggactggctgttcctctgctacgggctcatcgccttcctgacggaggtcatcgacagcaccacctgcccctcggtgtgccgctgcgacaacggcttcatctactgcaacgaccggggactcacatccatccccgcagatatccctgatgatgccaccaccctctacctgcagaacaaccagatcaacaacgccggcatcccccaggacctcaagaccaaggtcaacgtgcaggtcatctacctatacgagaatgacctggatgagttccccatcaacctgccccgctccctccgggagctgcacctgcaggacaacaatgtgcgcaccattgccagggactcgctggcccgcatcccgctgctggagaagctgcacctggatgacaactccgtgtccaccgtcagcattgaggaggacgccttcgccgacagcaaacagctcaagctgctcttcctgagccggaaccacctgagcagcatcccctcggggctgccgcacacgctggaggagctgcggctggatgacaaccgcatctccaccatcccgctgcatgccttcaagggcctcaacagcctgcggcgcctggtgctggacggtaacctgctggccaaccagcgcatcgccgacgacaccttcagccgcctacagaacctcacagagctctcgctggtgcgcaattcgctggccgcgccacccctcaacctgcccagcgcccacctgcagaagctctacctgcaggacaatgccatcagccacatcccctacaacacgctggccaagatgcgtgagctggagcggctggacctgtccaacaacaacctgaccacgctgccccgcggcctgttcgacgacctggggaacctggcccagctgctgctcaggaacaacccttggttttgtggctgcaacctcatgtggctgcgggactgggtgaaggcacgggcggccgtggtcaacgtgcggggcctcatgtgccagggccctgagaaggtccggggcatggccatcaaggacattaccagcgagatggacgagtgttttgagacggggccgcagggcggcgtggccaatgcggctgccaagaccacggccagcaaccacgcctctgccaccacgccccagggttccctgtttaccctcaaggccaaaaggccagggctgcgcctccccgactccaacattgactaccccatggccacgggtgatggcgccaagaccctggccatccacgtgaaggccctgacggcagactccatccgcatcacgtggaaggccacgctccccgcctcctctttccggctcagttggctgcgcctgggccacagcccagccgtgggctccatcacggagaccttggtgcagggggacaagacagagtacctgctgacagccctggagcccaagtccacctacatcatctgcatggtcaccatggagaccagcaatgcctacgtagctgatgagacacccgtgtgtgccaaggcagagacagccgacagctatggccctaccaccacactcaaccaggagcagaacgctggccccatggcgagcctgcccctggcgggcatcatcggcggggcagtggctctggtcttcctcttcctggtcctgggggccatctgctggtacgtgcaccaggctggcgagctgctgacccgggagagggcctacaaccggggcagcaggaaaaaggatgactatatggagtcagggaccaagaaggataactccatcctggaaatccgcggccctgggctgcagatgctgcccatcaacccgtaccgcgccaaagaagagtacgtggtccacactatcttcccctccaacggcagcagcctctgcaaggccacacacaccattggctacggcaccacgcggggctaccgggacggcggcatccccgacatagactactcctacacatgatgcccgcccacccgggctgccccgcctcagccccagctgccctggcgtggccatgtggctttgcccagcctgctgcaatccaagagagcaaggaagagaaattccatgggtgactttcctccgcagaaagcaaagtttggggagggctgacgattttgtagaacacaacagtgacaattttttttaaaagaatagaaggcaggagggggaattcgacattgttgaagacataatttataccaagttatgccagttggggagggaaggactaaaaataatattgcaggcagggctgggttgggttttttttttttcccccctgaactggaaggatactacctgtacaacatctgtggacacctcatgctctgttcaaggccatcacaaaggaaccgccagggagaagcagccggctctcaaagctcccacgcagctctcccgccactggccactcgctggcgacccgatggaaggttttcaggctcctcacaaaggagagagggaagaaaagatcttttgccctggagatatggtcctgaaatctctcccctggcttattccataccatttcccttgcagatttgcagaaacatggcatctttcactgcattctttgaacaatcatgtagtcgattaaaaaaaaaaaacaaacttttttttcctaggctgaagccctcttcagttccatgcaccacgctccgtagaagccccggcggaagccgtagctttccctgccacctggaggtgcatctgtctgcctgtctatccctgtcgcggtgtctctaagtacagatgggtagatagagccacatgcacggtccttaccgttcttcttgggtcagttcttaccatttcctgaacaatagaattgtgaaagtgtt

SEQ ID NO: 10820 - DNA, 7943 bp, Homo sapiens
  source 1..7943: mol_type = unassigned DNA
agttgtacgttcgaaacctgtcgccgtcacttgcgcgtttggcattatccattgtcaccgcggaggaacgagcgctcgagatatcatcagtgcccgcaaatctccgcgccaaggcgctgagctactcctttccgaggtgcgcctctggtcctccgtccctggtgcccagcagcggcgaggcggcatctccgctcccgccgccgtgtccaccgagccctgggatcagggtggcagttctcaacgatgggcaggagggacctcggcggcgacccctaaaacaataccatgccccgggatccccgctgctgccgcgccagcgtcttccctttccacctccctgaccctgtcggattcggatgagcccattgcaaggagaagacgcagccgtcagattgcagattgagcttaaccaagaagttcgtaggctaatcaaggctggcttgacctacaaaagaagaagagagttctgcctgcccacttgggcttgtgttgacacggctgataacttgccatcacctgttgccagtgtggaaaaattctccctgttgaattttttgcacatggaggacagcagcaaagagggcaacacaggctgataagaccagagacagcagggagattattttaccatacgccctcaggacgttccctctagctggagttctggacttcaacagaaccccatccagtcattttgattttgctgtttattttttttttctttttctttttcccaccacattgtattttatttccgtacttcagaaatgggcctacagaccacaaagtggcccagccatggggcttttttcctgaagtcttggcttatcatttccctggggctctactcacaggtgtccaaactcctggcctgccctagtgtgtgccgctgcgacaggaactttgtctactgtaatgagcgaagcttgacctcagtgcctcttgggatcccggagggcgtaactgtactctacctccacaacaaccaaattaataatgctggatttcctgcagaactgcacaatgtacagtcggtgcacacggtctacctgtatggcaaccaactggacgaattccccatgaaccttcccaagaatgtcagagttctccatttgcaggaaaacaatattcagaccatttcacgggctgctcttgcccagctcttgaagcttgaagagctgcacctggatgacaactccatatccacagtgggggtggaagacggggccttccgggaggctattagcctcaaattgttgtttttgtctaagaatcacctgagcagtgtgcctgttgggcttcctgtggacttgcaagagctgagagtggatgaaaatcgaattgctgtcatatccgacatggccttccagaatctcacgagcttggagcgtcttattgtggacgggaacctcctgaccaacaagggtatcgccgagggcaccttcagccatctcaccaagctcaaggaattttcaattgtacgtaattcgctgtcccaccctcctcccgatctcccaggtacgcatctgatcaggctctatttgcaggacaaccagataaaccacattcctttgacagccttctcaaatctgcgtaagctggaacggctggatatatccaacaaccaactgcggatgctgactcaaggggtttttgataatctctccaacctgaagcagctcactgctcggaataacccttggttttgtgactgcagtattaaatgggtcacagaatggctcaaatatatcccttcatctctcaacgtgcggggtttcatgtgccaaggtcctgaacaagtccgggggatggccgtcagggaattaaatatgaatcttttgtcctgtcccaccacgacccccggcctgcctctcttcaccccagccccaagtacagcttctccgaccactcagcctcccaccctctctattccaaaccctagcagaagctacacgcctccaactcctaccacatcgaaacttcccacgattcctgactgggatggcagagaaagagtgaccccacctatttctgaacggatccagctctctatccattttgtgaatgatacttccattcaagtcagctggctctctctcttcaccgtgatggcatacaaactcacatgggtgaaaatgggccacagtttagtagggggcatcgttcaggagcgcatagtcagcggtgagaagcaacacctgagcctggttaacttagagccccgatccacctatcggatttgtttagtgccactggatgcttttaactaccgcgcggtagaagacaccatttgttcagaggccaccacccatgcctcctatctgaacaacggcagcaacacagcgtccagccatgagcagacgacgtcccacagcatgggctccccctttctgctggcgggcttgatcgggggcgcggtgatatttgtgctggtggtcttgctcagcgtcttttgctggcatatgcacaaaaaggggcgctacacctcccagaagtggaaatacaaccggggccggcggaaagatgattattgcgaggcaggcaccaagaaggacaactccatcctggagatgacagaaaccagttttcagatcgtctccttaaataacgatcaactccttaaaggagatttcagactgcagcccatttacaccccaaatgggggcattaattacacagactgccatatccccaacaacatgcgatactgcaacagcagcgtgccagacctggagcactgccatacgtgacagccagaggcccagcgttatcaaggcggacaattagactcttgagaacacactcgtgtgtgcacataaagacacgcagattacatttgataaatgttacacagatgcatttgtgcatttgaatactctgtaatttatacggtgtactatataatgggatttaaaaaaagtgctatcttttctatttcaagttaattacaaacagttttgtaactctttgctttttaaatcttaaaaaaaaaaaagttgctgaagtactgtacagggttgtacaatgagaacccaatgccaaggcaaaaagaacgagtgatttttccttaggatacacatcaaccactttgctgttgaagctgtcagaataaattcctggtggtcagatgaaagggcagattaaatggactcatcagggtaagaggaataatatgggtaaaacaagaaatggcccgatagtttcacactattcctatacctccaggtccggaagacaggtaaaaaattctataatgtaagaatggaggtagttaccctgatttgaccctgtgtgggaaatgctgaaagcaccaggaggaagccggttcccgtgagataagttaacccggcctgacagaatcaagaaaattgagatgagatttgaaaggacccgaaaatgcaggggttggctttctgactgggaacttaaaaatcactcttcatgcttccctggtcctatgtgataacagagttagagacttgagtctgatttcagtcatcttcagggaccagtctgatgttgtagcaagaagactccctttaaaagtgttactgttcaaatcatatatcaggttgaatcacattcaacagagatatattctagaatacttttttagaagaggctaataaagggaagaattatattgaatggaattatttttgataatgagaattatttgggtagattcactgaggctatgtcaacatgatatttagaccaacaggtgatcaatgtttggaaaatacaacaatgacttatttaaaaattacccttcctgctatttagacaaaaacaactgatcagtggttctgttatgtcagctgactttgttagtatcatgttgaaatagcttgaagtaatatcttttatccccttgcaaattcttgtcttccaatcatctcccatatattttcataattagttgtttatgacacctttgtttttctccctctgttcagtatttcaaggaaaattatggatgccagtcttggctgcacaagatatccattacgtacttatacattttaaaatgagtactaattttcactgctaataattctgtaaggacacatcaaagctggccaaaataatgaattttttttaaaaagcaatacctggtttccaccttggactgactttgatcctgttccacttttgaaattttatttgttccttttccatcgtggatgttcctctactttggcaattgtggagggctaatcaatcttatgttagcaggacaacccatgaaaaacaagtcagagagtgaaggctttttcccctaatcctggcagagcagggcgtagaaaagagaggatgtccgtgcttaattctagatacttttgagacaacaccttcagaaaacacataatttaatctttgccatccttagatagagaagggctatagatcacatacgttatcaaaaactactcccttggaaaaaatatctttcgaaaatcaaatttaaacatttcactctgtgctgcatatttcttttaccattgaccattattatagggacccatgaagtaaatgtcacaatcatcttactagctctctctctctcagcaaaataaaactgtgatgtgtcttctttgtaaaagtttaggtataaaatgctatgcaactttttctttatagtaagagctttattttctttaataatatagcccaacttatatgttttaatctcccttgtccctcagaataagcagaaaatataactgcagctgtatgtcgtagacacaagaattgaaactgtgcagtcagtagagctgaacttagctatgaattaatttaaattaattctaaagtgactctggtttccattttagtctattagctagagggttttggctgttgctttttttaaagttaggtccacacagtgaagggaaaagagtctgtgaaggtgatcagtgtagcagtaagacatctaaaatcaagacaatgacatgggggctttgtgtacttagctggataattcccttctactgtcctcttccccttggctgtgtagataaaattgtgcattcaaatgatggtactttgacttttgagggtttttatttctgttattcacaaaatactcattctcatttatgtatattgtatgtttaacccccagtgggatttctggctgctgaaaccactttgggccaggaagaacaaggatgaagaggttcctgtcatttcttatggggttcacagaattatttggggcttaaatggtacaatggagacagtcatgtgcaatgcttaagatggtctgacagggtcccttttgctggaggtgttcctgaagagattgaacctagtaacaggctttattttcaccttgtgtacaacatggcaaagactgctaagattaaaatccgtctcccatttgttacagcctcacctgcaccaggatagaaagcacgtgatggaatctgtgatgtctaatgtgtcttatgaaaattgccaaacaactgtccctggggattctgctttgattggcatttttagtcatgggaatgtatatttgctgatatatctgctctgtgtttgggcctctcttgctgtcattatgatgtattttgagatgattagtcaagagtcaaggttgcgagtacaggccaagaccatgggaaaaaaagccatgctcactggccaataaagagcttgatgctgcctggccaaatgaggtgactcagatagaatctgatcccattcagagcttggtaaatgtcactgtacagaagacattgaaaaggaagaggcatagtcatgatcaaaaggatatattgacagttatctatagccagggtagttgttaatacctgcttgtttggggagatatgtttgattatagagagactctgggccaccctcaaacaccgtcagatgcattagcagcccactgcatgggacaatcgcaggcagatacgaggaatgtatcccctgcctattttccttgtgtaacaaatggaaaacattctcccctgtgagaaataatgcaatttctaattatctggatgttcgttgaaaatatattagacattctccctgaggttaaaaacaaaaagtacgtgaccagtctggtaagaagtattaatgaagtagctaatattacagcttcattttctactagcacctatcataatggtcttagtcatttcacacaaatcagaacttccttccccaccagggaggacaacatcttcatgctgtgattgaagcatccattcagaacacgaggcaatattgcagtccacagggaatggatgcttcacttgatctccggaccttggctgcagaggccatcgcagcttttgaaaagtgaaggggttaattcccattggtgtctttgcttatagcatttttctctaacctataacaaggagacattacattttactttagaacatgagaatagcagttttgctcatgacttaccattccagctgcatgggaaagcaaagcagaaaacagtgccccaaatggaaaaaagatactcacacagaacaaaacagttcttggtcttgttcttggtcttgtcaaaccttgcctgatgctctttctaaagtcaaaatatgaatgctaagaaggcataacctacatccttctctgatttcttcagcagggtcaaaagacagttactagcaatggggaatgcttgtcactgtggagaaagagttttgtatatgtctgataccgttgttataacaaaacaaatttttttactatagttttttgttttctacctgcacacccaccagaagagcacaaagcaaggccattgcaacaggcatttaaaaattattatcaaacatgcacatgcttgtacacacacacacacacacacacaaacaggggcatttgtaaaggtgtccctggaatgtaagatttataatgtttaaggcaaggtgaaggcattgccaagtgtgtgtcgctcataggactagtgtatattcactgaaagttaacctgatgatttgttattgtttgaaccatatgctgatttgcttctggtttctgtttagtgtgttctctctgataaggggctgaaagattctgcatcacacatcctctgagacctaccatgtcgcacactttgttaatgacaaacttcactctacactatacagtaccttgttgatatattcagtaaagtcttattttaaaagaaaaccacattgtgtttatctgagtaagttcattgggatacagtcaatacttgtgctgttaatgtagaagaaatgacgcaggagggcaggaataaaagaggtaataggactttcgtattctcctatcatgaatatgacttgcatttctaaaggccatttgatcctttttgtgtgaggagtttatatgaaatcctcatgttcttttaaatttcccaactaaattgtgtgttcctacgaataccttttaggtatgcacacatacacagagcatcttattttatactggtgaaatctatgttgtttaggatacagataatgtcattgtatttatcctatcagaataggcttttcccctatttcaaaatagatgctattggctttattttttatttttaaattttttttaaacacggtcttaccatgttgcccaggctggtctcaaactcctagatgcaagcaatcatcccacctcgatcacccaaagtgctgggagtacaggcagaggacaccatgcccagccacgctattggttttaaatgtcagatttctttaagaattctcatagtacttttctgccgcagaatttatagcacatctgtccatcctttcaataggcactcaaggaaatgtatctattcatatgctcaacttcaattgattagtctcatatgatttttcagaaccccttttgctaacccctcttggccatttcattaataatgtatttgacagagattgaatcaggaaataaattcatgacatttcagttaa

SEQ ID NO: 10821 - DNA, 1557 bp, Homo sapiens
  source 1..1557: mol_type = unassigned DNA
agagcgcgagggacggagggagaggaggagcgcgggagctgcggaggcgatcccgcgaattcattactgtaaacatatccgggggtgtcaggaggggtaggggggatggccgtcagggaattaaatatgaatcttttgtcctgtcccaccacgacccccggcctgcctctcttcaccccagccccaagtacagcttctccgaccactcagcctcccaccctctctattccaaaccctagcagaagctacacgcctccaactcctaccacatcgaaacttcccacgattcctgactgggatggcagagaaagagtgaccccacctatttctgaacggatccagctctctatccattttgtgaatgatacttccattcaagtcagctggctctctctcttcaccgtgatggcatacaaactcacatgggtgaaaatgggccacagtttagtagggggcatcgttcaggagcgcatagtcagcggtgagaagcaacacctgagcctggttaacttagagccccgatccacctatcggatttgtttagtgccactggatgcttttaactaccgcgcggtagaagacaccatttgttcagaggccaccacccatgcctcctatctgaacaacggcagcaacacagcgtccagccatgagcagacgacgtcccacagcatgggctccccctttctgctggcgggcttgatcgggggcgcggtgatatttgtgctggtggtcttgctcagcgtcttttgctggcatatgcacaaaaaggggcgctacacctcccagaagtggaaatacaaccggggccggcggaaagatgattattgcgaggcaggcaccaagaaggacaactccatcctggagatgacagaaaccagttttcagatcgtctccttaaataacgatcaactccttaaaggagatttcagactgcagcccatttacaccccaaatgggggcattaattacacagactgccatatccccaacaacatgcgatactgcaacagcagcgtgccagacctggagcactgccatacgtgacagccagaggcccagcgttatcaaggcggacaattagactcttgagaacacactcgtgtgtgcacataaagacacgcagattacatttgataaatgttacacagatgcatttgtgcatttgaatactctgtaatttatacggtgtactatataatgggatttaaaaaaagtgctatcttttctatttcaagttaattacaaacagttttgtaactctttgctttttaaatcttaaaaaaaaaaaagttgctgaagtactgtacagggttgtacaatgagaacccaatgccaaggcaaaaagaacgagtgatttttccttaggatacacatcaaccactttgctgttgaagctgtcagaataaattcctggtggtcagatgaaagggcagattaaatggactcatcagggtaagaggaataatatgggtaaaacaagaaatggcccgatagtttcacactattcctatacctccaggtccggaagacaggtaaaaaattctataatgtaag

SEQ ID NO: 10822 - DNA, 3278 bp, Homo sapiens
  source 1..3278: mol_type = unassigned DNA
catcagtgcccgcaaatctccgcgccaaggcgctgagctactcctttccgaggtgcgcctctggtcctccgtccctggtgcccagcagcggcgaggcggcatctccgctcccgccgccgtgtccaccgagccctgggatcagggtggcagttctcaacgatgggcaggagggacctcggcggcgacccctaaaacaataccatgccccgggatccccgctgctgccgcgccagcgtcttccctttccacctccctgaccctgtcggattcggatgagcccattgcaaggagaagacgcagccgtcaggtaaaaggggctgcgttgccagattgcagattgagcttaaccaagaagttcgtaggctaatcaaggctggcttgacctacaaaagaagaagagagttctgcctgcccacttgggcttgtgttgacacggctgataacttgccatcacctgttgccagtgtggaaaaattctccctgttgaattttttgcacatggaggacagcagcaaagagggcaacacaggctgataagaccagagacagcagggagattattttaccatacgccctcaggacgttccctctagctggagttctggacttcaacagaaccccatccagtcattttgattttgctgtttattttttttttctttttctttttcccaccacattgtattttatttccgtacttcagaaatgggcctacagaccacaaagtggcccagccatggggcttttttcctgaagtcttggcttatcatttccctggggctctactcacaggtgtccaaactcctggcctgccctagtgtgtgccgctgcgacaggaactttgtctactgtaatgagcgaagcttgacctcagtgcctcttgggatcccggagggcgtaactgtactctacctccacaacaaccaaattaataatgctggatttcctgcagaactgcacaatgtacagtcggtgcacacggtctacctgtatggcaaccaactggacgaattccccatgaaccttcccaagaatgtcagagttctccatttgcaggaaaacaatattcagaccatttcacgggctgctcttgcccagctcttgaagcttgaagagctgcacctggatgacaactccatatccacagtgggggtggaagacggggccttccgggaggctattagcctcaaattgttgtttttgtctaagaatcacctgagcagtgtgcctgttgggcttcctgtggacttgcaagagctgagagtggatgaaaatcgaattgctgtcatatccgacatggccttccagaatctcacgagcttggagcgtcttattgtggacgggaacctcctgaccaacaagggtatcgccgagggcaccttcagccatctcaccaagctcaaggaattttcaattgtacgtaattcgctgtcccaccctcctcccgatctcccaggtacgcatctgatcaggctctatttgcaggacaaccagataaaccacattcctttgacagccttctcaaatctgcgtaagctggaacggctggatatatccaacaaccaactgcggatgctgactcaaggggtttttgataatctctccaacctgaagcagctcactgctcggaataacccttggttttgtgactgcagtattaaatgggtcacagaatggctcaaatatatcccttcatctctcaacgtgcggggtttcatgtgccaaggtcctgaacaagtccgggggatggccgtcagggaattaaatatgaatcttttgtcctgtcccaccacgacccccggcctgcctctcttcaccccagccccaagtacagcttctccgaccactcagcctcccaccctctctattccaaaccctagcagaagctacacgcctccaactcctaccacatcgaaacttcccacgattcctgactgggatggcagagaaagagtgaccccacctatttctgaacggatccagctctctatccattttgtgaatgatacttccattcaagtcagctggctctctctcttcaccgtgatggcatacaaactcacatgggtgaaaatgggccacagtttagtagggggcatcgttcaggagcgcatagtcagcggtgagaagcaacacctgagcctggttaacttagagccccgatccacctatcggatttgtttagtgccactggatgcttttaactaccgcgcggtagaagacaccatttgttcagaggccaccacccatgcctcctatctgaacaacggcagcaacacagcgtccagccatgagcagacgacgtcccacagcatgggctccccctttctgctggcgggcttgatcgggggcgcggtgatatttgtgctggtggtcttgctcagcgtcttttgctggcatatgcacaaaaaggggcgctacacctcccagaagtggaaatacaaccggggccggcggaaagatgattattgcgaggcaggcaccaagaaggacaactccatcctggagatgacagaaaccagttttcagatcgtctccttaaataacgatcaactccttaaaggagatttcagactgcagcccatttacaccccaaatgggggcattaattacacagactgccatatccccaacaacatgcgatactgcaacagcagcgtgccagacctggagcactgccatacgtgacagccagaggcccagcgttatcaaggcggacaattagactcttgagaacacactcgtgtgtgcacataaagacacgcagattacatttgataaatgttacacagatgcatttgtgcatttgaatactctgtaatttatacggtgtactatataatgggatttaaaaaaagtgctatcttttctatttcaagttaattacaaacagttttgtaactctttgctttttaaatcttaaaaaaaaaaaagttgctgaagtactgtacagggttgtacaatgagaacccaatgccaaggcaaaaagaacgagtgatttttccttaggatacacatcaaccactttgctgttgaagctgtcagaataaattcctggtggtcagatgaaagggcagattaaatggactcatcagggtaagaggaataatatgggtaaaacaagaaatggcccgatagtttcacactattcctatacctccaggtccggaagacaggtaaaaaattctataatgtaagaatggaggtagttaccctgatttgaccctgtgtgggaaatgctgaaagcaccaggaggaagccggttcccgtgagataag

SEQ ID NO: 10823 - DNA, 3971 bp, Homo sapiens
  source 1..3971: mol_type = unassigned DNA
ctgtgtgcagtaaactggaatgctctccctcgctcactcctcagtgtaggagtgatctgaagcaggacaagctcagcctgcagctgccgtgggctttgtgtggactggacgcagagcttgggagacgggggagggctattactccaattcactgtcaatggaattacagctatagcggcagtgtatataggattgctttttctcgtcttcctggagatgctcagtcccagtatattttaaggaagagaaatataaaggaaatttagtatgcctccttttctttaaatgaagaatttagtttcctttacttcttaaaagagaatacctgttcttgtataacgtgactgcaccagacattctgaaaaatcagcaagaagcaaaagctggaaatagctatttcacagcagggttctgaagtaacggaagctaccttgtataaagacctcaacactgctgaccatgatcagcgcagcctggagcatcttcctcatcgggactaaaattgggctgttccttcaagtagcacctctatcagttatggctaaatcctgtccatctgtgtgtcgctgcgatgcgggtttcatttactgtaatgatcgctttctgacatccattccaacaggaataccagaggatgctacaactctctaccttcagaacaaccaaataaataatgctgggattccttcagatttgaaaaacttgctgaaagtagaaagaatatacctataccacaacagtttagatgaatttcctaccaacctcccaaagtatgtaaaagagttacatttgcaagaaaataacataaggactatcacttatgattcactttcaaaaattccctatctggaagaattacatttagatgacaactctgtctctgcagttagcatagaagagggagcattccgagacagcaactatctccgactgcttttcctgtcccgtaatcaccttagcacaattccctggggtttgcccaggactatagaagaactacgcttggatgataatcgcatatccactatttcatcaccatctcttcaaggtctcactagtctaaaacgcctggttctagatggaaacctgttgaacaatcatggtttaggtgacaaagttttcttcaacctagttaatttgacagagctgtccctggtgcggaattccctgactgctgcaccagtaaaccttccaggcacaaacctgaggaagctttatcttcaagataaccacatcaatcgggtgcccccaaatgctttttcttatctaaggcagctctatcgactggatatgtccaataataacctaagtaatttacctcagggtatctttgatgatttggacaatataacacaactgattcttcgcaacaatccctggtattgcgggtgcaagatgaaatgggtacgtgactggttacaatcactacctgtgaaggtcaacgtgcgtgggctcatgtgccaagccccagaaaaggttcgtgggatggctattaaggatctcaatgcagaactgtttgattgtaaggacagtgggattgtaagcaccattcagataaccactgcaatacccaacacagtgtatcctgcccaaggacagtggccagctccagtgaccaaacagccagatattaagaaccccaagctcactaaggatcaccaaaccacagggagtccctcaagaaaaacaattacaattactgtgaagtctgtcacctctgataccattcatatctcttggaaacttgctctacctatgactgctttgagactcagctggcttaaactgggccatagcccggcatttggatctataacagaaacaattgtaacaggggaacgcagtgagtacttggtcacagccctggagcctgattcaccctataaagtatgcatggttcccatggaaaccagcaacctctacctatttgatgaaactcctgtttgtattgagactgaaactgcaccccttcgaatgtacaaccctacaaccaccctcaatcgagagcaagagaaagaaccttacaaaaaccccaatttacctttggctgccatcattggtggggctgtggccctggttaccattgcccttcttgctttagtgtgttggtatgttcataggaatggatcgctcttctcaaggaactgtgcatatagcaaagggaggagaagaaaggatgactatgcagaagctggcactaagaaggacaactctatcctggaaatcagggaaacttcttttcagatgttaccaataagcaatgaacccatctcgaaggaggagtttgtaatacacaccatatttcctcctaatggaatgaatctgtacaaaaacaatcacagtgaaagcagtagtaaccgaagctacagagacagtggtattccagactcagatcactcacactcatgatgctgaaggactcacagcagacttgtgttttgggttttttaaacctaagggaggtgatggtaggaaccctgttctactgcaaaacactggaaaaagagactgaaaaaaagcaatgtactgtacatttgccatataatttatatttaagaactttttattaaaagtttcaaatttcaggttactgctgcgattgatgtagtggagatgcctgaacacaattctatattttagtattttttagtaatttgtactgtattttccttgcaaatattggagttataaaccatttactttgtgttctactgagtaagatgacttgttgactgtgaaagtgaattttcttgctgtgtcgaacaatcaggactgcattcatatgagatccttgtagtataagcacaggccatttttcactttggtattaataaaatgtaaaaaaaaaaaactggctgaatggctgaatgagataaaatttaattttaaaaaatggttatgaaataatgttccaattattaaatttgtattatcccagtggtattcaataaatcaaaatgtgtgaagtaatgggcaatatcaaacttcctgcatatctccatttttgctctaggcaaattaattatccttaaaaaagttaagcatatcttctgaactgaatacatcagctggcataaaaggagcatgaagtctgttaaagccattgtcagcaaagctttgaaaataaaggacttcacaaaaacggtaatgtaaatgtgcttccaagttggggggaaaatgtgtacttaggaaaacatggaaacttagacttgtatagtgtaatgaacacaaataccaaaactgcattttggttttgcctataccatcctgatttttgaaaagtgaattataaacacaaaattgttagtgtttatgatgtttttatcataaaggatgtcagagaaactttatgcatattaaaaatgtaatgtaattataagcgattcccctcaacaatccagagaaagtagttctttaaataagagataatttaaagaaaaataaatactagacatcaaatttagatctggtttatgtcaaaggttttaacactgtacataaatgttcaatttacttttacaaagatcaagaatactgcccattactgtcacaattttccagatattatataatgaactcgtaatgtaacatttccttctagcttcctactgaattgtgagctgttacttgttgaaaaaccatatcacttttctgttgccatgattttttttttttcaacaaaaaaccaaagtgcattgtacgccctttggccagtcttgtatgtgccttgatccaacgctacatgtattcagcttttaaaactccacaaatttttcatactccttaaatatgaaaaattatggtcttattgctgaataaaacttttaaaaagtacagaataattgtgcttgctttttcaggattgtgttactatcactaagtagcaaattgcccagcacattagtcctaaacgtcccatgtatttttctaggcataaaaataaaagttggctaaaaattttaaaaaatcaa

SEQ ID NO: 10824 - DNA, 4776 bp, Homo sapiens
  source 1..4776: mol_type = unassigned DNA
agtaaactggaatgctctccctcgctcactcctcagtgtaggagtgatctgaagcaggacaagctcagcctgcagctgccgtgggctttgtgtggactggacgcagagcttgggagacgggggagggctattactccaattcactgtcaatggaattacagctatagcggcagtgtatataggattgctttttctcgtcttcctgggttctgaagtaacggaagctaccttgtataaagacctcaacactgctgaccatgatcagcgcagcctggagcatcttcctcatcgggactaaaattgggctgttccttcaagtagcacctctatcagttatggctaaatcctgtccatctgtgtgtcgctgcgatgcgggtttcatttactgtaatgatcgctttctgacatccattccaacaggaataccagaggatgctacaactctctaccttcagaacaaccaaataaataatgctgggattccttcagatttgaaaaacttgctgaaagtagaaagaatatacctataccacaacagtttagatgaatttcctaccaacctcccaaagtatgtaaaagagttacatttgcaagaaaataacataaggactatcacttatgattcactttcaaaaattccctatctggaagaattacatttagatgacaactctgtctctgcagttagcatagaagagggagcattccgagacagcaactatctccgactgcttttcctgtcccgtaatcaccttagcacaattccctggggtttgcccaggactatagaagaactacgcttggatgataatcgcatatccactatttcatcaccatctcttcaaggtctcactagtctaaaacgcctggttctagatggaaacctgttgaacaatcatggtttaggtgacaaagttttcttcaacctagttaatttgacagagctgtccctggtgcggaattccctgactgctgcaccagtaaaccttccaggcacaaacctgaggaagctttatcttcaagataaccacatcaatcgggtgcccccaaatgctttttcttatctaaggcagctctatcgactggatatgtccaataataacctaagtaatttacctcagggtatctttgatgatttggacaatataacacaactgattcttcgcaacaatccctggtattgcgggtgcaagatgaaatgggtacgtgactggttacaatcactacctgtgaaggtcaacgtgcgtgggctcatgtgccaagccccagaaaaggttcgtgggatggctattaaggatctcaatgcagaactgtttgattgtaaggacagtgggattgtaagcaccattcagataaccactgcaatacccaacacagtgtatcctgcccaaggacagtggccagctccagtgaccaaacagccagatattaagaaccccaagctcactaaggatcaccaaaccacagggagtccctcaagaaaaacaattacaattactgtgaagtctgtcacctctgataccattcatatctcttggaaacttgctctacctatgactgctttgagactcagctggcttaaactgggccatagcccggcatttggatctataacagaaacaattgtaacaggggaacgcagtgagtacttggtcacagccctggagcctgattcaccctataaagtatgcatggttcccatggaaaccagcaacctctacctatttgatgaaactcctgtttgtattgagactgaaactgcaccccttcgaatgtacaaccctacaaccaccctcaatcgagagcaagagaaagaaccttacaaaaaccccaatttacctttggctgccatcattggtggggctgtggccctggttaccattgcccttcttgctttagtgtgttggtatgttcataggaatggatcgctcttctcaaggaactgtgcatatagcaaagggaggagaagaaaggatgactatgcagaagctggcactaagaaggacaactctatcctggaaatcagggaaacttcttttcagatgttaccaataagcaatgaacccatctcgaaggaggagtttgtaatacacaccatatttcctcctaatggaatgaatctgtacaaaaacaatcacagtgaaagcagtagtaaccgaagctacagagacagtggtattccagactcagatcactcacactcatgatgctgaaggactcacagcagacttgtgttttgggttttttaaacctaagggaggtgatggtaggaaccctgttctactgcaaaacactggaaaaagagactgaaaaaaagcaatgtactgtacatttgccatataatttatatttaagaactttttattaaaagtttcaaatttcaggttactgctgcgattgatgtagtggagatgcctgaacacaattctatattttagtattttttagtaatttgtactgtattttccttgcaaatattggagttataaaccatttactttgtgttctactgagtaagatgacttgttgactgtgaaagtgaattttcttgctgtgtcgaacaatcaggactgcattcatatgagatccttgtagtataagcacaggccatttttcactttggtattaataaaatgtaaaaaaaaaaaactggctgaatggctgaatgagataaaatttaattttaaaaaatggttatgaaataatgttccaattattaaatttgtattatcccagtggtattcaataaatcaaaatgtgtgaagtaatgggcaatatcaaacttcctgcatatctccatttttgctctaggcaaattaattatccttaaaaaagttaagcatatcttctgaactgaatacatcagctggcataaaaggagcatgaagtctgttaaagccattgtcagcaaagctttgaaaataaaggacttcacaaaaacggtaatgtaaatgtgcttccaagttggggggaaaatgtgtacttaggaaaacatggaaacttagacttgtatagtgtaatgaacacaaataccaaaactgcattttggttttgcctataccatcctgatttttgaaaagtgaattataaacacaaaattgttagtgtttatgatgtttttatcataaaggatgtcagagaaactttatgcatattaaaaatgtaatgtaattataagcgattcccctcaacaatccagagaaagtagttctttaaataagagataatttaaagaaaaataaatactagacatcaaatttagatctggtttatgtcaaaggttttaacactgtacataaatgttcaatttacttttacaaagatcaagaatactgcccattactgtcacaattttccagatattatataatgaactcgtaatgtaacatttccttctagcttcctactgaattgtgagctgttacttgttgaaaaaccatatcacttttctgttgccatgattttttttttttcaacaaaaaaccaaagtgcattgtacgccctttggccagtcttgtatgtgccttgatccaacgctacatgtattcagcttttaaaactccacaaatttttcatactccttaaatatgaaaaattatggtcttattgctgaataaaacttttaaaaagtacagaataattgtgcttgctttttcaggattgtgttactatcactaagtagcaaattgcccagcacattagtcctaaacgtcccatgtatttttctaggcataaaaataaaagttggctaaaaattttaaaaaatcaacatcttgaggttgtgtatcattttacttcaaagagttcagtgtttcatgtataaatgtatttcctcttacttatacactgtatagatggaaaatttaagaaatggtttcaaagcctttctctcttaggcgcactgctgccactgtcctgatactttttaaggtggtctttgaaaaactgtttttttaaaatagccttttagtagagtgagttggcatttgtgatactgtgaaatacacactttctctttgtccctgtttctggcatacaactcctaaaatccttgcaatcttcaaagtgatatattttcatatgctaatgagttcactgatagctggcaggccctaggtagcttcaagataaagtctgatcattgaaaagaccaagacatgattatagggttgggacttacaaccccaaaccctaacctccagagagggcgaagtggatgaagattaagttgatcaccagtgaccagtggtttaatcaagcatgcctatgtaatcaagcctccataaaaaaacaaaaggtcaagatttggagagcttccagattgctgaacatgtggtggttcctgcaggatggcatgcctggagagggcatggaagctctgtgcccacctagacctcaccttatgtttcctgccatctggatcctttgtaacatcctttataatacgtcagtaaatctgtttccttgcattttgtgagctgttgtagcaaattaatagaacacaaaaaggggatcctgggaaaccaaacttgaagctgactagtcttgcaactggtgtctgaagaggaggcagttttgtgggaataagccctcaacctgtgggatatgacacaatttccaggtagacagtgttgggattaaactgaattggaggacacccagctggtatctgctgaagaactgattgcttgcgtggtgtatggggcaaaacttgttaagacaagtcttctatgttgattattgttgaatgagagaattaaacacacatacacactt

SEQ ID NO: 10825 - DNA, 2635 bp, Homo sapiens
  source 1..2635: mol_type = unassigned DNA
agtaaactggaatgctctccctcgctcactcctcagtgtaggagtgatctgaagcaggacaagctcagcctgcagctgccgtgggctttgtgtggactggacgcagagcttgggagacgggggagggctattactccaattcactgtcaatggaattacagctatagcggcagtgtatataggattgctttttctcgtcttcctgggttctgaagtaacggaagctaccttgtataaagacctcaacactgctgaccatgatcagcgcagcctggagcatcttcctcatcgggactaaaattgggctgttccttcaagtagcacctctatcagttatggctaaatcctgtccatctgtgtgtcgctgcgatgcgggtttcatttactgtaatgatcgctttctgacatccattccaacaggaataccagaggatgctacaactctctaccttcagaacaaccaaataaataatgctgggattccttcagatttgaaaaacttgctgaaagtagaaagaatatacctataccacaacagtttagatgaatttcctaccaacctcccaaagtatgtaaaagagttacatttgcaagaaaataacataaggactatcacttatgattcactttcaaaaattccctatctggaagaattacatttagatgacaactctgtctctgcagttagcatagaagagggagcattccgagacagcaactatctccgactgcttttcctgtcccgtaatcaccttagcacaattccctggggtttgcccaggactatagaagaactacgcttggatgataatcgcatatccactatttcatcaccatctcttcaaggtctcactagtctaaaacgcctggttctagatggaaacctgttgaacaatcatggtttaggtgacaaagttttcttcaacctagttaatttgacagagctgtccctggtgcggaattccctgactgctgcaccagtaaaccttccaggcacaaacctgaggaagctttatcttcaagataaccacatcaatcgggtgcccccaaatgctttttcttatctaaggcagctctatcgactggatatgtccaataataacctaagtaatttacctcagggtatctttgatgatttggacaatataacacaactgattcttcgcaacaatccctggtattgcgggtgcaagatgaaatgggtacgtgactggttacaatcactacctgtgaaggtcaacgtgcgtgggctcatgtgccaagccccagaaaaggttcgtgggatggctattaaggatctcaatgcagaactgtttgattgtaaggacagtgggattgtaagcaccattcagataaccactgcaatacccaacacagtgtatcctgcccaaggacagtggccagctccagtgaccaaacagccagatattaagaaccccaagctcactaaggatcaccaaaccacagggagtccctcaagaaaaacaattacaattactgtgaagtctgtcacctctgataccattcatatctcttggaaacttgctctacctatgactgctttgagactcagctggcttaaactgggccatagcccggcatttggatctataacagaaacaattgtaacaggggaacgcagtgagtacttggtcacagccctggagcctgattcaccctataaagtatgcatggttcccatggaaaccagcaacctctacctatttgatgaaactcctgtttgtattgagactgaaactgcaccccttcgaatgtacaaccctacaaccaccctcaatcgagagcaagagaaagaaccttacaaaaaccccaatttacctttggctgccatcattggtggggctgtggccctggttaccattgcccttcttgctttagtgtgttggtatgttcataggaatggatcgctcttctcaaggaactgtgcatatagcaaagggaggagaagaaaggatgactatgcagaagctggcactaagaaggacaactctatcctggaaatcagggaaacttcttttcagatgttaccaataagcaatgaacccatctcgaaggaggagtttgtaatacacaccatatttcctcctaatggaatgaatctgtacaaacaatcacagtgaaagcagtagtaaccgaagctacagagacagtggtattccagactcagatcactcacactcatgatgctgaaggactcacagcagacttgtgttttgggttttttaaacctaagggaggtgatggtaggaaccctgttctactgcaaaacactggaaaaagagactgaaaaaaagcaatgtactgtacatttgccatataatttatatttaagaactttttattaaaagtttcaaatttcaggttactgctgcgattgatgtagtggagatgcctgaacacaattctatattttagtattttttagtaatttgtactgtattttccttgcaaatattggagttataaaccatttactttgtgttctactgagtaagatgacttgttgactgtgaaagtgaattttcttgctgtgtcgaacaatcaggactgcattcatatgagatccttgtagtataagcacaggccatttttcactttggtattaataaaatgt

SEQ ID NO: 10826 - DNA, 522 bp, Homo sapiens
  source 1..522: mol_type = unassigned DNA
tgtcacacagataaatatgagtcacaggagtttgttgtacatagtattacatcacccagaaatcatgccaccctcaaagcctcatccacctgtcgtgggcaaagtgactcatcacagcattgaattatactgggatctggaaaagaaagccaaacgccaaggacctcaagagcagtggttcaggttctcgattgaagaagaagaccccaaaatgcacacttatggtatcatttatacgggatatgcaacgaagcatgttgttgaaggtctggaaccaaggacgctgtacagatttcgcctgaaggtcaccagcccctctggggagtgtgagtacagcccactcgtctcagtgtctacaaccagtagcatttggcttggaggagagcccataagtagtgagcacttgcaccgggctgtcagtgtgaatgatgaagatttgctggtccgaatacttcaaggagggtgagagaactctgtcagttgttttttttcccccatgcctataaagtgcatagaaataca

SEQ ID NO: 10827 - DNA, 949 bp, Homo sapiens
  source 1..949: mol_type = unassigned DNA
gttccttcttccacatgtatccctcagtatctagaaccctgaaattggtttctctaagaaaaccaagaggcccataaggaaatcatgccaccctcaaagcctcatccacctgtcgtgggcaaagtgactcatcacagcattgaattatactgggatctggaaaagaaagccaaacgccaaggacctcaagagcagtggttcaggttctcgattgaagaagaagaccccaaaatgcacacttatggtatcatttatacgggatatgcaacgaagcatgttgttgaaggtctggaaccaaggacgctgtacagatttcgcctgaaggtcaccagcccctctggggagtgtgagtacagcccactcgtctcagtgtctacaaccagtagcatttggcttggaggagagcccataagtagtgagcacttgcaccgggctgtcagtgtgaatgatgaagatttgctggtccgaatacttcaaggaggccgtgttaaggttgatgttcccaataagtttggctttaccgctctgatggttgctgcccagaaaggatacaccagtctaatgctggcgtgctatgcgggacacctagatgttgtgaaatatctccgaagacatggcgcttcttggcaggctagagacctgggaggctgtacagctctgcactgggctgcagatggaggccactgcagtgtgattgagtggatgataaaggatggctgtgaggtagacgtcgtggacactggttcaggatggaccccactcatgagagtctctgcggtgtcgggaaatcagagggtggcctctcttctaattgatgctggggccaatgtgaatgtgaaggacagaaatggaaagacgccccttatgagtgtagtctccttattagaagaaaggaaaaaaaagcagaggccaaagaagtcttgtgtctgctgatgagagcaccactcat

SEQ ID NO: 10828 - DNA, 1268 bp, Homo sapiens
  source 1..1268: mol_type = unassigned DNA
ttacagaagcaaaaaatcatgccaccctcaaagcctcatccacctgtcgtgggcaaagtgactcatcacagcattgaattatactgggatctggaaaagaaagccaaacgccaaggacctcaagagcagtggttcaggttctcgattgaagaagaagaccccaaaatgcacacttatggtatcatttatacgggatatgcaacgaagcatgttgttgaaggtctggaaccaaggacgctgtacagatttcgcctgaaggtcaccagcccctctggggagtgtgagtacagcccactcgtctcagtgtctacaaccaggccatctctgagcaagagccttgtaaaaattaggatggtcacaagtgttctccacggcccacccactgaaaacacaggagagcccataagtagtgagcacttgcaccgggctgtcagtgtgaatgatgaagatttgctggtccgaatacttcaaggaggccgtgttaaggttgatgttcccaataagtttggctttaccgctctgatggttgctgcccagaaaggatacaccaggcttgtgaaaatcctagtttctaatggcacagacgtgaatctgaagaatggaagtggcaaggacagtctaatgctggcgtgctatgcgggacacctagatgttgtgaaatatctccgaagacatggcgcttcttggcaggctagagacctgggaggctgtacagctctgcactgggctgcagatggaggccactgcagtgtgattgagtggatgataaaggatggctgtgaggtagacgtcgtggacactggttcaggatggaccccactcatgagagtctctgcggtgtcgggaaatcagagggtggcctctcttctaattgatgctggggccaatgtgaatgtgaaggacagaaatggaaagacgccccttatggtggctgtgttaaataatcatgaagagttagttcagttacttcttgacaaaggggcagatgcaagtgtaaaaaatgagttcggcaaaggtgtcctagaaatggccagagtttttgacagacagagtgtagtctccttattagaagaaaggaaaaaaaagcagaggccaaagaagtcttgtgtctgctgatgagagcaccactcatctgcgaaacgcacgtaaaacaaagtgaaccgtgactgttaaactagggatgggaaattctgcatcttggggggctgtacatttatttatttagttgaagattcactgatcccactttgaaatacatctttttacct

SEQ ID NO: 10829 - DNA, 1294 bp, Homo sapiens
  source 1..1294: mol_type = unassigned DNA
cacttcgcctccgggttgtcagggcaaccgtagcgacgccggccctggctgagaggcgttaggagtccgggggttcgcccgcggaggccggggagcagccgaccatggagccccagaaaatcatgccaccctcaaagcctcatccacctgtcgtgggcaaagtgactcatcacagcattgaattatactgggatctggaaaagaaagccaaacgccaaggacctcaagagcagtggttcaggttctcgattgaagaagaagaccccaaaatgcacacttatggtatcatttatacgggatatgcaacgaagcatgttgttgaaggtctggaaccaaggacgctgtacagatttcgcctgaaggtcaccagcccctctggggagtgtgagtacagcccactcgtctcagtgtctacaaccagagagcccataagtagtgagcacttgcaccgggctgtcagtgtgaatgatgaagatttgctggtccgaatacttcaaggaggccgtgttaaggttgatgttcccaataagtttggctttaccgctctgatggttgctgcccagaaaggatacaccaggcttgtgaaaatcctagtttctaatggcacagacgtgaatctgaagaatggaagtggcaaggacagtctaatgctggcgtgctatgcgggacacctagatgttgtgaaatatctccgaagacatggcgcttcttggcaggctagagacctgggaggctgtacagctctgcactgggctgcagatggaggccactgcagtgtgattgagtggatgataaaggatggctgtgaggtagacgtcgtggacactggttcaggatggaccccactcatgagagtctctgcggtgtcgggaaatcagagggtggcctctcttctaattgatgctggggccaatgtgaatgtgaaggacagaaatggaaagacgccccttatggtggctgtgttaaataatcatgaagagttagttcagttacttcttgacaaaggggcagatgcaagtgtaaaaaatgagttcggcaaaggtgtcctagaaatggccagagtttttgacagacagagtgtagtctccttattagaagaaaggaaaaaaaagcagaggccaaagaagtcttgtgtctgctgatgagagcaccactcatctgcgaaacgcacgtaaaacaaagtgaaccgtgactgttaaactagggatgggaaattctgcatcttggggggctgtacatttatttatttagttgaagattcactgatcccactttgaaatacatctttttacct

SEQ ID NO: 10830 - DNA, 1296 bp, Homo sapiens
  source 1..1296: mol_type = unassigned DNA
cacttcgcctccgggttgtcagggcaaccgtagcgacgccggccctggctgagaggcgttaggagtccgggggttcgcccgcggaggccggggagcagccgaccatggagccccagaaaatcatgccaccctcaaagcctcatccacctgtcgtgggcaaagtgactcatcacagcattgaattatactgggatctggaaaagaaagccaaacgccaaggacctcaagagcagtggttcaggttctcgattgaagaagaagaccccaaaatgcacacttatggtatcatttatacgggatatgcaacgaagcatgttgttgaaggtctggaaccaaggacgctgtacagatttcgcctgaaggtcaccagcccctctggggagtgtgagtacagcccactcgtctcagtgtctacaaccagagagcccataagtagtgagcacttgcaccgggctgtcagtgtgaatgatgaagatttgctggtccgaatacttcaaggaggccgtgttaaggttgatgttcccaataagtttggctttaccgctctgatggttgctgcccagaaaggatacaccaggcttgtgaaaatcctagtttctaatggcacagacgtgaatctgaagaatggaagtggcaaggacagtctaatgctggcgtgctatgcgggacacctagatgttgtgaaatatctccgaagacatggcgcttcttggcaggctagagacctgggaggctgtacagctctgcactgggctgcagatggaggccactgcagtgtgattgagtggatgataaaggatggctgtgaggtagacgtcgtggacactggttcaggatggaccccactcatgagagtctctgcggtgtcgggaaatcagagggtggcctctcttctaattgatgctggggccaatgtgaatgtgaaggacagaaatggaaagacgccccttatggtggctgtgttaaataatcatgaagagttagttcagttacttcttgacaaaggggcagatgcaagtgtaaaaaatgagttcggcaaaggtgtcctagaaatggccagagtttttgacagacagagtgtagtctccttattagaagaaaggaaaaaaaagcagaggccaaagaagtcttgtgtctgctgatgagagcaccactcatctgcgaaacgcacgtaaaacaaagtgaaccgtgactgttaaactagggatgggaaattctgcatcttggggggctgtacatttatttatttagttgaagattcactgatcccactttgaaatacatctttttacctaa

SEQ ID NO: 10831 - DNA, 499 bp, Homo sapiens
  source 1..499: mol_type = unassigned DNA
tgggctgtgaaaaaaatcatttgttcaacactgatgtcgtgatacaaggacgtgaagatgtgagtcattgtgacatcaccagccagaattgctgggattcagtgagatgactcacagtaagagaaatcatgccaccctcaaagcctcatccacctgtcgtgggcaaagtgactcatcacagcattgaattatactgggatctggaaaagaaagccaaacgccaaggacctcaagagcagtggttcaggttctcgattgaagaagaagaccccaaaatgcacacttatggtatcatttatacgggatatgcaacgaagcatgttgttgaaggtctggaaccaaggacgctgtacagatttcgcctgaaggtcaccagcccctctggggagtgtgagtacagcccactcgtctcagtgtctacaaccagagagcccataagtagtgagcacttgcaccgggctgtcagtgtgaatgatgaagatttgctggtccgaatact

SEQ ID NO: 10832 - DNA, 672 bp, Homo sapiens
  source 1..672: mol_type = unassigned DNA
agtgtctggttcagtagttccttcttccacatgtatccctcagtatctagaaccctgaaattggtttctctaagaaaaccaagaggcccataagggtaatgtatactgttgatttttatggttatttttcaaaaactaatattttaaacatatcaaaattatttcaaatggtaatgtactcaatgtaccatttggtttaagatgttaacattttgccatatatgtcataaagtcttttcatgaagaaatcaaaccttacaaatatactgaaatcatgccaccctcaaagcctcatccacctgtcgtgggcaaagtgactcatcacagcattgaattatactgggatctggaaaagaaagccaaacgccaaggacctcaagagcagtggttcaggttctcgattgaagaagaagaccccaaaatgcacacttatggtatcatttatacgggatatgcaacgaagcatgttgttgaaggtctggaaccaaggacgctgtacagatttcgcctgaaggtcaccagcccctctggggagtgtgagtacagcccactcgtctcagtgtctacaaccagtagcatttggcttggaggagagcccataagtagtgagcacttgcaccgggctgtcagtgtgaatgatgaagatttgctggtccgaatacttcaaggagg

SEQ ID NO: 10833 - DNA, 1283 bp, Homo sapiens
  source 1..1283: mol_type = unassigned DNA
gttcgcccgcggaggccggggagcagccgaccatggagccccagatgggctgtgaaaaaaatcatttgttcaacactgatgtcgtgatacaaggacgtgaagatgtgagtcattgtgacatcaccagccagaattgctgggattcagtgagatgactcacagtaagagaaatcatgccaccctcaaagcctcatccacctgtcgtgggcaaagtgactcatcacagcattgaattatactgggatctggaaaagaaagccaaacgccaaggacctcaagagcagtggttcaggttctcgattgaagaagaagaccccaaaatgcacacttatggtatcatttatacgggatatgcaacgaagcatgttgttgaaggtctggaaccaaggacgctgtacagatttcgcctgaaggtcaccagcccctctggggagtgtgagtacagcccactcgtctcagtgtctacaaccagtgagtattcagaccgtccacactcacctctctctagatcaatggagatgacaagcaatttagaaaaaatattctgcctctcgtttggccttaccagaagcagaaatgatacaatttttaaacactgcaataatatttgctagttgggccttgccataacttgtaatgtcagggaagtctaattatgctttcacaaactgggagagctatttttgtgccagaactgtcctgttagtagccattcagcacaaaagggtggagtcacctttcttaggaaatgggccacaggggtgtgggctgggtaagcctaagcgtccccacacagccaagcaggctgcctgcctgagcgtccttgggcaagcagctccattcagtgtcatatccattttagacaaccccagggtgtgcgtcttaactcgccacacaaacccgattcctggggtcacggtgagtgagggtgaacgaacagtgctgctgcatccacggagaatcctgtgagggagagccccacatggagacctctgagcccttcagccggctgagttttaaggttgtttctgagattggtattttaaagcattttaaagatgctatctatgtccagggccatctctgagcaagagccttgtaaaaattaggatggtcacaagtgttctccacggcccacccactgaaaacacaggcaagtaatttttcagttgcacaaaggaaaccttccttttgtgagtaaagctctttttccgttttattccaggtagcatttggcttggaggtatgtgctttccatggctttcaactgtgtcctttaggca

SEQ ID NO: 10834 - DNA, 753 bp, Homo sapiens
  source 1..753: mol_type = unassigned DNA
gagagcccataagtagtgagcacttgcaccgggctgtcagtgtgaatgatgaagatttgctggtccgaatacttcaaggaggccgtgttaaggttgatgttcccaataagtttggctttaccgctctgatggttgctgcccagaaaggatacaccaggcttgtgaaaatcctagtttctaatggcacagacgtgaatctgaagaatggaagtggcaaggacagtctaatgctggcgtgctatgcgggacacctagatgttgtgaaatatctccgaagacatggcgcttcttggcaggctagagacctgggaggctgtacagctctgcactgggctgcagatggaggccactgcagtgtgattgagtggatgataaaggatggctgtgaggtagacgtcgtggacactggttcaggatggaccccactcatgagagtctctgcggtgtcgggaaatcagagggtggcctctcttctaattgatgctggggccaatgtgaatgtgaaggacagaaatggaaagacgccccttatgagtgtagtctccttattagaagaaaggaaaaaaaagcagaggccaaagaagtcttgtgtctgctgatgagagcaccactcatctgcgaaacgcacgtaaaacaaagtgaaccgtgactgttaaactagggatgggaaattctgcatcttggggggctgtacatttatttatttagttgaagattcactgatcccactttgaaatacatctttttacctaa

SEQ ID NO: 10835 - DNA, 1847 bp, Homo sapiens
  source 1..1847: mol_type = unassigned DNA
ctgcgcaatgcgcgcggtgatggagcgctaaccgggggcgcggcggcggcgagggctcggcgggccattggctaccggccgcggcaaaggcagcttggggacccagcgtgcgcggggcccgcgggccgggccggggtgacctgggctgcagccatggaagaacagagggaggccctgaggaagatcatcaaaacactggctgtgaagaatgaagaaattcagagctttatctactccctgaaacagatgctgctgaacgtggaggcgaactcggcgaaggtgcaggaggacctcgaagcagagttccagtccctcttctccctcctggaggagctgaaagaaggcatgcttatgaagataaaacaggaccgtgccagccgtacctacgagctgcagaaccagctggctgcctgcacgcgggccctggagagctccgaggagcttctggagacagccaaccagactctgcaggccatggacagcgaggactttcctcaggctgccaagcaaatcaaagatggagtgaccatggcccctgccttccggctatcattgaaagcgaaggtcagtgacaacatgagtcacctcatggtggacttcgcgcaagagcggcagatgctacaggcactcaagttcctgcctgtgcccagcgcacccgtgatcgacctggctgagtccctggtggcagataactgtgtgaccctggtgtggcgcatgccggatgaggacagcaagattgaccactacgtgctggagtaccggcggaccaacttcgagggcccgccccgcctcaaggaggaccagccctggatggtcatcgagggcatccggcagacagagtacaccctgacaggtctcaagtttgacatgaaatacatgaacttccgtgtgaaggcctgtaacaaggcagttgcaggagagttctctgagccggtgactctggagacaccagcgttcatgttccgcctggatgcgtccacatcccaccagaacctgcgggtggatgatctctccgtggagtgggacgctatgggcgggaaggtgcaggatatcaaggctcgcgagaaagatggcaaggggcggacggcgtctcccatcaactccccagccagaggtactccatctcccaagaggatgccctcaggtcgtgggggacgggaccgcttcaccgctgagtcctacacagttctgggggacacgctgatcgacggcggggagcattactgggaggtgcgctacgagccggacagcaaggcgttcggcgtgggcgtggcctaccgcagcctgggccgcttcgagcaactgggcaagacggccgcctcctggtgcctgcacgtcaacaattggctgcaggtcagcttcacggccaagcacgccaacaaggtcaaggtgctggacgcccccgtgcccgactgcctgggtgtgcactgtgacttccaccaaggcctcctgtccttctacaatgcccgcaccaaacaagtgctgcacactttcaagaccaggttcacacagccgctgctgcctgctttcacggtatggtgtggcagcttccaggtgacgacaggcctgcaggtccccagtgctgtgcgctgcctgcaaaagcgaggcagtgctaccagcagctccaacaccagcctcacctaggcccccaggcacccacccagctggggtgtttttgggggagtcgccgccaagcccaggctgctggagccaggcaccctcctctgtcacttgctgcttggagccttaactccagatgggggggtcaccaagagggagtgggcaccctggcgggccctctccccacctcacctcttaataaaggtcagacactggccaggcgaggc

SEQ ID NO: 10836 - DNA, 7623 bp, Homo sapiens
  source 1..7623: mol_type = unassigned DNA
gcaaccgcggcgtgactacggcgcgcgcggtctgggcgcggacgggtggggccgggcggtgccggtgcgggctggggcagtgcagtgagtagcggtcttggggtgtgcgatctcgctgagcctcctcacacggttcgtcgtctcgggttcgagcccagtgggcttagccactcgccatggactcccagaaagaagctctacagaggatcatttcaactctggcaaataaaaatgatgaaattcagaactttattgatacactacatcatacactaaaaggagttcaggaaaattcgtccaacatactctcagagttagatgaagaatttgatagtttatactctatactggatgaagtaaaagaaagtatgattaactgtatcaagcaggaacaagctcgtaaatcccaagagttacagagtcagattagtcaatgtaataatgccctggagaactctgaagaactattagaatttgcaacaaggtcattagatataaaggaacctgaagaattttcaaaggctgccagacagatcaaggatagagtcacaatggcttcagcctttcgcctttctttgaaaccaaaggtcagtgacaacatgactcatttaatggtggatttctcacaggaaagacagatgctgcaaactttgaagtttttgccagtccccaaagctccagagatagatccagtagagtgtttggtggcagataactctgtaacagtggcttggagaatgccagaagaagataataagattgaccattttatactggaacataggaagactaattttgatggacttccacgtgtaaaggatgagcgatgctgggagataattgataatattaagggtactgaatatacactatcaggcttaaaatttgattcaaagtatatgaatttcagagtgcgagcttgtaacaaggctgtggctggagagtattctgatccagtgactctagagaccaaagcacttaacttcaatttggataactcctcatcccatttgaacctgaaagttgaagatacatgtgtagagtgggatcctactggaggaaaaggtcaagaaagtaaaattaaaggaaaagagaacaagggcagaagtggtacaccatccccaaaacgaacatctgtaggctccaggccaccagcagtaagaggcagtagagatcgttttactggagaatcatacacagtgctgggagacactgctattgaaagtggacaacattattgggaggtcaaggcccagaaggattgtaaatcctacagtgtgggagtagcatacaaaacgttggggaaatttgaccaattgggaaagacaaacactagttggtgtatccatgtcaacaactggctacaaaacacatttgcagcaaagcataataataaagtcaaagctttggatgttactgttcctgaaaaaataggtgtattttgtgattttgatgggggtcaactttcattctatgatgcaaattctaaacagttgctatattcctttaagacaaaatttactcagccagtactacctggtttcatggtatggtgtggtggactttctttgagtactgggatgcaggttccaagtgctgtgagaacacttcagaaaagtgaaaatggaatgactggttcagctagcagcctgaacaatgttgttactcaatagtgtctactcagaatacgtttaccctccgtcttgattaggtggccttttctgtgcagttactaatcacaggaatttggtagtagtgaaaatcaggtttgctgtgttctgctttgaggcctggaatcttttatcattaaacacctagtacgaagcatttgcaggaacctactgtgcagtatcatagaagcaagcagataccaagcaaaaaactgatgattgaagagtaaatgggggaaaaggcagtgtttaattaacataaaaactcatttttgtatttcttggattactttgactattctaatgtttaattacatatggtaaccctaaggcctggggagaaaagcttttaaatcttgccttctttcttctgtactttgtctttttaaaatctcattactatctattatttagttctaacacagaagctttaaaaatacatagtcatccaaggttttctaaaaattgaaatcatatgttgggaatggtaaaaaggttttcaaatggtttatttttcctcttttataaataagttttacaaaattttcctcttttgtttattgactagattgtatataattttcttttttccaaaatattgtgataagaaatttctagacacaacagcttaaaatcacccaaatttcagttctttacctactgcactaacaatggcaaggggggtattctttatatgttgccttgtttaactacagttcttttcattccatcactttaggtgatgggtaagatttttgaaagccttatattttttgattttgttgtctagtttaatcctacctttaatagttgtgtttggtaaaattcccacttgaatgtgacactgataataattatgctgatttttagcatctcttataggaatcaaagtttattaaagttacatagaggattgaaaaatgtatatcactcaatttttatctaagaaggataggttataaagggaggtacctaaatactcaaataatgtatatattctttttcataacatatggaatgctttaagcaattgttttgaaaaaaatctgcgtatctttgacttaattggcacatgactttttcaagcagccattcattcagaggtttgttttctctcagtccttttgctacattcactttcttttcaaagaaatgttaattattacaaaaattgacatagatatctttcccaaacttggggtaaaacccatggttatgtggaacataactgttcttaaaaagtcaattataatttgtaactcacatcctttgagctaaactaaattaaaattacagtatttaataattctttgggcatttttaagaggtctgaatttgtatttttcttcatttttgaaactttacatttgttgactttttttcattctcatttaaaatatattgtgctatgataaccaaccttcttccaaggagtgaccattactgcctacatttgcgttgctttctacatagagacttgtataatagtattaatagtagctcattctctctaaaaatttactgcccactgataggatgttttgtttccttgataaaacaaatgtaaatgaggaattttatttgaattggaatattgtttttctagaggacattcatatctgcactattatctgatgacatgttggtaattttaaagactgcaaggcagtttagagaatgaagtaaaccaatagatactcttttgattctccaaagaaatataattttggtttttgttcctcagagagagtttgaaagaaattttcagatgttctgttccctatagagggcctattccaggatctaaatgaatgggaatttataattcctttcatagactcaaacctgaaagcagaaatttttagtagttgagttgctttaagtgaattttaacaaatatgacacagaaaaggtcagatgctgttgtataaaattttttactagtgtgtcttatataattctttcttctcattaattcagtgcctttttcctctaagcatactcttggtccatgccccatgcagtgtcaactgatgtttaagctacagagcattgttgtagtggtgagggccctctgttgcaggggcatggggaaatgcatatattaatcaggggctggaggagtatacatgattcttgtgttcatgttgtcatttgaaactcttcacataaaattttctaatattcatttggaaaacctctccactggagaggtttcatctctgagaggttttgtaataatagtgtaagttcagtaaatccagtccaaattctcatcacatgtattatttgatactaaattttcaattattacttcaaaataagagtctgaggatttcttcttactggcgttcttaaaggtctctaaaattaaagaacaagatgtggttttttgtttaagacgtttttagtttatttgttgttaagttaaactggagaaagtttgtcatcctcattttcaaactgaaaactaatcaaatatagtgcctatttagtctcaaaataaggtaactattaacttgattatactatataatattctcaattacatttgaatttaaaaatattgagctcttgattacaatttaatacattgtaaaaagtattaaatcctttgaaacatcttttgttgcttatttagtttttgtttctacaggtcaaacatgattgctttctataaaagaaatgcttgagaggttgactataatggatatgtcacaggtataaaacagttgttttctaaaaacatgcatttagtatggcattctcttttagcaactgaattcccaacgagttttattaagctggatatcgaaatgaaggagctgccttaagcactttagaaaaagaatttttttacaattcattttgactctcatggctgaccatgtcattatgtctttaaattttggtaaatatgtagataccaagcattaataactaatgcacacagaaatttaatatacagcaattctttgaatgttccaggtgtacgtaaactaactgaaagtattaaggacatgcctgtctatacatgggtttcattgatggtatctgtatcatcttgacaaatcgtgaactgctgctgtatggctagactttgcctatttactctgttatgcaaacagtaatttttccctatgttatgaagagagacatattggcttgctttaatttacttatttatgaaattaaagcatgaataatatgtataatttgaattttttgtgactgatccttggcagtataaatgataaaagtaaatgtaatggaatcttttaattaggctaagatatgctatttcataacttatgtagaatgatttttatctatatactttgtccataaaattataattgtttatgtaattttattgtttcttatggaaacaattggaaaagtatatggaaaatgattatttcaaagaatatttatttaaagagggaagtgtagacttcttactgtaaaatatgtgattccaggcttaagaaattgattatattttaaaataattatttttttaaaaacgtaatttgtttttaaaagatgagtctccattcattggctaatccatacagcaaatatttgagtgtttgtgatatggcagtaaaaatgtgattactttgtatgtacattaaccaaaaccagtgaagtttgatggactgtgcatagagttttgcagcttttgagtagtgtgacagagtttgcctcttaaaattgttttgctaataagtcagaagtttaaaatgtgttatagtttgctaaaaaaaaatcaaattaactgcatataaaatggttcacttttatatagtcacatgtaatgggcctgaaaaagtttcttctttgattatgtagttactctagatacattcttttagggaagtgtatggtcaacatatatttactcagtatacagataaccacaaagttgttatttttaaccaaaatatacatttcataatgttggcactggagtattataagagatcatgaatgtttccttaattatcatggcaagattacctcacgttcagtatagtttagttttgtgtgtatcttacagtatgcatgttctgaaattatttgtgatcctgatatgtcacatataatagctttgttacctggagtatttgattaacctaaacagtttaagcattttgaattagttggagtttaaatggattacatttggtgtatattgtcttcattgaaaagatattgttggatatgccacatcagagttagcattgacttataaataaataccagaatttaccagagtacacttttctcttcagatgactcaattattaaataaaagaatatttcttatttctgggtcaatataaggtactgacttctgatgcataatcacttaagctatgtgagtttaaactggtatcttttcttagtggtacccattcaatgtaagctggtccatgggaatggacatgaagaggatttcacagtatgtagagcagaaggcacgtgaatgtgtttgctttggcttggagcttattaagttttgactacggttaaaataagtcaaatagtaagtggtaaaacacatttttgttagtattggaactttctggagaacataagggctatgagaatgcatatatatattttttaacatttcctatatatctaaggtaccaaagcactgagtctaatttacctattaagggagactctttaaaatcaactttataactaattcatactataagacagataatagctaaagttttggaataatttatattaaaagccgcaagtcttaaaaatccctggatatgacataaaaaggattttggcttcttttttgaagtatttaaaattaatcaccttagctctaccatatactagatctgtgaccgctacacaaattgtttatcatctttgggtctctattgccttctttataaaataagtgtaagttgttcagcctgcctcacagggctgttgtgaggaaataaaatgaaatggagtatgtgaaattgcttcagcaacagcaaagtgctacgtaaatgtaaagtgttgtttttagctaataatggatttaagtgtttggataattgtagatgcatttactttgataaagcgtgtgcttaaagtggtatcaccagtgatttctaacatgattttaaaaaaataaaaccccaattaaaatgttctttaatattcatttaatttgtgcatgacttgtggcctttttgtattttctcaagcctattactctagagctgtaaaagctcttgcacagcattgttgtgtcagtgtagaatagtggcataaataaatgaattaagctacatttccatgcaggcatttgcactttgaagttagggctgcccagtgccacatgcaaagagtgtatttggtctaaacagttctttccaaacaaccaaatggctgggcagcttgttgtcacggataaatgatataaaatgtaaccactgaacatttgacaactttgttgcattatcatttttaaaaaaagatgaagcatttcaaaatcttgttaacctggttatctcttggtatctctcctgacatatttgttttgctttaaattggattaaatggtttacaggttatctgaatctacagatttagtatgtctattatctggacatgattttgctatgcagttgtgataataaaaattctaattcctcaggtttggccttttaagttatggctgaagacctttaatgatacttatgatgcactcagtgccatacaatagtgttttaagaagcacatggcctcattttccttagaaacaagacaaagcctttttaaaatgtttttttttcactttaaaatagggtattcaaagtggagtaacgtgtattttgaaatgattttgtgttctatatagaatgtcccagttaagattttacagaagcacctggaatatctcattaaaaatttaaaaactctt

SEQ ID NO: 10837 - DNA, 658 bp, Homo sapiens
  source 1..658: mol_type = unassigned DNA
ctttcaccctggcaaccgcggcgtgactacggcgcgcgcggtctgggcgcggacgggtggggccgggcggtgccggtgcgggctggggcagtgcagtgagtagcggtcttggggtgtgcgatctcgctgagcctcctcacacggttcgtcgtctcgggttcgagcccagtgggcttagccactcgccatggactcccagaaagaagctctacagaggatcatttcaactctggcaaataaaaatgatgaaattcagaactttattgatacactacatcatacactaaaaggagttcaggaaaattcgtccaacatactctcagagttagatgaagaatttgatagtttatactctatactggatgaagtaaaagaaagtatgattaactgtatcaagcaggaacaagctcgtaaatcccaagagttacagagtcagattagtcaatgtaataatgccctggagaactctgaagaactattagaatttgcaacaaggtcattagatataaaggaacctgaagaattttcaaaggtacacaaaaactgcattaatacacttaacaagggaagttgtatttttaaaaaggcgtttttgtttttctttagttttggatttctttactgatttctaatactaataaagccttggggtttcttg

SEQ ID NO: 10838 - DNA, 1804 bp, Homo sapiens
  source 1..1804: mol_type = unassigned DNA
ggtgccggtgcgggctggggcagtgcagtgagtagcggtcttggggtgtgcgatctcgctgagcctcctcacacggttcgtcgtctcgggttcgagcccagtgggcttagccactcgccatggactcccagaaatactgctttaaggagaatgaaaacgttacagttgataaagcctgttttctgatctctaacatcactattggaccagagtctattaacttgcagcaggaagctctacagaggatcatttcaactctggcaaataaaaatgatgaaattcagaactttattgatacactacatcatacactaaaaggagttcaggaaaattcgtccaacatactctcagagttagatgaagaatttgatagtttatactctatactggatgaagtaaaagaaagtatgattaactgtatcaagcaggaacaagctcgtaaatcccaagagttacagagtcagattagtcaatgtaataatgccctggagaactctgaagaactattagaatttgcaacaaggtcattagatataaaggaacctgaagaattttcaaaggctgccagacagatcaaggatagagtcacaatggcttcagcctttcgcctttctttgaaaccaaaggtcagtgacaacatgactcatttaatggtggatttctcacaggaaagacagatgctgcaaactttgaagtttttgccagtccccaaagctccagagatagatccagtagagtgtttggtggcagataactctgtaacagtggcttggagaatgccagaagaagataataagattgaccattttatactggaacataggaagactaattttgatggacttccacgtgtaaaggatgagcgatgctgggagataattgataatattaagggtactgaatatacactatcaggcttaaaatttgattcaaagtatatgaatttcagagtgcgagcttgtaacaaggctgtggctggagagtattctgatccagtgactctagagaccaaagcacttaacttcaatttggataactcctcatcccatttgaacctgaaagttgaagatacatgtgtagagtgggatcctactggaggaaaaggtcaagaaagtaaaattaaaggaaaagagaacaagggcagaagtggtacaccatccccaaaacgaacatctgtaggctccaggccaccagcagtaagaggcagtagagatcgttttactggagaatcatacacagtgctgggagacactgctattgaaagtggacaacattattgggaggtcaaggcccagaaggattgtaaatcctacagtgtgggagtagcatacaaaacgttggggaaatttgaccaattgggaaagacaaacactagttggtgtatccatgtcaacaactggctacaaaacacatttgcagcaaagcataataataaagtcaaagctttggatgttactgttcctgaaaaaataggtgtattttgtgattttgatgggggtcaactttcattctatgatgcaaattctaaacagttgctatattcctttaagacaaaatttactcagccagtactacctggtttcatggtatggtgtggtggactttctttgagtactgggatgcaggttccaagtgctgtgagaacacttcagaaaagtgaaaatggaatgactggttcagctagcagcctgaacaatgttgttactcaatagtgtctactcagaatacgtttaccctccgtcttgattaggtggccttttctgtgcagttactaatcacaggaatttggtagtagtgaaaatca

SEQ ID NO: 10839 - DNA, 1944 bp, Homo sapiens
  source 1..1944: mol_type = unassigned DNA
agtgcagtgagtagcggtcttggggtgtgcgatctcgctgagcctcctcacacggttcgtcgtctcgggttcgagcccagtgggcttagccactcgccatggactcccagaaagaagctctacagaggatcatttcaactctggcaaataaaaatgatgaaattcagaactttattgatacactacatcatacactaaaaggagttcaggaaaattcgtccaacatactctcagagttagatgaagaatttgatagtttatactctatactggatgaagtaaaagaaagtatgattaactgtatcaagcaggaacaagctcgtaaatcccaagagttacagagtcagattagtcaatgtaataatgccctggagaactctgaagaactattagaatttgcaacaaggtcattagatataaaggaacctgaagaattttcaaaggctgccagacagatcaaggatagagtcacaatggcttcagcctttcgcctttctttgaaaccaaaggtcagtgacaacatgactcatttaatggtggatttctcacaggaaagacagatgctgcaaactttgaagtttttgccagtccccaaagctccagagatagatccagtagagtgtttggtggcagataactctgtaacagtggcttggagaatgccagaagaagataataagattgaccattttatactggaacataggaagactaattttgatggacttccacgtgtaaaggatgagcgatgctgggagataattgataatattaagggtactgaatatacactatcaggcttaaaatttgattcaaagtatatgaatttcagagtgcgagcttgtaacaaggctgtggctggagagtattctgatccagtgactctagagaccaaagcacttaacttcaatttggataactcctcatcccatttgaacctgaaagttgaagatacatgtgtagagtgggatcctactggaggaaaaggtcaagaaagtaaaattaaaggaaaagagaacaagggcagtgtccatgttacttcactgaagaaacatacaagtggtacaccatccccaaaacgaacatctgtaggctccaggccaccagcagtaagaggcagtagagatcgttttactggagaatcatacacagtgctgggagacactgctattgaaagtggacaacattattgggaggtcaaggcccagaaggattgtaaatcctacagtgtgggagtagcatacaaaacgttggggaaatttgaccaattgggaaagacaaacactagttggtgtatccatgtcaacaactggctacaaaacacatttgcagcaaagcataataataaagtcaaagctttggatgttactgttcctgaaaaaataggtgtattttgtgattttgatgggggtcaactttcattctatgatgcaaattctaaacagttgctatattcctttaagacaaaatttactcagccagtactacctggtttcatggtatggtgtggtggactttctttgagtactgggatgcaggttccaagtgctgtgagaacacttcagaaaagtgaaaatggaatgactggttcagctagcagcctgaacaatgttgttactcaatagtgtctactcagaatacgtttaccctccgtcttgattaggtggccttttctgtgcagttactaatcacaggaatttggtagtagtgaaaatcaggtttgctgtgttctgctttgaggcctggaatcttttatcattaaacacctagtacgaagcatttgcaggaacctactgtgcagtatcatagaagcaagcagataccaagcaaaaaactgatgattgaagagtaaatgggggaaaaggcagtgtttaattaacataaaaactcatttttgtatttcttggattactttgactattctaatgtttaattacatatggt

SEQ ID NO: 10840 - DNA, 6552 bp, Homo sapiens
  source 1..6552: mol_type = unassigned DNA
ctcagtggcggagcgcggctgccggtgtgcggccgggagcgatcgccgcggggcaggggcgcggcgggcaccgcgcagagcgcgcagaacagacggacggcggcggggacccgacggcggcgcctcggcactccccagactccggccagcgcccccctgccagccgcaagcacccagccccggcccaccccgggctctcgatggcccccgaggccggggcgaccctgcgcgcgccgcgccggctgtcctgggcggcgctgctgctcttggccgcgctgctccccgtcgcctcctcggcggcggcctcagttgaccacccactgaagccaaggcatgtgaaactgctgtccactaaaatgggcctgaaagtcacgtgggacccacccaaagatgctaccagtagacctgtggagcattacaacattgcctatgggaagtcactgaaaagtcttaaatacatcaaggtgaatgcggagacatactccttccttattgaggatgtggagccgggggtagtgtactttgtgctgcttactgcagaaaaccacagtggagtgagccgtcctgtttacagagctgaaagcccacctggaggtgaatggatcgagattgatggttttcccattaagggtccaggaccatttaatgaaaccgtcacagaaaaggaagtgcccaacaagcccttgcgtgtgcgtgtccggtcctcagatgacaggctgtccgttgcgtggaaggcaccacgcctgtctggagccaagagtccacgcagatcacggggttttctcctgggctacggggagagtggccggaagatgaattatgttccactgacaagagatgaacggacacacgaaattaaaaagctagcctcggaatccgtgtatgtggtctccctgcagtccatgaactctcagggccggagccaaccagtctacagggctgccctaacaaagcgaaagatttcagaagaggacgaattggatgtacctgacgacatcagcgtccgggttatgtcatctcagtctgtgcttgtgtcctgggtggatcctgttctggaaaaacagaagaaagttgttgcatcaagacagtacaccgtgcgctatcgagagaagggggaattggccaggtgggattataagcagatcgctaacaggcgtgtgctgattgagaacctgattccagacactgtgtatgaatttgcagtccgtatttcacagggtgaaagagatggcaaatggagtacgtcagtcttccaaagaacaccagaatctgcccctaccacagctcctgaaaacttgaacgtctggccagtcaatggcaaacctacagttgtcgctgcatcttgggatgcgctaccagagactgaggggaaagtgaaagaatacattctttcatacgccccggctctcaaaccatttggagcaaagtccctcacctatcctggagacactacttctgccctggtggatggtctgcagcctggggaacgctatcttttcaaaatccgggccacaaacaggagaggcctgggacctcactccaaagccttcattgtcgctatgccaacaaccagtaaggcggatgttgagcagaacacggaggacaatgggaaacccgaaaaacctgagccttcctcaccttctcccagagctccagcttcctcccaacacccctctgtgcctgcttctccccaagggagaaatgccaaggaccttcttcttgacttgaagaacaaaatattggctaatggtggggcgccccgaaaaccccagcttcgcgccaagaaggcagaggagctggatcttcagtcgacagaaatcactggggaggaggagctgggttcccgggaggactcgcccatgtcaccctcagacacccaagaccagaaacggaccctgaggccgccaagtagacacggccactcggtggttgctcccggcaggactgcagtgagggcccggatgccagcgctgccccgaagggaaggcgtagataagcctggcttttccctggccacgcagccccgcccaggggcgcccccctcggcttcggcctctcctgcccaccacgcgtccacccagggcacctctcatcgtccttccctgcctgccagcttgaatgacaacgacttggtggactcagacgaagatgagcgcgctgtgggctccctccaccccaagggcgccttcgcccagccccggccagccctgtcccccagccgccagtccccgtccagcgttctccgcgacagaagctctgtgcaccccggcgcaaagccagcctcgccggcccggaggaccccccattcaggggccgcagaggaagattccagtgcctcagccccaccctcaagactttctccaccccatgggggatcatctcggctgctgcccacccagccacacctgagctctccactttccaagggcgggaaggatggtgaggacgccccagccaccaactccaatgcgccatcacggtccaccatgtcctcctccgtctcttctcatctctcgtccaggacgcaggtctctgagggagcggaggcttctgatggtgaaagccacggtgacggcgatagggaagacggcggaaggcaggcggaggccacggcccagacgctgcgggcccggcctgcctctggacacttccatttgctcagacacaaaccctttgctgccaacgggaggtctccaagcaggttcagcattgggcggggacctcggctgcagccctccagctccccacagtcgactgtgccctcccgagcccaccccagggttccctctcactctgattcccaccctaagcttagctcaggtatccatggagacgaggaggatgagaagccgcttcctgccaccgttgtcaatgaccacgtgccttcctcctccaggcagcccatctcccggggctgggaggacttaaggagaagcccgcagagaggggccagcctgcatcggaaggaacccatcccagagaaccccaaatccacaggggcagatacacatcctcagggcaagtactcctccctggcctccaaggctcaggatgttcaacagagcacagacgcggacacggagggtcattctcccaaagcacagccagggtccacagaccgccacgcgtcccctgctcgtccgcccgcagcacggtcacagcagcatcccagtgttcccagaaggatgacacccggccgggccccacaacagcagccccctcctcccgtcgccacgtcccagcaccacccgggaccccagagcagagacgcgggtcggtcaccttcccagcccaggctctcactgacccaggccgggcggccccgccccacgtcgcagggccgctcccactcctcctcggacccttacacggcgagctccagagggatgctccccacggccctccagaaccaggacgaggatgcccagggcagctacgacgacgacagcacagaagtcgaggcccaggatgtgcgggcccccgcgcacgccgcgcgcgccaaggaggcagctgcgtcccttcccaagcaccagcaggtggagtctcccacaggcgcaggggcaggtggcgaccacaggtcccagcgcggacatgcggcctcccccgccaggcccagccgacccggcggcccccagtcccgcgcccgggtacccagcagggcagcgccggggaagtcggagcctccttccaagcggcccctgtcctccaagtcccagcagtcggtctcagccgaggacgacgaggaggaggacgcgggattttttaaaggcgggaaagaagaccttctgtcttcctctgtgccaaagtggccctcttcctccactcccaggggcggcaaagacgccgatgggagcctcgccaaggaagagagggagcctgccatcgcgcttgcccctcgcggagggagcctggctcctgtgaagcgacctctccccccacctccaggcagctcccccagggcctcccacgtcccttcccgactgccgcctcgcagcgctgccaccgtgagccccgtcgcgggcacccacccctggccgcagtacaccacgcgcgccccacctggccacttctccaccaccccgatgctgtccttgcgccagaggatgatgcatgccagattccgtaaccctctctcccgacagcctgccagaccctcttacagacaaggttataatggcagaccaaatgtagaagggaaagtccttcctggtagtaatggaaaaccgaatggacagagaattatcaatggccctcaaggaacaaagtgggttgtggaccttgatcgtgggttagtattgaatgcagaaggaaggtacctccaagattcacatggaaatcctcttcggattaaactaggaggagatggtcgaaccattgtagatctggaagggacccccgtggtgagtcctgacggcctcccactctttgggcaggggcgacatggcacacctctggccaatgcccaagataagccaattttgagtcttggaggaaagccgctggtgggcttggaggtcatcaaaaaaaccacccatccccctaccactaccatgcagcccaccactactacgacgcccctgcctaccactacaaccccgaggcccaccactgccaccacccgccgcacgaccaccacccgccgcacgaccaccaggcgtccaacaaccacagtccgaaccactacgcggacaaccaccaccaccacccccacacccaccactcccatccccacctgtccccctgggaccttggaacggcacgacgatgatggcaacctgataatgagctccaatgggatcccagagtgctacgctgaagaagatgagttctcaggcttggagactgacactgcagtacctacggaagaggcctacgttatatatgatgaagattatgaatttgagacgtcaaggccaccaaccaccactgagccttcgaccactgctaccacaccgagggtgatcccagaggaaggcgccatcagttcctttcctgaagaagaatttgatctggctggaaggaaacgatttgttgctccttacgtgacgtacctaaataaagacccatcagccccgtgctctctgactgatgcactggatcacttccaagtggacagcctggatgaaatcatccccaatgacctgaagaagagtgacctgcctccccagcatgctccccgcaacatcaccgtggtggccgtggaaggttgccactcatttgtcattgtggactgggacaaagccaccccaggagatgtggtcacaggttacttggtttacagtgcatcctatgaagacttcatcaggaacaagtggtccactcaagcttcatcagtaactcacttgcccattgagaacctaaagcccaacacgaggtattattttaaagtgcaagcacaaaatcctcatggctacggacctatcagcccttcggtctcatttgtcaccgaatcagataatcctctgcttgttgtgaggcccccaggcggtgagcctatctggatcccattcgctttcaaacatgatcccagctacacggactgccatggacggcaatatgtgaagcgcacgtggtatcgaaagttcgtgggagttgttctttgtaattcactgaggtataaaatctacctcagtgacaacctgaaagatacattctacagcattggagacagctggggaagaggtgaagaccattgccaatttgtggattcacaccttgatggaagaacagggcctcagtcctatgtagaagccctccctactattcaaggctactatcgccagtatcgtcaggagcctgtcaggtttgggaacatcggcttcggaaccccctactactatgtgggctggtacgagtgtggggtctccatccctggaaagtggtaatcacaggaccgtcatgctgcaagcttgccctgcccagccccaccaactaagtcgcactaggggctgtgagcaaagacagccagcgtgctcagccccgctgccctaggtgccaggaaggtcatagatggacactggccattctggtcatctcagtctggaactcagtcccacttcttggcctggacaatgaacaggattcagttttgctgttaactttgcttctctacttttttttgtttgtttgtaatagcacatcccagagacatcagaaaccagcaactgattcagtgtgatttccagactttttaggcatgaaattcggacacttcagtatttccaggaatagcatatgcacgctgttcttgcttcatggaatgctacatgctttctgtttttctcattttggatttctccaaaactaactgaatttaagcttcaggtccctttgtatgcagtagaaaggaattattaaaaacaccaccaaagaaaataaatatatcctacttgaaatttactctatggacttacccactgctagaataaatgtatcaaatcttatttgtaaattctcaattttgatatatatatgtatatatgcatatacatatccacacttgtctgcaagaatattgattaaaattgctaaatttgtacttgttcaccagat

SEQ ID NO: 10841 - DNA, 6359 bp, Homo sapiens
  source 1..6359: mol_type = unassigned DNA
ctcagtggcggagcgcggctgccggtgtgcggccgggagcgatcgccgcggggcaggggcgcggcgggcaccgcgcagagcgcgcagaacagacggacggcggcggggacccgacggcggcgcctcggcactccccagactccggccagcgcccccctgccagccgcaagcacccagccccggcccaccccgggctctcgatggcccccgaggccggggcgaccctgcgcgcgccgcgccggctgtcctgggcggcgctgctgctcttggccgcgctgctccccgtcgcctcctcggcggcggcctcagttgaccacccactgaagccaaggcatgtgaaactgctgtccactaaaatgggcctgaaagtcacgtgggacccacccaaagatgctaccagtagacctgtggagcattacaacattgcctatgggaagtcactgaaaagtcttaaatacatcaaggtgaatgcggagacatactccttccttattgaggatgtggagccgggggtagtgtactttgtgctgcttactgcagaaaaccacagtggagtgagccgtcctgtttacagagctgaaagcccacctggaggtgaatggatcgagattgatggttttcccattaagggtccaggaccatttaatgaaaccgtcacagaaaaggaagtgcccaacaagcccttgcgtgtgcgtgtccggtcctcagatgacaggctgtccgttgcgtggaaggcaccacgcctgtctggagccaagagtccacgcagatcacggggttttctcctgggctacggggagagtggccggaagatgaattatgttccactgacaagagatgaacggacacacgaaattaaaaagctagcctcggaatccgtgtatgtggtctccctgcagtccatgaactctcagggccggagccaaccagtctacagggctgccctaacaaagcgaaagatttcagaagaggacgaattggatgtacctgacgacatcagcgtccgggttatgtcatctcagtctgtgcttgtgtcctgggtggatcctgttctggaaaaacagaagaaagttgttgcatcaagacagtacaccgtgcgctatcgagagaagggggaattggccaggtgggattataagcagatcgctaacaggcgtgtgctgattgagaacctgattccagacactgtgtatgaatttgcagtccgtatttcacagggtgaaagagatggcaaatggagtacgtcagtcttccaaagaacaccagaatctgcccctaccacagctcctgaaaacttgaacgtctggccagtcaatggcaaacctacagttgtcgctgcatcttgggatgcgctaccagagactgaggggaaagtgaaagccagtaaggcggatgttgagcagaacacggaggacaatgggaaacccgaaaaacctgagccttcctcaccttctcccagagctccagcttcctcccaacacccctctgtgcctgcttctccccaagggagaaatgccaaggaccttcttcttgacttgaagaacaaaatattggctaatggtggggcgccccgaaaaccccagcttcgcgccaagaaggcagaggagctggatcttcagtcgacagaaatcactggggaggaggagctgggttcccgggaggactcgcccatgtcaccctcagacacccaagaccagaaacggaccctgaggccgccaagtagacacggccactcggtggttgctcccggcaggactgcagtgagggcccggatgccagcgctgccccgaagggaaggcgtagataagcctggcttttccctggccacgcagccccgcccaggggcgcccccctcggcttcggcctctcctgcccaccacgcgtccacccagggcacctctcatcgtccttccctgcctgccagcttgaatgacaacgacttggtggactcagacgaagatgagcgcgctgtgggctccctccaccccaagggcgccttcgcccagccccggccagccctgtcccccagccgccagtccccgtccagcgttctccgcgacagaagctctgtgcaccccggcgcaaagccagcctcgccggcccggaggaccccccattcaggggccgcagaggaagattccagtgcctcagccccaccctcaagactttctccaccccatgggggatcatctcggctgctgcccacccagccacacctgagctctccactttccaagggcgggaaggatggtgaggacgccccagccaccaactccaatgcgccatcacggtccaccatgtcctcctccgtctcttctcatctctcgtccaggacgcaggtctctgagggagcggaggcttctgatggtgaaagccacggtgacggcgatagggaagacggcggaaggcaggcggaggccacggcccagacgctgcgggcccggcctgcctctggacacttccatttgctcagacacaaaccctttgctgccaacgggaggtctccaagcaggttcagcattgggcggggacctcggctgcagccctccagctccccacagtcgactgtgccctcccgagcccaccccagggttccctctcactctgattcccaccctaagcttagctcaggtatccatggagacgaggaggatgagaagccgcttcctgccaccgttgtcaatgaccacgtgccttcctcctccaggcagcccatctcccggggctgggaggacttaaggagaagcccgcagagaggggccagcctgcatcggaaggaacccatcccagagaaccccaaatccacaggggcagatacacatcctcagggcaagtactcctccctggcctccaaggctcaggatgttcaacagagcacagacgcggacacggagggtcattctcccaaagcacagccagggtccacagaccgccacgcgtcccctgctcgtccgcccgcagcacggtcacagcagcatcccagtgttcccagaaggatgacacccggccgggccccacaacagcagccccctcctcccgtcgccacgtcccagcaccacccgggaccccagagcagagacgcgggtcggtcaccttcccagcccaggctctcactgacccaggccgggcggccccgccccacgtcgcagggccgctcccactcctcctcggacccttacacggcgagctccagagggatgctccccacggccctccagaaccaggacgaggatgcccagggcagctacgacgacgacagcacagaagtcgaggcccaggatgtgcgggcccccgcgcacgccgcgcgcgccaaggaggcagctgcgtcccttcccaagcaccagcaggtggagtctcccacaggcgcaggggcaggtggcgaccacaggtcccagcgcggacatgcggcctcccccgccaggcccagccgacccggcggcccccagtcccgcgcccgggtacccagcagggcagcgccggggaagtcggagcctccttccaagcggcccctgtcctccaagtcccagcagtcggtctcagccgaggacgacgaggaggaggacgcgggattttttaaaggcgggaaagaagaccttctgtcttcctctgtgccaaagtggccctcttcctccactcccaggggcggcaaagacgccgatgggagcctcgccaaggaagagagggagcctgccatcgcgcttgcccctcgcggagggagcctggctcctgtgaagcgacctctccccccacctccaggcagctcccccagggcctcccacgtcccttcccgactgccgcctcgcagcgctgccaccgtgagccccgtcgcgggcacccacccctggccgcagtacaccacgcgcgccccacctggccacttctccaccaccccgatgctgtccttgcgccagaggatgatgcatgccagattccgtaaccctctctcccgacagcctgccagaccctcttacagacaaggttataatggcagaccaaatgtagaagggaaagtccttcctggtagtaatggaaaaccgaatggacagagaattatcaatggccctcaaggaacaaagtgggttgtggaccttgatcgtgggttagtattgaatgcagaaggaaggtacctccaagattcacatggaaatcctcttcggattaaactaggaggagatggtcgaaccattgtagatctggaagggacccccgtggtgagtcctgacggcctcccactctttgggcaggggcgacatggcacacctctggccaatgcccaagataagccaattttgagtcttggaggaaagccgctggtgggcttggaggtcatcaaaaaaaccacccatccccctaccactaccatgcagcccaccactactacgacgcccctgcctaccactacaaccccgaggcccaccactgccaccacccgccgcacgaccaccacccgccgcacgaccaccaggcgtccaacaaccacagtccgaaccactacgcggacaaccaccaccaccacccccacacccaccactcccatccccacctgtccccctgggaccttggaacggcacgacgatgatggcaacctgataatgagctccaatgggatcccagagtgctacgctgaagaagatgagttctcaggcttggagactgacactgcagtacctacggaagaggcctacgttatatatgatgaagattatgaatttgagacgtcaaggccaccaaccaccactgagccttcgaccactgctaccacaccgagggtgatcccagaggaaggcgccatcagttcctttcctgaagaagaatttgatctggctggaaggaaacgatttgttgctccttacgtgacgtacctaaataaagacccatcagccccgtgctctctgactgatgcactggatcacttccaagtggacagcctggatgaaatcatccccaatgacctgaagaagagtgacctgcctccccagcatgctccccgcaacatcaccgtggtggccgtggaaggttgccactcatttgtcattgtggactgggacaaagccaccccaggagatgtggtcacaggttacttggtttacagtgcatcctatgaagacttcatcaggaacaagtggtccactcaagcttcatcagtaactcacttgcccattgagaacctaaagcccaacacgaggtattattttaaagtgcaagcacaaaatcctcatggctacggacctatcagcccttcggtctcatttgtcaccgaatcagataatcctctgcttgttgtgaggcccccaggcggtgagcctatctggatcccattcgctttcaaacatgatcccagctacacggactgccatggacggcaatatgtgaagcgcacgtggtatcgaaagttcgtgggagttgttctttgtaattcactgaggtataaaatctacctcagtgacaacctgaaagatacattctacagcattggagacagctggggaagaggtgaagaccattgccaatttgtggattcacaccttgatggaagaacagggcctcagtcctatgtagaagccctccctactattcaaggctactatcgccagtatcgtcaggagcctgtcaggtttgggaacatcggcttcggaaccccctactactatgtgggctggtacgagtgtggggtctccatccctggaaagtggtaatcacaggaccgtcatgctgcaagcttgccctgcccagccccaccaactaagtcgcactaggggctgtgagcaaagacagccagcgtgctcagccccgctgccctaggtgccaggaaggtcatagatggacactggccattctggtcatctcagtctggaactcagtcccacttcttggcctggacaatgaacaggattcagttttgctgttaactttgcttctctacttttttttgtttgtttgtaatagcacatcccagagacatcagaaaccagcaactgattcagtgtgatttccagactttttaggcatgaaattcggacacttcagtatttccaggaatagcatatgcacgctgttcttgcttcatggaatgctacatgctttctgtttttctcattttggatttctccaaaactaactgaatttaagcttcaggtccctttgtatgcagtagaaaggaattattaaaaacaccaccaaagaaaataaatatatcctacttgaaatttactctatggacttacccactgctagaataaatgtatcaaatcttatttgtaaattctcaattttgatatatatatgtatatatgcatatacatatccacacttgtctgcaagaatattgattaaaattgctaaatttgtacttgttcacc

SEQ ID NO: 10842 - DNA, 7904 bp, Homo sapiens
  source 1..7904: mol_type = unassigned DNA
aagctcgggcgggggagcggggcgcggcgggaaggagcgggcgacccggtgtgtgggccagcggagctccggaagccagttgagggaagttctccatgaatgtacgtcacaatgatgatgaccgaccaaatccctctggaactgccaccattgctgaacggagaggtagccatgatgccccacttggtgaatggagatgcagctcagcaggttattctcgttcaagttaatccaggtgagactttcacaataagagcagaggatggaacacttcagtgcattcaaggacctgctgaagttcccatgatgtcacccaatggatccattcctcccattcatgtgcctccaggttatatctcacaggtgattgaagatagtactggagtccgccgggtggtggtcacaccccagtctcctgagtgttatcccccaagctacccctcagccatgtctccaacccatcatctccctccctatctgactcaccatccacattttattcataactcacacacggcttactacccacctgttaccggacctggagatatgccgcctcagttttttccccagcatcatcttccccacacaatatatggtgagcaagaaattataccattttatggaatgtcaacctacatcacccgagaagaccagtacagcaagcctccgcacaaaaaactgaaagaccgccagatcgatcgccagaaccgcctcaacagccctccttcttctatctacaaaagcagctgcacaacagtatacaatggctatgggaagggccatagtggtggaagtggcggaggcggcagcggtagtggtcccggaattaagaaaacagagcgacgagcaagaagcagcccaaagtcgaatgattcagacttgcaagaatatgagttggaagtaaagagggtgcaagacattctttcgggaatagagaaaccacaggtttctaatattcaggcaagagcagttgtgttgtcctgggctccccctgttggactttcctgtggaccccacagtggtctttccttcccctacagttacgaggtggccttatcagacaaaggacgagatggaaaatacaagataatttacagtggagaagaattagaatgtaacctgaaagatcttagaccagcaacagattatcatgtgagggtgtatgccatgtacaattccgtaaagggatcctgctccgagcctgttagcttcaccacccacagctgtgcacccgagtgtcctttcccccctaagctggcacataggagcaaaagttcactaaccctgcagtggaaggcaccaattgacaacggttcaaaaatcaccaactaccttttagagtgggatgagggaaaaagaaatagtggtttcagacagtgcttcttcgggagccagaagcactgcaagttgacaaagctttgtccggcaatggggtacacattcaggctggccgctcgaaacgacattggtaccagtggttatagccaagaggtggtgtgctacacattaggaaatatccctcagatgccttctgcaccaaggctggttcgagctggcatcacatgggtcacgttgcagtggagtaagccagaaggctgttcacccgaggaagtgatcacctacaccttggaaattcaggaggatgaaaatgataaccttttccacccaaaatacactggagaggatttaacctgtactgtgaaaaatctcaaaagaagcacacagtataaattcaggctgactgcttctaatacggaaggaaaaagctgtccaagcgaagttcttgtttgtacgacgagtcctgacaggcctggacctcctaccagaccgcttgtcaaaggcccagttacatctcatggctttagtgtcaaatgggatccccctaaggacaatggtggttcagaaatcctcaagtacttgctagagattactgatggaaattctgaagcgaatcagtgggaagtggcctacagtgggtcggctaccgaatacaccttcacccacttgaaaccaggcactttgtacaaactccgagcatgctgcatcagtaccggcggacacagccagtgttctgaaagtctccctgttcgcacactaagcattgcaccaggtcaatgtcgaccaccgagggttttgggtagaccaaagcacaaagaagtccacttagagtgggatgttcctgcatcggaaagtggctgtgaggtctcagagtacagcgtggagatgacggagcccgaagacgtagcctcggaagtgtaccatggcccagagctggagtgcaccgtcggcaacctgcttcctggaaccgtgtatcgcttccgggtgagggctctgaatgatggagggtatggtccctattctgatgtctcagaaattaccactgctgcagggcctcctggacaatgcaaagcaccttgtatttcttgtacacctgatggatgtgtcttagtgggttgggagagtcctgatagttctggtgctgacatctcagagtacaggttggaatggggagaagatgaagaatccttagaactcatttatcatgggacagacacccgttttgaaataagagacctgttgcctgctgcacagtattgctgtagactacaggccttcaatcaagcaggggcagggccgtacagtgaacttgtcctttgccagacgccagcgtctgcccctgaccccgtctccactctctgtgtcctggaggaggagccccttgatgcctaccctgattcaccttctgcgtgccttgtactgaactgggaagagccgtgcaataacggatctgaaatccttgcttacaccattgatctaggagacactagcattaccgtgggcaacaccaccatgcatgttatgaaagatctccttccagaaaccacctaccggatcagaattcaggctataaatgaaattggagctggaccatttagtcagttcattaaagcaaaaactcggccattaccacccttgcctcctaggctagaatgtgctgctgctggtcctcagagcctgaagctaaaatggggagacagtaactccaagacacatgctgctgaggacattgtgtacacactacagctggaggacagaaacaagaggtttatttcaatctacagaggacccagccacacctacaaggtccagagactgacggaattcacatgctactccttcagaatccaggcagcaagcgaggctggagaagggcccttctcagaaacctataccttcagcacaaccaaaagtgtcccccccaccatcaaagcacctcgagtaacacagttagaaggaaattcatgtgaaattttatgggagacggtaccatcaatgaaaggtgaccctgttaactacattctgcaggtattggttggaagagaatctgagtacaaacaggtgtacaagggagaagaagccacattccaaatctcaggcctccagaccaacacagactacaggttccgcgtatgtgcgtgtcgtcgctgtttagacacctctcaggagctaagcggagccttcagcccctctgcggcttttgtattacaacgaagtgaggtcatgcttacaggggacatggggagcttagatgatcccaaaatgaagagcatgatgcctactgatgaacagtttgcagccatcattgtgcttggctttgcaactttgtccattttatttgcctttatattacagtacttcttaatgaagtaaacccaacaaaactagaggtatgaattaatgctacacattttaatacacacatttattcagatactcccctttttaaagcccttttgttttttgatttatatactctgttttacagatttagctagaaaaaaaatgtcagtgttttggtgcacctttttgaaatgcaaaactaggaaaaggttaaactggatttttttttttaaaaaaaagaaaaaaaaagaagaaaagtataccagataccaaaagctagctttcttatgttttcctttaaattttcagatttaccttcattctgttttcactgatgtcttttgcaagcctttgatttttttttttttgttacagtttagtaatttatattcaccagtcacttcatatgtcttgaacatctgtatctgtaaacatgaatcaccgtgtgtgtacttacagggctaggatttcagtgttgtcagagtattaccacacagcaacagcaacatacagaagatatgttcactcagataagactgccctaaacaaccattttgtcactcagttatttaactgtgtttagctcatttaaatcaaaatgtgtactttaatctaaaatgttttaataatctgtatttcttataattttaacactatgagctgcctgtataagaaatcaagtaaccagaatgcacctataaattatggagcattgtagattttaccacatcaattcatagcagtaactttaagagggcattgtgcaatagttagttgttttcttgttcagctattttaaaggctgctttaacttgtttgtttgtctttgtatataactacttctaatctaatcactagagttattatattctgttatgtttgaccagaattatatgacaagaactggtgacagtttagtgcctctgcccattgtccatgatttacactaattgtgagcagtcttcttatgtgtcagctcattatttttgaaacatttgcctttaggctgttctttgaggtatcaatgaagtgattgaatttcaataccttaattcagtgcacataatactaatgtaacagcagatgaaaattgataaaacccaaaagagagtcatctaaatttgtagttcctatttctgtgggtttgcctggccatggttggagagggaatggtgtttgatggtaaacacagggtgtttggggatcaaggagcctagattctctccctggatctgtcactaacttgctgcgtgacctgaacacgtcactttacctctctgtgcctcagttttcccatgcatgaaaaataaaataaaataaaacggggattctaatgtttgtaagtgctttgagatctttgaccaacaggtgctattggagtgcaaagtgttactcttacgtgtttattttgagtcatgagataatcaattttaacccaaagtcattggattatttatatgaagtccataatgttcgagtacctcagggacatttaagagttggaggtgcaaatatattccaaaagggtgcaacagacacagtgtatccccctgcttctgtttttgtatatttttgctacttggtttttcttgatcatagctattttgtgcttgatctttattgtctaagatgcagtatcctgtactagcttataatattcccataccaaagtcatggggaaacaaacattattttgtttttggtttatttatactatattctgcatacagtactttaaatgccaattacagtgcaatctttatttattgtaaaattttttaagtgtacttatgtactaattttcccttgtagcatgttatatttttgtgttttatacttttgtaattttaggtcagtcttgttccttggcaacatctgtagtattattaatcttctgacattttcttatgtttttaaaaagataagagcatctagtgcattaaatgccaaaaaaaaaatacattatcagtgattgaaacgtttacatgtacccaaaaaccataatcatctcttggaagaaaatgctgagatcaatgaattattctgtgtgcctatattgacgtagtgagtactagagagttctgtattttattattgactataataattagtttaattagctttgcaaactgatggcatcaaggtaaatatatttttgccaaagttctggccttccaaaactcacccccttatttaaatgtgtgctatgacccactatgaccacagcatctgcattttctaaaaaattccatgcaggtgttttggggagaggtattttttaagcaatgaaaattcaactgagtacaaagccccctcttggggggttggggaagtctcttttttgaaacacttcagaactgctgctataaagaaattctctaattggttgaattttttttttaagtaaatagtactttaggccaaaatttatatgaatatttgatcttcttgagattttcatactatcatttaaccaccaggaagctgaagtgtgtgaagtacaaagctgacagcactttattttattgctctccattatttggtattcattatattccttcagtcagaaaattattactctctatggcactgttttttatcacaaatatgtatatgtgatattgatatataactatatatattgccatcacacacgaacaataaaataaagtgttctattaacctgatctctttgcccttttgctatgtgaggagtgaatgagtggccttctgatgctctgactcttctctgtatgtcaaactcatccctggcacaagaaattccagtcatgtgaagcaaactgccctttgtcctcaaagaaattgttgaaaaagaaaactttttaaagagattttttgcatattctctgccttgttcttatcaacttgaaatgttggcattttctaaccttgttttgttggctacaataattcagtattcatgtcaaaattgagaagtgccctaattgaatgtgtttgaatgttatccttgcacaattctttaaattgaaagataaaatgttttacctcactgttggacatacattccaagcttttcaactctaggagaaaaagaaaatcatgttttcctgtattgtaaattttagactatttcatatacattgtattaaaactgccatatcaattttaatgtatagattttgcaaatattatgctatatgtaatacctaactgtatctgtagtgtatatgtaatatatttatgcccaataaatgttttaattctttctgacttaaatagggtttttctgccatgactaggattgcttttgttgttgttgttgttgtttctttctttttttttttttttgagacggagtcttgctctgtcgccaggctggagtgcagtggcgcgatctcagctcactgcaacctccagctcccaggttcaagtgattcccctgcctcagcctcccaagtagctggggattacaggcactcgccaccatgcccggataattttttttttttttttgagttggagtcttgctctgtcgcccaggctggagtgcagtgacccaatctcggctcactgcaagctccacctcccgggttcatgccattctcctgcctcagcctcccaagtagctgggactacaggtgcccgccaccacgcccggctaatttttttaattttagtagagtcggggtttcaccatgttggccaagatggtctcgatctgacctcgtgatctgcccgcctcggcctcccaaagtgctgggattacaggtgtgagcccccgcacccagccttattcttcccttttaaatacttaaagcacattcagattagttgaaaattcacgtgtttttggaggccaggcaggtggccttctgcagagacagcagcagctcagctcttgctgaccaaggccttggaggactgtgagccacaatcacatatgtccatgtttcaaaagaagctaaatatccagatttcctccatgggccaactaaaaggtgattgtggactatacaggctgccagtttaatcctttatcagagtctctgtggataatgtaccttgttgcctaatactttatctgtctaccaaaactcagtccagatctccctctgttcacctggcacactgggtgcttcctctcccctgacgaactctatagagtgttcatgtcctttcctgcaggtctcattcaacaacaacaacaacaacagcaataaaacacagtgttcctgcta

SEQ ID NO: 10843 - DNA, 388 bp, Homo sapiens
  source 1..388: mol_type = unassigned DNA
gcggcggcggcggctggaggaggagagcggcggcggcgggagcagcgaagggggcggcagggatcctccaggctgccggctgggaaggcgtgggcgacccggtgtgtggcgcgcccagagccccgcgtttcagccctagggaaggaagccagttgagggaagttctccatgaatgtacgtcacaatgatgatgaccgaccaaatccctctggaactgccaccattgctgaacggagaggtagccatgatgccccacttggtgaatggagatgcagctcagcaggttattctcgttcaagttaatccaggtgagactttcacaataagagcagaggatggaacacttcagtgcattcaagaagtaaatgttaaaaggcactgtttatga

SEQ ID NO: 10844 - DNA, 5083 bp, Homo sapiens
  source 1..5083: mol_type = unassigned DNA
gcggcggcggcggctggaggaggagagcggcggcggcgggagcagcgaagggggcggcagggatcctccaggctgccggctgggaaggcgtgggcgacccggtgtgtggcgcgcccagagccccgcgtttcagccctagggaaggaagccagttgagggaagttctccatgaatgtacgtcacaatgatgatgaccgaccaaatccctctggaactgccaccattgctgaacggagaggtagccatgatgccccacttggtgaatggagatgcagctcagcaggttattctcgttcaagttaatccaggtgagactttcacaataagagcagaggatggaacacttcagtgcattcaaggacctgctgaagttcccatgatgtcacccaatggatccattcctcccattcatgtgcctccaggttatatctcacaggtgattgaagatagtactggagtccgccgggtggtggtcacaccccagtctcctgagtgttatcccccaagctacccctcagccatgtctccaacccatcatctccctccctatctgactcaccatccacattttattcataactcacacacggcttactacccacctgttaccggacctggagatatgccgcctcagttttttccccagcatcatcttccccacacaatatatggtgagcaagaaattataccattttatggaatgtcaacctacatcacccgagaagaccagtacagcaagcctccgcacaaaaaactgaaagaccgccagatcgatcgccagaaccgcctcaacagccctccttcttctatctacaaaagcagctgcacaacagtatacaatggctatgggaagggccatagtggtggaagtggcggaggcggcagcggtagtggtcccggaattaagaaaacagagcgacgagcaagaagcagcccaaagtcgaatgattcagacttgcaagaatatgagttggaagtaaagagggtgcaagacattctttcgggaatagagaaaccacaggtttctaatattcaggcaagagcagttgtgttgtcctgggctccccctgttggactttcctgtggaccccacagtggtctttccttcccctacagttacgaggtggccttatcagacaaaggacgagatggaaaatacaagataatttacagtggagaagaattagaatgtaacctgaaagatcttagaccagcaacagattatcatgtgagggtgtatgccatgtacaattccgtaaagggatcctgctccgagcctgttagcttcaccacccacagctgtgcacccgagtgtcctttcccccctaagctggcacataggagcaaaagttcactaaccctgcagtggaaggcaccaattgacaacggttcaaaaatcaccaactaccttttagagtgggatgagggaaaaagaaatagtggtttcagacagtgcttcttcgggagccagaagcactgcaagttgacaaagctttgtccggcaatggggtacacattcaggctggccgctcgaaacgacattggtaccagtggttatagccaagaggtggtgtgctacacattaggaaatatccctcagatgccttctgcaccaaggctggttcgagctggcatcacatgggtcacgttgcagtggagtaagccagaaggctgttcacccgaggaagtgatcacctacaccttggaaattcaggaggatgaaaatgataaccttttccacccaaaatacactggagaggatttaacctgtactgtgaaaaatctcaaaagaagcacacagtataaattcaggctgactgcttctaatacggaaggaaaaagctgtccaagcgaagttcttgtttgtacgacgagtcctgacaggcctggacctcctaccagaccgcttgtcaaaggcccagttacatctcatggctttagtgtcaaatgggatccccctaaggacaatggtggttcagaaatcctcaagtacttgctagagattactgatggaaattctgaagcgaatcagtgggaagtggcctacagtgggtcggctaccgaatacaccttcacccacttgaaaccaggcactttgtacaaactccgagcatgctgcatcagtaccggcggacacagccagtgttctgaaagtctccctgttcgcacactaagcattgcaccaggtcaatgtcgaccaccgagggttttgggtagaccaaagcacaaagaagtccacttagagtgggatgttcctgcatcggaaagtggctgtgaggtctcagagtacagcgtggagatgacggagcccgaagacgtagcctcggaagtgtaccatggcccagagctggagtgcaccgtcggcaacctgcttcctggaaccgtgtatcgcttccgggtgagggctctgaatgatggagggtatggtccctattctgatgtctcagaaattaccactgctgcagggcctcctggacaatgcaaagcaccttgtatttcttgtacacctgatggatgtgtcttagtgggttgggagagtcctgatagttctggtgctgacatctcagagtacaggttggaatggggagaagatgaagaatccttagaactcatttatcatgggacagacacccgttttgaaataagagacctgttgcctgctgcacagtattgctgtagactacaggccttcaatcaagcaggggcagggccgtacagtgaacttgtcctttgccagacgccagcgtctgcccctgaccccgtctccactctctgtgtcctggaggaggagccccttgatgcctaccctgattcaccttctgcgtgccttgtactgaactgggaagagccgtgcaataacggatctgaaatccttgcttacaccattgatctaggagacactagcattaccgtgggcaacaccaccatgcatgttatgaaagatctccttccagaaaccacctaccggatcagaattcaggctataaatgaaattggagctggaccatttagtcagttcattaaagcaaaaactcggccattaccacccttgcctcctaggctagaatgtgctgctgctggtcctcagagcctgaagctaaaatggggagacagtaactccaagacacatgctgctgaggacattgtgtacacactacagctggaggacagaaacaagaggtttatttcaatctacagaggacccagccacacctacaaggtccagagactgacggaattcacatgctactccttcagaatccaggcagcaagcgaggctggagaagggcccttctcagaaacctataccttcagcacaaccaaaagtgtcccccccaccatcaaagcacctcgagtaacacagttagaaggaaattcatgtgaaattttatgggagacggtaccatcaatgaaaggtgaccctgttaactacattctgcaggtattggttggaagagaatctgagtacaaacaggtgtacaagggagaagaagccacattccaaatctcaggcctccagaccaacacagactacaggttccgcgtatgtgcgtgtcgtcgctgtttagacacctctcaggagctaagcggagccttcagcccctctgcggcttttgtattacaacgaagtgaggtcatgcttacaggggacatggggagcttagatgatcccaaaatgaagagcatgatgcctactgatgaacagtttgcagccatcattgtgcttggctttgcaactttgtccattttatttgcctttatattacagtacttcttaatgaagtaaacccaacaaaactagaggtatgaattaatgctacacattttaatacacacatttattcagatactcccctttttaaagcccttttgttttttgatttatatactctgttttacagatttagctagaaaaaaaatgtcagtgttttggtgcacctttttgaaatgcaaaactaggaaaaggttaaactggatttttttttttaaaaaaaagaaaaaaaaagaagaaaagtataccagataccaaaagctagctttcttatgttttcctttaaattttcagatttaccttcattctgttttcactgatgtcttttgcaagcctttgatttttttttttttgttacagtttagtaatttatattcaccagtcacttcatatgtcttgaacatctgtatctgtaaacatgaatcaccgtgtgtgtacttacagggctaggatttcagtgttgtcagagtattaccacacagcaacagcaacatacagaagatatgttcactcagataagactgccctaaacaaccattttgtcactcagttatttaactgtgtttagctcatttaaatcaaaatgtgtactttaatctaaaatgttttaataatctgtatttcttataattttaacactatgagctgcctgtataagaaatcaagtaaccagaatgcacctataaattatggagcattgtagattttaccacatcaattcatagcagtaactttaagagggcattgtgcaatagttagttgttttcttgttcagctattttaaaggctgctttaacttgtttgtttgtctttgtatataactacttctaatctaatcactagagttattatattctgttatgtttgaccagaattatatgacaagaactggtgacagtttagtgcctctgcccattgtccatgatttacactaattgtgagcagtcttcttatgtgtcagctcattatttttgaaacatttgcctttaggctgttctttgaggtatcaatgaagtgattgaatttcaataccttaattcagtgcacataatactaatgtaacagcagatgaaaattgataaaacccaaaagagagtcatctaaatttgtagttcctatttctgtgggtttgcctggccatggttggagagggaatggtgtttgatggtaaacacagggtgtttggggatcaaggagcctagattctctccctggatctgtcactaacttgctgcgtgacctgaacacgtcactttacctctctgtgcctcagttttcccatgcatgaaaaataaaataaaataaaacggg

SEQ ID NO: 10845 - DNA, 3684 bp, Homo sapiens
  source 1..3684: mol_type = unassigned DNA
agtgtctaccaccaaactcctaaggctggatggtggaagccagttgagggaagttctccatgaatgtacgtcacaatgatgatgaccgaccaaatccctctggaactgccaccattgctgaacggagaggtagccatgatgccccacttggtgaatggagatgcagctcagcaggttattctcgttcaagttaatccaggtgagactttcacaataagagcagaggatggaacacttcagtgcattcaaggacctgctgaagttcccatgatgtcacccaatggatccattcctcccattcatgtgcctccaggttatatctcacaggtgattgaagatagtactggagtccgccgggtggtggtcacaccccagtctcctgagtgttatcccccaagctacccctcagccatgtctccaacccatcatctccctccctatctgactcaccatccacattttattcataactcacacacggcttactacccacctgttaccggacctggagatatgccgcctcagttttttccccagcatcatcttccccacacaatatatggtgagcaagaaattataccattttatggaatgtcaacctacatcacccgagaagaccagtacagcaagcctccgcacaaaaaactgaaagaccgccagatcgatcgccagaaccgcctcaacagccctccttcttctatctacaaaagcagctgcacaacagtatacaatggctatgggaagggccatagtggtggaagtggcggaggcggcagcggtagtggtcccggaattaagaaaacagagcgacgagcaagaagcagcccaaagtcgaatgattcagacttgcaagaatatgagttggaagtaaagagggtgcaagacattctttcgggaatagagaaaccacaggtttctaatattcaggcaagagcagttgtgttgtcctgggctccccctgttggactttcctgtggaccccacagtggtctttccttcccctacagttacgaggtggccttatcagacaaaggacgagatggaaaatacaagataatttacagtggagaagaattagaatgtaacctgaaagatcttagaccagcaacagattatcatgtgagggtgtatgccatgtacaattccgtaaagggatcctgctccgagcctgttagcttcaccacccacagctgtgcacccgagtgtcctttcccccctaagctggcacataggagcaaaagttcactaaccctgcagtggaaggcaccaattgacaacggttcaaaaatcaccaactaccttttagagtgggatgagggaaaaagaaatagtggtttcagacagtgcttcttcgggagccagaagcactgcaagttgacaaagctttgtccggcaatggggtacacattcaggctggccgctcgaaacgacattggtaccagtggttatagccaagaggtggtgtgctacacattaggaaatatccctcagatgccttctgcaccaaggctggttcgagctggcatcacatgggtcacgttgcagtggagtaagccagaaggctgttcacccgaggaagtgatcacctacaccttggaaattcaggaggatgaaaatgataaccttttccacccaaaatacactggagaggatttaacctgtactgtgaaaaatctcaaaagaagcacacagtataaattcaggctgactgcttctaatacggaaggaaaaagctgtccaagcgaagttcttgtttgtacgacgagtcctgacaggcctggacctcctaccagaccgcttgtcaaaggcccagttacatctcatggctttagtgtcaaatgggatccccctaaggacaatggtggttcagaaatcctcaagtacttgctagagattactgatggaaattctgaagcgaatcagtgggaagtggcctacagtgggtcggctaccgaatacaccttcacccacttgaaaccaggcactttgtacaaactccgagcatgctgcatcagtaccggcggacacagccagtgttctgaaagtctccctgttcgcacactaagcattgcaccaggtcaatgtcgaccaccgagggttttgggtagaccaaagcacaaagaagtccacttagagtgggatgttcctgcatcggaaagtggctgtgaggtctcagagtacagcgtggagatgacggagcccgaagacgtagcctcggaagtgtaccatggcccagagctggagtgcaccgtcggcaacctgcttcctggaaccgtgtatcgcttccgggtgagggctctgaatgatggagggtatggtccctattctgatgtctcagaaattaccactgctgcagggcctcctggacaatgcaaagcaccttgtatttcttgtacacctgatggatgtgtcttagtgggttgggagagtcctgatagttctggtgctgacatctcagagtacaggttggaatggggagaagatgaagaatccttagaactcatttatcatgggacagacacccgttttgaaataagagacctgttgcctgctgcacagtattgctgtagactacaggccttcaatcaagcaggggcagggccgtacagtgaacttgtcctttgccagacgccagcgtctgcccctgaccccgtctccactctctgtgtcctggaggaggagccccttgatgcctaccctgattcaccttctgcgtgccttgtactgaactgggaagagccgtgcaataacggatctgaaatccttgcttacaccattgatctaggagacactagcattaccgtgggcaacaccaccatgcatgttatgaaagatctccttccagaaaccacctaccggatcagaattcaggctataaatgaaattggagctggaccatttagtcagttcattaaagcaaaaactcggccattaccacccttgcctcctaggctagaatgtgctgctgctggtcctcagagcctgaagctaaaatggggagacagtaactccaagacacatgctgctgaggacattgtgtacacactacagctggaggacagaaacaagaggtttatttcaatctacagaggacccagccacacctacaaggtccagagactgacggaattcacatgctactccttcagaatccaggcagcaagcgaggctggagaagggcccttctcagaaacctataccttcagcacaaccaaaagtgtcccccccaccatcaaagcacctcgagtaacacagttagaaggaaattcatgtgaaattttatgggagacggtaccatcaatgaaaggtgaccctgttaactacattctgcaggtattggttggaagagaatctgagtacaaacaggtgtacaagggagaagaagccacattccaaatctcaggcctccagaccaacacagactacaggttccgcgtatgtgcgtgtcgtcgctgtttagacacctctcaggagctaagcggagccttcagcccctctgcggcttttgtattacaacgaagtgaggtcatgcttacaggggacatggggagcttagatgatcccaaaatgaagagcatgatgcctactgatgaacagtttgcagccatcattgtgcttggctttgcaactttgtccattttatttgcctttatattacagtacttcttaatgaagtaaacccaa

SEQ ID NO: 10846 - DNA, 678 bp, Homo sapiens
  source 1..678: mol_type = unassigned DNA
agcagacactggaatgtgaatgcattgggaggtgagcccttaaggagagcccaaatgtttaccaaagagaaaatctggtcagaggttattctcgttcaagttaatccaggtgagactttcacaataagagcagaggatggaacacttcagtgcattcaaggacctgctgaagttcccatgatgtcacccaatggatccattcctcccattcatgtgcctccaggttatatctcacaggtgattgaagatagtactggagtccgccgggtggtggtcacaccccagtctcctgagtgttatcccccaagctacccctcagccatgtctccaacccatcatctccctccctatctgactcaccatccacattttattcataactcacacacggcttactacccacctgttaccggacctggagatatgccgcctcagttttttccccagcatcatcttccccacacaatatatggtgagcaagaaattataccattttatggaatgtcaacctacatcacccgagaagaccagtacagcaagcctccgcacaaaaaactgaaagaccgccagatcgatcgccagaaccgcctcaacagccctccttcttctatctacaaaagcagctgcacaacagtatacaatggctatgggaagggccatagtggtggaagtggcgga

SEQ ID NO: 10847 - DNA, 1657 bp, Homo sapiens
  source 1..1657: mol_type = unassigned DNA
cgcgcgtcccggccgggctgcggcggagcgagcggggccagcgctgcagaaggcggcggctggctctccgggacggtcacatcccgctgcaggggcgggcggaggccgccgcactgcctcccgcaccggggacccaggccagcgtccgggcaacgccccctgctcccggacagactccgtggcccgctcgagccctgggggctccgcagacccgcgcccgctccgcccgcagctcggccccgcgctgcccgcgtcgccgggcccgcgccgggatggggtaggggcagcgccaccgagtcgggcgatgggccgccctctgggcaccgagcagccccccgaggcctgaccaaccgcgaggaccggcggaggagccccgcctggatgtcaagcggatgccaagcggatgccacagttccccccccagcggactccgtggggacatggcttcgctggtgcccctttccccatatctaagccccacggtcctcctgctggtcagctgtgacctgggcttcgtgcgagcagaccggcctccctctcctgtgaatgtgacggtcactcacctcagagccaactcggccactgtgtcctgggacgtcccagaaggcaacatcgtcattggctactccatttcccagcaacggcagaatggccccgggcagcgtgtgattcgggaggtgaacaccaccacccgggcctgtgccctctggggcctggctgaagacagtgactacacagtgcaggtcaggagcatcggccttcggggagagagtcccccagggccccgggtgcacttccgaactctcaagggttctgaccggctaccttcaaacagttcaagcccaggtgacatcacagtggaaggtctggatggagagcggccactgcagactggggaagtggtcatcattgtggtggtgttgctcatgtgggctgctgtaattgggctgttctgccgtcagtatgacatcatcaaggacaatgactccaacaacaatcccaaggagaagggaaaggggccggaacagagtcctcagggaaggccagtggggacaagacagaaaaagtcaccatctatcaacaccatcgacgtttgagtgaagaaacacacccagaagagagatgcactaacaactggggatagggatggggtcagggggagcccaagatggtgatctgcccgagactcccagagggtaatgccactcccacaatctcaggcctggtacccatcctctttccactgtgagcagagccagaaggtaggtctgttcagagtctgtgcccctggacctggggagtggatatcagatgggatatctccttccattccccggtccaggggagagtcactagttgtaccctactccattaggtcccaaatgggggccccatttcacctgtatcaggactctgagcatccccagctgccccacatcttgcctctggccctcagagaggggtgtttctgtgggtactcctcttaccccagcaaataaaaggaattgtctgaccctagaggcagatgctgcactgcactactccaatgtcttccatggagcctcaggtgctccccctctcacctggcagccccttcagctgctagtgatatcacttgttggacatttttccaataaaggttcttggacaaactgga

SEQ ID NO: 10848 - DNA, 2938 bp, Homo sapiens
  source 1..2938: mol_type = unassigned DNA
ataacagagactaaagaagaaagacgcttactgaataaggtgggatccaacaagagtgtagtatggaatgcaatagcttatgaattactttttttctgagggagctcaacagaatgacacctaagaaagggaaagtctttgacacttggtacgtttgtgatttttggtcattacttgaaaattaataagtttgaaatcactactcttagaaatggaagaaagtgatgactctaatcagcctatctcagcgtgtaggcaagaaattcgaaagagaagatgacccagcaaaccaatggtaggcaaatcccagcaaactgatgtaatagagaaaaagaaacacatggccataccaaaatcatctagccccaaagctacccatcgtattggtaatacttctggaagcaaaggcagctactctgccaaagcctatgagtctattagagtatcttctgagcttcagcaaacttggacaaagagaaagcatggacaggaaatgactagtaagtctctccagacagacaccattgtagaagagaaaaaagaagtcaagttagttgaggaaaccgtggtacctgaagaaaagtcagctgatgttagagaagctgctattgaattgccagagagtgttcaggatgtagaaattccaccaaacataccttcagttcaactaaaaatggacagatctcagcagaccagccgtacaggatactggaccatgatgaacatcccccctgtagaaaaagtggacaaggaacaacagacatactttagtgaatcagaaatagtggttatttccaggccagatagttcttctacaaagtcaaaggaagatgccctgaaacataaatcgtcgggaaagatttttgctagtgaacaccctgaatttcaaccagcaacaaacagcaatgaagaaattgggcagaaaaatatcagcagaacttcatttactcaggagactaaaaaaggtcccccggtacttttagaagatgagcttagggaagaagtaactgtacctgttgtacaagaaggttctgctgttaaaaaagtggcttctgctgaaatagagcctccatcaacagaaaaattcccagctaaaatacagcctccattagttgaagaggccactgctaaagcggagcccagacctgctgaagagacccatgtccaagtacagccatcaactgaagagactcctgatgctgaggcagccactgcagttgcggagaattctgttaaagttcagcctccacctgctgaagaggcccctttagtggagtttcctgctgaaattcagcctccatcagctgaagagtctccttctgtagagcttctggctgaaattctgcctccatcagctgaagagtccccttcagaagagcctcctgctgaaattctgcctccaccagctgaaaagtctccttcagtagagcttcttggtgaaattcggtctccctcagcacaaaaggctcccattgaagtacagcctttaccagctgagggcgcccttgaagaggccccagctaaagtagagcctcccactgttgaagagacccttgctgatgttcagcctctattacctgaagaggctcctagagaagaggctcgagaacttcagctttcaacagctatggagacccctgcagaagaggctcctactgaatttcagtctccattacctaaagagaccactgcagaagaggcctctgctgaaattcagcttctagcagctacggagcctcctgcagatgaaactcctgccgaagctcggtctccactatctgaggagacttctgcagaagaggctcatgctgaagttcaatctccattagctgaagagaccactgcagaagaggcctctgctgaaattcagcttctagcagctatagaggctcctgcagatgaaactcctgctgaagctcagtctccactatctgaggagacttctgcagaagaggctcctgctgaagttcagtctccatcagctaagggagtttctatagaagaggcccctcttgagcttcagcctccatcaggtgaagagaccactgcagaagaggcctctgctgcaattcagcttctagcagctacagaggcttctgcagaagaggctcctgctgaagttcagcctccaccagctgaggaggcccccgctgaagttcagcctccaccagctgaggaggcccccgctgaagttcagcctccaccagctgaggaggcccccgctgaagttcagcctccaccagctgaggaggcccccgctgaagttcagcctccaccagctgaggaggcccccgctgaagttcagcctccaccagctgaggaggcccctgctgaagttcagtctctaccagctgaggagactcctatagaagagacccttgctgcagtacactctcccccagctgatgatgtccctgcagaagaggcctccgttgacaaacattccccaccagctgatttgcttctgactgaggagtttcctataggagaggcctctgctgaagtttcacctccaccatctgaacaaacccctgaagatgaggctctggtagagaatgtgtctacagaatttcagtcaccgcaggtggcaggaattccagcagtaaaattaggatcggttgttttggaaggtgaagcaaaatttgaagaggtttcaaaaatcaattctgtccttaaagatttgtctaataccaatgatggacaggctcccactcttgaaatagaaagtgtttttcatatagaattaaaacaacgtcctcctgaactgtagtcaggttgtacctaagctagcaatcagaagctacatggttttggaagaacatactttagaaaagggtgggcagcgggaagtagctttgtcaataaggcaaattaaaggggaccccaagacttggaatacaggttggaaaatgaacaataaaaactgtagcagcataaa

SEQ ID NO: 10849 - DNA, 2157 bp, Homo sapiens
  source 1..2157: mol_type = unassigned DNA
atggtaggcaaatcccagcaaactgatgtaatagagaaaaagaaacacatggccataccaaaatcatctagccccaaagctacccatcgtattggtaatacttctggaagcaaaggcagctactctgccaaagcctatgagtctattagagtatcttctgagcttcagcaaacttggacaaagagaaagcatggacaggaaatgactagtaagtctctccagacagacaccattgtagaagagaaaaaagaagtcaagttagttgaggaaaccgtggtacctgaagaaaagtcagctgatgttagagaagctgctattgaattgccagagagtgttcaggatgtagaaattccaccaaacataccttcagttcaactaaaaatggacagatctcagcagaccagccgtacaggatactggaccatgatgaacatcccccctgtagaaaaagtggacaaggaacaacagacatactttagtgaatcagaaatagtggttatttccaggccagatagttcttctacaaagtcaaaggaagatgccctgaaacataaatcgtcgggaaagatttttgctagtgaacaccctgaatttcaaccagcaacaaacagcaatgaagaaattgggcagaaaaatatcagcagaacttcatttactcaggagactaaaaaaggtcccccggtacttttagaagatgagcttagggaagaagtaactgtacctgttgtacaagaaggttctgctgttaaaaaagtggcttctgctgaaatagagcctccatcaacagaaaaattcccagctaaaatacagcctccattagttgaagaggccactgctaaagcggagcccagacctgctgaagagacccatgtccaagtacagccatcaactgaagagactcctgatgctgaggcagccactgcagttgcggagaattctgttaaagttcagcctccacctgctgaagaggcccctttagtggagtttcctgctgaaattcagcctccatcagctgaagagtctccttctgtagagcttctggctgaaattctgcctccatcagctgaagagtccccttcagaagagcctcctgctgaaattctgcctccaccagctgaaaagtctccttcagtagagcttcttggtgaaattcggtctccctcagcacaaaaggctcccattgaagtacagcctttaccagctgagggcgcccttgaagaggccccagctaaagtagagcctcccactgttgaagagacccttgctgatgttcagcctctattacctgaagaggctcctagagaagaggctcgagaacttcagctttcaacagctatggagacccctgcagaagaggctcctactgaatttcagtctccattacctaaagagaccactgcagaagaggcctctgctgaaattcagcttctagcagctacggagacttctgcagaagaggctcctgctgaagttcagtctccatcagcagaagaggctcctgctgaagttcagcctccaccagctgaggaggcccccgctgaagttcagcctccaccagctgaggaggcccccgctgaagttcagcctccaccagctgaggaggcccccgctgaagttcagcctccaccagctgaggaggcccccgctgaagttcagcctccaccagctgaggaggcccccgctgaagttcagcctccaccagctgaggaggcccctgctgaagttcagtctctaccagctgaggagactcctatagaagagacccttgctgcagtacactctcccccagctgatgatgtccctgcagaagaggcctccgttgacaaacattccccaccagctgatttgcttctgactgaggagtttcctataggagaggcctctgctgaagtttcacctccaccatctgaacaaacccctgaagatgaggctctggtagagaatgtgtctacagaatttcagtcaccgcaggtggcaggaattccagcagtaaaattaggatcggttgttttggaaggtgaagcaaaatttgaagaggtttcaaaaatcaattctgtccttaaagatttgtctaataccaatgatggacaggctcccactcttgaaatagaaagtgtttttcatatagaattaaaacaacgtcctcctgaactgtag

SEQ ID NO: 10850 - DNA, 2251 bp, Homo sapiens
  source 1..2251: mol_type = unassigned DNA
gttggctgccgaggctcggccggagcgtggagcccgcgccgctgccccaggaccgcgcccgcgcctttgtccgccgccgcccaccgcccgtcgcccgccgcccatggagcgcgccgcgccgtcgcgccgggtcccgcttccgctgctgctgctcggcggccttgcgctgctggcggccggagtggacgcggatgtcctcctggaggcctgctgtgcggacggacaccggatggccactcatcagaaggactgctcgctgccatatgctacggaatccaaagaatgcaggatggtgcaggagcagtgctgccacagccagctggaggagctgcactgtgccacgggcatcagcctggccaacgagcaggaccgctgtgccacgccccacggtgacaacgccagcctggaggccacatttgtgaagaggtgctgccattgctgtctgctggggagggcggcccaggcccagggccagagctgcgagtacagcctcatggttggctaccagtgtggacaggtcttccaggcatgctgtgtcaagagccaggagaccggagatttggatgtcgggggcctccaagaaacggataagatcattgaggttgaggaggaacaagaggacccatatctgaatgaccgctgccgaggaggcgggccctgcaagcagcagtgccgagacacgggtgacgaggtggtctgctcctgcttcgtgggctaccagctgctgtctgatggtgtctcctgtgaagatgtcaatgaatgcatcacgggcagccacagctgccggcttggagaatcctgcatcaacacagtgggctctttccgctgccagcgggacagcagctgcgggactggctatgagctcacagaggacaatagctgcaaagatattgacgagtgtgagagtggtattcataactgcctccccgattttatctgtcagaatactctgggatccttccgctgccgacccaagctacagtgcaagagtggctttatacaagatgctctaggcaactgtattgatatcaatgagtgtttgagtatcagtgccccgtgccctatcgggcatacatgcatcaacacagagggctcctacacgtgccagaagaacgtgcccaactgtggccgtggctaccatctcaacgaggagggaacgcgctgtgttgatgtggacgagtgcgcgccacctgctgagccctgtgggaagggacatcgctgcgtgaactctcccggcagtttccgctgcgaatgcaagacgggttactattttgacggcatcagcaggatgtgtgtcgatgtcaacgagtgccagcgctaccccgggcgcctgtgtggccacaagtgcgagaacacgctgggctcctacctctgcagctgttccgtgggcttccggctctctgtggatggcaggtcatgtgaagacatcaatgagtgcagcagcagcccctgtagccaggagtgtgccaacgtctacggctcctaccagtgttactgccggcgaggctaccagctcagcgatgtggatggagtcacctgtgaagacatcgacgagtgcgccctgcccaccgggggccacatctgctcctaccgctgcatcaacatccctggaagcttccagtgcagctgcccctcgtctggctacaggctggcccccaatggccgcaactgccaagacattgatgagtgtgtgactggcatccacaactgctccatcaacgagacctgcttcaacatccagggcggcttccgctgcctggccttcgagtgccctgagaactaccgccgctccgcagccacccgctgtgagcgcttgccttgccatgagaatcgggagtgctccaagctgcctctgagaataacctactaccacctctctttccccaccaacatccaagcgcccgcggtggttttccgcatgggcccctccagtgctgtccccggggacagcatgcagctggccatcaccggcggcaatgaggagggctttttcaccacccggaaggtgagcccccacagtggggtggtggccctcaccaagcctgtccccgagcccagggacttgctcctgaccgtcaagatggatctctctcgccacggcaccgtcagctcctttgtggccaagcttttcatctttgtgtctgcagagctctgagcactcgcttcgcgtcgcggggtctccctcctgttgctttcctaaccctgccctccggggcgttaataaagtcttagcaagcgtcccacacagtga

SEQ ID NO: 10851 - DNA, 2896 bp, Homo sapiens
  source 1..2896: mol_type = unassigned DNA
ccgaggctcggccggagcgtggagcccgcgccgctgccccaggaccgcgcccgcgcctttgtccgccgccgcccaccgcccgtcgcccgccgcccatggagcgcgccgcgccgtcgcgccgggtcccgcttccgctgctgctgctcggcggccttgcgctgctggcggccggagtggacgcggatgtcctcctggaggcctgctgtgcggacggacaccggatggccactcatcagaaggactgctcgctgccatatgctacggaatccaaagaatgcaggatggtgcaggagcagtgctgccacagccagctggaggagctgcactgtgccacgggcatcagcctggccaacgagcaggaccgctgtgccacgccccacggtgacaacgccagcctggaggccacatttgtgaagaggtgctgccattgctgtctgctggggagggcggcccaggcccagggccagagctgcgagtacagcctcatggttggctaccagtgtggacaggtcttccaggcatgctgtgtcaagagccaggagaccggagatttggatgtcgggggcctccaagaaacggataagatcattgaggttgaggaggaacaagaggacccatatctgaatgaccgctgccgaggaggcgggccctgcaagcagcagtgccgagacacgggtgacgaggtggtctgctcctgcttcgtgggctaccagctgctgtctgatggtgtctcctgtgaagatgtcaatgaatgcatcacgggcagccacagctgccggcttggagaatcctgcatcaacacagtgggctctttccgctgccagcgggacagcagctgcgggactggctatgagctcacagaggacaatagctgcaaagatattgacgagtgtgagagtggtattcataactgcctccccgattttatctgtcagaatactctgggatccttccgctgccgacccaagctacagtgcaagagtggctttatacaagatgctctaggcaactgtattgatatcaatgagtgtttgagtatcagtgccccgtgccctatcgggcatacatgcatcaacacagagggctcctacacgtgccagaagaacgtgcccaactgtggccgtggctaccatctcaacgaggagggaacgcgctgtgttgatgtggacgagtgcgcgccacctgctgagccctgtgggaagggacatcgctgcgtgaactctcccggcagtttccgctgcgaatgcaagacgggttactattttgacggcatcagcaggatgtgtgtcgatgtcaacgagtgccagcgctaccccgggcgcctgtgtggccacaagtgcgagaacacgctgggctcctacctctgcagctgttccgtgggcttccggctctctgtggatggcaggtcatgtgaagacatcaatgagtgcagcagcagcccctgtagccaggagtgtgccaacgtctacggctcctaccagtgttactgccggcgaggctaccagctcagcgatgtggatggagtcacctgtgaagacatcgacgagtgcgccctgcccaccgggggccacatctgctcctaccgctgcatcaacatccctggaagcttccagtgcagctgcccctcgtctggctacaggctggcccccaatggccgcaactgccaagacattgatgagtgtgtgactggcatccacaactgctccatcaacgagacctgcttcaacatccagggcggcttccgctgcctggccttcgagtgccctgagaactaccgccgctccgcagccacgctccagcaggagaagacagacacggtccgctgcatcaagtcctgccgccccaacgatgtcacatgcgtgttcgaccccgtgcacaccatctcccacaccgtcatctcgctgcctaccttccgcgagttcacccgccctgaagagatcatcttcctccgggccatcacgccaccgcatcctgccagccaggctaacatcatcttcgacatcacggaagggaacctgcgggactcttttgacatcatcaagcgttacatggacggcatgaccgtgggtgtcgtgcgccaggtgcggcccatcgtgggcccatttcatgccgtcctgaagctggagatgaactatgtggtcgggggcgtggtctcccaccgaaatgttgtcaacgtccacatcttcgtctctgagtactggttctgagggctggtctgccgcacagccgcaggtgcacctccaggccaaatcattgctgccagtgactgtggtctgtacttgtttataccctcagacttttttaatgttaggtatttgtagcattaggccaacatgtattaagctgagccagatgaataagtccatctgatgtattttcggtgtttaaaaaatgagcccagttgctcaactgtttggttgaaaaccttgctcattttttaatgcgaaggctaagtgtcaccccctttctctgcctctggctgggccttgctaagggccaaggaaagaaagacattttttagggggcagccagtccaaatgccaaaagaagaccagttcttgccctgattgtatgaaatttgacattttggcactttttttttttttttggccaatcagattttctatgttctaaggacatggctgctgtagaatagcacagacgtggatgataaattatccccagaagcagcatgacagaatgcctcggggagcacttggaagggaaattgcagttctgttgaaatagaggaaaatcccttggtaaagacacagcctgttaggctcgtgtgggcctccagtatgttcaccaggggaatggctgggatttctcggcactctgcatcatccatcttttcttataggtgggaaaataaacaactttgtgatcctcctga

SEQ ID NO: 10852 - DNA, 2348 bp, Homo sapiens
  source 1..2348: mol_type = unassigned DNA
cccgccgcccatggagcgcgccgcgccgtcgcgccgggtcccgcttccgctgctgctgctcggcggccttgcgctgctggcggccggagtggacgcggatgtcctcctggaggcctgctgtgcggacggacaccggatggccactcatcagaaggactgctcgctgccatatgctacggaatccaaagaatgcaggatggtgcaggagcagtgctgccacagccagctggaggagctgcactgtgccacgggcatcagcctggccaacgagcaggaccgctgtgccacgccccacggtgacaacgccagcctggaggccacatttgtgaagaggtgctgccattgctgtctgctggggagggcggcccaggcccagggccagagctgcgagtacagcctcatggttggctaccagtgtggacaggtcttccaggcatgctgtgtcaagagccaggagaccggagatttggatgtcgggggcctccaagaaacggataagatcattgaggttgaggaggaacaagaggacccatatctgaatgaccgctgccgaggaggcgggccctgcaagcagcagtgccgagacacgggtgacgaggtggtctgctcctgcttcgtgggctaccagctgctgtctgatggtgtctcctgtgaagatgtcaatgaatgcatcacgggcagccacagctgccggcttggagaatcctgcatcaacacagtgggctctttccgctgccagcgggacagcagctgcgggactggctatgagctcacagaggacaatagctgcaaagatattgacgagtgtgagagtggtattcataactgcctccccgattttatctgtcagaatactctgggatccttccgctgccgacccaagctacagtgcaagagtggctttatacaagatgctctaggcaactgtattgatatcaatgagtgtttgagtatcagtgccccgtgccctatcgggcatacatgcatcaacacagagggctcctacacgtgccagaagaacgtgcccaactgtggccgtggctaccatctcaacgaggagggaacgcgctgtgttgatgtggacgagtgcgcgccacctgctgagccctgtgggaagggacatcgctgcgtgaactctcccggcagtttccgctgcgaatgcaagacgggttactattttgacggcatcagcaggatgtgtgtcgatgtcaacgagtgccagcgctaccccgggcgcctgtgtggccacaagtgcgagaacacgctgggctcctacctctgcagctgttccgtgggcttccggctctctgtggatggcaggtcatgtgaagacatcaatgagtgcagcagcagcccctgtagccaggagtgtgccaacgtctacggctcctaccagtgttactgccggcgaggctaccagctcagcgatgtggatggagtcacctgtgaagacatcgacgagtgcgccctgcccaccgggggccacatctgctcctaccgctgcatcaacatccctggaagcttccagtgcagctgcccctcgtctggctacaggctggcccccaatggccgcaactgccaagacattgatgagtgtgtgactggcatccacaactgctccatcaacgagacctgcttcaacatccagggcggcttccgctgcctggccttcgagtgccctgagaactaccgccgctccgcagccacatgatcgtagggaactctgcatgaggccatcggtgcaggctggagaagagaaggcaagttggcaggagtggagaccacgggcatttgagccacttcctcatgtaacttaacttgtgccttcaggacctgctcaagcccgatcacgtatataccacttccatttgatgatggaatgctgctgttcatgaccaactttatggctagatgggtcagaaagcacccagttcatgataggcagttcaggtcatatggtgacttgatgacccagagtcaaacattcagtttccaccaaagcccagtaacaggccaagagctgtctctcaaaaggagagtagttatctgcagaagatggcagggccttgctccgaaagcctagagaccgccactgtgattcacctatgggggcctgccaaaggctgcagccagcatccttatctgccactgacacctcaagcaacattggatctgctgggtcatatggcccaagtggcagagcaacttgcacaacagcctggacctgtcatagagctttctcctgttctggaccccactcaaaactggcagcctttcaggtcactcgataaatgtgctggagtaacactcaaacgaggaatgtgttgcctccaaaatccaataggccc

SEQ ID NO: 10853 - DNA, 2947 bp, Homo sapiens
  source 1..2947: mol_type = unassigned DNA
ctcctcccgggcgggataattgaacggcgcggccctggcccagcgttggctgccgaggctcggccggagcgtggagcccgcgccgctgccccaggaccgcgcccgcgcctttgtccgccgccgcccaccgcccgtcgcccgccgcccatggagcgcgccgcgccgtcgcgccgggtcccgcttccgctgctgctgctcggcggccttgcgctgctggcggccggagtggacgcggatgtcctcctggaggcctgctgtgcggacggacaccggatggccactcatcagaaggactgctcgctgccatatgctacggaatccaaagaatgcaggatggtgcaggagcagtgctgccacagccagctggaggagctgcactgtgccacgggcatcagcctggccaacgagcaggaccgctgtgccacgccccacggtgacaacgccagcctggaggccacatttgtgaagaggtgctgccattgctgtctgctggggagggcggcccaggcccagggccagagctgcgagtacagcctcatggttggctaccagtgtggacaggtcttccaggcatgctgtgtcaagagccaggagaccggagatttggatgtcgggggcctccaagaaacggataagatcattgaggttgaggaggaacaagaggacccatatctgaatgaccgctgccgaggaggcgggccctgcaagcagcagtgccgagacacgggtgacgaggtggtctgctcctgcttcgtgggctaccagctgctgtctgatggtgtctcctgtgaagatgtcaatgaatgcatcacgggcagccacagctgccggcttggagaatcctgcatcaacacagtgggctctttccgctgccagcgggacagcagctgcgggactggctatgagctcacagaggacaatagctgcaaagatattgacgagtgtgagagtggtattcataactgcctccccgattttatctgtcagaatactctgggatccttccgctgccgacccaagctacagtgcaagagtggctttatacaagatgctctaggcaactgtattgatatcaatgagtgtttgagtatcagtgccccgtgccctatcgggcatacatgcatcaacacagagggctcctacacgtgccagaagaacgtgcccaactgtggccgtggctaccatctcaacgaggagggaacgcgctgtgttgatgtggacgagtgcgcgccacctgctgagccctgtgggaagggacatcgctgcgtgaactctcccggcagtttccgctgcgaatgcaagacgggttactattttgacggcatcagcaggatgtgtgtcgatgtcaacgagtgccagcgctaccccgggcgcctgtgtggccacaagtgcgagaacacgctgggctcctacctctgcagctgttccgtgggcttccggctctctgtggatggcaggtcatgtgaagacatcaatgagtgcagcagcagcccctgtagccaggagtgtgccaacgtctacggctcctaccagtgttactgccggcgaggctaccagctcagcgatgtggatggagtcacctgtgaagacatcgacgagtgcgccctgcccaccgggggccacatctgctcctaccgctgcatcaacatccctggaagcttccagtgcagctgcccctcgtctggctacaggctggcccccaatggccgcaactgccaagacattgatgagtgtgtgactggcatccacaactgctccatcaacgagacctgcttcaacatccagggcggcttccgctgcctggccttcgagtgccctgagaactaccgccgctccgcagccacgcagaaatccaagaagggaaggcagaacaccccagcgggatcaagtaaagaggactgcagggttcttccatggaagcaggggttggaggatacccaccttgatgcctatctcccatgttgcaggagattcacccgccctgaagagatcatcttcctccgggccatcacgccaccgcatcctgccagccaggctaacatcatcttcgacatcacggaagggaacctgcgggactcttttgacatcatcaagcgttacatggacggcatgaccgtgggtgtcgtgcgccaggtgcggcccatcgtgggcccatttcatgccgtcctgaagctggagatgaactatgtggtcgggggcgtggtctcccaccgaaatgttgtcaacgtccacatcttcgtctctgagtactggttctgagggctggtctgccgcacagccgcaggtgcacctccaggccaaatcattgctgccagtgactgtggtctgtacttgtttataccctcagacttttttaatgttaggtatttgtagcattaggccaacatgtattaagctgagccagatgaataagtccatctgatgtattttcggtgtttaaaaaatgagcccagttgctcaactgtttggttgaaaaccttgctcattttttaatgcgaaggctaagtgtcaccccctttctctgcctctggctgggccttgctaagggccaaggaaagaaagacattttttagggggcagccagtccaaatgccaaaagaagaccagttcttgccctgattgtatgaaatttgacattttggcactttttttttttttttggccaatcagattttctatgttctaaggacatggctgctgtagaatagcacagacgtggatgataaattatccccagaagcagcatgacagaatgcctcggggagcacttggaagggaaattgcagttctgttgaaatagaggaaaatcccttggtaaagacacagcctgttaggctcgtgtgggcctccagtatgttcaccaggggaatggctgggatttctcggcactctgcatcatccatcttttcttataggtgggaaaataaacaactttgtgatcctcctg

SEQ ID NO: 10854 - DNA, 2355 bp, Homo sapiens
  source 1..2355: mol_type = unassigned DNA
gttggctgccgaggctcggccggagcgtggagcccgcgccgctgccccaggaccgcgcccgcgcctttgtccgccgccgcccaccgcccgtcgcccgccgcccatggagcgcgccgcgccgtcgcgccgggtcccgcttccgctgctgctgctcggcggccttgcgctgctggcggccggagtggacgcggatgtcctcctggaggcctgctgtgcggacggacaccggatggccactcatcagaaggactgctcgctgccatatgctacggaatccaaagaatgcagagccgtggggttggcctcactgtgccaggacctgaatggggcgtgggcagtatggaaagtgggaagagcatcccaggccgagggaacagccagcgcaagagcccagaggagagggatggtgcaggagcagtgctgccacagccagctggaggagctgcactgtgccacgggcatcagcctggccaacgagcaggaccgctgtgccacgccccacggtgacaacgccagcctggaggccacatttgtgaagaggtgctgccattgctgtctgctggggagggcggcccaggcccagggccagagctgcgagtacagcctcatggttggctaccagtgtggacaggtcttccaggcatgctgtgtcaagagccaggagaccggagatttggatgtcgggggcctccaagaaacggataagatcattgaggttgaggaggaacaagaggacccatatctgaatgaccgctgccgaggaggcgggccctgcaagcagcagtgccgagacacgggtgacgaggtggtctgctcctgcttcgtgggctaccagctgctgtctgatggtgtctcctgtgaagatgtcaatgaatgcatcacgggcagccacagctgccggcttggagaatcctgcatcaacacagtgggctctttccgctgccagcgggacagcagctgcgggactggctatgagctcacagaggacaatagctgcaaagatattgacgagtgtgagagtggtattcataactgcctccccgattttatctgtcagaatactctgggatccttccgctgccgacccaagctacagtgcaagagtggctttatacaagatgctctaggcaactgtattgatatcaatgagtgtttgagtatcagtgccccgtgccctatcgggcatacatgcatcaacacagagggctcctacacgtgccagaagaacgtgcccaactgtggccgtggctaccatctcaacgaggagggaacgcgctgtgttgatgtggacgagtgcgcgccacctgctgagccctgtgggaagggacatcgctgcgtgaactctcccggcagtttccgctgcgaatgcaagacgggttactattttgacggcatcagcaggatgtgtgtcgatgtcaacgagtgccagcgctaccccgggcgcctgtgtggccacaagtgcgagaacacgctgggctcctacctctgcagctgttccgtgggcttccggctctctgtggatggcaggtcatgtgaagacatcaatgagtgcagcagcagcccctgtagccaggagtgtgccaacgtctacggctcctaccagtgttactgccggcgaggctaccagctcagcgatgtggatggagtcacctgtgaagacatcgacgagtgcgccctgcccaccgggggccacatctgctcctaccgctgcatcaacatccctggaagcttccagtgcagctgcccctcgtctggctacaggctggcccccaatggccgcaactgccaagacattgatgagtgtgtgactggcatccacaactgctccatcaacgagacctgcttcaacatccagggcggcttccgctgcctggccttcgagtgccctgagaactaccgccgctccgcagccacccgctgtgagcgcttgccttgccatgagaatcgggagtgctccaagctgcctctgagaataacctactaccacctctctttccccaccaacatccaagcgcccgcggtggttttccgcatgggcccctccagtgctgtccccggggacagcatgcagctggccatcaccggcggcaatgaggagggctttttcaccacccggaaggtgagcccccacagtggggtggtggccctcaccaagcctgtccccgagcccagggacttgctcctgaccgtcaagatggatctctctcgccacggcaccgtcagctcctttgtggccaagcttttcatctttgtgtctgcagagctctgagcactcgcttcgcgtcgcggggtctccctcctgttgctttcctaaccctgccctccggggcgttaataaagtcttagcaagcgtcc

SEQ ID NO: 10855 - DNA, 568 bp, Homo sapiens
  source 1..568: mol_type = unassigned DNA
atgaattcctatacaagaggctcccgcaggcccagcgccaaagctgcctcccctgcagcctcggtgacttcccgggtctctccctccggccctggtgtcccggtggacgcggatgtcctcctggaggcctgctgtgcggacggacaccggatggccactcatcagaaggactgctcgctgccatatgctacggaatccaaagaatgcaggatggtgcaggagcagtgctgccacagccagctggaggagctgcactgtgccacgggcatcagcctggccaacgagcaggaccgctgtgccacgccccacggtgacaacgccagcctggaggccacatttgtgaagaggtgctgccattgctgtctgctggggagggcggcccaggcccagggccagagctgcgagtacagcctcatggttggctaccagtgtggacaggtcttccaggcatgctgtgtcaagagccaggagaccggagatttggatgtcgggggcctccaagaaacggataagatcattgaggttgaggaggaacaagaggacccatatctgaatgaccgctgccgag

SEQ ID NO: 10856 - DNA, 572 bp, Homo sapiens
  source 1..572: mol_type = unassigned DNA
gcgctgctggcggccggaggtaggggcgtcccgggtccgccgccccagcttagggtcccgaccccctcggcctcgcgctccctgcgagtttcggaaccacggggactcggagtccgtgcgttgccctgcgcggcgcccccggactgtcagcgccgaggcctcggcgacgcccccctcccccacggccagctccggtcctcatctcctccccggcctggggacttgtttcaaaaccggattcccccacccctcaaacacaccgtcctaccccagtcctagcaaatccagccggctccgggggccgcatcccgggccctgggggttcaggggcgctagctgggctgggggacgctggctgggggttaccgagcccagggcgccttgcacttgacgctggaagcgccctcggctatctttcctcaccgcttcccgcctccacccccagtggacgcggatgtcctcctggaggcctgctgtgcggacggacaccggatggccactcatcagaaggactgctcgctgccatatgctacggaatccaaagaatgcaggatggtgcaggagcagtgctg

SEQ ID NO: 10857 - DNA, 2531 bp, Homo sapiens
  source 1..2531: mol_type = unassigned DNA
ccgtcgcccgccgcccatggagcgcgccgcgccgtcgcgccgggtcccgcttccgctgctgctgctcggcggccttgcgctgctggcggccggagtggacgcggatgtcctcctggaggcctgctgtgcggacggacaccggatggccactcatcagaaggactgctcgctgccatatgctacggaatccaaagaatgcaggatggtgcaggagcagtgctgccacagccagctggaggagctgcactgtgccacgggcatcagcctggccaacgagcaggaccgctgtgccacgccccacggtgacaacgccagcctggaggccacatttgtgaagaggtgctgccattgctgtctgctggggagggcggcccaggcccagggccagagctgcgagtacagcctcatggttggctaccagtgtggacaggtcttccaggcatgctgtgtcaagagccaggagaccggagatttggatgtcgggggcctccaagaaacggataagatcattgaggttgaggaggaacaagaggacccatatctgaatgaccgctgccgaggaggcgggccctgcaagcagcagtgccgagacacgggtgacgaggtggtctgctcctgcttcgtgggctaccagctgctgtctgatggtgtctcctgtgaagatgtcaatgaatgcatcacgggcagccacagctgccggcttggagaatcctgcatcaacacagtgggctctttccgctgccagcgggacagcagctgcgggactggctatgagctcacagaggacaatagctgcaaagatattgacgagtgtgagagtggtattcataactgcctccccgattttatctgtcagaatactctgggatccttccgctgccgacccaagctacagtgcaagagtggctttatacaagatgctctaggcaactgtattgatatcaatgagtgtttgagtatcagtgccccgtgccctatcgggcatacatgcatcaacacagagggctcctacacgtgccagaagaacgtgcccaactgtggccgtggctaccatctcaacgaggagggaacgcgctgtgttgatgtggacgagtgcgcgccacctgctgagccctgtgggaagggacatcgctgcgtgaactctcccggcagtttccgctgcgaatgcaagacgggttactattttgacggcatcagcaggatgtgtgtcgatgtcaacgagtgccagcgctaccccgggcgcctgtgtggccacaagtgcgagaacacgctgggctcctacctctgcagctgttccgtgggcttccggctctctgtggatggcaggtcatgtgaagacatcaatgagtgcagcagcagcccctgtagccaggagtgtgccaacgtctacggctcctaccagtgttactgccggcgaggctaccagctcagcgatgtggatggagtcacctgtgaagacatcgacgagtgcgccctgcccaccgggggccacatctgctcctaccgctgcatcaacatccctggaagcttccagtgcagctgcccctcgtctggctacaggctggcccccaatggccgcaactgccaagacattgatgagtgtgtgactggcatccacaactgctccatcaacgagacctgcttcaacatccagggcggcttccgctgcctggccttcgagtgccctgagaactaccgccgctccgcagccacgcagaaatccaagaagggaaggcagaacaccccagcgggatcaagtaaagaggactgcagggttcttccatggaagcaggggttggaggatacccaccttgatgcctagtgaggaagatggacctggacagacagtcagctccacaccttgcgctgagcagctgtgattgtgccacgggagcatgagcccttttccccacggcccttgccactgtctcctggccctctctctgatcatgccaggtttgcaccagcctcgagtctcccatgttgtagtacattctccaagatgcagcccaggagcctctctgaaggaccagtctggttacgatggtctgagcttccttagaaccttccatggttgtcttttcccagcagatgaagcatagcctccttggaatggcatgggaggcctggcctgatctggcctctgcccaccctttgagctgcacctgccccaccccagctcatccatgtgcttgtaccctggccccacggggaggcttgcccttccctgaatctgccttcttgtggctttagcatgtgccatgctgtccccctgcagactgccattctccttgcagacttggctcagaagtcacctcctcagtgcagttagcctgagctcccctggccccaggtgcctccatcagagcatttaccccattgtgttgtggctgttccttaacgtccccactagccaggctctttgagggcagggattgtgtctggttaatttctgtattctctgcaactttgcaatgtttggcttgaagaaggagctcagtaaacatctgaataaacatgcaggttgatgg

SEQ ID NO: 10858 - DNA, 512 bp, Homo sapiens
  source 1..512: mol_type = unassigned DNA
aaagctgcctcccctgcagcctcggtgacttcccgggtctctccctccggccctggtgtcccgggtgagcccagcacacgttgggattttggttgtttgttggcctggcccgactgtccctgtctctgagggcagagtcgggtcccatcccgggacacgcctggggttagccaccgacctgcagcctcccggccgagggtgcggggttggcgtcctgtcctcaccagacttctcacaggtccccgtttctgtggaagaggggatcttgtgtggacgcggatgtcctcctggaggcctgctgtgcggacggacaccggatggccactcatcagaaggactgctcgctgccatatgctacggaatccaaagaatgcaggatggtgcaggagcagtgctgccacagccagctggaggagctgcactgtgccacgggcatcagcctggccaacgagcaggaccgctgtgccacgccccacggtgacaacgccagcctggaggccacatttgtgaag

SEQ ID NO: 10859 - DNA, 544 bp, Homo sapiens
  source 1..544: mol_type = unassigned DNA
tgcaggatggtgcaggagcagtgctgccacagccagctggaggagctgcactgtgccacgggcatcagcctggccaacgagcaggaccgctgtgccacgccccacggtgacaacgccagcctggaggccacatttgtgaagaggtgctgccattgctgtctgctggggagggcggcccaggcccagggccagagctgcgagtacagcctcatggttggctaccagtgtggacaggtcttccaggcatgctgtgtcaagagccaggagaccggagatttggatgtcgggggcctccaagaaacgggaggcgggccctgcaagcagcagtgccgagacacgggtgacgaggtggtctgctcctgcttcgtgggctaccagctgctgtctgatggtgtctcctgtgaagatgtcaatgaatgcatcacgggcagccacagctgccggcttggagaatcctgcatcaacacagtgggctctttccgctgccagcgggacagcagctgcgggactggctatgagctcacagaggacaatagctgcaaag

SEQ ID NO: 10860 - DNA, 565 bp, Homo sapiens
  source 1..565: mol_type = unassigned DNA
tcaagacagaaggacgtgcgtgtcctggtggtgcatctgggagggccctccacccgctgagtggtgagccacctctcagcttgttctcttccctgcacagtggacgcggatgtcctcctggaggcctgctgtgcggacggacaccggatggccactcatcagaaggactgctcgctgccatatgctacggaatccaaagaatgcaggatggtgcaggagcagtgctgccacagccagctggaggagctgcactgtgccacgggcatcagcctggccaacgagcaggaccgctgtgccacgccccacggtgacaacgccagcctggaggccacatttgtgaagaggtgctgccattgctgtctgctggggagggcggcccaggcccagggccagagctgcgagtacagcctcatggttggctaccagtgtggacaggtcttccaggcatgctgtgtcaagagccaggagaccggagatttggatgtcgggggcctccaagaaacggataagatcattgaggttgaggaggaacaagaggacccatatctgaatgaccgctgccgag

SEQ ID NO: 10861 - DNA, 671 bp, Homo sapiens
  source 1..671: mol_type = unassigned DNA
ccgcgccctcctcccgggcgggataattgaacggcgcggccctggcccagcgttggctgccgaggctcggccggagcgtggagcccgcgccgctgccccaggaccgcgcccgcgcctttgtccgccgccgcccaccgcccgtcgcccgccgcccatggagcgcgccgcgccgtcgcgccgggtcccgcttccgctgctgctgctcggcggccttgcgctgctggcggccggagtggacgcggatgtcctcctggaggcctgctgtgcggacggacaccggatggccactcatcagaaggactgctcgctgccatatgctacggaatccaaagaatgcaggatggtgcaggagcagtgctgccacagccagctggaggagctgcactgtgccacgggcatcagcctggccaacgagcaggaccgctgtgccacgccccacggtgacaacgccagcctggaggccacatttgtgaagaggtgctgccattgctgtctgctggggagggcggcccaggcccagggccagagctgcgagtacagcctcatggttggctaccagtgtggacaggtcttccaggcatgctgtgtcaagagccaggagaccggagatttggatgtcgggggcctccaagaaacgggaggcgggccctgcaagcagcagtgccgagaca

SEQ ID NO: 10862 - DNA, 4127 bp, Homo sapiens
  source 1..4127: mol_type = unassigned DNA
ggacggacgccgagcgcagtgccccgcgggtcttacaggagaggggaccgtcctgggctggcctggaccatggtgctgctctgggagcctgcaggagcctggcttgctctgggcctggccctggccctgggccccagcgtggccgcagctgcccctcggcaggactgcacgggcgtggagtgcccgccgctggagaactgcattgaggaggcgctggagccgggtgcctgctgtgccacgtgtgtgcagcagggctgcgcctgcgagggctaccagtactatgactgcctacagggtggcttcgtgcgcggccgcgtgcccgccggtcagtcctattttgtggacttcgggagcactgagtgctcctgcccaccaggcggcggcaagatcagctgccagttcatgctgtgcccggagctgccgcccaactgcatcgaggctgtagtggtggctgacagctgcccacagtgcggccaggtgggctgcgtccacgcgggccacaagtacgccgctggccacactgttcacctgccgccctgccgggcctgccactgccctgacgccggtggagagctcatctgctaccagctccccggttgccacgggaacttctcagatgccgaggagggtgaccccgagcgacactacgaagacccctacagctatgaccaggaggtggccgaggtggaagcagcaacagccctggggggtgaggtccaggcgggtgcagtccaggcaggcgcagggggccccccagctgctctgggaggtgggagtcagccactgtccaccatccaggcacccccctggccagctgtcctccccaggcccacagcggctgctgccctgggtcccccagccccagtgcaggccaaagctaggagagtgaccgaggacagtgaggaggaagaagaggaggaggaggagagagaggaaatggctgtcactgagcagctggcagcaggtggccacagggggctggatgggctgcccactacagccccagctggacccagtcttcctatccaggaggagagggcagaagctggggcaagggcagaagctggggcaaggcctgaagagaacctcatcctggatgcccaagccacgtcccgcagcactgggccggagggcgtgacgcatgcaccgagcctgggcaaggctgctctcgtcccaactcaggccgtgcctggctctcccagggacccagtcaagcccagcccccacaacatcctgtccacatcactgcctgatgcagcctggatcccacccacccgagaagtgcccaggaagccgcaagttctgccccattcccacgtggaggaggacacagaccccaactctgtccattctatccccagaagtagccctgaaggctccaccaaggacctgatcgagacttgctgcgcagccggacagcagtgggccattgacaatgacgagtgcctggagatccctgagagtggcactgaggacaacgtctgcaggacagcccagaggcactgctgtgtctcctacttgcaggagaagagctgcatggccggcgtcctgggagccaaggagggtgagacctgtggggctgaggacaacgacagctgcggcatctccctgtacaagcaatgctgtgactgctgtggcctgggcctccgcgtgcgggccgagggccagtcgtgtgagtccaatcctaacctgggctatccctgcaatcatgtcatgctctcctgctgtgagggtgaagagcctctcatagtacctgaggttcgccgacctccagagcccgcagctgcaccacggagagtttcagaggcagagatggcgggccgagaggccctgtcactgggcacagaggccgagctgccgaacagcctgccgggcgatgaccaggatgagtgccttctcctcccgggagagctgtgccagcacctttgcatcaatactgtgggttcttaccactgtgcctgctttcctggcttctcactgcaggacgatggccgcacttgccgcccagagggtcaccctccacagccggaagccccacaggagcctgcactgaagtcagaattttcccaggtggcctctaacaccatcccgctgccactgccgcagcccaatacctgcaaagacaatggaccctgcaagcaggtgtgcagcactgttgggggctcagccatatgctcctgttttcccggctatgccatcatggcggatggcgtgtcctgtgaagacatcaacgagtgtgtgacggacctgcacacgtgcagccggggcgagcactgtgtgaacacactgggctccttccactgctacaaggcactcacctgtgagccaggctatgccctcaaggatggcgagtgcgaagacgtggatgagtgtgcgatgggcacgcacacctgccagccgggcttcttgtgccagaacaccaagggctccttctactgccaggccaggcagcgctgcatggatggcttcctgcaggatcctgaaggcaactgtgtggacatcaacgagtgcacgtcactgtccgagccatgtcggccaggcttcagctgcatcaacacggtgggctcctacacatgccagaggaacccgctgatctgcgcgcgcggctaccacgccagcgatgatgggaccaagtgtgtggacgtgaatgagtgtgagacaggtgtgcaccgctgcggtgagggccaagtgtgccacaacctccctggctcctaccgctgtgactgcaaagccggctttcagcgggatgcctttggccggggctgcatcgacgtgaatgagtgctgggcctcgccaggccgcctgtgccagcacacgtgtgagaacacactcggctcctaccgctgttcctgcgcctccgggttcctgctagcagcggacggcaagcgctgtgaagacgtgaatgagtgtgaggcccagcgctgcagccaggagtgtgccaacatctatggctcctaccagtgctactgccgccagggctaccagctggctgaggatgggcacacctgcacagacatcgacgagtgtgctcaaggcgccggcatcctctgcaccttccgctgtctcaacgtgccagggagctaccagtgtgcatgccctgagcagggctacaccatgacggccaacgggaggtcctgcaaggacgtggatgagtgtgcactgggtacccacaactgttccgaggctgagacctgccacaacatccagggtagcttccgctgcctgcgcttcgagtgtcctcccaactatgtccaagtctccaaaacgaagtgcgagcgcaccacgtgccatgacttcctggagtgccagaactcgccagcgcgcatcacgcactaccagctcaacttccagacgggcctcctggtgcctgcgcatatcttccgcattggccccgcgccagccttcacgggggacaccatcgccctgaacatcatcaagggcaatgaggagggctactttggcacgcgcaggctcaatgcctacacgggtgtggtctacctgcagcgggccgtgctggagccccgggactttgccctggacgtggagatgaagctctggaggcagggctccgtcaccaccttcctggccaagatgcacatcttcttcaccacctttgccctgtgaggtgccagcacgggccacctgcgggtgtggcgcagcccagggctcacactgcgtgggagggactgggtcactattgtggtttttactataactttgtaaattaacttaattttgctgacttgactcctgtggcttctggacccctcctctgccccgcaggaggaagttccacggcaggtggtgcgttcccacgcaggcaccaagtggaagcttgcacggtgggccacggccgtggcgggtgccctgtgggtgaggctgggtgatgacctgaggaccagagacacgcgaccatgttggggctcttggactcctctggatgacccgtccccaaagttgacattccatttcatgttccactgtgattaattcttttcttttttaaaaaatcattttaaagttttttgtttaactataaagtagtacatgtacattatataaaaaaaagttcaactagtatgaaagggttataaagtaacagaggaaaacgcctcttggtcccttta

SEQ ID NO: 10863 - DNA, 4318 bp, Homo sapiens
  source 1..4318: mol_type = unassigned DNA
agccaggggccgcccgggctctcgacgcgccgacggccgggcggacggacggacggacgccgagcgcagtgccccgcgggtcttacaggagaggggaccgtcctgggctggcctggaccatggtgctgctctgggagcctgcaggagcctggcttgctctgggcctggccctggccctgggccccagcgtggccgcagctgcccctcggcaggactgcacgggcgtggagtgcccgccgctggagaactgcattgaggaggcgctggagccgggtgcctgctgtgccacgtgtgtgcagcagggctgcgcctgcgagggctaccagtactatgactgcctacagggtggcttcgtgcgcggccgcgtgcccgccggtcagtcctattttgtggacttcgggagcactgagtgctcctgcccaccaggcggcggcaagatcagctgccagttcatgctgtgcccggagctgccgcccaactgcatcgaggctgtagtggtggctgacagctgcccacagtgcggccaggtgggctgcgtccacgcgggccacaagtacgccgctggccacactgttcacctgccgccctgccgggcctgccactgccctgacgccggtggagagctcatctgctaccagctccccggttgccacgggaacttctcagatgccgaggagggtgaccccgagcgacactacgaagacccctacagctatgaccaggaggtggccgaggtggaagcagcaacagccctggggggtgaggtccaggcgggtgcagtccaggcaggcgcagggggccccccagctgctctgggaggtgggagtcagccactgtccaccatccaggcacccccctggccagctgtcctccccaggcccacagcggctgctgccctgggtcccccagccccagtgcaggccaaagctaggagagtgaccgaggacagtgaggaggaagaagaggaggaggaggagagagaggaaatggctgtcactgagcagctggcagcaggtggccacagggggctggatgggctgcccactacagccccagctggacccagtcttcctatccaggaggagagggcagaagctggggcaagggcagaagctggggcaaggcctgaagagaacctcatcctggatgcccaagccacgtcccgcagcactgggccggagggcgtgacgcatgcaccgagcctgggcaaggctgctctcgtcccaactcaggccgtgcctggctctcccagggacccagtcaagcccagcccccacaacatcctgtccacatcactgcctgatgcagcctggatcccacccacccgagaagtgcccaggaagccgcaagttctgccccattcccacgtggaggaggacacagaccccaactctgtccattctatccccagaagtagccctgaaggctccaccaaggacctgatcgagacttgctgcgcagccggacagcagtgggccattgacaatgacgagtgcctggagatccctgagagtggcactgaggacaacgtctgcaggacagcccagaggcactgctgtgtctcctacttgcaggagaagagctgcatggccggcgtcctgggagccaaggagggtgagacctgtggggctgaggacaacgacagctgcggcatctccctgtacaagcaatgctgtgactgctgtggcctgggcctccgcgtgcgggccgagggccagtcgtgtgagtccaatcctaacctgggctatccctgcaatcatgtcatgctctcctgctgtgagggtgaagagcctctcatagtacctgaggttcgccgacctccagagcccgcagctgcaccacggagagtttcagaggcagagatggcgggccgagaggccctgtcactgggcacagaggccgagctgccgaacagcctgccgggcgatgaccaggatgagtgccttctcctcccgggagagctgtgccagcacctttgcatcaatactgtgggttcttaccactgtgcctgctttcctggcttctcactgcaggacgatggccgcacttgccgcccagagggtcaccctccacagccggaagccccacaggagcctgcactgaagtcagaattttcccaggtggcctctaacaccatcccgctgccactgccgcagcccaatacctgcaaagacaatggaccctgcaagcaggtgtgcagcactgttgggggctcagccatatgctcctgttttcccggctatgccatcatggcggatggcgtgtcctgtgaagaccaagacgagtgcctgatgggtgctcacgattgtagccggcgacagttctgtgtgaacaccctgggatccttctactgtgtcaaccacacagtgctctgtgccgatggctatatcctcaatgcgcacaggaagtgcgtggacatcaacgagtgtgtgacggacctgcacacgtgcagccggggcgagcactgtgtgaacacactgggctccttccactgctacaaggcactcacctgtgagccaggctatgccctcaaggatggcgagtgcgaagacgtggatgagtgtgcgatgggcacgcacacctgccagccgggcttcttgtgccagaacaccaagggctccttctactgccaggccaggcagcgctgcatggatggcttcctgcaggatcctgaaggcaactgtgtggacatcaacgagtgcacgtcactgtccgagccatgtcggccaggcttcagctgcatcaacacggtgggctcctacacatgccagaggaacccgctgatctgcgcgcgcggctaccacgccagcgatgatgggaccaagtgtgtggacgtgaatgagtgtgagacaggtgtgcaccgctgcggtgagggccaagtgtgccacaacctccctggctcctaccgctgtgactgcaaagccggctttcagcgggatgcctttggccggggctgcatcgacgtgaatgagtgctgggcctcgccaggccgcctgtgccagcacacgtgtgagaacacactcggctcctaccgctgttcctgcgcctccgggttcctgctagcagcggacggcaagcgctgtgaagacgtgaatgagtgtgaggcccagcgctgcagccaggagtgtgccaacatctatggctcctaccagtgctactgccgccagggctaccagctggctgaggatgggcacacctgcacagacatcgacgagtgtgctcaaggcgccggcatcctctgcaccttccgctgtctcaacgtgccagggagctaccagtgtgcatgccctgagcagggctacaccatgacggccaacgggaggtcctgcaaggacgtggatgagtgtgcactgggtacccacaactgttccgaggctgagacctgccacaacatccagggtagcttccgctgcctgcgcttcgagtgtcctcccaactatgtccaagtctccaaaacgaagtgcgagcgcaccacgtgccatgacttcctggagtgccagaactcgccagcgcgcatcacgcactaccagctcaacttccagacgggcctcctggtgcctgcgcatatcttccgcattggccccgcgccagccttcacgggggacaccatcgccctgaacatcatcaagggcaatgaggagggctactttggcacgcgcaggctcaatgcctacacgggtgtggtctacctgcagcgggccgtgctggagccccgggactttgccctggacgtggagatgaagctctggaggcagggctccgtcaccaccttcctggccaagatgcacatcttcttcaccacctttgccctgtgaggtgccagcacgggccacctgcgggtgtggcgcagcccagggctcacactgcgtgggagggactgggtcactattgtggtttttactataactttgtaaattaacttaattttgctgacttgactcctgtggcttctggacccctcctctgccccgcaggaggaagttccacggcaggtggtgcgttcccacgcaggcaccaagtggaagcttgcacggtgggccacggccgtggcgggtgccctgtgggtgaggctgggtgatgacctgaggaccagagacacgcgaccatgttggggctcttggactcctctggatgacccgtccccaaagttgacattccatttcatgttccactgtgattaattcttttcttttttaaaaaatcattttaaagttttttgtttaactataaagtagtacatgtacattatataaaaaaaagttcaactagtatgaaagggttataaagtaacagaggaaaacgcctcttggtcccttta

SEQ ID NO: 10864 - DNA, 584 bp, Homo sapiens
  source 1..584: mol_type = unassigned DNA
acacatacacgccccattgggagcagctgtggagatgtgaggacagtgaggtctgctattctcccagggtcttacaggagaggggaccgtcctgggctggcctggaccatggtgctgctctgggagcctgcaggagcctggcttgctctgggcctggccctggccctgggccccagcgtggccgcagctgcccctcggcaggactgcacgggcgtggagtgcccgccgctggagaactgcattgaggaggcgctggagccgggtgcctgctgtgccacgtgtgtgcagcagggctgcgcctgcgagggctaccagtactatgactgcctacagggtggcttcgtgcgcggccgcgtgcccgccggtcagtcctattttgtggacttcgggagcactgagtgctcctgcccaccaggcggcggcaagatcagctgccagttcatgctgtgcccggagctgccgcccaactgcatcgaggctgtagtggtggctgacagctgcccacagtgcggccaggtgggctgcgtccacgcgggccacaagtacgccgctggccacactgttcacctgccgccctgccgggc

SEQ ID NO: 10865 - DNA, 4193 bp, Homo sapiens
  source 1..4193: mol_type = unassigned DNA
gattcccttcatttatttcatcatggggctcatgcctgcctggcgttcagttctctacagatttgctcttgggtttattatctgcccctccacccctgagggtgtcagtgctgtgaggacgctgggaacctgtcttgctggctgataaacccctggttcctagaggggctgggtgcagaggaggcgttcctttagaaatggggcaggcttggggaccactgctgtggtaacgagtcctgctgtccctctgtcactgccctatggggctgcgctttaggctgggagtcggagaaggagctcttgcctgtgactttggggagcacgctgtctataagagtcagggtcttacaggagaggggaccgtcctgggctggcctggaccatggtgctgctctgggagcctgcaggagcctggcttgctctgggcctggccctggccctgggccccagcgtggccgcagctgcccctcggcaggactgcacgggcgtggagtgcccgccgctggagaactgcattgaggaggcgctggagccgggtgcctgctgtgccacgtgtgtgcagcagggctgcgcctgcgagggctaccagtactatgactgcctacagggtggcttcgtgcgcggccgcgtgcccgccggtcagtcctattttgtggacttcgggagcactgagtgctcctgcccaccaggcggcggcaagatcagctgccagttcatgctgtgcccggagctgccgcccaactgcatcgaggctgtagtggtggctgacagctgcccacagtgcggccaggtgggctgcgtccacgcgggccacaagtacgccgctggccacactgttcacctgccgccctgccgggcctgccactgccctgacgccggtggagagctcatctgctaccagctccccggttgccacgggaacttctcagatgccgaggagggtgaccccgagcgacactacgaagacccctacagctatgaccaggaggtggccgaggtggaagcagcaacagccctggggggtgaggtccaggcgggtgcagtccaggcaggcgcagggggccccccagctgctctgggaggtgggagtcagccactgtccaccatccaggcacccccctggccagctgtcctccccaggcccacagcggctgctgccctgggtcccccagccccagtgcaggccaaagctaggagagtgaccgaggacagtgaggaggaagaagaggaggaggaggagagagaggaaatggctgtcactgagcagctggcagcaggtggccacagggggctggatgggctgcccactacagccccagctggacccagtcttcctatccaggaggagagggcagaagctggggcaagggcagaagctggggcaaggcctgaagagaacctcatcctggatgcccaagccacgtcccgcagcactgggccggagggcgtgacgcatgcaccgagcctgggcaaggctgctctcgtcccaactcaggccgtgcctggctctcccagggacccagtcaagcccagcccccacaacatcctgtccacatcactgcctgatgcagcctggatcccacccacccgagaagtgcccaggaagccgcaagttctgccccattcccacgtggaggaggacacagaccccaactctgtccattctatccccagaagtagccctgaaggctccaccaaggacctgatcgagacttgctgcgcagccggacagcagtgggccattgacaatgacgagtgcctggagatccctgagagtggcactgaggacaacgtctgcaggacagcccagaggcactgctgtgtctcctacttgcaggagaagagctgcatggccggcgtcctgggagccaaggagggtgagacctgtggggctgaggacaacgacagctgcggcatctccctgtacaagcaatgctgtgactgctgtggcctgggcctccgcgtgcgggccgagggccagtcgtgtgagtccaatcctaacctgggctatccctgcaatcatgtcatgctctcctgctgtgagggtgaagagcctctcatagtacctgaggttcgccgacctccagagcccgcagctgcaccacggagagtttcagaggcagagatggcgggccgagaggccctgtcactgggcacagaggccgagctgccgaacagcctgccgggcgatgaccaggatgagtgccttctcctcccgggagagctgtgccagcacctttgcatcaatactgtgggttcttaccactgtgcctgctttcctggcttctcactgcaggacgatggccgcacttgccgcccagagggtcaccctccacagccggaagccccacaggagcctgcactgaagtcagaattttcccaggtggcctctaacaccatcccgctgccactgccgcagcccaatacctgcaaagacaatggaccctgcaagcaggtgtgcagcactgttgggggctcagccatatgctcctgttttcccggctatgccatcatggcggatggcgtgtcctgtgaagaccaagacgagtgcctgatgggtgctcacgattgtagccggcgacagttctgtgtgaacaccctgggatccttctactgtgtcaaccacacagtgctctgtgccgatggctatatcctcaatgcgcacaggaagtgcgtggacatcaacgagtgtgtgacggacctgcacacgtgcagccggggcgagcactgtgtgaacacactgggctccttccactgctacaaggcactcacctgtgagccaggctatgccctcaaggatggcgagtgcgaagacgtggatgagtgtgcgatgggcacgcacacctgccagccgggcttcttgtgccagaacaccaagggctccttctactgccaggccaggcagcgctgcatggatggcttcctgcaggatcctgaaggcaactgtgtggacatcaacgagtgcacgtcactgtccgagccatgtcggccaggcttcagctgcatcaacacggtgggctcctacacatgccagaggaacccgctgatctgcgcgcgcggctaccacgccagcgatgatgggaccaagtgtgtggacgtgaatgagtgtgagacaggtgtgcaccgctgcggtgagggccaagtgtgccacaacctccctggctcctaccgctgtgactgcaaagccggctttcagcgggatgcctttggccggggctgcatcgacgtgaatgagtgctgggcctcgccaggccgcctgtgccagcacacgtgtgagaacacactcggctcctaccgctgttcctgcgcctccgggttcctgctagcagcggacggcaagcgctgtgaagacgtgaatgagtgtgaggcccagcgctgcagccaggagtgtgccaacatctatggctcctaccagtgctactgccgccagggctaccagctggctgaggatgggcacacctgcacagacatcgacgagtgtgctcaaggcgccggcatcctctgcaccttccgctgtctcaacgtgccagggagctaccagtgtgcatgccctgagcagggctacaccatgacggccaacgggaggtcctgcaaggacgtggatgagtgtgcactgggtacccacaactgttccgaggctgagacctgccacaacatccagggtagcttccgctgcctgcgcttcgagtgtcctcccaactatgtccaagtctccaaaacgaagtgcgagcgcaccacgtgccatgacttcctggagtgccagaactcgccagcgcgcatcacgcactaccagctcaacttccagacgggcctcctggtgcctgcgcatatcttccgcattggccccgcgccagccttcacgggggacaccatcgccctgaacatcatcaagggcaatgaggagggctactttggcacgcgcaggctcaatgcctacacgggtgtggtctacctgcagcgggccgtgctggagccccgggactttgccctggacgtggagatgaagctctggaggcagggctccgtcaccaccttcctggccaagatgcacatcttcttcaccacctttgccctgtgaggtgccagcacgggccacctgcgggtgtggcgcagcccagggctcacactgcgtgggagggactgggtcactattgtggtttttactataactttgtaaattaacttaattttgc

SEQ ID NO: 10866 - DNA, 3873 bp, Homo sapiens
  source 1..3873: mol_type = unassigned DNA
agacaccgagaccaagagcttggccggggctgtggggcgaagcttcctgggcccttggtggggatgagctgggggggcctctggggaggggagttaatgatcctgggcacgaggccggtggccactgggacatagtcaccgagggtgatggagacttcccttagcctggagagtggccatcatgggtcttacaggagaggggaccgtcctgggctggcctggaccatggtgctgctctgggagcctgcaggagcctggcttgctctgggcctggccctggccctgggccccagcgtggccgcagctgcccctcggcaggactgcacgggcgtggagtgcccgccgctggagaactgcattgaggaggcgctggagccgggtgcctgctgtgccacgtgtgtgcagcagggctgcgcctgcgagggctaccagtactatgactgcctacagggtggcttcgtgcgcggccgcgtgcccgccggtcagtcctattttgtggacttcgggagcactgagtgctcctgcccaccaggcggcggcaagatcagctgccagttcatgctgtgcccggagctgccgcccaactgcatcgaggctgtagtggtggctgacagctgcccacagtgcggccaggtgggctgcgtccacgcgggccacaagtacgccgctggccacactgttcacctgccgccctgccgggcctgccactgccctgacgccggtggagagctcatctgctaccagctccccggttgccacgggaacttctcagatgccgaggagggtgaccccgagcgacactacgaagacccctacagctatgaccaggaggtggccgaggtggaagcagcaacagccctggggggtgaggtccaggcgggtgcagtccaggcaggcgcagggggccccccagctgctctgggaggtgggagtcagccactgtccaccatccaggcacccccctggccagctgtcctccccaggcccacagcggctgctgccctgggtcccccagccccagtgcaggccaaagctaggagagtgaccgaggacagtgaggaggaagaagaggaggaggaggagagagaggaaatggctgtcactgagcagctggcagcaggtggccacagggggctggatgggctgcccactacagccccagctggacccagtcttcctatccaggaggagagggcagaagctggggcaagggcagaagctggggcaaggcctgaagagaacctcatcctggatgcccaagccacgtcccgcagcactgggccggagggcgtgacgcatgcaccgagcctgggcaaggctgctctcgtcccaactcaggccgtgcctggctctcccagggacccagtcaagcccagcccccacaacatcctgtccacatcactgcctgatgcagcctggatcccacccacccgagaagtgcccaggaagccgcaagttctgccccattcccacgtggaggaggacacagaccccaactctgtccattctatccccagaagtagccctgaaggctccaccaaggacctgatcgagacttgctgcgcagccggacagcagtgggccattgacaatgacgagtgcctggagatccctgagagtggcactgaggacaacgtctgcaggacagcccagaggcactgctgtgtctcctacttgcaggagaagagctgcatggccggcgtcctgggagccaaggagggtgagacctgtggggctgaggacaacgacagctgcggcatctccctgtacaagcaatgctgtgactgctgtggcctgggcctccgcgtgcgggccgagggccagtcgtgtgagtccaatcctaacctgggctatccctgcaatcatgtcatgctctcctgctgtgagggtgaagagcctctcatagtacctgaggttcgccgacctccagagcccgcagctgcaccacggagagtttcagaggcagagatggcgggccgagaggccctgtcactgggcacagaggccgagctgccgaacagcctgccgggcgatgaccaggatgagtgccttctcctcccgggagagctgtgccagcacctttgcatcaatactgtgggttcttaccactgtgcctgctttcctggcttctcactgcaggacgatggccgcacttgccgcccagagggtcaccctccacagccggaagccccacaggagcctgcactgaagtcagaattttcccaggtggcctctaacaccatcccgctgccactgccgcagcccaatacctgcaaagacaatggaccctgcaagcaggtgtgcagcactgttgggggctcagccatatgctcctgttttcccggctatgccatcatggcggatggcgtgtcctgtgaagacatcaacgagtgtgtgacggacctgcacacgtgcagccggggcgagcactgtgtgaacacactgggctccttccactgctacaaggcactcacctgtgagccaggctatgccctcaaggatggcgagtgcgaagacgtggatgagtgtgcgatgggcacgcacacctgccagccgggcttcttgtgccagaacaccaagggctccttctactgccaggccaggcagcgctgcatggatggcttcctgcaggatcctgaaggcaactgtgtggacatcaacgagtgcacgtcactgtccgagccatgtcggccaggcttcagctgcatcaacacggtgggctcctacacatgccagaggaacccgctgatctgcgcgcgcggctaccacgccagcgatgatgggaccaagtgtgtggacgtgaatgagtgtgagacaggtgtgcaccgctgcggtgagggccaagtgtgccacaacctccctggctcctaccgctgtgactgcaaagccggctttcagcgggatgcctttggccggggctgcatcgacgtgaatgagtgctgggcctcgccaggccgcctgtgccagcacacgtgtgagaacacactcggctcctaccgctgttcctgcgcctccgggttcctgctagcagcggacggcaagcgctgtgaagacgtgaatgagtgtgaggcccagcgctgcagccaggagtgtgccaacatctatggctcctaccagtgctactgccgccagggctaccagctggctgaggatgggcacacctgcacagacatcgacgagtgtgctcaaggcgccggcatcctctgcaccttccgctgtctcaacgtgccagggagctaccagtgtgcatgccctgagcagggctacaccatgacggccaacgggaggtcctgcaaggacgtggatgagtgtgcactgggtacccacaactgttccgaggctgagacctgccacaacatccagggtagcttccgctgcctgcgcttcgagtgtcctcccaactatgtccaagtctccaaaacgaagtgcgagcgcaccacgtgccatgacttcctggagtgccagaactcgccagcgcgcatcacgcactaccagctcaacttccagacgggcctcctggtgcctgcgcatatcttccgcattggccccgcgccagccttcacgggggacaccatcgccctgaacatcatcaagggcaatgaggagggctactttggcacgcgcaggctcaatgcctacacgggtgtggtctacctgcagcgggccgtgctggagccccgggactttgccctggacgtggagatgaagctctggaggcagggctccgtcaccaccttcctggccaagatgcacatcttcttcaccacctttgccctgtgaggtgccagcacgggccacctgcgggtgtggcgcagcccagggctcacactgcgtgggagggactgggtcactattgtggtttttactataact

SEQ ID NO: 10867 - DNA, 2123 bp, Homo sapiens
  source 1..2123: mol_type = unassigned DNA
gccacgcagcgcgggcgtgcacgcccctccccgccgggccgcgctgccagccccgccccgcccctgggtgggaaggtcaaggggcccgggccctcccagcccccgcacccctgcgcgcgcccgcccctcgccttctgcccgggcgctcgcagccgagcgcggccggggaagggctctcctcccagcgccgagcactgggccctggcagacgccccaagattgttgtgaggagtctagccagttggtgagcgctgtaatctgaaccagctgtgtccagactgaggccccatttgcattgtttaacatacttagaaaatgaagtgttcatttttaacattcctcctccaattggtttaatgctgaattactgaagagggctaagcaaaaccaggtgcttgcgctgagggctctgcagtggctgggaggaccccggcgctctccccgtgtcctctccacgactcgctcggcccctctggaataaaacacccgcgagccccgagggcccagaggaggccgacgtgcccgagctcctccgggggtcccgcccgcgagctttcttctcgccttcgcatctcctcctcgcgcgtcttggacatgccaggaataaaaaggatactcactgttaccattctggctctctgtcttccaagccctgggaatgcacaggcacagtgcacgaatggctttgacctggatcgccagtcaggacagtgtttagatattgatgaatgccgaaccatccccgaggcctgccgaggagacatgatgtgtgttaaccaaaatggcgggtatttatgcattccccggacaaaccctgtgtatcgagggccctactcgaacccctactcgaccccctactcaggtccgtacccagcagctgccccaccactctcagctccaaactatcccacgatctccaggcctcttatatgccgctttggataccagatggatgaaagcaaccaatgtgtggatgtggacgagtgtgcaacagattcccaccagtgcaaccccacccagatctgcatcaatactgaaggcgggtacacctgctcctgcaccgacggatattggcttctggaaggccagtgcttagacattgatgaatgtcgctatggttactgccagcagctctgtgcgaatgttcctggatcctattcttgtacatgcaaccctggttttaccctcaatgaggatggaaggtcttgccaagatgtgaacgagtgtgccaccgagaacccctgcgtgcaaacctgcgtcaacacctacggctctttcatctgccgctgtgacccaggatatgaacttgaggaagatggcgttcattgcagtgatatggacgagtgcagcttctctgagttcctctgccaacatgagtgtgtgaaccagcccggcacatacttctgctcctgccctccaggctacatcctgctggatgacaaccgaagctgccaagacatcaacgaatgtgagcacaggaaccacacgtgcaacctgcagcagacgtgctacaatttacaagggggcttcaaatgcattgaccccatccgctgtgaggagccttatctgaggatcagtgataaccgctgtatgtgtcctgctgagaaccctggctgcagagaccagccctttaccatcttgtaccgggacatggacgtggtgtcaggacgctccgttcccgctgacatcttccaaatgcaagccacgacccgctaccctggggcctattacattttccagatcaaatctgggaatgagggcagagaattttacatgcggcaaacgggccccatcagtgccaccctggtgatgacacgccccatcaaagggccccgggaaatccagctggacttggaaatgatcactgtcaacactgtcatcaacttcagaggcagctccgtgatccgactgcggatatatgtgtcgcagtacccattctgagcctcgggctggagcctccgacgctgcctctcattggcaccaagggacaggagaagagaggaaataacagagagaatgagagcgacacagacgttaggcatttcctgctgaacgtttccccgaagagtcagccccgacttcctgactctcacctgtactattgcagacctgtcaccctgcag

SEQ ID NO: 10868 - DNA, 547 bp, Homo sapiens
  source 1..547: mol_type = unassigned DNA
ccttcttcgggaagatcgcgactctcccgtcgctcgccccaagcctctgcttcagggctaagcaaaaccaggtgcttgcgctgagggctctgcagtggctgggaggaccccggcgctctccccgtgtcctctccacgactcgctcggcccctctggaataaaacacccgcgagccccgagggcccagaggaggccgacgtgcccgagctcctccgggggtcccgcccgcgagctttcttctcgccttcgcatctcctcctcgcgcgtcttggacatgccaggaataaaaaggatactcactgttaccattctggctctctgtcttccaagccctgggaatgcacaggcacagtgcacgaatggctttgacctggatcgccagtcaggacagtgtttagatattgatgaatgccgaaccatccccgaggcctgccgaggagacatgatgtgtgttaaccaaaatggcgggtatttatgcattccccggacaaaccctgtgtatcgagggccctactcgaacccctactcgaccccctactcaggtccg

SEQ ID NO: 10869 - DNA, 2299 bp, Homo sapiens
  source 1..2299: mol_type = unassigned DNA
cttagcccaggggccggcgcctccccgcctcgcgcggactgtctcgtgcgggcagctgcgggcgcacctggaccctcgcaaggcccgggcggcgccgatccccgcgggacgcgctgcgctcggggcctcccgcctccccccctgccccagccgccccccggccgcgcggcgccccgcaccctgcagggacggctgccgcatcgctgggacaaactcggcagcggaggcaaagttatttcccctcccaggcagcgggattccgactggcaagatggtgcccagctctccgcgcgcgctcttccttctgctcctgatcctcgcctgccccgagccgcgggcttcccagaactgtctcagcaaacagcagctcctctcggccatccgccagctgcagcagctgctgaagggccaggagacacgcttcgccgagggcatccgccacatgaagagccggctggccgcgctgcagaactctgtgggcagggtgggcccagatgcccttccagtttcctgcccggctctgaacacccccgcagacggcagaaagtttggaagcaagtacttagtggatcacgaagtccattttacctgcaaccctgggttccggctggtcgggcccagcagcgtggtgtgtcttcccaatggcacctggacaggggagcagccccactgtagaggtatcagtgaatgctccagccagccttgtcaaaatggtggtacatgtgtagaaggagtcaaccagtacagatgcatttgtcctccaggaaggactgggaaccgctgtcagcatcaggcccagactgccgcccccgagggcagcgtggccggcgactccgccttcagccgcgcgccgcgctgtgcgcaggtggagcgggctcagcactgcagctgcgaggccggattccacctgagcggcgccgccggcgacagcgtctgccaggacgtgaacgagtgtgagctctacgggcaggaggggcgcccccggctctgcatgcacgcctgcgtgaacaccccgggctcttaccgttgcacctgccccggtggataccgaactctggctgacgggaagagctgtgaggatgtggatgaatgtgtgggcctgcagccggtgtgcccccaggggaccacatgcatcaacaccggtggaagcttccagtgtgtcagccctgagtgccccgagggcagcggcaatgtgagctacgtgaagacgtctccattccagtgtgagcggaacccctgccccatggacagcaggccctgccgccatctgcccaagaccatctccttccattacctctctctgccttccaacctgaagacgcccatcacgctcttccgcatggccacagcctctgcccccggccgagctgggcccaacagcctgcggtttgggatcgtgggtgggaacagccgcggccactttgtgatgcagcgttcagaccggcagactggggatctgatccttgtgcagaacctggaggggcctcagacgctggaggtggacgtcgacatgtcggaatacctggaccgctccttccaggccaaccacgtgtccaaggtcaccatctttgtatccccctatgacttctgagggtacacaggggcactggggtgtggagagctgacctcatttctcttccccgaaggctcagcttcgggcaccgactgcgtggagcctcccgcctgttcccgccctctcaccagtgcacccaggcttctagggcagcgttgcacggcgccccatggaatagcacggaagagcagccacaaaactcaactgctgccatcactctttttttttttctgctttgaggcccttcccttagattatgcactaactttcttaaaactttttcatccaggggatgggtggctttccaaaatgctgtgcaaatggccttgtgagtttgaactagctggggagagaaaaggtggcaatgtgtgtcaggtgactatcagcccttctgcctttttgtagccaggcttgctatgaatgaaacggttctagtcgtgcggggggccctagtcatgcctctgcgcatgtggcataggaagtggagtctcctcccatgacccagcacgttgttcttatctgccttttcctctgtgacatgcctgcctgcctgccttctcatcagagagtcacaggagggccttaaaccccacgcagatccttctagaccaaggacccattgttaaaagcatggattctgcctgagttacttcccttttgagaaatcatatctcaaatacataacctggtaatataactgaaaaaataaaagtgattgctccttcc

SEQ ID NO: 10870 - DNA, 1394 bp, Homo sapiens
  source 1..1394: mol_type = unassigned DNA
catcgctgggacaaactcggcagcggaggcaaagttatttcccctcccaggcagcgggattccgactggcaagatggtgcccagctctccgcgcgcgctcttccttctgctcctgatcctcgcctgccccgagccgcgggcttcccagaactgtctcagcaaacagcagctcctctcggccatccgccagctgcagcagctgctgaagggccaggagacacgcttcgccgagggcatccgccacatgaagagccggctggccgcgctgcagaactctgtgggcagggtgggcccagatgcccttccagtttcctgcccggctctgaacacccccgcagacggcagaaagtttggaagcaagtacttagtggatcacgaagtccattttacctgcaaccctgggttccggctggtcgggcccagcagcgtggtgtgtcttcccaatggcacctggacaggggagcagccccactgtagaggtatcagtgaatgctccagccagccttgtcaaaatggtggtacatgtgtagaaggagtcaaccagtacagatgcatttgtcctccaggaaggactgggaaccgctgtcagcatcaggcccagactgacgtgaacgagtgtgagctctacgggcaggaggggcgcccccggctctgcatgcacgcctgcgtgaacaccccgggctcttaccgttgcacctgccccggtggataccgaactctggctgacgggaagagctgtgaggatgtggatgaatgtgtgggcctgcagccggtgtgcccccaggggaccacatgcatcaacaccggtggaagcttccagtgtgtcagccctgagtgccccgagggcagcggcaatgtgagctacgtgaagacgtctccattccagtgtgagcggaacccctgccccatggacagcaggccctgccgccatctgcccaagaccatctccttccattacctctctctgccttccaacctgaagacgcccatcacgctcttccgcatggccacagcctctgcccccggccgagctgggcccaacagcctgcggtttgggatcgtgggtgggaacagccgcggccactttgtgatgcagcgttcagaccggcagactggggatctgatccttgtgcagaacctggaggggcctcagacgctggaggtggacgtcgacatgtcggaatacctggaccgctccttccaggccaaccacgtgtccaaggtcaccatctttgtatccccctatgacttctgagggtacacaggggcactggggtgtggagagctgacctcatttctcttccccgaaggctcagcttcgggcaccgactgcgtggagcctcccgcctgttcccgccctctcaccagtgcacccaggcttctagggcagcgtt

SEQ ID NO: 10871 - DNA, 1057 bp, Homo sapiens
  source 1..1057: mol_type = unassigned DNA
accagaagagatggagctggacagagctgtgggggtcctgggcgctgccaccctgctgctctctttcctgggcatggcctgggctctccaggcggcagacacctgtccagaggtgaagatggtgggcctggagggctctgacaagctcaccattctccgaggctgtccggggctgcctggggcccctgggcccaagggagaggcaggcaccaatggaaagagaggagaacgtggcccccctggacctcctgggaaggcaggaccacctgggcccaacggagcacctggggagccccagccgtgcctgacaggcccgcgtacctgcaaggacctgctagaccgagggcacttcctgagcggctggcacaccatctacctgcccgactgccggcccctgactgtgctctgtgacatggacacggacggagggggctggaccgttttccagcggagggtggatggctctgtggacttctaccgggactgggccacgtacaagcagggcttcggcagtcggctgggggagttctggctggggaatgacaacatccacgccctgaccgcccagggaaccagcgagctccgtgtagacctggtggactttgaggacaactaccagtttgctaagtacagatcattcaaggtggccgacgaggcggagaagtacaatctggtcctgggggccttcgtggagggcagtgcgggagattccctgacgttccacaacaaccagtccttctccaccaaagaccaggacaatgatcttaacaccggaaattgtgctgtgatgtttcagggagcttggtggtacaaaaactgccatgtgtcaaacctgaatggtcgctacctcagggggactcatggcagctttgcaaatggcatcaactggaagtcggggaaaggatacaattatagctacaaggtgtcagagatgaaggtgcgacctgcctagcccaggccggcctcagggtcaggacgcctccacacatagttggttggggggtagggttgggagcttggccctacggtttgtaaaagaaacacatgtcgtgattct

SEQ ID NO: 10872 - DNA, 1505 bp, Homo sapiens
  source 1..1505: mol_type = unassigned DNA
aaagaccagaagagatggagctggacagagctgtgggggtcctgggcgctgccaccctgctgctctctttcctgggcatggcctgggctctccaggcggcagacacctgtccaggagaacgtggcccccctggacctcctgggaaggcaggaccacctgggcccaacggagcacctggggagccccagccgtgcctgacaggcccgcgtacctgcaaggacctgctagaccgagggcacttcctgagcggctggcacaccatctacctgcccgactgccggcccctgactgtgctctgtgacatggacacggacggagggggctggaccgttttccagcggagggtggatggctctgtggacttctaccgggactgggccacgtacaagcagggcttcggcagtcggctgggggagttctggctggggaatgacaacatccacgccctgaccgcccagggaaccagcgagctccgtgtagacctggtggactttgaggacaactaccagtttgctaagtacagatcattcaaggtggccgacgaggcggagaagtacaatctggtcctgggggccttcgtggagggcagtgcgggagattccctgacgttccacaacaaccagtccttctccaccaaagaccaggacaatgatcttaacaccggaaattgtgctgtgatgtttcagggagcttggtggtacaaaaactgccatgtgtcaaacctgaatggtcgctacctcagggggactcatggcagctttgcaaatggcatcaactggaagtcggggaaaggatacaattatagctacaaggtgtcagagatgaaggtgcgacctgcctagcccaggccggcctcagggtcaggacgcctccacacatagttggttggggggtagggttgggagcttggccctacggtttgtaaaagaaacacatgtcgtgattctaaattgggtttgtcttgctgtgcggaagaggttcaaatccagctctgtttccgcaatcaaccctttcagatttgtgacattaactcacctcaaacctctgtctttccttgacaatgagtaagaatgtgttcctgaccatgccagcaggaaccttccttaaggacaaatacaagactttgaagctgcgatgggctcagagtgcagccctgctcaggtccctgggcaggctaaacgccttcctggggctcgaccatctgggcttctctgtgagctggatggcagggaagtcagaaggcacattggagaggaagtttctcttgcactcagagatgccgttgcctgtccaaggcccccagcctcgtagccgcagctctgctcactctcccccgtcacccaggcttcctgccgcctgctgtcctgggtattcgtgggatctgctcgctacttcctcacaagccgaagcaagagtggcagtgtgcctgtgactccctcatcaaaacggagagagtggttacatgaggcaggtgtgagggacccgagcactcctgaggagggaag

SEQ ID NO: 10873 - DNA, 1240 bp, Homo sapiens
  source 1..1240: mol_type = unassigned DNA
ggagttgagaaactgtggcacaaggcgagagctggtttcctctgccctgttagagctgggggactcttcagagtcaaaggccagagagcatggagctgagtggagccaccatggcccgggggctcgctgtcctgctagtcttgttcctgcatatcaagaacctgcctgcccaggctgcggacacatgtccagaggtgaaggtggtgggcctggagggctctgacaagctcaccattctccgaggctgcccggggctgcccggggccccagggccaaagggagaggcaggtgtcattggagagagaggagaacgcggtctccctggagcccctggaaaggcaggaccagtggggcccaaaggagacgctgggcagtctcagtcgtgtgcgacaggcccacgcaactgcaaggacctgctagaccgggggtatttcctgagcggctggcacaccatctacctgcccgactgccggcccctgactgtgctctgtgacatggacacggacggagggggctggaccgttttccagcggaggatggatggctctgtggacttctatcgggactgggccgcatacaagcagggcttcggcagtcagctgggggagttctggctggggaatgacaacatccacgccctgactgcccagggaagcagcgagctccgtgtagacctggtggactttgagggcaaccaccagtttgctaagtacaaatcattcaaggtggctgacgaggcagagaagtacaagctggtactgggagcctttgtcgggggcagtgcgggtaattctctaacgggccacaacaacaacttcttctccaccaaagaccaagacaatgatgtgagttcttcgaattgtgctgagaagttccaaggagcctggtggtacgccgactgtcatgcttcaaacctcaatggtctctacctcatgggaccccatgagagctatgccaatggtatcaactggagtgcggcgaaggggtacaaatatagctacaaggtgtcagagatgaaggtgcggcccgcctagacgggccaggacccctccacatgcacctgctagtggggaggccacacccacaagcgctgcgtcgtggaagtcaccccatttccccagccagacacactcccatgacgcccacagctgcccctttgcccccagctcagtcaagccgccacatgcccacaacctcaccagagggagaattatgtttctaaatatgtttactttgggac

SEQ ID NO: 10874 - DNA, 1286 bp, Homo sapiens
  source 1..1286: mol_type = unassigned DNA
cagggagttgagaaactgtggcacaaggcgagagctggtttcctctgccctgttagagctgggggactcttcagagtcaaaggccagagagcatggagctgagtggagccaccatggcccgggggctcgctgtcctgctagtcttgttcctgcatatcaagaacctgcctgcccaggctgcggacacatgtccagaggtgaaggtggtgggcctggagggctctgacaagctcaccattctccgaggctgcccggggctgcccggggccccagggccaaagggagaggcaggtgtcattggagagagaggagaacgcggtctccctggagcccctggaaaggcaggaccagtggggcccaaaggagaccgaggagagaaggggatgcgtggagagaaaggagacgctgggcagtctcagtcgtgtgcgacaggcccacgcaactgcaaggacctgctagaccgggggtatttcctgagcggctggcacaccatctacctgcccgactgccggcccctgactgtgctctgtgacatggacacggacggagggggctggaccgttttccagcggaggatggatggctctgtggacttctatcgggactgggccgcatacaagcagggcttcggcagtcagctgggggagttctggctggggaatgacaacatccacgccctgactgcccagggaagcagcgagctccgtgtagacctggtggactttgagggcaaccaccagtttgctaagtacaaatcattcaaggtggctgacgaggcagagaagtacaagctggtactgggagcctttgtcgggggcagtgcgggtaattctctaacgggccacaacaacaacttcttctccaccaaagaccaagacaatgatgtgagttcttcgaattgtgctgagaagttccaaggagcctggtggtacgccgactgtcatgcttcaaacctcaatggtctctacctcatgggaccccatgagagctatgccaatggtatcaactggagtgcggcgaaggggtacaaatatagctacaaggtgtcagagatgaaggtgcggcccgcctagacgggccaggacccctccacatgcacctgctagtggggaggccacacccacaagcgctgcgtcgtggaagtcaccccatttccccagccagacacactcccatgacgcccacagctgcccctttgcccccagctcagtcaagccgccacatgcccacaacctcaccagagggagaattatgtttctaaatatgtttactttgggacagaaaag

SEQ ID NO: 10875 - DNA, 4369 bp, Homo sapiens
  source 1..4369: mol_type = unassigned DNA
gagagcatggagctgagtggagccaccatggcccgggggctcgctgtcctgctagtcttgttcctgcatatcaagaacctgcctgcccaggctgcggacacatgtccagaggtgaaggtggtgggcctggagggctctgacaagctcaccattctccgaggctgcccggggctgcccggggccccagggccaaagggagaggcaggtgtcattggagagagaggagaacgcggtctccctggagcccctggaaaggcaggaccagtggggcccaaaggagaccgaggagagaaggggatgcgtggagagaaaggagacgctgggcagtctcagtcgtgtgcgacaggcccacgcaactgcaaggacctgctagaccgggggtatttcctgagcggctggcacaccatctacctgcccgactgccggcccctgactgtgctctgtgacatggacacggacggagggggctggaccgttttccagcggaggatggatggctctgtggacttctatcgggactgggccgcatacaagcagggcttcggcagccagacacactcccatgacgcccacagctgcccctttgcccccagctcagtcaagccgccacatgcccacaacctcaccagagggagaattatgtttctaaatatgtttactttgggacagaaaagttttaccagtttcaatgtgtgtttcttgaacaccagtggttttgatcactttcctgtgtctgttgcacggcaggtctttccctggaatttggtaagtcgggaagagtcaggacccttatttagcagatggcactaccgatgttcagggaggttgagtgacttttgcgaggattttccacctccagtaattgacacagggcgatcctcacctccacccccaagcctcccccatccccccatgcctcactcacaacacttcacacttcttgaaaaaggtcactttggggtccagaaaacacttactaaaaagggggaaagtttagtaggaacttttctgcttcccaccacggcagagttcatgctttgggctggctggctgctgggaagagataaacacttagcactcactaagtgagcgcctggtcagccacctgcacagagaagattccgaagaggccttcctcccacacacagacctcagctagaggggaccgcggacctcagtgggaaaagctgcacaaggcttctaggagatgatggagaaggggcttctccagctcccaggccaggggagatttctcaaccacgacctaagaagcatcaaagggaatgtggcaagtgtgactccattcaaatcaagagctcccacttaccgaaggacactaagggaaccaaaggaaggccagaggggcagaatcaacgtgcggcacacaaatctttagttttctactattgccgcaaccagtcaccacaaatggagtggcttgaaacaacaagaactcgccacctcctggctcagtagatctggagtccctgggccttactgggccagcaggcaggactcagcagtggtggctccttccagggttctaggggagaacctgcttccttgccttttccagccccaggggtcactggcattcattggcccggactccttcccccaaccccaaagccagcagcaccacatctctctgacccttcatccgttgtcccctctccccccaagccccatgggacagggtctccactcctgagactcatgggattagactaggcctacctggatgatctgggatcctctcccatgtccaggtctctatccctaaccacatcagcaaagtctcttttgccatggaaggtatttgcaggctctgactttgtgtgtattagggcaggacatttttggcggggcagtggtgggggcagggaattattctgcctaccatgccttatacaaaaataaataaatcacaggcttatacctgaaagaattcctgcaaataataaaagaattagagcagctcagttaaataaaaaaaggtatgagatgtgaacagacacttcacagaagatgacatgcaggggagcaaggtatttatcaaaaagtgctccacttttcacttaccagagaaatgcaaatcagcacccaaaggagtcactgcggcaccctcatctgagcctcagaagttagaaagatggatagcaccagtgtcaaaggtgactgtgggagggagatttgcatacactgctagtaacaatgcgaattgatggaaccaacctggaaaatggcttggcatcaactgttggagaagaagacacacagtcctctaacctgccagtcccacatcagggcctggatatggccgtcatgtgtaccagggagcatggccaggaatctttacagccaaatactcaccatagcaccaaactggaatcagccgacatacccatcaggaagagaatggatgttaaaaaatgcaaggatagccattgggtagaacgccatacagccatgacaattacacagtgacacctacacacaaggagcatgagtctcacaaacatggcagcaaaaggagcctgttcaagagggtatgtgctatggattccattgtagataaagtttttcaaaagcaaaagtagccaatggtattttggatgcatatttaggtggtaaatgtatacaggaaaaataagaaagtgattgtatttgagggtgggaccacatggtgactgggaagggacagggacaagcctctggggttctggcaatgctctgtttcttgacccaggtggtgattgtaaggatgtttgttaactagtgatgaaaataattaagctgtacttttgctttatacacttttgagtacatgttatgttccacaatttaaaaactacttataaagaaactgcacatgcttggatccaggaacatgagctacaggcacatcctccactgatgcccagtgttcttgactcaatacctgtaaggagaggtccttgtagcccattgggggctgaccagaccctactacgcccctgccacaatctctagtccatcacaaaatccactattgggatagtactttcgtccctcagtaggtaagcatttttacaacctaggaagacttagctttaagtctagaaatgattagtataaatataaaatataaatatgattaatataaatataaaatagccatagaaatatgccttttagtttgttttttgagacagagttttactctgccacccaggctggagtgcagtggcgtgatctcagctcactgcaatctccacctcccaggttcaagagattctcatgcttcagcctcccaagtagctgggatcacaggcacacacaaccatgcccagcaatttttttgtatttttagtagagatggggtttcgccgtgttggccaggctggtcttgaactcccgacctcaagtgatccacccgcctctgcctcccaaattgctgagattacaggcgtgagacactgtgcctggccaaaatatgccttttgtattaaggaatctggacaggtttgatttttcacagtcttgtaatgtttaaataatttggcctattatgaagaatctcacaaatccaatataaaatgtggaactaactaatcaaaatcatcttgtaatattacatggaaatcttagtgcgtttatacacggtattggcatatttaagagactttgagctcattgcatttctaagttaaattattagatttcttaagatttaagttaaattattagatttttaaagattaattagtgctaaggagggttttctcattagacagctgaaatgccgcaggagaaatttgagtgtattccacttcttattgcaattttaaatgtttgaagttatttaaagaactaaatttatggtatccaaaagctctaaaaaggtgactcttaagatttgcaggtcttataaatagaaaaacaagaactgtaagccaaacttaaaatattcaggatgaattgagtttttgaatttgtagctttcagaaactgaacattaattttaagaagcaaagcaggctgggcacagtggctcacgcctgtaatcctagcactttaggaggctgaagtgggtggatcacttgagatcaggagttcaagaccagcctggccaacatgatgaaacctcctctctactaaaaatacaaaactccgccagaaatcgcttgatcccgggaggtggaggttgcagtgagctgagatcgtgccactgcactccagcctggggaacagagcgagattccgcctcaaaaaaaaaataaaaataaaaagaagaagaagaagaaggagaaagagggagagggagagggagagggagagggagagggagagggagaagaagaagaagaagaagaagaagaagaagaag

SEQ ID NO: 10876 - DNA, 1030 bp, Homo sapiens
  source 1..1030: mol_type = unassigned DNA
agcaagatggatctactgtggatcctgccctccctgtggcttctcctgcttggggggcctgcctgcctgaagacccaggaacaccccagctgcccaggacccagggaactggaagccagcaaagttgtcctcctgcccagttgtcccggagctccaggaagtcctggggagaagggagccccaggtcctcaagggccacctggaccaccaggcaagatgggccccaagggtgagccaggagatccagtgaacctgctccggtgccaggaaggccccagaaactgccgggagctgttgagccagggcgccaccttgagcggctggtaccatctgtgcctacctgagggcagggccctcccagtcttttgtgacatggacaccgaggggggcggctggctggtgtttcagaggcgccaggatggttctgtggatttcttccgctcttggtcctcctacagagcaggttttgggaaccaagagtctgaattctggctgggaaatgagaatttgcaccagcttactctccagggtaactgggagctgcgggtagagctggaagactttaatggtaaccgtactttcgcccactatgcgaccttccgcctcctcggtgaggtagaccactaccagctggcactgggcaagttctcagagggcactgcaggggattccctgagcctccacagtgggaggccctttaccacctatgacgctgaccacgattcaagcaacagcaactgtgcagtgattgtccacggtgcctggtggtatgcatcctgttaccgatcaaatctcaatggtcgctatgcagtgtctgaggctgccgcccacaaatatggcattgactgggcctcaggccgtggtgtgggccacccctaccgcagggttcggatgatgcttcgatagggcactctggcagccagtgcccttatctctcctgtacagcttccggatcgtcagccaccttgcctttgccaaccacctctgcttgcctgtccacatttaaaaataaaatcattttagccctttc

SEQ ID NO: 10877 - DNA, 997 bp, Homo sapiens
  source 1..997: mol_type = unassigned DNA
agcaagatggatctactgtggatcctgccctccctgtggcttctcctgcttggggggcctgcctgcctgaagacccaggaacaccccagctgcccaggacccagggaactggaagccagcaaagttgtcctcctgcccagttgtcccggagctccaggaagtcctggggagaagggagccccaggtcctcaagggccacctggaccaccaggcaagatgggccccaagggtgagccaggccccagaaactgccgggagctgttgagccagggcgccaccttgagcggctggtaccatctgtgcctacctgagggcagggccctcccagtcttttgtgacatggacaccgaggggggcggctggctggtgtttcagaggcgccaggatggttctgtggatttcttccgctcttggtcctcctacagagcaggttttgggaaccaagagtctgaattctggctgggaaatgagaatttgcaccagcttactctccagggtaactgggagctgcgggtagagctggaagactttaatggtaaccgtactttcgcccactatgcgaccttccgcctcctcggtgaggtagaccactaccagctggcactgggcaagttctcagagggcactgcaggggattccctgagcctccacagtgggaggccctttaccacctatgacgctgaccacgattcaagcaacagcaactgtgcagtgattgtccacggtgcctggtggtatgcatcctgttaccgatcaaatctcaatggtcgctatgcagtgtctgaggctgccgcccacaaatatggcattgactgggcctcaggccgtggtgtgggccacccctaccgcagggttcggatgatgcttcgatagggcactctggcagccagtgcccttatctctcctgtacagcttccggatcgtcagccaccttgcctttgccaaccacctctgcttgcctgtccacatttaaaaataaaatcattttagccctttc

SEQ ID NO: 10878 - DNA, 931 bp, Homo sapiens
  source 1..931: mol_type = unassigned DNA
gaagggcctgggtaccctatgatggccctcctacagggtatggaaggctgggaggagtgggaaggattcggaaaagggcctgggtaccggctccactggtggctcagcgctggggtgctgagacatcagagccaacactcatcccttctctggggcaggagatccagtgaacctgctccggtgccaggaaggtgaggcagcccttgcaggagccaggaacttgggatcacatggtgttgggtgttggcagacccccaagtgtggccaagatcctccccacagcctcctcagaacccttcttcagggacctgaaggagccaagagggtccctagggtcccacacttgttccagtgcctgggggtgggggtcagggaataacctgggcaccaccccagtccatctcccctttcccaggccccagaaactgccgggagctgttgagccagggcgccaccttgagcggctggtaccatctgtgcctacctgagggcagggccctcccagtcttttgtgacatggacaccgaggggggcggctggctggtgtttcagaggcgccaggatggttctgtggatttcttccgctcttggtcctcctacagagcaggttttgggaaccaagagtctgaattctggctgggaaatgagaatttgcaccagcttactctccagggtaactgggagctgcgggtagagctggaagactttaatggtaaccgtactttcgcccactatgcgaccttccgcctcctcggtgaggtagaccactaccagctggcactgggcaagttctcagagggcactgcaggtgagtgagcctaaggggagcagaggaaggaggctggatcctttcccagtgctgccactgcccccatgaatgacccagggcaatcctgtctcctctgtgggccttagtttccgcatctgagaa

SEQ ID NO: 10879 - DNA, 3011 bp, Homo sapiens
  source 1..3011: mol_type = unassigned DNA
agtgcctaatgggtgttgttcctggctggacttgatgtccagggcctgaggggttttctcgccgagtctcctggggcggtccggaggctcgtgccctgttgtggggcccccatttgccgccgccatgcccacggccgccgcccccatcatcagctcggtccagaagctggttctgtatgagactagagctagatactttctagttgggagcaataatgcagaaacgaaatatcgtgtcttgaagattgatagaacagaaccaaaagatttggtcataattgatgacaggcatgtctatactcaacaagaagtaagggaacttcttggccgcttggatcttggaaatagaacaaagatgggacagaaaggatcctcgggcttatttcgagcggtttcagcttttggtgttgtgggttttgtcaggttcttagaaggctattatattgtgttaataactaaaaggaggaagatggcggatattggaggtcatgcaatctataaggtcgaagatacaaatatgatctatatacccaatgattctgtacgggttactcatcctgatgaagctaggtatctacgaatatttcaaaatgtggacctatctagcaatttttactttagttacagctatgatttgtcccactcacttcaatataatctcactgtcttgcgaatgcccctggagatgttaaagtcagaaatgacccagaatcgccaagagagctttgacatctttgaagatgaaggattaattacacaaggtggaagcggggtatttgggatctgtagtgagccttatatgaaatatgtatggaatggtgaacttctggatataattaaaagtactgtgcatcgtgactggcttttgtatattattcatgggttctgtgggcagtcaaagctgttgatctatggacgaccagtgtatgtcactctaatagctagaagatccagtaaatttgctggcacccgttttcttaaaagaggtgcaaactgtgagggtgatgttgcaaatgaagtggagactgaacaaatactctgcgatgcttctgtgatgtctttcactgcaggaagttattcttcatatgtacaagttagaggatctgtgcccttatactggtctcaggacatttcaactatgatgcctaaaccacctattacattggatcaggcagatccatttgcacatgtggctgcccttcactttgaccagatgttccagaggtttggctctcccatcatcatcttgaatttagtgaaggaacgagagaaaagaaagcatgaaagaattctgagtgaagaacttgttgctgctgtgacctatctcaaccaatttttgcctcctgagcacactattgtttatattccctgggacatggccaagtataccaaaagcaagctgtgtaatgttcttgatcgactaaatgtgattgcagaaagtgtggtgaagaaaacaggtttctttgtaaaccgccctgattcttactgtagcattttgcggccagatgaaaagtggaatgaactaggaggatgtgtgattcccactggtcgcctgcagactggcatccttcgaaccaactgtgtggactgtttagatcgcaccaacacagcacagtttatggtgggaaaatgtgctctggcctatcagctgtattcactgggactgattgacaaacctaatctacagtttgatacagatgcagttaggttatttgaggaactctatgaagatcatggtgataccctatcccttcagtatggtggttctcaacttgttcatcgtgtgaaaacctacagaaagatagcaccatggacccagcactccaaagacatcatgcaaaccctgtctagatattacagcaatgctttttcagatgccgatagacaagattccattaatctcttcctgggagttttccatcccactgaagggaaacctcatctctgggagctcccaacagatttttatttgcatcacaaaaataccatgagacttttgccaacaagaagaagttatacttactggtggacaccagaggtgataaagcatttaccattgccctatgatgaagttatctgtgctgtgaacttaaagaagttgatagtgaagaaattccacaaatatgaagaagagattgatatccacaatgagttctttcggccatatgagttgagcagctttgatgataccttttgcttggctatgacaagctcagcacgtgactttatgcctaagaccgttggaattgatccaagtccatttactgtgcgtaaaccagatgaaactggaaaatcagtattgggaaacaaaagcaatagagaagaagctgtattacagcggaaaacggcagccagcgccccgccgccccccagcgaggaggctgtgtccagcagctctgaggatgactctgggactgatcgggaagaagagggctctgtgtctcagcgctccactcccgtgaagatgactgatgcaggagacagtgccaaagtgaccgagaatgtggtccaacccatgaaggagctatatggaattaacctctcagatggcctctcagaagaagatttctccatttattcaagatttgttcagctggggcagagtcaacataaacaagacaagaatagccagcagccctgttctaggtgctcagatggagttataaaactaacacccatctcggctttctcgcaagataacatctatgaagttcagcccccaagagtagacagaaaatctacagagatcttccaagcccacatccaggccagccaaggtatcatgcagcccctaggaaaagaggactcctccatgtaccgagagtacatcaggaaccgctacctgtgaaaagagcgcaggtccacctggtggacacgtctgattagcttagaacctgtcttgtctcatcttcaaaaggtaacttattaaaagtcctttgcgtctgaagcctttctccttttctgtcacttgcaaattccaaattatagctaataaagatgactagataatt

SEQ ID NO: 10880 - DNA, 791 bp, Homo sapiens
  source 1..791: mol_type = unassigned DNA
caaagatgggacagaaaggatcctcgggcttatttcgagcggtttcagcttttggtgttgtgggttttgtcaggttcttagaaggctattatattgtgttaataactaaaaggaggaagatggcggatattggaggtcatgcaatctataaggtcgaagatacaaatatgatctatatacccaatgattctgtacgggttactcatcctgatgaagctaggtatctacgaatatttcaaaatgtggacctatctagcaatttttactttagttacagctatgatttgtcccactcacttcaatataatctcactgtcttgcgaatgcccctggagatgttaaagtcagaaatgacccagaatcgccaagagagctttgacatctttgaagatgaaggattaattacacaaggtggaagcgggtgatgttgcaaatgaagtggagactgaacaaatactctgcgatgcttctgtgatgtctttcactgcaggaagttattcttcatatgtacaagttagaggatctgtgcccttatactggtctcaggacatttcaactatgatgcctaaaccacctattacatgtgtgtggagccatgtttttaataataactcctgtcctcacatttagagataatgaactgttgtcacagaaatctcataaatgcttaggttttcaggaggttttagtcctggaaggtagataatttagaagaggaatttccgttattcttatgtaataaatttatgtttaattttgactgttaaataaattatttttattttgcttca

SEQ ID NO: 10881 - DNA, 439 bp, Homo sapiens
  source 1..439: mol_type = unassigned DNA
gttatttgaggaactctatgaagatcatggtgataccctatcccttcagtatggtggttctcaacttgttcatcgtgtgaaaacctacagaaagatagcaccatggacccagcactccaaagacatcatgcaaaccctgtctagatattacagcaatgctttttcagatgccgatagacaagattccattaatctcttcctgggagttttccatcccactgaagggaaacctcatctctgggagctcccaacagatttttatttgcatcacaaaaataccatgagacttttgccaacaagaagaagttatacttactggtggacaccagaggtgataaagcatttaccattgccctatgatgaagggttcctagcaagatctcctgcgaatctggaatgctccaattgaggactccatctagtcatgcttcagcatccc

SEQ ID NO: 10882 - DNA, 724 bp, Homo sapiens
  source 1..724: mol_type = unassigned DNA
gagcaaaaaggaatttaaagaacctcctctaaataactgcctgctcccattggacttcctgaggccctcctggctccttagagcttgttgaactcagctttgcattgtattttctatgcatctatctcatctcctttctaactgtgtaagtgttggaggcaggagcttaccctcggtcagggctgtatcccccacagagcttatcacagtgctgtctgtgaacacagttaatattatggaaatgtttgcttgctataatctcagacttttagagtaacatgcagtatctctcttagttatctgtgctgtgaacttaaagaagttgatagtgaagaaattccacaaatatgaagaagagattgatatccacaatgagttctttcggccatatgagttgagcagctttgatgataccttttgcttggctatgacaagctcagcacgtgactttatgcctaagaccgttggaattgatccaagtccatttactgtgcgtaaaccagatgaaactggaaaatcagtattgggaaacaaaagcaatagagaagaagctgtattacagcggaaaacggcagccagcgccccgccgccccccagcgaggaggctgtgtccagcagctctgaggatgactctgggactgatcgggaagaagagggctctgtgtctcagcgctccactcccgtgaagatgactgatgcaggagacagtgccaaagtgaccgag

SEQ ID NO: 10883 - DNA, 2262 bp, Homo sapiens
  source 1..2262: mol_type = unassigned DNA
gatcatctataggtttagtgcctaatgggtgttgttcctggctggacttgatgtccagggcctgaggggttttctcgccgagtctcctggggcggtccggaggctcgtgccctgttgtggggcccccatttgccgccgccatgcccacggccgccgcccccatcatcagctcggtccagaagctggttctgtatgagactagagctagatactttctagttgggagcaataatgcagaaacgaaatatcgtgtcttgaagattgatagaacagaaccaaaagatttggtcataattgatgacagggtatctacgaatatttcaaaatgtggacctatctagcaatttttactttagttacagctatgatttgtcccactcacttcaatataatctcactgtcttgcgaatgcccctggagatgttaaagtcagaaatgacccagaatcgccaagagagctttgacatctttgaagatgaaggattaattacacaaggtggaagcgtggatcaggcagatccatttgcacatgtggctgcccttcactttgaccagatgttccagaggtttggctctcccatcatcatcttgaatttagtgaaggaacgagagaaaagaaagcatgaaagaattctgagtgaagaacttgttgctgctgtgacctatctcaaccaatttttgcctcctgagcacactattgtttatattccctgggacatggccaagtataccaaaagcaagctgtgtaatgttcttgatcgactaaatgtgattgcagaaagtgtggtgaagaaaacaggtttctttgtaaaccgccctgattcttactgtagcattttgcggccagatgaaaagtggaatgaactaggaggatgtgtgattcccactggtcgcctgcagactggcatccttcgaaccaactgtgtggactgtttagatcgcaccaacacagcacagtttatggtgggaaaatgtgctctggcctatcagctgtattcactgggactgattgacaaacctaatctacagtttgatacagatgcagttaggttatttgaggaactctatgaagatcatggtgataccctatcccttcagtatggtggttctcaacttgttcatcgtgtgaaaacctacagaaagatagcaccatggacccagcactccaaagacatcatgcaaaccctgtctagatattacagcaatgctttttcagatgccgatagacaagattccattaatctcttcctgggagttttccatcccactgaagggaaacctcatctctgggagctcccaacagatttttatttgcatcacaaaaataccatgagacttttgccaacaagaagaagttatacttactggtggacaccagaggtgataaagcatttaccattgccctatgatgaagttatctgtgctgtgaacttaaagaagttgatagtgaagaaattccacaaatatgaagaagagattgatatccacaatgagttctttcggccatatgagttgagcagctttgatgataccttttgcttggctatgacaagctcagcacgtgactttatgcctaagaccgttggaattgatccaagtccatttactgtgcgtaaaccagatgaaactggaaaatcagtattgggaaacaaaagcaatagagaagaagctgtattacagcggaaaacggcagccagcgccccgccgccccccagcgaggaggctgtgtccagcagctctgaggatgactctgggactgatcgggaagaagagggctctgtgtctcagcgctccactcccgtgaagatgactgatgcaggagacagtgccaaagtgaccgagaatgtggtccaacccatgaaggagctatatggaattaacctctcagatggcctctcagaagaagatttctccatttattcaagaacacccatctcggctttctcgcaagataacatctatgaagttcagcccccaagagtagacagaaaatctacagagatcttccaagcccacatccaggccagccaaggtatcatgcagcccctaggaaaagaggactcctccatgtaccgagagtacatcaggaaccgctacctgtgaaaagagcgcaggtccacctggtggacacgtctgattagcttagaacctgtcttgtctcatcttcaaaaggtaacttattaaaagtcctttgcgtctgaagcctttctccttttctgtcacttgcaaattccaaattatagctaataaagatgactagat

SEQ ID NO: 10884 - DNA, 712 bp, Homo sapiens
  source 1..712: mol_type = unassigned DNA
atgagatactttctagttgggagcaataatgcagaaacgaaatatcgtgtcttgaagattgatagaacagaaccaaaagatttggtcataattgatgacaggcatgtctatactcaacaagaagtaagggaacttcttggccgcttggatcttggaaatagaacaaagatgggacagaaaggatcctcgggcttatttcgagcggtttcagcttttggtgttgtgggttttgtcaggttcttagaaggctattatattgtgttaataactaaaaggaggaagatggcggatattggaggtcatgcaatctataaggtcgaagatacaaatatgatctatatacccaatgattctgtacgggttactcatcctgatgaagctaggtatctacgaatatttcaaaatgtggacctatctagcaatttttactttagttacagctatgatttgtcccactcacttcaatataatctcactgtcttgcgaatgcccctggagatgttaaagtcagaaatgacccagaatcgccaagagagctttgacatctttgaagatgaaggattaattacacaaggtggaagcggggtatttgggatctgtagtgagccttatatgaaatatgtatggaatggtgaacttctggatataattaaaagtactgtgcatcgtgactggcttttgtatattattcatgggttctgtgggcagtcaa

SEQ ID NO: 10885 - DNA, 966 bp, Homo sapiens
  source 1..966: mol_type = unassigned DNA
ctctaccaggtgagcactcatgaacagtctgagtccgcccatggacgcacagggcccagcactggaggaagacaaagatcccgccacgagcaggcacgagacagctccaggcactcagcgtcccaagagggtcaggacaccattcgtggacacccagggtcaagcagaggaggaaggcagggatcccactatgagcaatcggtagatagttctggacactcagggtctcatcacagccacaccacgtcccaggaaaggtctgatgtctcccgtgggcagtcaggatccagaagtgtcagcagacaaacacgtaatgagaaacaatcaggagacggctccaggcactcagggtcgcgtcaccatgaagcttcctctcgggccgacagctctagacactcgcaggtgggccagggacaatcatcagggcccaggacaagcaggaaccagggatccagtgttagccaggacagtgacagtcagggacactcagaagactctgagaggcggtctgggtctgcgtccagaaaccatcatggatctgctcaggagcagtcaagagatggctccagacaccccaggtcccatcacgaagacagagccggtcatgggcactctgcagagagctccagacaatcaggcactcatcatgcagagaattcctctggtggacaggctgcatcatcccatgaacaggcaagatcaagtgcaggagagagacacggatcccaccaccagcagtcagcagacagctccagacactcaggcattgggcacggacaagcttcatctgcagtcagagacagtggacaccgagggtccagtggtagtcaggccagtgacagtgagggacattcagaagactcagacacacagtcagtgtcagcccacggacaggctgggccccatcagcagagccaccaagagtccacacgtggccggtcagcaggaaggtctggacgttcaggg

SEQ ID NO: 10886 - DNA, 966 bp, Homo sapiens
  source 1..966: mol_type = unassigned DNA
ctctaccaggtgagcactcatgaacagtctgagtcctcccatggatggacggggcccagcactagaggaagacaaggatcccgccatgagcaggcacaagacagctccaggcactcagcatcccaagacggtcaggacaccattcgtggacacccggggtcaagcagaggaggaaggcaggggtaccaccacgagcattcggtagatagctctggacactcagggtcccatcacagccacaccacatcccagggaaggtctgatgcctcccgtgggcagtcaggatccagaagtgcaagcagaacaacacgtaatgaggaacaatcaggagacggctccaggcactcagggtcgcgtcaccatgaagcttccactcatgccgacatctctagacactcacaggcagtccagggacaatcagaggggtccaggagaagcaggcgccagggatccagtgtgagccaggacagtgacagtgagggacattcagaagactctgagaggtggtctgggtctgcttccagaaaccatcgtggatctgttcaggagcagtcaaggcacggctccagacaccccaggtcccatcacgaagacagagccggtcacgggcactctgcagaccgctccagacaatcaggcactcgtcacgcagagacttcctctggtggacaggctgcatcatcccatgaacaggcaagatcaagtccaggagagagacacggatcccgccaccagcagtcagcagacagctccagacactcaggcattccgcgtggacaagcttcatctgcagtcagagacagtagacactgggggtccagtggtagtcaggccagtgatagtgagggacattcagaagagtcagacacacagtcagtgtcaggccatggacaggctgggccccatcagcagagccaccaagagtccgcacgtgaccggtcagggggaaggtctggacgttcaggg

SEQ ID NO: 10887 - DNA, 12747 bp, Homo sapiens
  source 1..12747: mol_type = unassigned DNA
cttttggtgaacaaggttcacatttattgccaaaagatgtctactctcctggaaaacatctttgccataattaatcttttcaagcaatattcaaaaaaagataaaaacactgacacattgagtaaaaaagagctgaaggaacttctggaaaaggaatttcggcaaatcctgaagaatccagatgacccagatatggttgatgtcttcatggatcacttggatatagaccacaacaagaaaattgacttcactgagtttcttctgatggtattcaagttggctcaagcatattatgagtctaccagaaaagagaatttaccgatatcaggacacaagcacagaaagcacagtcatcatgataaacatgaagataataaacaggaagaaaacaaagaaaacagaaaaagaccctcaagtctggaaagaagaaacaatagaaaagggaataagggaagatccaagagcccaagagaaacaggggggaaaaggcatgaatctagttctgaaaaaaaagaaagaaaaggatattcacctactcatagagaagaagaatatggaaaaaaccatcataactcaagtaaaaaagagaaaaacaagactgaaaatactagattaggagacaataggaagaggctaagtgaaagacttgaagagaaagaagacaatgaagaaggagtatatgattatgaaaatacaggaagaatgactcaaaaatggatacaatcaggccatattgccacatattacacaatccaggatgaagcctatgacaccactgatagtctattagaagaaaacaaaatatatgaaagatcaaggtcatctgatggcaaatcatcatctcaagtgaacaggtcaagacatgaaaatacaagccaggtaccattgcaggagtccaggacaagaaagcgtaggggatccagagttagccaggacagggacagtgagggacactcagaagactctgagaggcactctgggtcggcttccagaaaccatcatggatctgcgtgggagcagtcaagagatggctccagacaccccaggtcccatgatgaagacagagccagtcatgggcactctgcagacagctccagacaatcaggcactcgtcacgcagagacttcctctcgtggacagactgcatcatcccatgaacaggcaagatcaagtccaggagaaagacatggatccggccaccagcagtcagcagacagctccagacactcagccactgggcgcgggcaagcttcatctgcagtcagcgatcgtggacaccgggggtctagcggtagtcaggccagtgacagtgagggacattcagaaaactcagacacacaatcagtgtcaggccacggaaaggctgggctgagacagcagagccaccaagagtccacacgtggccggtcaggggaacggtctggacgttcagggtcttccctctaccaggtgagcactcatgaacagcctgactctgcccatggacggaccgggaccagcactggaggaagacaaggatcgcaccacgagcaggcacgagacagctccaggcattcagcgtcccaagagggtcaggacaccattcgtggacacccggggtcaagcagaggaggaaggcagggatcccaccacgagcaatcggtaaataggtctggacactcaggttcccatcacagccacaccacatcccagggaaggtctgatgcctcccatgggcagtcaggatccagaagtgcaagcagacaaacacgaaatgaggaacaatcaggagacggcaccaggcactcagggtcacgtcatcatgaagcttcctctcaggctgacagctctagacactcacaggtgggccagggacaatcatcggggcccaggacaagtaggaaccagggatccagtgttagccaggacagtgacagtcagggacactcagaagactctgagaggtggtctgggtctgcttccagaaaccatcatggatctgctcaggagcagtcaagagatggctccagacaccccaggtcccatcacgaagacagagctggtcatgggcactctgcagacagctccagaaaatcaggcactcgtcacacacagaattcctctagtggacaggctgcgtcatcccatgaacaggcaagatcaagtgcaggagaaagacatggatcccgccaccagctccagtcagcagacagctccagacactcaggcactgggcacggacaagcttcatctgcagtcagagacagtggacaccgagggtccagtggtagtcaggccactgacagtgagggacattcagaagactcagacacacagtcagtgtcaggccatggacaggctggtcaccatcagcagagccaccaagagtccgcacgtgaccggtcaggggaaaggtctcgacgttcagggtctttcctctaccaggtgagcactcataaacagtctgagtcctcccatggatggacagggcccagcactggagtaagacaaggatcccaccatgagcaggcacgagacaactccaggcactcagcatcccaagatggtcaggacaccattcgtggacacccggggtcaagcagaagaggaaggcaggggtcccaccacgagcaatcggtagataggtctggacactcagggtcccatcacagccacaccacatcccagggaaggtctgatgcctcccgtgggcagtcaggatccagaagtgcaagcagaacaacacgtaatgaggaacaatcaagagacggctccaggcactcagggtcacgtcaccatgaagcttcctctcatgccgacatctctagacactcacaggcaggccagggacaatcagaggggtccaggacaagcaggcgccagggatccagtgttagccaggacagtgacagtgagggacattcagaagactctgagaggtggtctgggtctgcttccagaaaccatcgtggatctgctcaggagcagtcaagacatggctccagacaccccaggtcccatcacgaagacagagccggtcacgggcactctgcagacagctccagacaatcaggaactcctcacgcagagacttcctctggtggacaggctgcgtcatcccatgaacaggcaagatcaagtccaggagaaagacacggatcccgccaccagcagtcagcagacagctccagacactcaggcattccgcgcagacaagcttcatctgcagtcagagacagtggacactgggggtccagtggtagtcaggccagtgatagtgagggacattcagaggagtcagacacacagtcagtgtcaggccatggacaggatgggccccatcagcagagccaccaagagtccgcacgtgactggtcagggggaaggtctggacgttcagggtctttcatctaccaggtgagcactcatgaacagtctgagtctgcccatgggcggaccaggaccagcactggacgaagacaaggatcccaccacgagcaggcacgagacagctccaggcactcagcgtcccaagagggtcaggacaccattcgtgcacacccggggtcaaggagaggaggaaggcagggatcccaccatgagcaatcggtagatagatctggacactcagggtcccatcacagccacaccacatcccagggaaggtctgatgcctcccatgggcagtcaggatccagaagtgcaagcagacaaactcgtaaggacaaacaatcaggagacggctccaggcactcagggtcacgtcaccatgaagctgcctcttgggctgacagctctagacactcacaggtgggacaggaacaatcatcggggtccaggacaagcaggcaccagggatccagtgttagccaggacagtgacagtgagagacactcagacgactccgagaggttgtctgggtctgcttccagaaaccatcatggatcttctcgggagcagtcaagagatggctccagacaccctgggttccatcaagaagacagagccagtcacgggcactctgcagacagctccagacaatcaggcactcatcacacagagtcttcctctcatggacaggctgtgtcatcccatgaacaggcaagatcaagtccaggagaaagacatggatcccgccaccagcagtcagcagacagctccagacactcaggcattgggcacagacaagcttcatctgcagtcagagacagtggacaccgagggtccagtggtagtcaggtcactaacagtgagggacattcagaagactcagacacacagtcagtgtcagcccacggacaagctgggccccatcagcagagccacaaagagtccgcacgtggccagtcaggggaaagctctggacgttcaaggtctttcctctaccaggtgagctctcatgaacagtctgagtccacacacggacagactgcacccagcactggaggaagacaaggatcccgccatgagcaggcacgaaacagctctaggcactcagcatcccaagacggtcaggacaccattcgtggacacccggggtcaagcagaggaggaaggcagggatcctaccacgagcaatcagtagataggtctggacactcagggtaccatcacagccacaccacaccccagggaaggtctgatgcctcccatgggcagtcaggacccagaagtgcaagcaggcaaacaagaaatgaggaacaatcaggagacggctccaggcactcagggtcacgtcaccatgaaccttccactcgggccggcagctctagacactcacaggtgggccagggagaatcagcggggtccaagacaagcaggcgccagggatccagtgttagtcaggacagggacagtgagggacactcagaagactctgagaggcggtctgagtcggcttccagaaaccattatggatctgctcgggagcagtcaagacatggctccaggaaccccaggtcccatcaagaagatagagccagtcatgggcactctgcagagagctccagacaatcaggcactcgtcatgcagagacttcctctggtggacaggctgcatcatcccaggaacaggcaaggtcaagtccaggagaaagacatggatcccgccaccagcagtcagcagacagctccacagactcaggcactgggcgcagacaagattcatctgtagtcggagacagtggaaaccgagggtccagtggtagccaggccagtgacagcgagggacactcagaagagtcagacacacagtcagtgtcagcccacggacaggctgggccccatcagcagagccaccaagagtccacacgtggccagtcaggggaaaggtctggacgttcagggtctttcctctaccaggtgagcactcatgaacagtctgagtccgcccatggacgcacagggcccagcactggaggaagacaaagatcccgccacgagcaggcacgagacagctccaggcactcagcgtcccaagagggtcaggacaccattcgtggacacccagggtcaagcagaggaggaaggcagggatcccactatgagcaatcggtagatagttctggacactcagggtctcatcacagccacaccacgtcccaggaaaggtctgatgtctcccgtgggcagtcaggatccagaagtgtcagcagacaaacacgtaatgagaaacaatcaggagacggctccaggcactcagggtcgcgtcaccatgaagcttcctctcgggccgacagctctagacactcgcaggtgggccagggacaatcatcagggcccaggacaagcaggaaccagggatccagtgttagccaggacagtgacagtcagggacactcagaagactctgagaggtggtctgggtctgcttccagaaaccatcttggatctgcttgggagcagtcaagagatggctccagacaccctgggtcccatcacgaagacagagccggtcacgggcactctgcagacagctccagacaatcaggcactcgtcacacagagtcttcctctcgtggacaggctgcgtcatcccatgaacaggcaagatcaagtgcaggagaaagacatggatcccaccaccagctccagtcagcagacagctccagacactcaggcattgggcatggacaagcttcatctgcagtcagagacagtggacaccgagggtacagtggtagtcaggccagtgacagtgagggacattcagaagactcagacacacagtcagtgtcagcacagggaaaagctgggccccatcagcagagccacaaagagtccgcacgtggccagtcaggggaaagctctggacgttcagggtctttcctctaccaggtgagcactcatgaacagtctgagtccacccatggacagtctgcgcccagcactggaggaagacaaggatcccattatgatcaggcacaagacagctccaggcactcagcatcccaagagggtcaggacaccattcgtggacacccggggccaagcagaggaggaagacaggggtcccaccaagagcaatcggtagataggtctggacactcagggtctcatcacagccacaccacatcccagggaaggtctgatgcctcccgtgggcagtcaggatccagaagtgcaagcagaaaaacatatgacaaggaacaatcaggagatggctctaggcactcagggtcgcatcatcatgaagcttcctcttgggccgacagctctagacactcactggtgggccagggacaatcatcagggcccaggacaagcaggccccggggatccagtgttagccaggacagtgacagtgagggacactcagaagattctgagaggcggtctgggtctgcgtccagaaaccatcatggatctgctcaggagcagtcaagagatggctccagacaccccaggtcccatcacgaagacagagccggtcatgggcactctgcagagagctccagacaatcaggcactcatcatgcagagaattcctctggtggacaggctgcatcatcccatgaacaggcaagatcaagtgcaggagagagacacggatcccaccaccagcagtcagcagacagctccagacactcaggcattgggcacggacaagcttcatctgcagtcagagacagtggacaccgagggtccagtggtagtcaggccagtgacagtgagggacattcagaagactcagacacacagtcagtgtcagcccacggacaggctgggccccatcagcagagccaccaagagtccacacgtggccggtcagcaggaaggtctggacgttcagggtctttcctctaccaggtgagcactcatgaacagtctgagtccgcccatggacggaccgggaccagcactggaggaagacaaggatcccaccacaagcaggcacgagacagctccaggcactcaacgtcccaagagggtcaggacaccattcatggacacccggggtcaagcagtggaggaaggcagggatcccactacgagcaattggtagatagatctggacactcagggtctcatcacagccacaccacatcccagggaaggtctgatgcctcccatgggcactcaggatccagaagtgcaagcagacaaactcgtaacgatgaacaatcaggagacggctccaggcactcagggtcgcgtcaccatgaagcttcctctcgggccgacagctctggacactcgcaggtgggccagggacaatcagaggggcccaggacaagcaggaactggggatccagttttagccaggacagtgacagtcagggacactcagaagactctgagaggtggtctgggtctgcttccagaaaccatcatggatctgctcaggagcagctaagagatggctccagacaccccaggtcccatcaagaagacagagctggtcatgggcactctgcagacagctccagacaatcaggcactcgtcacacacagacttcctctggtggacaggctgcatcatcccatgaacaggcaagatcaagtgcaggagaaagacatggatcccaccaccagcagtcagcagacagctccagacactcaggcattgggcacggacaagcttcatctgcagtcagagacagtggacaccgagggtacagtggtagtcaggccagtgacaatgagggacattcagaagactcagacacacagtcagtgtcagcccacggacaggctgggtcccatcagcagagccaccaagagtccgcacgtggccggtcaggggaaacgtctggacattcaggatctttcctctaccaggtgagcactcatgaacagtctgagtcctcccatggatggacggggcccagcactagaggaagacaaggatcccgccatgagcaggcacaagacagctccaggcactcagcatcccaagacggtcaggacaccattcgtggacacccggggtcaagcagaggaggaaggcaggggtaccaccacgagcattcggtagatagctctggacactcagggtcccatcacagccacaccacatcccagggaaggtctgatgcctcccgtgggcagtcaggatccagaagtgcaagcagaacaacacgtaatgaggaacaatcaggagacggctccaggcactcagggtcgcgtcaccatgaagcttccactcatgccgacatctctagacactcacaggcagtccagggacaatcagaggggtccaggagaagcaggcgccagggatccagtgtgagccaggacagtgacagtgagggacattcagaagactctgagaggtggtctgggtctgcttccagaaaccatcatggatctgctcaggagcagctaagagatggctccagacaccccaggtcccatcaagaagacagagctggtcatgggcactctgcagacagctccagacaatcaggcactcgtcacacacagacttcctctggtggacaggctgcatcatcccatgaacaggcaagatcaagtgcaggagaaagacatggatcccaccaccagcagtcagcagacagctccagacactcaggcattgggcacggacaagcttcatctgcagtcagagacagtggacaccgagggtacagtggtagtcaggccagtgacaatgagggacattcagaagactcagacacacagtcagtgtcagcccacggacaggctgggtcccatcagcagagccaccaagagtccgcacgtggccggtcaggggaaacgtctggacattcaggatctttcctctaccaggtgagcactcatgaacagtctgagtcctcccatggatggacggggcccagcactagaggaagacaaggatcccgccatgagcaggcacaagacagctccaggcactcagcatcccaatacggtcaggacaccattcgtggacacccggggtcaagcagaggaggaaggcaggggtaccaccacgagcattcggtagatagctctggacactcagggtcccatcacagccacaccacatcccagggaaggtctgatgcctcccgtgggcagtcaggatccagaagtgcaagcagaacaacacgtaatgaggaacaatcaggagacagctccaggcactcagtgtcacgtcaccatgaagcttccactcatgccgacatctctagacactcacaggcagtccagggacaatcagaggggtccaggagaagcaggcgccagggatccagtgtgagccaggacagtgacagtgagggacattcagaagactctgagaggtggtctgggtctgcttccagaaaccatcgtggatctgttcaggagcagtcaaggcacggctccagacaccccaggtcccatcacgaagacagagccggtcacgggcactctgcagaccgctccagacaatcaggcactcgtcacgcagagacttcctctggtggacaggctgcatcatcccatgaacaggcaagatcaagtccaggagagagacacggatcccgccaccagcagtcagcagacagctccagacactcaggcattccgcgtggacaagcttcatctgcagtcagagacagtagacactgggggtccagtggtagtcaggccagtgatagtgagggacattcagaagagtcagacacacagtcagtgtcaggccatggacaggctgggccccatcagcagagccaccaagagtccgcacgtgaccggtcagggggaaggtctggacgttcagggtctttcctctaccaggtgagcactcatgaacagtctgagtctgcccatgggcggaccaggaccagcactggacgaagacaaggatcccaccacgagcaggcacgagacagctccaggcactcagcgtcccaagagggtcaggacaccattcgtggacacccggggtcaagcagaagaggaaggcagggatcccactacgagcaatcggtagataggtctggacactcagggtcccatcacagccacaccacatcccagggaaggtctgatgcctcccgtgggcagtcaggatccagaagtgccagcagacaaactcgtaatgacgaacaatcaggagatggctccaggcactcatggtcgcatcaccatgaagcttccactcaggcggacagctctagacactcacagtccggccagggacaatcagcggggcccaggacaagcaggaaccagggatccagtgttagccaggacagtgacagtcagggacactcagaagactctgagaggtggtctgggtctgcttccagaaaccatcgtggatctgctcaggagcagtcaagagatggctccagacaccccacgtcccatcacgaagacagagccggtcacgggcactctgcagagagctccagacaatcaggcactcatcatgcagagaattcctctggtggacaggctgcatcatcccatgaacaggcaagatcaagtgcaggagagagacatggatcccaccaccagcagtcagcagacagctccagacactcaggcattgggcacggacaagcttcatctgcagtcagagacagtggacaccgagggtccagtggtagtcaggccagtgacagtgagggacattcagaagactcagacacacagtcagtgtcagcccacggacaggctgggccccatcagcagagccaccaagagtccacacgtggccggtcagcaggaaggtctggacgttcagggtctttcctctaccaggtgagcactcatgaacagtctgagtctgcccatggacgggctgggcccagtactggaggaagacaaggatcccgccacgagcaggcacgagacagctccaggcactcagcgtcccaagagggtcaggacaccattcgtggacacccggggtcaaggagaggaggaagacagggatcctaccacgagcaatcggtagataggtctggacactcagggtcccatcacagccacaccacatcccagggaaggtctgatgcctcccatgggcagtcaggatccagaagtgcaagcagagaaacacgtaatgaggaacagtcaggagacggctccaggcactcagggtcgcgtcaccatgaagcttccactcaggctgacagctctagacactcacagtccggccagggtgaatcagcggggtccaggagaagcaggcgccagggatccagtgttagccaggacagtgacagtgaggcatacccagaggactctgagaggcgatctgagtctgcttccagaaaccatcatggatcttctcgggagcagtcaagagatggctccagacaccccggatcctctcaccgcgatacagccagtcatgtacagtcttcacctgtacagtcagactctagtaccgctaaggaacatggtcactttagtagtctttcacaagattctgcgtatcactcaggaatacagtcacgtggcagtcctcacagttctagttcttatcattatcaatctgagggcactgaaaggcaaaaaggtcaatcaggtttagtttggagacatggcagctatggtagtgcagattatgattatggtgaatccgggtttagacactctcagcacggaagtgttagttacaattccaatcctgttgttttcaaggaaagatctgatatctgtaaagcaagtgcgtttggtaaagatcatccaaggtattatgcaacgtatattaataaggacccaggtttatgtggccattctagtgatatatcgaaacaactgggatttagtcagtcacagagatactattactatgagtaagaaattaatggcaaaggaattaatccaagaatagaagaatgaagcaagttcactttcaatcaagaaacttcataatactttcagggaagttatcttttcctgtcaatctgtttaaaatatgctatagtatttcattagtttggtggtagcttatttttattgtgtaatgatctttaaacgctatatttcagaaatattaaatggaagaaatcaatatcatggagagctaactttagaaaactagctggagtattttaggagattctgggtcaagtaatgttttatgtttttgaaagtttaagttttagacactccccaaatttctaaattaatctttttcagaaatatcgaaggagccaaaaatataaaacagttctgtataccaaagtggctatatcaacatcagggctagcacatctttctctattatccttctattggaattctagtattctgtattcaaaaaatcatcttggacataattaatattatagtaagctgcatctaaattaaaaataaactatt

SEQ ID NO: 10888 - DNA, 966 bp, Homo sapiens
  source 1..966: mol_type = unassigned DNA
ctctaccaggtgagcactcatgaacagcctgactctgcccatggacggaccgggaccagcactggaggaagacaaggatcgcaccacgagcaggcacgagacagctccaggcattcagcgtcccaagagggtcaggacaccattcgtggacacccggggtcaagcagaggaggaaggcagggatcccaccacgagcaatcggtaaataggtctggacactcaggttcccatcacagccacaccacatcccagggaaggtctgatgcctcccatgggcagtcaggatccagaagtgcaagcagacaaacacgaaatgaggaacaatcaggagacggcaccaggcactcagggtcacgtcatcatgaagcttcctctcaggctgacagctctagacactcacaggcaggccagggacaatcagaggggtccaggacaagcaggcgccagggatccagtgttagccaggacagtgacagtgagggacattcagaagactctgagaggtggtctgggtctgcttccagaaaccatcgtggatctgctcaggagcagtcaagacatggctccagacaccccaggtcccatcacgaagacagagccggtcacgggcactctgcagacagctccagacaatcaggaactcctcacgcagagacttcctctggtggacaggctgcgtcatcccatgaacaggcaagatcaagtccaggagaaagacacggatcccgccaccagcagtcagcagacagctccagacactcaggcattccgcgcagacaagcttcatctgcagtcagagacagtggacactgggggtccagtggtagtcaggccagtgatagtgagggacattcagaggagtcagacacacagtcagtgtcaggccatggacaggatgggccccatcagcagagccaccaagagtccgcacgtgactggtcagggggaaggtctggacgttcaggg

SEQ ID NO: 10889 - DNA, 4219 bp, Homo sapiens
  source 1..4219: mol_type = unassigned DNA
acacacacacacacacacagacgtgctcacggagcctgtgcctgcctctacttgtctgctctgcgcagatggttcctggcttttgggtcacctcatcctgcagcccagtccagttagaacctttcttccacagagactggcaagctgtggggtaagagttttggtaaggctgcctgtcttcagagcatgaaggacactgcccggagagggaagagggcaatatttagtgtttgggcctacttgttgttgggctccccactgcctctcctttgcagagctatcactggcccctggttgcaaactctcggtggctttcaagcctacaaaacaaaaactgagagggtgtccaaaaagagaagaagaaaacgttgttgttggtcctggattccactgttggattttggtggggatgagaagaaggaattaccaggtgtgatcaacacctgcacggtacctgcacggctttaaagaatgcgttccagaggcagtgataccgagggctcagcccaaaagaaatttccaagacatactaaaggccacagtttccaagggcctaaaaacatgaagcatagacagcaagacaaagactcccccagtgagtcggatgtaatacttccgtgtcccaaggcagagaagccacacagtggtaatggccaccaagcagaagacctctcaagagatgacctgttatttctcctcagcattctggagggagaactgcaggctcgagatgaggtcataggcattttaaaggctgaaaaaatggacctggctttgctggaagctcagtatgggtttgtcactccaaaaaaggtgttagaggctctccagagagatgcttttcaagcgaaatctaccccttggcaggaggacatctatgagaaaccaatgaatgagttggacaaagttgtggaaaaacataaagaatcttacagacgaatcctgggacagcttttagtggcagaaaaatcccgtaggcaaaccatattggagttggaggaagaaaagagaaaacataaagaatacatggagaagagtgatgaattcatatgcctactagaacaggaatgtgaaagattaaagaagctaattgatcaagaaatcaagtctcaggaggagaaggagcaagaaaaggagaaaagggtcaccaccctgaaagaggagctgaccaagctgaagtcttttgctttgatggtggtggatgaacagcaaaggctgacggcacagctcacccttcaaagacagaaaatccaagagctgaccacaaatgcaaaggaaacacataccaaactagcccttgctgaagccagagttcaggaggaagagcagaaggcaaccagactagagaaggaactgcaaacgcagaccacaaagtttcaccaagaccaagacacaattatggcgaagctcaccaatgaggacagtcaaaatcgccagcttcaacaaaagctggcagcactcagccggcagattgatgagttagaagagacaaacaggtctttacgaaaagcagaagaggagctgcaagatataaaagaaaaaatcagtaagggagaatatggaaacgctggtatcatggctgaagtggaagagctcaggaaacgtgtgctagatatggaagggaaagatgaagagctcataaaaatggaggagcagtgcagagatctcaataagaggcttgaaagggagacgttacagagtaaagactttaaactagaggttgaaaaactcagtaaaagaattatggctctggaaaagttagaagacgctttcaacaaaagcaaacaagaatgctactctctgaaatgcaatttagaaaaagaaaggatgaccacaaagcagttgtctcaagaactggagagtttaaaagtaaggatcaaagagctagaagccattgaaagtcggctagaaaagacagaattcactctaaaagaggatttaactaaactgaaaacattaactgtgatgtttgtagatgaacggaaaacaatgagtgaaaaattaaagaaaactgaagataaattacaagctgcttcttctcagcttcaagtggagcaaaataaagtaacaacagttactgagaagttaattgaggaaactaaaagggcgctcaagtccaaaaccgatgtagaagaaaagatgtacagcgtaaccaaggagagagatgatttaaaaaacaaattgaaagcggaagaagagaaaggaaatgatctcctgtcaagagttaatatgttgaaaaataggcttcaatcattggaagcaattgagaaagatttcctaaaaaacaaattaaatcaagactctgggaaatccacaacagcattacaccaagaaaacaataagattaaggagctctctcaagaagtggaaagactgaaactgaagctaaaggacatgaaagccattgaggatgacctcatgaaaacagaagatgaatatgagactctagaacgaaggtatgctaatgaacgagacaaagctcaatttttatctaaagagctagaacatgttaaaatggaacttgctaagtacaagttagcagaaaagacagagaccagccatgaacaatggcttttcaaaaggcttcaagaagaagaagctaagtcagggcacctctcaagagaagtggatgcattaaaagagaaaattcatgaatacatggcaactgaagacctaatatgtcacctccagggagatcactcagtcctgcaaaaaaaactaaatcaacaagaaaacaggaacagagatttaggaagagagattgaaaacctcactaaggagttagagaggtaccggcatttcagtaagagcctcaggcctagtctcaatggaagaagaatttccgatcctcaagtattttctaaagaagttcagacagaagcagtagacaatgaaccacctgattacaagagcctcattcctctggaacgtgcagtcatcaatggtcagttatatgaggagagtgagaatcaagacgaggaccctaatgatgagggatctgtgctgtccttcaaatgcagccagtctactccatgtcctgttaacagaaagctatggattccctggatgaaatccaaggagggccatcttcagaatggaaaaatgcaaactaaacccaatgccaactttgtgcaacctggagatctagtcctaagccacacacctgggcagccacttcatataaaggttactccagaccatgtacaaaacacagccactcttgaaatcacaagtccaaccacagagagtcctcactcttacacgagtactgcagtgataccgaactgtggcacgccaaagcaaaggataaccatcctccaaaacgcctccataacaccagtaaagtccaaaacctctaccgaagacctcatgaatttagaacaaggcatgtccccaattaccatggcaacctttgccagagcacagaccccagagtcttgtggttctctaactccagaaaggacaatgtcccctattcaggttttggctgtgactggttcagctagctctcctgagcagggacgctccccagaaccaacagaaatcagtgccaagcatgcgatattcagagtctccccagaccggcagtcatcatggcagtttcagcgttcaaacagcaatagctcaagtgtgataactactgaggataataaaatccacattcacttaggaagtccttacatgcaagctgtagccagccctgtgagacctgccagcccttcagcaccactgcaggataaccgaactcaaggcttaattaacggggcactaaacaaaacaaccaataaagtcaccagcagtattactatcacaccaacagccacacctcttcctcgacaatcacaaattacagtaagtaatatatataactgaccacgctcaccctcatccagtccatactgatatttttgcaaggaactcaatccttttttaatcatccctccatatcccccaagactgactgaactcgtactttgggaaggtttgtgcatgaactatacaagagtatctgaaactaactgttgcctgcatagtcatatcgagtgtgcacttactgtatatcttttcatttacatacttgtatggaaaatatttagtctgcacttgtataaatacatctttatgtatttcattttccataactcactttaatttgactgcaacttgtcttggtgaaatactttaacattataaaacagtaaataatttgttattttta

SEQ ID NO: 10890 - DNA, 3970 bp, Homo sapiens
  source 1..3970: mol_type = unassigned DNA
acacacacacacacacacagacgtgctcacggagcctgtgcctgcctctacttgtctgctctgcgcagatggttcctggcttttgggtcacctcatcctgcagcccagtccagttagaacctttcttccacagagactggcaagctgtggggtaagagttttggtaaggctgcctgtcttcagagcatgaaggacactgcccggagagggaagagggcaatatttagtgtttgggcctacttgttgttgggctccccactgcctctcctttgcagagctatcactggcccctggttgcaaactctcggtggctttcaagcctacaaaacaaaaactgagagggtgtccaaaaagagaagaagaaaacgttgttgttggtcctggattccactgttggattttggtggggatgagaagaaggaattaccaggtgtgatcaacacctgcacggtacctgcacggctttaaagaatgcgttccagaggcagtgataccgagggctcagcccaaaagaaatttccaagacatactaaaggccacagtttccaagggcctaaaaacatgaagcatagacagcaagacaaagactcccccagtgagtcggatgtaatacttccgtgtcccaaggcagagaagccacacagtggtaatggccaccaagcagaagacctctcaagagatgacctgttatttctcctcagcattctggagggagaactgcaggctcgagatgaggtcataggcattttaaaggctgaaaaaatggacctggctttgctggaagctcagtatgggtttgtcactccaaaaaaggtgttagaggctctccagagagatgcttttcaagcgaaatctaccccttggcaggaggacatctatgagaaaccaatgaatgagttggacaaagttgtggaaaaacataaagaatcttacagacgaatcctgggacagcttttagtggcagaaaaatcccgtaggcaaaccatattggagttggaggaagaaaagagaaaacataaagaatacatggagaagagtgatgaattcatatgcctactagaacaggaatgtgaaagattaaagaagctaattgatcaagaaatcaagtctcaggaggagaaggagcaagaaaaggagaaaagggtcaccaccctgaaagaggagctgaccaagctgaagtcttttgctttgatggtggtggatgaacagcaaaggctgacggcacagctcacccttcaaagacagaaaatccaagagctgaccacaaatgcaaaggaaacacataccaaactagcccttgctgaagccagagttcaggaggaagagcagaaggcaaccagactagagaaggaactgcaaacgcagaccacaaagtttcaccaagaccaagacacaattatggcgaagctcaccaatgaggacagtcaaaatcgccagcttcaacaaaagctggcagcactcagccggcagattgatgagttagaagagacaaacaggtctttacgaaaagcagaagaggagctgcaagatataaaagaaaaaatcagtaagggagaatatggaaacgctggtatcatggctgaagtggaagagctcaggaaacgtgtgctagatatggaagggaaagatgaagagctcataaaaatggaggagcagtgcagagatctcaataagaggcttgaaagggagacgttacagagtaaagactttaaactagaggttgaaaaactcagtaaaagaattatggctctggaaaagttagaagacgctttcaacaaaagcaaacaagaatgctactctctgaaatgcaatttagaaaaagaaaggatgaccacaaagcagttgtctcaagaactggagagtttaaaagtaaggatcaaagagctagaagccattgaaagtcggctagaaaagacagaattcactctaaaagaggatttaactaaactgaaaacattaactgtgatgtttgtagatgaacggaaaacaatgagtgaaaaattaaagaaaactgaagataaattacaagctgcttcttctcagcttcaagtggagcaaaataaagtaacaacagttactgagaagttaattgaggaaactaaaagggcgctcaagtccaaaaccgatgtagaagaaaagatgtacagcgtaaccaaggagagagatgatttaaaaaacaaattgaaagcggaagaagagaaaggaaatgatctcctgtcaagagttaatatgttgaaaaataggcttcaatcattggaagcaattgagaaagatttcctaaaaaacaaattaaatcaagactctgggaaatccacaacagcattacaccaagaaaacaataagattaaggagctctctcaagaagtggaaagactgaaactgaagctaaaggacatgaaagccattgaggatgacctcatgaaaacagaagatgaatatgagactctagaacgaaggtatgctaatgaacgagacaaagctcaatttttatctaaagagctagaacatgttaaaatggaacttgctaagtacaagttagcagaaaagacagagaccagccatgaacaatggcttttcaaaaggcttcaagaagaagaagctaagtcagggcacctctcaagagaagtggatgcattaaaagagaaaattcatgaatacatggcaactgaagacctaatatgtcacctccagggagatcactcagtcctgcaaaaaaaactaaatcaacaagaaaacaggaacagagatttaggaagagagattgaaaacctcactaaggagttagagaggtaccggcatttcagtaagagcctcaggcctagtctcaatggaagaagaatttccgatcctcaagtattttctaaagaagttcagacagaagcagtagacaatgaaccacctgattacaagagcctcattcctctggaacgtgcagtcatcaatggtcagttatatgaggagagtgagaatcaagacgaggaccctaatgatgagggatctgtgctgtccttcaaatgcagccagtctactccatgtcctgttaacagaaagctatggattccctggatgaaatccaaggagggccatcttcagaatggaaaaatgcaaactaaacccaatgccaactttgtgcaacctggagatctagtcctaagccacacacctgggcagccacttcatataaaggttactccagaccatgtacaaaacacagccactcttgaaatcacaagtccaaccacagagagtcctcactcttacacgagtactgcagtgataccgaactgtggcacgccaaagcaaaggataaccatcctccaaaacgcctccataacaccagtaaagtccaaaacctctaccgaagacctcatgaatttagaacaaggcatgtccccaattaccatggcaacctttgccagagcacagaccccagagtcttgtggttctctaactccagaaaggacaatgtcccctattcaggttttggctgtgactggttcagctagctctcctgagcagggacgctccccagaaccaacagaaatcagtgccaagcatgcgatattcagagtctccccagaccggcagtcatcatggcagtttcagcgttcaaacagcaatagctcaagtgtgataactactgaggataataaaatccacattcacttaggaagtccttacatgcaagctgtagccagccctgtgagacctgccagcccttcagcaccactgcaggataaccgaactcaaggcttaattaacggggcactaaacaaaacaaccaataaagtcaccagcagtattactatcacaccaacagccacacctcttcctcgacaatcacaaattacagtggaaccacttcttctgcctcattgaactcaacatccttcagacttttaaggcattccaaatcccagtcttcatgttgaactgggttaagcatttattaaaaaatcgttttcttcta

SEQ ID NO: 10891 - DNA, 3274 bp, Homo sapiens
  source 1..3274: mol_type = unassigned DNA
ataggccgggcgcgctcagcgccccgctcgcattgttcgggcgactctcggagcgcgcacagtcggctcgcagcgcggcactacagcggccccggcccggcccccgcccggccccggcgcaggcagttcagattaaagaagctaattgatcaagaaatcaagtctcaggaggagaaggagcaagaaaaggagaaaagggtcaccaccctgaaagaggagctgaccaagctgaagtcttttgctttgatggtggtggatgaacagcaaaggctgacggcacagctcacccttcaaagacagaaaatccaagagctgaccacaaatgcaaaggaaacacataccaaactagcccttgctgaagccagagttcaggaggaagagcagaaggcaaccagactagagaaggaactgcaaacgcagaccacaaagtttcaccaagaccaagacacaattatggcgaagctcaccaatgaggacagtcaaaatcgccagcttcaacaaaagctggcagcactcagccggcagattgatgagttagaagagacaaacaggtctttacgaaaagcagaagaggagctgcaagatataaaagaaaaaatcagtaagggagaatatggaaacgctggtatcatggctgaagtggaagagctcaggaaacgtgtgctagatatggaagggaaagatgaagagctcataaaaatggaggagcagtgcagagatctcaataagaggcttgaaagggagacgttacagagtaaagactttaaactagaggttgaaaaactcagtaaaagaattatggctctggaaaagttagaagacgctttcaacaaaagcaaacaagaatgctactctctgaaatgcaatttagaaaaagaaaggatgaccacaaagcagttgtctcaagaactggagagtttaaaagtaaggatcaaagagctagaagccattgaaagtcggctagaaaagacagaattcactctaaaagaggatttaactaaactgaaaacattaactgtgatgtttgtagatgaacggaaaacaatgagtgaaaaattaaagaaaactgaagataaattacaagctgcttcttctcagcttcaagtggagcaaaataaagtaacaacagttactgagaagttaattgaggaaactaaaagggcgctcaagtccaaaaccgatgtagaagaaaagatgtacagcgtaaccaaggagagagatgatttaaaaaacaaattgaaagcggaagaagagaaaggaaatgatctcctgtcaagagttaatatgttgaaaaataggcttcaatcattggaagcaattgagaaagatttcctaaaaaacaaattaaatcaagactctgggaaatccacaacagcattacaccaagaaaacaataagattaaggagctctctcaagaagtggaaagactgaaactgaagctaaaggacatgaaagccattgaggatgacctcatgaaaacagaagatgaatatgagactctagaacgaaggtatgctaatgaacgagacaaagctcaatttttatctaaagagctagaacatgttaaaatggaacttgctaagtacaagttagcagaaaagacagagaccagccatgaacaatggcttttcaaaaggcttcaagaagaagaagctaagtcagggcacctctcaagagaagtggatgcattaaaagagaaaattcatgaatacatggcaactgaagacctaatatgtcacctccagggagatcactcagtcctgcaaaaaaaactaaatcaacaagaaaacaggaacagagatttaggaagagagattgaaaacctcactaaggagttagagaggtaccggcatttcagtaagagcctcaggcctagtctcaatggaagaagaatttccgatcctcaagtattttctaaagaagttcagacagaagcagtagacaatgaaccacctgattacaagagcctcattcctctggaacgtgcagtcatcaatggtcagttatatgaggagagtgagaatcaagacgaggaccctaatgatgagggatctgtgctgtccttcaaatgcagccagtctactccatgtcctgttaacagaaagctatggattccctggatgaaatccaaggagggccatcttcagaatggaaaaatgcaaactaaacccaatgccaactttgtgcaacctggagatctagtcctaagccacacacctgggcagccacttcatataaaggttactccagaccatgtacaaaacacagccactcttgaaatcacaagtccaaccacagagagtcctcactcttacacgagtactgcagtgataccgaactgtggcacgccaaagcaaaggataaccatcctccaaaacgcctccataacaccagtaaagtccaaaacctctaccgaagacctcatgaatttagaacaaggcatgtccccaattaccatggcaacctttgccagagcacagaccccagagtcttgtggttctctaactccagaaaggacaatgtcccctattcaggttttggctgtgactggttcagctagctctcctgagcagggacgctccccagaaccaacagaaatcagtgccaagcatgcgatattcagagtctccccagaccggcagtcatcatggcagtttcagcgttcaaacagcaatagctcaagtgtgataactactgaggataataaaatccacattcacttaggaagtccttacatgcaagctgtagccagccctgtgagacctgccagcccttcagcaccactgcaggataaccgaactcaaggcttaattaacggggcactaaacaaaacaaccaataaagtcaccagcagtattactatcacaccaacagccacacctcttcctcgacaatcacaaattacagtaagtaatatatataactgaccacgctcaccctcatccagtccatactgatatttttgcaaggaactcaatccttttttaatcatccctccatatcccccaagactgactgaactcgtactttgggaaggtttgtgcatgaactatacaagagtatctgaaactaactgttgcctgcatagtcatatcgagtgtgcacttactgtatatcttttcatttacatacttgtatggaaaatatttagtctgcacttgtataaatacatctttatgtatttcattttccataactcactttaatttgactgcaacttgtcttggtgaaatactttaacattataaaacagtaaataatttgttattttta

SEQ ID NO: 10892 - DNA, 1712 bp, Homo sapiens
  source 1..1712: mol_type = unassigned DNA
acacacacacacacacacagacgtgctcacggagcctgtgcctgcctctacttgtctgctctgcgcagatggttcctggcttttgggtcacctcatcctgcagcccagtccagttagaacctttcttccacagagactggcaagctgtggggtaagagttttggtaaggctgcctgtcttcagagcatgaaggacactgcccggagagggaagagggcaatatttagtgtttgggcctacttgttgttgggctccccactgcctctcctttgcagagctatcactggcccctggttgcaaactctcggtggctttcaagcctacaaaacaaaaactgagagggtgtccaaaaagagaagaagaaaacgttgttgttggtcctggattccactgttggattttggtggggatgagaagaaggaattaccaggtgtgatcaacacctgcacggtacctgcacggctttaaagaatgcgttccagaggcagtgataccgagggctcagcccaaaagaaatttccaagacatactaaaggccacagtttccaagggcctaaaaacatgaagcatagacagcaagacaaagactcccccagtgagtcggatgtaatacttccgtgtcccaaggcagagaagccacacagtggtaatggccaccaagcagaagacctctcaagagatgacctgttatttctcctcagcattctggagggagaactgcaggctcgagatgaggtcataggcattttaaaggctgaaaaaatggacctggctttgctggaagctcagtatgggtttgtcactccaaaaaaggtgttagaggctctccagagagatgcttttcaagcgaaatctaccccttggcaggaggacatctatgagaaaccaatgaatgagttggacaaagttgtggaaaaacataaagaatcttacagacgaatcctgggacagcttttagtggcagaaaaatcccgtaggcaaaccatattggagttggaggaagaaaagagaaaacataaagaatacatggagaagagtgatgaattcatatgcctactagaacaggaatgtgaaagatggagtctagctctgctgccgaggctggagtgcaatggcatgatcttggctcactgcaatctctgcctcctgggttcaagtgattctcctgcctcagcattccaagtagctgggattacaggcacccgccatcatgcccagctagtttttgtatttttgtagagacagagtttcaccatgttggccaggctagtcttgaacccctgacctcaggtgatccacccacctcggcctcccaaagtgctgggataacaggcatgagccaacgcgcttgacttgcacatatatttttaatgtgtgagtgggtgcatgtcataattccagatggaaatttgtcaccacaaaacataatttttatttagctgatctttccaggtttctatttataatggaatgaaaagatgaagttgggcttatgaatcaagacaaacacaggccctggtcattgtgtaattccatatagtataatttgtttgcaatctttcattccatacacctacaatacagctctaaaaataatgctacctacaatataaagatatactttttttccaaataaccttcaaaaatgtcaaaatatgcaacaaaaatattgtatcatatctaaaccctcaaataagctacatttaaaccaa

SEQ ID NO: 10893 - DNA, 2837 bp, Homo sapiens
  source 1..2837: mol_type = unassigned DNA
ggagcgcgcacagtcggctcgcagcgcggcactacagcggccccggcccggcccccgcccggccccggcgcaggcagttcagattaaagaagctaattgatcaagaaatcaagtctcaggaggagaaggagcaagaaaaggagaaaagggtcaccaccctgaaagaggagctgaccaagctgaagtcttttgctttgatggtggtggatgaacagcaaaggctgacggcacagctcacccttcaaagacagaaaatccaagagctgaccacaaatgcaaaggaaacacataccaaactagcccttgctgaagccagagttcaggaggaagagcagaaggcaaccagactagagaaggaactgcaaacgcagaccacaaagtttcaccaagaccaagacacaattatggcgaagctcaccaatgaggacagtcaaaatcgccagcttcaacaaaagctggcagcactcagccggcagattgatgagttagaagagacaaacaggtctttacgaaaagcagaagaggagctgcaagatataaaagaaaaaatcagtaagggagaatatggaaacgctggtatcatggctgaagtggaagagctcataaaaatggaggagcagtgcagagatctcaataagaggcttgaaagggagacgttacagagtaaagactttaaactagaggttgaaaaactcagtaaaagaattatggctctggaaaagttagaagacgctttcaacaaaagcaaacaagaatgctactctctgaaatgcaatttagaaaaagaaaggatgaccacaaagcagttgtctcaagaactggagagtttaaaagtaaggatcaaagagctagaagccattgaaagtcggctagaaaagacagaattcactctaaaagaggatttaactaaactgaaaacattaactgtgatgtttgtagatgaacggaaaacaatgagtgaaaaattaaagaaaactgaagataaattacaagctgcttcttctcagcttcaagtggagcaaaataaagtaacaacagttactgagaagttaattgaggaaactaaaagggcgctcaagtccaaaaccgatgtagaagaaaagatgtacagcgtaaccaaggagagagatgatttaaaaaacaaattgaaagcggaagaagagaaaggaaatgatctcctgtcaagagttaatatgttgaaaaataggcttcaatcattggaagcaattgagaaagatttcctaaaaaacaaattaaatcaagactctgggaaatccacaacagcattacaccaagaaaacaataagattaaggagctctctcaagaagtggaaagactgaaactgaagctaaaggacatgaaagccattgaggatgacctcatgaaaacagaagatgaatatgagactctagaacgaaggtatgctaatgaacgagacaaagctcaatttttatctaaagagctagaacatgttaaaatggaacttgctaagtacaagttagcagaaaagacagagaccagccatgaacaatggcttttcaaaaggcttcaagaagaagaagctaagtcagggcacctctcaagagaagtggatgcattaaaagagaaaattcatgaatacatggcaactgaagacctaatatgtcacctccagggagatcactcagtcctgcaaaaaaaactaaatcaacaagaaaacaggaacagagatttaggaagagagattgaaaacctcactaaggagttagagaggtaccggcatttcagtaagagcctcaggcctagtctcaatggaagaagaatttccgatcctcaagtattttctaaagaagttcagacagaagcagtagacaatgaaccacctgattacaagagcctcattcctctggaacgtgcagtcatcaatggtcagttatatgaggagagtgagaatcaagacgaggaccctaatgatgagggatctgtgctgtccttcaaatgcagccagtctactccatgtcctgttaacagaaagctatggattccctggatgaaatccaaggagggccatcttcagaatggaaaaatgcaaactaaacccaatgccaactttgtgcaacctggagatctagtcctaagccacacacctgggcagccacttcatataaaggttactccagaccatgtacaaaacacagccactcttgaaatcacaagtccaaccacagagagtcctcactcttacacgagtactgcagtgataccgaactgtggcacgccaaagcaaaggataaccatcctccaaaacgcctccataacaccagtaaagtccaaaacctctaccgaagacctcatgaatttagaacaaggcatgtccccaattaccatggcaacctttgccagagcacagaccccagagtcttgtggttctctaactccagaaaggacaatgtcccctattcaggttttggctgtgactggttcagctagctctcctgagcagggacgctccccagaaccaacagaaatcagtgccaagcatgcgatattcagagtctccccagaccggcagtcatcatggcagtttcagcgttcaaacagcaatagctcaagtgtgataactactgaggataataaaatccacattcacttaggaagtccttacatgcaagctgtagccagccctgtgagacctgccagcccttcagcaccactgcaggataaccgaactcaaggcttaattaacggggcactaaacaaaacaaccaataaagtcaccagcagtattactatcacaccaacagccacacctcttcctcgacaatcacaaattacagtaagtaatatatataactga

SEQ ID NO: 10894 - DNA, 2854 bp, Homo sapiens
  source 1..2854: mol_type = unassigned DNA
ggcccccgcccggccccggcgcaggcagttcagattaaagaagctaattgatcaagaaatcaagtctcaggaggagaaggagcaagaaaaggagaaaagggtcaccaccctgaaagaggagctgaccaagctgaagtcttttgctttgatggtggtggatgaacagcaaaggctgacggcacagctcacccttcaaagacagaaaatccaagagctgaccacaaatgcaaaggaaacacataccaaactagcccttgctgaagccagagttcaggaggaagagcagaaggcaaccagactagagaaggaactgcaaacgcagaccacaaagtttcaccaagaccaagacacaattatggcgaagctcaccaatgaggacagtcaaaatcgccagcttcaacaaaagctggcagcactcagccggcagattgatgagttagaagagacaaacaggtctttacgaaaagcagaagaggagctgcaagatataaaagaaaaaatcagtaagggagaatatggaaacgctggtatcatggctgaagtggaagagctcaggaaacgtgtgctagatatggaagggaaagatgaagagctcataaaaatggaggagcagtgcagagatctcaataagaggcttgaaagggagacgttacagagtaaagactttaaactagaggttgaaaaactcagtaaaagaattatggctctggaaaagttagaagacgctttcaacaaaagcaaacaagaatgctactctctgaaatgcaatttagaaaaagaaaggatgaccacaaagcagttgtctcaagaactggagagtttaaaagtaaggatcaaagagctagaagccattgaaagtcggctagaaaagacagaattcactctaaaagaggatttaactaaactgaaaacattaactgtgatgtttgtagatgaacggaaaacaatgagtgaaaaattaaagaaaactgaagataaattacaagctgcttcttctcagcttcaagtggagcaaaataaagtaacaacagttactgagaagttaattgaggaaactaaaagggcgctcaagtccaaaaccgatgtagaagaaaagatgtacagcgtaaccaaggagagagatgatttaaaaaacaaattgaaagcggaagaagagaaaggaaatgatctcctgtcaagagttaatatgttgaaaaataggcttcaatcattggaagcaattgagaaagatttcctaaaaaacaaattaaatcaagactctgggaaatccacaacagcattacaccaagaaaacaataagattaaggagctctctcaagaagtggaaagactgaaactgaagctaaaggacatgaaagccattgaggatgacctcatgaaaacagaagatgaatatgagactctagaacgaaggtatgctaatgaacgagacaaagctcaatttttatctaaagagctagaacatgttaaaatggaacttgctaagtacaagttagcagaaaagacagagaccagccatgaacaatggcttttcaaaaggcttcaagaagaagaagctaagtcagggcacctctcaagagaagtggatgcattaaaagagaaaattcatgaatacatggcaactgaagacctaatatgtcacctccagggagatcactcagtcctgcaaaaaaaactaaatcaacaagaaaacaggaacagagatttaggaagagagattgaaaacctcactaaggagttagagaggtaccggcatttcagtaagagcctcaggcctagtctcaatggaagaagaatttccgatcctcaagtattttctaaagaagttcagacagaagcagtagacaatgaaccacctgattacaagagcctcattcctctggaacgtgcagtcatcaatggtcagttatatgaggagagtgagaatcaagacgaggaccctaatgatgagggatctgtgctgtccttcaaatgcagccagtctactccatgtcctgttaacagaaagctatggattccctggatgaaatccaaggagggccatcttcagaatggaaaaatgcaaactaaacccaatgccaactttgtgcaacctggagatctagtcctaagccacacacctgggcagccacttcatataaaggttactccagaccatgtacaaaacacagccactcttgaaatcacaagtccaaccacagagagtcctcactcttacacgagtactgcagtgataccgaactgtggcacgccaaagcaaaggataaccatcctccaaaacgcctccataacaccagtaaagtccaaaacctctaccgaagacctcatgaatttagaacaaggcatgtccccaattaccatggcaacctttgccagagcacagaccccagagtcttgtggttctctaactccagaaaggacaatgtcccctattcaggttttggctgtgactggttcagctagctctcctgagcagggacgctccccagaaccaacagaaatcagtgccaagcatgcgatattcagagtctccccagaccggcagtcatcatggcagtttcagcgttcaaacagcaatagctcaagtgtgataactactgaggataataaaatccacattcacttaggaagtccttacatgcaagctgtagccagccctgtgagacctgccagcccttcagcaccactgcaggataaccgaactcaaggcttaattaacggggcactaaacaaaacaaccaataaagtcaccagcagtattactatcacaccaacagccacacctcttcctcgacaatcacaaattacagtggaaccacttcttctgcctcattgaactcaacatccttcagac

SEQ ID NO: 10895 - DNA, 2321 bp, Homo sapiens
  source 1..2321: mol_type = unassigned DNA
ttcagattaaagaagctaattgatcaagaaatcaagtctcaggaggagaaggagcaagaaaaggagaaaagggtcaccaccctgaaagaggagctgaccaagctgaagtcttttgctttgatggtggtggatgaacagcaaaggttgaaaaactcagtaaaagaattatggctctggaaaagttagaagacgctttcaacaaaagcaaacaagaatgctactctctgaaatgcaatttagaaaaagaaaggatgaccacaaagcagttgtctcaagaactggagagtttaaaagtaaggatcaaagagctagaagccattgaaagtcggctagaaaagacagaattcactctaaaagaggatttaactaaactgaaaacattaactgtgatgtttgtagatgaacggaaaacaatgagtgaaaaattaaagaaaactgaagataaattacaagctgcttcttctcagcttcaagtggagcaaaataaagtaacaacagttactgagaagttaattgaggaaactaaaagggcgctcaagtccaaaaccgatgtagaagaaaagatgtacagcgtaaccaaggagagagatgatttaaaaaacaaattgaaagcggaagaagagaaaggaaatgatctcctgtcaagagttaatatgttgaaaaataggcttcaatcattggaagcaattgagaaagatttcctaaaaaacaaattaaatcaagactctgggaaatccacaacagcattacaccaagaaaacaataagattaaggagctctctcaagaagtggaaagactgaaactgaagctaaaggacatgaaagccattgaggatgacctcatgaaaacagaagatgaatatgagactctagaacgaaggtatgctaatgaacgagacaaagctcaatttttatctaaagagctagaacatgttaaaatggaacttgctaagtacaagttagcagaaaagacagagaccagccatgaacaatggcttttcaaaaggcttcaagaagaagaagctaagtcagggcacctctcaagagaagtggatgcattaaaagagaaaattcatgaatacatggcaactgaagacctaatatgtcacctccagggagatcactcagtcctgcaaaaaaaactaaatcaacaagaaaacaggaacagagatttaggaagagagattgaaaacctcactaaggagttagagaggtaccggcatttcagtaagagcctcaggcctagtctcaatggaagaagaatttccgatcctcaagtattttctaaagaagttcagacagaagcagtagacaatgaaccacctgattacaagagcctcattcctctggaacgtgcagtcatcaatggtcagttatatgaggagagtgagaatcaagacgaggaccctaatgatgagggatctgtgctgtccttcaaatgcagccagtctactccatgtcctgttaacagaaagctatggattccctggatgaaatccaaggagggccatcttcagaatggaaaaatgcaaactaaacccaatgccaactttgtgcaacctggagatctagtcctaagccacacacctgggcagccacttcatataaaggttactccagaccatgtacaaaacacagccactcttgaaatcacaagtccaaccacagagagtcctcactcttacacgagtactgcagtgataccgaactgtggcacgccaaagcaaaggataaccatcctccaaaacgcctccataacaccagtaaagtccaaaacctctaccgaagacctcatgaatttagaacaaggcatgtccccaattaccatggcaacctttgccagagcacagaccccagagtcttgtggttctctaactccagaaaggacaatgtcccctattcaggttttggctgtgactggttcagctagctctcctgagcagggacgctccccagaaccaacagaaatcagtgccaagcatgcgatattcagagtctccccagaccggcagtcatcatggcagtttcagcgttcaaacagcaatagctcaagtgtgataactactgaggataataaaatccacattcacttaggaagtccttacatgcaagctgtagccagccctgtgagacctgccagcccttcagcaccactgcaggataaccgaactcaaggcttaattaacggggcactaaacaaaacaaccaataaagtcaccagcagtattactatcacaccaacagccacacctcttcctcgacaatcacaaattacagtggaaccacttcttctgcctcattgaactcaacatccttcagac

SEQ ID NO: 10896 - DNA, 2898 bp, Homo sapiens
  source 1..2898: mol_type = unassigned DNA
acagtcggctcgcagcgcggcactacagcggccccggcccggcccccgcccggccccggcgcaggcagttcagggaagcccaccataatgagaagagcggggccaacacccatgtcactgtggagaagtacagaatatgcaatggaagagttgtttatctgatataagcggtaattggaaactgaaaaattcctgctctggaaaaaagatattctgctcttctgaatctaacagaggaagagacaaacagaaaccatcaattattgtttcagattaaagaagctaattgatcaagaaatcaagtctcaggaggagaaggagcaagaaaaggagaaaagggtcaccaccctgaaagaggagctgaccaagctgaagtcttttgctttgatggtggtggatgaacagcaaaggctgacggcacagctcacccttcaaagacagaaaatccaagagctgaccacaaatgcaaaggaaacacataccaaactagcccttgctgaagccagagttcaggaggaagagcagaaggcaaccagactagagaaggaactgcaaacgcagaccacaaagtttcaccaagaccaagacacaattatggcgaagctcaccaatgaggacagtcaaaatcgccagcttcaacaaaagctggcagcactcagccggcagattgatgagttagaagagacaaacaggtctttacgaaaagcagaagaggagctgcaagatataaaagaaaaaatcagtaagggagaatatggaaacgctggtatcatggctgaagtggaagagctcaggaaacgtgtgctagatatggaagggaaagatgaagagctcataaaaatggaggagcagtgcagagatctcaataagaggcttgaaagggagacgttacagagtaaagactttaaactagaggttgaaaaactcagtaaaagaattatggctctggaaaagttagaagacgctttcaacaaaagcaaacaagaatgctactctctgaaatgcaatttagaaaaagaaaggatgaccacaaagcagttgtctcaagaactggagagtttaaaagtaaggatcaaagagctagaagccattgaaagtcggctagaaaagacagaattcactctaaaagaggatttaactaaactgaaaacattaactgtgatgtttgtagatgaacggaaaacaatgagtgaaaaattaaagaaaactgaagataaattacaagctgcttcttctcagcttcaagtggagcaaaataaagtaacaacagttactgagaagttaattgaggaaactaaaagggcgctcaagtccaaaaccgatgtagaagaaaagatgtacagcgtaaccaaggagagagatgatttaaaaaacaaattgaaagcggaagaagagaaaggaaatgatctcctgtcaagagttaatatgttgaaaaataggcttcaatcattggaagcaattgagaaagatttcctaaaaaacaaattaaatcaagactctgggaaatccacaacagcattacaccaagaaaacaataagattaaggagctctctcaagaagtggaaagactgaaactgaagctaaaggacatgaaagccattgaggatgacctcatgaaaacagaagatgaatatgagactctagaacgaaggtatgctaatgaacgagacaaagctcaatttttatctaaagagctagaacatgttaaaatggaacttgctaagtacaagttagcagaaaagacagagaccagccatgaacaatggcttttcaaaaggcttcaagaagaagaagctaagtcagggcacctctcaagagaagtggatgcattaaaagagaaaattcatgaatacatggcaactgaagacctaatatgtcacctccagggagatcactcagtcctgcaaaaaaaactaaatcaacaagaaaacaggaacagagatttaggaagagagattgaaaacctcactaaggagttagagaggtaccggcatttcagtaagagcctcaggcctagtctcaatggaagaagaatttccgatcctcaagtattttctaaagaagttcagacagaagcagtagacaatgaaccacctgattacaagagcctcattcctctggaacgtgcagtcatcaatggtcagttatatgaggagagtgagaatcaagacgaggaccctaatgatgagggatctgtgctgtccttcaaatgcagccagtctactccatgtcctgttaacagaaagctatggattccctggatgaaatccaaggagggccatcttcagaatggaaaaatgcaaactaaacccaatgccaactttgtgcaacctggagatctagtcctaagccacacacctgggcagccacttcatataaaggttactccagaccatgtacaaaacacagccactcttgaaatcacaagtccaaccacagagagtcctcactcttacacgagtactgcagtgataccgaactgtggcacgccaaagcaaaggataaccatcctccaaaacgcctccataacaccagtaaagtccaaaacctctaccgaagacctcatgaatttagaacaaggcatgtccccaattaccatggcaacctttgccagagcacagaccccagagtcttgtggttctctaactccagaaaggacaatgtcccctattcaggttttggctgtgactggttcagctagctctcctgagcagggacgctccccagaaccaacagaaatcagtgccaagcatgcgatattcagagtctccccagaccggcagtcatcatggcagtttcagcgttcaaacagcaatagctcaagtgtgataactactgaggataataaaatccacattcacttaggaagtccttacatgcaagctgtagccagccct

SEQ ID NO: 10897 - DNA, 8382 bp, Homo sapiens
  source 1..8382: mol_type = unassigned DNA
gcgcgtcgcgcgcagcggacgccgacagaatccccgaggcgcctggcgcgggcgcgggcgcgaaggcgatccgggcgccaccccgcggtcatcggtcaccggtcgctctcaggaacagcagcgcaacctctgctccctgcctcgcctcccgcgcgcctaggtgcctgcgactttaattaaagggccgtcccctcgccgaggctgcagcaccgcccccccggcttctcgcgcctcaaaatgagtagctcccactctcgggcgggccagagcgcagcaggcgcggctccgggcggcggcgtcgacacgcgggacgccgagatgccggccaccgagaaggacctggcggaggacgcgccgtggaagaagatccagcagaacactttcacgcgctggtgcaacgagcacctgaagtgcgtgagcaagcgcatcgccaacctgcagacggacctgagcgacgggctgcggcttatcgcgctgttggaggtgctcagccagaagaagatgcaccgcaagcacaaccagcggcccactttccgccaaatgcagcttgagaacgtgtcggtggcgctcgagttcctggaccgcgagagcatcaaactggtgtccatcgacagcaaggccatcgtggacgggaacctgaagctgatcctgggcctcatctggaccctgatcctgcactactccatctccatgcccatgtgggacgaggaggaggatgaggaggccaagaagcagacccccaagcagaggctcctgggctggatccagaacaagctgccgcagctgcccatcaccaacttcagccgggactggcagagcggccgggccctgggcgccctggtggacagctgtgccccgggcctgtgtcctgactgggactcttgggacgccagcaagcccgttaccaatgcgcgagaggccatgcagcaggcggatgactggctgggcatcccccaggtgatcacccccgaggagattgtggaccccaacgtggacgagcactctgtcatgacctacctgtcccagttccccaaggccaagctgaagccaggggctcccttgcggcccaaactgaacccgaagaaagcccgtgcctacgggccaggcatcgagcccacaggcaacatggtgaagaagcgggcagagttcactgtggagaccagaagtgctggccagggagaggtgctggtgtacgtggaggacccggccggacaccaggaggaggcaaaagtgaccgccaataacgacaagaaccgcaccttctccgtctggtacgtccccgaggtgacggggactcataaggttactgtgctctttgctggccagcacatcgccaagagccccttcgaggtgtacgtggataagtcacagggtgacgccagcaaagtgacagcccaaggtcccggcctggagcccagtggcaacatcgccaacaagaccacctactttgagatctttacggcaggagctggcacgggcgaggtcgaggttgtgatccaggaccccatgggacagaagggcacggtagagcctcagctggaggcccggggcgacagcacataccgctgcagctaccagcccaccatggagggcgtccacaccgtgcacgtcacgtttgccggcgtgcccatccctcgcagcccctacactgtcactgttggccaagcctgtaacccgagtgcctgccgggcggttggccggggcctccagcccaagggtgtgcgggtgaaggagacagctgacttcaaggtgtacacaaagggcgctggcagtggggagctgaaggtcaccgtgaagggccccaagggagaggagcgcgtgaagcagaaggacctgggggatggcgtgtatggcttcgagtattaccccatggtccctggaacctatatcgtcaccatcacgtggggtggtcagaacatcgggcgcagtcccttcgaagtgaaggtgggcaccgagtgtggcaatcagaaggtacgggcctggggccctgggctggagggcggcgtcgttggcaagtcagcagactttgtggtggaggctatcggggacgacgtgggcacgctgggcttctcggtggaagggccatcgcaggctaagatcgaatgtgacgacaagggcgacggctcctgtgatgtgcgctactggccgcaggaggctggcgagtatgccgttcacgtgctgtgcaacagcgaagacatccgcctcagccccttcatggctgacatccgtgacgcgccccaggacttccacccagacagggtgaaggcacgtgggcctggattggagaagacaggtgtggccgtcaacaagccagcagagttcacagtggatgccaagcacggtggcaaggccccacttcgggtccaagtccaggacaatgaaggctgccctgtggaggcgttggtcaaggacaacggcaatggcacttacagctgctcctacgtgcccaggaagccggtgaagcacacagccatggtgtcctggggaggcgtcagcatccccaacagccccttcagggtgaatgtgggagctggcagccaccccaacaaggtcaaagtatacggccccggagtagccaagacagggctcaaggcccacgagcccacctacttcactgtggactgcgccgaggctggccagggggacgtcagcatcggcatcaagtgtgcccctggagtggtaggccccgccgaagctgacatcgacttcgacatcatccgcaatgacaatgacaccttcacggtcaagtacacgccccggggggctggcagctacaccattatggtcctctttgctgaccaggccacgcccaccagccccatccgagtcaaggtggagccctctcatgacgccagtaaggtgaaggccgagggccctggcctcagtcgcactggtgtcgagcttggcaagcccacccacttcacagtaaatgccaaagctgctggcaaaggcaagctggacgtccagttctcaggactcaccaagggggatgcagtgcgagatgtggacatcatcgaccaccatgacaacacctacacagtcaagtacacgcctgtccagcagggtccagtaggcgtcaatgtcacttatggaggggatcccatccctaagagccctttctcagtggcagtatctccaagcctggacctcagcaagatcaaggtgtctggcctgggagagaaggtggacgttggcaaagaccaggagttcacagtcaaatcaaagggtgctggtggtcaaggcaaagtggcatccaagattgtgggcccctcgggtgcagcggtgccctgcaaggtggagccaggcctgggggctgacaacagtgtggtgcgcttcctgccccgtgaggaagggccctatgaggtggaggtgacctatgacggcgtgcccgtgcctggcagcccctttcctctggaagctgtggcccccaccaagcctagcaaggtgaaggcgtttgggccggggctgcagggaggcagtgcgggctcccccgcccgcttcaccatcgacaccaagggcgccggcacaggtggcctgggcctgacggtggagggcccctgtgaggcgcagctcgagtgcttggacaatggggatggcacatgttccgtgtcctacgtgcccaccgagcccggggactacaacatcaacatcctcttcgctgacacccacatccctggctccccattcaaggcccacgtggttccctgctttgacgcatccaaagtcaagtgctcaggccccgggctggagcgggccaccgctggggaggtgggccaattccaagtggactgctcgagcgcgggcagcgcggagctgaccattgagatctgctcggaggcggggcttccggccgaggtgtacatccaggaccacggtgatggcacgcacaccattacctacattcccctctgccccggggcctacaccgtcaccatcaagtacggcggccagcccgtgcccaacttccccagcaagctgcaggtggaacctgcggtggacacttccggtgtccagtgctatgggcctggtattgagggccagggtgtcttccgtgaggccaccactgagttcagtgtggacgcccgggctctgacacagaccggagggccgcacgtcaaggcccgtgtggccaacccctcaggcaacctgacggagacctacgttcaggaccgtggcgatggcatgtacaaagtggagtacacgccttacgaggagggactgcactccgtggacgtgacctatgacggcagtcccgtgcccagcagccccttccaggtgcccgtgaccgagggctgcgacccctcccgggtgcgtgtccacgggccaggcatccaaagtggcaccaccaacaagcccaacaagttcactgtggagaccaggggagctggcacgggcggcctgggcctggctgtagagggcccctccgaggccaagatgtcctgcatggataacaaggacggcagctgctcggtcgagtacatcccttatgaggctggcacctacagcctcaacgtcacctatggtggccatcaagtgccaggcagtcctttcaaggtccctgtgcatgatgtgacagatgcgtccaaggtcaagtgctctgggcccggcctgagcccaggcatggttcgtgccaacctccctcagtccttccaggtggacacaagcaaggctggtgtggccccattgcaggtcaaagtgcaagggcccaaaggcctggtggagccagtggacgtggtagacaacgctgatggcacccagaccgtcaattatgtgcccagccgagaagggccctacagcatctcagtactgtatggagatgaagaggtaccccggagccccttcaaggtcaaggtgctgcctactcatgatgccagcaaggtgaaggccagtggccccgggctcaacaccactggcgtgcctgccagcctgcccgtggagttcaccatcgatgcaaaggacgccggggagggcctgctggctgtccagatcacggatcccgaaggcaagccgaagaagacacacatccaagacaaccatgacggcacgtatacagtggcctacgtgccagacgtgacaggtcgctacaccatcctcatcaagtacggtggtgacgagatccccttctccccgtaccgcgtgcgtgccgtgcccaccggggacgccagcaagtgcactgtcacagtgtcaatcggaggtcacgggctaggtgctggcatcggccccaccattcagattggggaggagacggtgatcactgtggacactaaggcggcaggcaaaggcaaagtgacgtgcaccgtgtgcacgcctgatggctcagaggtggatgtggacgtggtggagaatgaggacggcactttcgacatcttctacacggccccccagccgggcaaatacgtcatctgtgtgcgctttggtggcgagcacgtgcccaacagccccttccaagtgacggctctggctggggaccagccctcggtgcagccccctctacggtctcagcagctggccccacagtacacctacgcccagggcggccagcagacttgggccccggagaggcccctggtgggtgtcaatgggctggatgtgaccagcctgaggccctttgaccttgtcatccccttcaccatcaagaagggcgagatcacaggggaggttcggatgccctcaggcaaggtggcgcagcccaccatcactgacaacaaagacggcaccgtgaccgtgcggtatgcacccagcgaggctggcctgcacgagatggacatccgctatgacaacatgcacatcccaggaagccccttgcagttctatgtggattacgtcaactgtggccatgtcactgcctatgggcctggcctcacccatggagtagtgaacaagcctgccaccttcaccgtcaacaccaaggatgcaggagaggggggcctgtctctggccattgagggcccgtccaaagcagaaatcagctgcactgacaaccaggatgggacatgcagcgtgtcctacctgcctgtgctgccgggggactacagcattctagtcaagtacaatgaacagcacgtcccaggcagccccttcactgctcgggtcacaggtgacgactccatgcgtatgtcccacctaaaggtcggctctgctgccgacatccccatcaacatctcagagacggatctcagcctgctgacggccactgtggtcccgccctcgggccgggaggagccctgtttgctgaagcggctgcgtaatggccacgtggggatttcattcgtgcccaaggagacgggggagcacctggtgcatgtgaagaaaaatggccagcacgtggccagcagccccatcccggtggtgatcagccagtcggaaattggggatgccagtcgtgttcgggtctctggtcagggccttcacgaaggccacacctttgagcctgcagagtttatcattgatacccgcgatgcaggctatggtgggctcagcctgtccattgagggccccagcaaggtggacatcaacacagaggacctggaggacgggacgtgcagggtcacctactgccccacagagccaggcaactacatcatcaacatcaagtttgccgaccagcacgtgcctggcagccccttctctgtgaaggtgacaggcgagggccgggtgaaagagagcatcacccgcaggcgtcgggctccttcagtggccaacgttggtagtcattgtgacctcagcctgaaaatccctgaaattagcatccaggatatgacagcccaggtgaccagcccatcgggcaagacccatgaggccgagatcgtggaaggggagaaccacacctactgcatccgctttgttcccgctgagatgggcacacacacagtcagcgtgaagtacaagggccagcacgtgcctgggagccccttccagttcaccgtggggcccctaggggaagggggagcccacaaggtccgagctgggggccctggcctggagagagctgaagctggagtgccagccgaattcagtatctggacccgggaagctggtgctggaggcctggccattgctgtcgagggccccagcaaggctgagatctcttttgaggaccgcaaggacggctcctgtggtgtggcttatgtggtccaggagccaggtgactacgaagtctcagtcaagttcaacgaggaacacattcccgacagccccttcgtggtgcctgtggcttctccgtctggcgacgcccgccgcctcactgtttctagccttcaggagtcagggctaaaggtcaaccagccagcctcttttgcagtcagcctgaacggggccaagggggcgatcgatgccaaggtgcacagcccctcaggagccctggaggagtgctatgtcacagaaattgaccaagataagtatgctgtgcgcttcatccctcgggagaatggcgtttacctgattgacgtcaagttcaacggcacccacatccctggaagccccttcaagatccgagttggggagcctgggcatggaggggacccaggcttggtgtctgcttacggagcaggtctggaaggcggtgtcacagggaacccagctgagttcgtcgtgaacacgagcaatgcgggagctggtgccctgtcggtgaccattgacggcccctccaaggtgaagatggattgccaggagtgccctgagggctaccgcgtcacctatacccccatggcacctggcagctacctcatctccatcaagtacggcggcccctaccacattgggggcagccccttcaaggccaaagtcacaggcccccgtctcgtcagcaaccacagcctccacgagacatcatcagtgtttgtagactctctgaccaaggccacctgtgccccccagcatggggccccgggtcctgggcctgctgacgccagcaaggtggtggccaagggcctggggctgagcaaggcctacgtaggccagaagagcagcttcacagtagactgcagcaaagcaggcaacaacatgctgctggtgggggttcatggcccaaggaccccctgcgaggagatcctggtgaagcacgtgggcagccggctctacagcgtgtcctacctgctcaaggacaagggggagtacacactggtggtcaaatggggggacgagcacatcccaggcagcccctaccgcgttgtggtgccctgagtctggggcccgtgccagccggcagcccccaagcctgccccgctacccaagcagccccgccctcttcccctcaaccccggcccaggccgccctggccgcccgcctgtcactgcagccgcccctgccctgtgccgtgctgcgctcacctgcctccccagccagccgctgacctctcggctttcacttgggcagagggagcca

SEQ ID NO: 10898 - DNA, 7319 bp, Homo sapiens
  source 1..7319: mol_type = unassigned DNA
agagcgcagcaggcgcggctccgggcggcggcgtcgacacgcgggacgccgagatgccggccaccgagaaggacctggcggaggacgcgccgtggaagaagatccagcagaacactttcacgcgctggtgcaacgagcacctgaagtgcgtgagcaagcgcatcgccaacctgcagacggacctgagcgacgggctgcggcttatcgcgctgttggaggtgctcagccagaagaagatgcaccgcaagcacaaccagcggcccactttccgccaaatgcagcttgagaacgtgtcggtggcgctcgagttcctggaccgcgagagcatcaaactggtgtccatcgacagcaaggccatcgtggacgggaacctgaagctgatcctgggcctcatctggaccctgatcctgcactactccatctccatgcccatgtgggacgaggaggaggatgaggaggccaagaagcagacccccaagcagaggctcctgggctggatccagaacaagctgccgcagctgcccatcaccaacttcagccgggactggcagagcggccgggccctgggcgccctggtggacagctgtgccccgggcctgtgtcctgactgggactcttgggacgccagcaagcccgttaccaatgcgcgagaggccatgcagcaggcggatgactggctgggcatcccccaggtgatcacccccgaggagattgtggaccccaacgtggacgagcactctgtcatgacctacctgtcccagttccccaaggccaagctgaagccaggggctcccttgcggcccaaactgaacccgaagaaagcccgtgcctacgggccaggcatcgagcccacaggcaacatggtgaagaagcgggcagagttcactgtggagaccagaagtgctggccagggagaggtgctggtgtacgtggaggacccggccggacaccaggaggaggcaaaagtgaccgccaataacgacaagaaccgcaccttctccgtctggtacgtccccgaggtgacggggactcataaggttactgtgctctttgctggccagcacatcgccaagagccccttcgaggtgtacgtggataagtcacagggtgacgccagcaaagtgacagcccaaggtcccggcctggagcccagtggcaacatcgccaacaagaccacctactttgagatctttacggcaggagctggcacgggcgaggtcgaggttgtgatccaggaccccatgggacagaagggcacggtagagcctcagctggaggcccggggcgacagcacataccgctgcagctaccagcccaccatggagggcgtccacaccgtgcacgtcacgtttgccggcgtgcccatccctcgcagcccctacactgtcactgttggccaagcctgtaacccgagtgcctgccgggcggttggccggggcctccagcccaagggtgtgcgggtgaaggagacagctgacttcaaggtgtacacaaagggcgctggcagtggggagctgaaggtcaccgtgaagggccccaagggagaggagcgcgtgaagcagaaggacctgggggatggcgtgtatggcttcgagtattaccccatggtccctggaacctatatcgtcaccatcacgtggggtggtcagaacatcgggcgcagtcccttcgaagtgaaggtgggcaccgagtgtggcaatcagaaggtacgggcctggggccctgggctggagggcggcgtcgttggcaagtcagcagactttgtggtggaggctatcggggacgacgtgggcacgctgggcttctcggtggaagggccatcgcaggctaagatcgaatgtgacgacaagggcgacggctcctgtgatgtgcgctactggccgcaggaggctggcgagtatgccgttcacgtgctgtgcaacagcgaagacatccgcctcagccccttcatggctgacatccgtgacgcgccccaggacttccacccagacagggtgaaggcacgtgggcctggattggagaagacaggtgtggccgtcaacaagccagcagagttcacagtggatgccaagcacggtggcaaggccccacttcgggtccaagtccaggacaatgaaggctgccctgtggaggcgttggtcaaggacaacggcaatggcacttacagctgctcctacgtgcccaggaagccggtgaagcacacagccatggtgtcctggggaggcgtcagcatccccaacagccccttcagggtgaatgtgggagctggcagccaccccaacaaggtcaaagtatacggccccggagtagccaagacagggctcaaggcccacgagcccacctacttcactgtggactgcgccgaggctggccagggggacgtcagcatcggcatcaagtgtgcccctggagtggtaggccccgccgaagctgacatcgacttcgacatcatccgcaatgacaatgacaccttcacggtcaagtacacgccccggggggctggcagctacaccattatggtcctctttgctgaccaggccacgcccaccagccccatccgagtcaaggtggagccctctcatgacgccagtaaggtgaaggccgagggccctggcctcagtcgcactggtgtcgagcttggcaagcccacccacttcacagtaaatgccaaagctgctggcaaaggcaagctggacgtccagttctcaggactcaccaagggggatgcagtgcgagatgtggacatcatcgaccaccatgacaacacctacacagtcaagtacacgcctgtccagcagggtccagtaggcgtcaatgtcacttatggaggggatcccatccctaagagccctttctcagtggcagtatctccaagcctggacctcagcaagatcaaggtgtctggcctgggagagaaggtggacgttggcaaagaccaggagttcacagtcaaatcaaagggtgctggtggtcaaggcaaagtggcatccaagattgtgggcccctcgggtgcagcggtgccctgcaaggtggagccaggcctgggggctgacaacagtgtggtgcgcttcctgccccgtgaggaagggccctatgaggtggaggtgacctatgacggcgtgcccgtgcctggcagcccctttcctctggaagctgtggcccccaccaagcctagcaaggtgaaggcgtttgggccggggctgcagggaggcagtgcgggctcccccgcccgcttcaccatcgacaccaagggcgccggcacaggtggcctgggcctgacggtggagggcccctgtgaggcgcagctcgagtgcttggacaatggggatggcacatgttccgtgtcctacgtgcccaccgagcccggggactacaacatcaacatcctcttcgctgacacccacatccctggctccccattcaaggcccacgtggttccctgctttgacgcatccaaagtcaagtgctcaggccccgggctggagcgggccaccgctggggaggtgggccaattccaagtggactgctcgagcgcgggcagcgcggagctgaccattgagatctgctcggaggcggggcttccggccgaggtgtacatccaggaccacggtgatggcacgcacaccattacctacattcccctctgccccggggcctacaccgtcaccatcaagtacggcggccagcccgtgcccaacttccccagcaagctgcaggtggaacctgcggtggacacttccggtgtccagtgctatgggcctggtattgagggccagggtgtcttccgtgaggccaccactgagttcagtgtggacgcccgggctctgacacagaccggagggccgcacgtcaaggcccgtgtggccaacccctcaggcaacctgacggagacctacgttcaggaccgtggcgatggcatgtacaaagtggagtacacgccttacgaggagggactgcactccgtggacgtgacctatgacggcagtcccgtgcccagcagccccttccaggtgcccgtgaccgagggctgcgacccctcccgggtgcgtgtccacgggccaggcatccaaagtggcaccaccaacaagcccaacaagttcactgtggagaccaggggagctggcacgggcggcctgggcctggctgtagagggcccctccgaggccaagatgtcctgcatggataacaaggacggcagctgctcggtcgagtacatcccttatgaggctggcacctacagcctcaacgtcacctatggtggccatcaagtgccaggcagtcctttcaaggtccctgtgcatgatgtgacagatgcgtccaaggtcaagtgctctgggcccggcctgagcccaggcatggttcgtgccaacctccctcagtccttccaggtggacacaagcaaggctggtgtggccccattgcaggtcaaagtgcaagggcccaaaggcctggtggagccagtggacgtggtagacaacgctgatggcacccagaccgtcaattatgtgcccagccgagaagggccctacagcatctcagtactgtatggagatgaagaggtaccccggagccccttcaaggtcaaggtgctgcctactcatgatgccagcaaggtgaaggccagtggccccgggctcaacaccactggcgtgcctgccagcctgcccgtggagttcaccatcgatgcaaaggacgccggggagggcctgctggctgtccagatcacggatcccgaaggcaagccgaagaagacacacatccaagacaaccatgacggcacgtatacagtggcctacgtgccagacgtgacaggtcgctacaccatcctcatcaagtacggtggtgacgagatccccttctccccgtaccgcgtgcgtgccgtgcccaccggggacgccagcaagtgcactgtcacagtgtcaatcggaggtcacgggctaggtgctggcatcggccccaccattcagattggggaggagacggtgatcactgtggacactaaggcggcaggcaaaggcaaagtgacgtgcaccgtgtgcacgcctgatggctcagaggtggatgtggacgtggtggagaatgaggacggcactttcgacatcttctacacggccccccagccgggcaaatacgtcatctgtgtgcgctttggtggcgagcacgtgcccaacagccccttccaagtgacggctctggctggggaccagccctcggtgcagccccctctacggtctcagcagctggccccacagtacacctacgcccagggcggccagcagacttgggccccggagaggcccctggtgggtgtcaatgggctggatgtgaccagcctgaggccctttgaccttgtcatccccttcaccatcaagaagggcgagatcacaggggaggttcggatgccctcaggcaaggtggcgcagcccaccatcactgacaacaaagacggcaccgtgaccgtgcggtatgcacccagcgaggctggcctgcacgagatggacatccgctatgacaacatgcacatcccaggaagccccttgcagttctatgtggattacgtcaactgtggccatgtcactgcctatgggcctggcctcacccatggagtagtgaacaagcctgccaccttcaccgtcaacaccaaggatgcaggagaggggggcctgtctctggccattgagggcccgtccaaagcagaaatcagctgcactgacaaccaggatgggacatgcagcgtgtcctacctgcctgtgctgccgggggactacagcattctagtcaagtacaatgaacagcacgtcccaggcagccccttcactgctcgggtcacaggtgacgactccatgcgtatgtcccacctaaaggtcggctctgctgccgacatccccatcaacatctcagagatctcttttgaggaccgcaaggacggctcctgtggtgtggcttatgtggtccaggagccaggtgactacgaagtctcagtcaagttcaacgaggaacacattcccgacagccccttcgtggtgcctgtggcttctccgtctggcgacgcccgccgcctcactgtttctagccttcaggagtcagggctaaaggtcaaccagccagcctcttttgcagtcagcctgaacggggccaagggggcgatcgatgccaaggtgcacagcccctcaggagccctggaggagtgctatgtcacagaaattgaccaagataagtatgctgtgcgcttcatccctcgggagaatggcgtttacctgattgacgtcaagttcaacggcacccacatccctggaagccccttcaagatccgagttggggagcctgggcatggaggggacccaggcttggtgtctgcttacggagcaggtctggaaggcggtgtcacagggaacccagctgagttcgtcgtgaacacgagcaatgcgggagctggtgccctgtcggtgaccattgacggcccctccaaggtgaagatggattgccaggagtgccctgagggctaccgcgtcacctatacccccatggcacctggcagctacctcatctccatcaagtacggcggcccctaccacattgggggcagccccttcaaggccaaagtcacaggcccccgtctcgtcagcaaccacagcctccacgagacatcatcagtgtttgtagactctctgaccaaggccacctgtgccccccagcatggggccccgggtcctgggcctgctgacgccagcaaggtggtggccaagggcctggggctgagcaaggcctacgtaggccagaagagcagcttcacagtagactgcagcaaagcaggcaacaacatgctgctggtgggggttcatggcccaaggaccccctgcgaggagatcctggtgaagcacgtgggcagccggctctacagcgtgtcctacctgctcaaggacaagggggagtacacactggtggtcaaatggggggacgagcacatcccaggcagcccctaccgcgttgtggtgccctgagtctggggcccgtgccagccggcagcccccaagcctgccccgctacccaagcagccccgccctcttcccctcaaccccggcccaggccgccctggccgcccgcctgtcactgcagccgcccctgccctgtgccgtgctgcgctcacctgcctccccagccagccgctgacctctcggctttcacttgggcagagggagccatttggtggcgctgcttgtcttctttggttctgggaggggtgagggatgggggtcctgtacacaaccacccactagttctcttctccagccaagaggaataaagttttgcttccattc

SEQ ID NO: 10899 - DNA, 3223 bp, Homo sapiens
  source 1..3223: mol_type = unassigned DNA
aaggacgccggggagggcctgctggctgtccagatcacggatcccgaaggcaagccgaagaagacacacatccaagacaaccatgacggcacgtatacagtggcctacgtgccagacgtgacaggtcgctacaccatcctcatcaagtacggtggtgacgagatccccttctccccgtaccgcgtgcgtgccgtgcccaccggggacgccagcaagtgcactgtcacaggtgctggcatcggccccaccattcagattggggaggagacggtgatcactgtggacactaaggcggcaggcaaaggcaaagtgacgtgcaccgtgtgcacgcctgatggctcagaggtggatgtggacgtggtggagaatgaggacggcactttcgacatcttctacacggccccccagccgggcaaatacgtcatctgtgtgcgctttggtggcgagcacgtgcccaacagccccttccaagtgacggctctggctggggaccagccctcggtgcagccccctctacggtctcagcagctggccccacagtacacctacgcccagggcggccagcagacttgggccccggagaggcccctggtgggtgtcaatgggctggatgtgaccagcctgaggccctttgaccttgtcatccccttcaccatcaagaagggcgagatcacaggggaggttcggatgccctcaggcaaggtggcgcagcccaccatcactgacaacaaagacggcaccgtgaccgtgcggtatgcacccagcgaggctggcctgcacgagatggacatccgctatgacaacatgcacatcccaggaagccccttgcagttctatgtggattacgtcaactgtggccatgtcactgcctatgggcctggcctcacccatggagtagtgaacaagcctgccaccttcaccgtcaacaccaaggatgcaggagagggtgacgactccatgcgtatgtcccacctaaaggtcggctctgctgccgacatccccatcaacatctcagagacggatctcagcctgctgacggccactgtggtcccgccctcgggccgggaggagccctgtttgctgaagcggctgcgtaatggccacgtggggatttcattcgtgcccaaggagacgggggagcacctggtgcatgtgaagaaaaatggccagcacgtggccagcagccccatcccggtggtgatcagccagtcggaaattggggatgccagtcgtgttcgggtctctggtcagggccttcacgaaggccacacctttgagcctgcagagtttatcattgatacccgcgatgcaggctatggtgggctcagcctgtccattgagggccccagcaaggtggacatcaacacagaggacctggaggacgggacgtgcagggtcacctactgccccacagagccaggcaactacatcatcaacatcaagtttgccgaccagcacgtgcctggcagccccttctctgtgaaggtgacaggcgagggccgggtgaaagagagcatcacccgcaggcgtcgggctccttcagtggccaacgttggtagtcattgtgacctcagcctgaaaatccctgaaattagcatccaggatatgacagcccaggtgaccagcccatcgggcaagacccatgaggccgagatcgtggaaggggagaaccacacctactgcatccgctttgttcccgctgagatgggcacacacacagtcagcgtgaagtacaagggccagcacgtgcctgggagccccttccagttcaccgtggggcccctaggggaagggggagcccacaaggtccgagctgggggccctggcctggagagagctgaagctggagtgccagccgaattcagtatctggacccgggaagctggtgctggaggcctggccattgctgtcgagggccccagcaaggctgagatctcttttgaggaccgcaaggacggctcctgtggtgtggcttatgtggtccaggagccaggtgactacgaagtctcagtcaagttcaacgaggaacacattcccgacagccccttcgtggtgcctgtggcttctccgtctggcgacgcccgccgcctcactgtttctagccttcaggagtcagggctaaaggtcaaccagccagcctcttttgcagtcagcctgaacggggccaagggggcgatcgatgccaaggtgcacagcccctcaggagccctggaggagtgctatgtcacagaaattgaccaagataagtatgctgtgcgcttcatccctcgggagaatggcgtttacctgattgacgtcaagttcaacggcacccacatccctggaagccccttcaagatccgagttggggagcctgggcatggaggggacccaggcttggtgtctgcttacggagcaggtctggaaggcggtgtcacagggaacccagctgagttcgtcgtgaacacgagcaatgcgggagctggtgccctgtcggtgaccattgacggcccctccaaggtgaagatggattgccaggagtgccctgagggctaccgcgtcacctatacccccatggcacctggcagctacctcatctccatcaagtacggcggcccctaccacattgggggcagccccttcaaggccaaagtcacaggcccccgtctcgtcagcaaccacagcctccacgagacatcatcagtgtttgtagactctctgaccaaggccacctgtgccccccagcatggggccccgggtcctgggcctgctgacgccagcaaggtggtggccaagggcctggggctgagcaaggcctacgtaggccagaagagcagcttcacagtagactgcagcaaagcaggcaacaacatgctgctggtgggggttcatggcccaaggaccccctgcgaggagatcctggtgaagcacgtgggcagccggctctacagcgtgtcctacctgctcaaggacaagggggagtacacactggtggtcaaatggggggacgagcacatcccaggcagcccctaccgcgttgtggtgccctgagtctggggcccgtgccagccggcagcccccaagcctgccccgctacccaagcagccccgccctcttcccctcaaccccggcccaggccgccctggccgcccgcctgtcactgcagccgcccctgccctgtgccgtgctgcgctcacctgcctccccagccagccgctgacctctcggctttcacttgggcaga

SEQ ID NO: 10900 - DNA, 8486 bp, Homo sapiens
  source 1..8486: mol_type = unassigned DNA
attcgcgtggaggcgcgtcgcgcgcagcggacgccgacagaatccccgaggcgcctggcgcgggcgcgggcgcgaaggcgatccgggcgccaccccgcggtcatcggtcaccggtcgctctcaggaacagcagcgcaacctctgctccctgcctcgcctcccgcgcgcctaggtgcctgcgactttaattaaagggccgtcccctcgccgaggctgcagcaccgcccccccggcttctcgcgcctcaaaatgagtagctcccactctcgggcgggccagagcgcagcaggcgcggctccgggcggcggcgtcgacacgcgggacgccgagatgccggccaccgagaaggacctggcggaggacgcgccgtggaagaagatccagcagaacactttcacgcgctggtgcaacgagcacctgaagtgcgtgagcaagcgcatcgccaacctgcagacggacctgagcgacgggctgcggcttatcgcgctgttggaggtgctcagccagaagaagatgcaccgcaagcacaaccagcggcccactttccgccaaatgcagcttgagaacgtgtcggtggcgctcgagttcctggaccgcgagagcatcaaactggtgtccatcgacagcaaggccatcgtggacgggaacctgaagctgatcctgggcctcatctggaccctgatcctgcactactccatctccatgcccatgtgggacgaggaggaggatgaggaggccaagaagcagacccccaagcagaggctcctgggctggatccagaacaagctgccgcagctgcccatcaccaacttcagccgggactggcagagcggccgggccctgggcgccctggtggacagctgtgccccgggcctgtgtcctgactgggactcttgggacgccagcaagcccgttaccaatgcgcgagaggccatgcagcaggcggatgactggctgggcatcccccaggtgatcacccccgaggagattgtggaccccaacgtggacgagcactctgtcatgacctacctgtcccagttccccaaggccaagctgaagccaggggctcccttgcggcccaaactgaacccgaagaaagcccgtgcctacgggccaggcatcgagcccacaggcaacatggtgaagaagcgggcagagttcactgtggagaccagaagtgctggccagggagaggtgctggtgtacgtggaggacccggccggacaccaggaggaggcaaaagtgaccgccaataacgacaagaaccgcaccttctccgtctggtacgtccccgaggtgacggggactcataaggttactgtgctctttgctggccagcacatcgccaagagccccttcgaggtgtacgtggataagtcacagggtgacgccagcaaagtgacagcccaaggtcccggcctggagcccagtggcaacatcgccaacaagaccacctactttgagatctttacggcaggagctggcacgggcgaggtcgaggttgtgatccaggaccccatgggacagaagggcacggtagagcctcagctggaggcccggggcgacagcacataccgctgcagctaccagcccaccatggagggcgtccacaccgtgcacgtcacgtttgccggcgtgcccatccctcgcagcccctacactgtcactgttggccaagcctgtaacccgagtgcctgccgggcggttggccggggcctccagcccaagggtgtgcgggtgaaggagacagctgacttcaaggtgtacacaaagggcgctggcagtggggagctgaaggtcaccgtgaagggccccaagggagaggagcgcgtgaagcagaaggacctgggggatggcgtgtatggcttcgagtattaccccatggtccctggaacctatatcgtcaccatcacgtggggtggtcagaacatcgggcgcagtcccttcgaagtgaaggtgggcaccgagtgtggcaatcagaaggtacgggcctggggccctgggctggagggcggcgtcgttggcaagtcagcagactttgtggtggaggctatcggggacgacgtgggcacgctgggcttctcggtggaagggccatcgcaggctaagatcgaatgtgacgacaagggcgacggctcctgtgatgtgcgctactggccgcaggaggctggcgagtatgccgttcacgtgctgtgcaacagcgaagacatccgcctcagccccttcatggctgacatccgtgacgcgccccaggacttccacccagacagggtgaaggcacgtgggcctggattggagaagacaggtgtggccgtcaacaagccagcagagttcacagtggatgccaagcacggtggcaaggccccacttcgggtccaagtccaggacaatgaaggctgccctgtggaggcgttggtcaaggacaacggcaatggcacttacagctgctcctacgtgcccaggaagccggtgaagcacacagccatggtgtcctggggaggcgtcagcatccccaacagccccttcagggtgaatgtgggagctggcagccaccccaacaaggtcaaagtatacggccccggagtagccaagacagggctcaaggcccacgagcccacctacttcactgtggactgcgccgaggctggccagggggacgtcagcatcggcatcaagtgtgcccctggagtggtaggccccgccgaagctgacatcgacttcgacatcatccgcaatgacaatgacaccttcacggtcaagtacacgccccggggggctggcagctacaccattatggtcctctttgctgaccaggccacgcccaccagccccatccgagtcaaggtggagccctctcatgacgccagtaaggtgaaggccgagggccctggcctcagtcgcactggtgtcgagcttggcaagcccacccacttcacagtaaatgccaaagctgctggcaaaggcaagctggacgtccagttctcaggactcaccaagggggatgcagtgcgagatgtggacatcatcgaccaccatgacaacacctacacagtcaagtacacgcctgtccagcagggtccagtaggcgtcaatgtcacttatggaggggatcccatccctaagagccctttctcagtggcagtatctccaagcctggacctcagcaagatcaaggtgtctggcctgggagagaaggtggacgttggcaaagaccaggagttcacagtcaaatcaaagggtgctggtggtcaaggcaaagtggcatccaagattgtgggcccctcgggtgcagcggtgccctgcaaggtggagccaggcctgggggctgacaacagtgtggtgcgcttcctgccccgtgaggaagggccctatgaggtggaggtgacctatgacggcgtgcccgtgcctggcagcccctttcctctggaagctgtggcccccaccaagcctagcaaggtgaaggcgtttgggccggggctgcagggaggcagtgcgggctcccccgcccgcttcaccatcgacaccaagggcgccggcacaggtggcctgggcctgacggtggagggcccctgtgaggcgcagctcgagtgcttggacaatggggatggcacatgttccgtgtcctacgtgcccaccgagcccggggactacaacatcaacatcctcttcgctgacacccacatccctggctccccattcaaggcccacgtggttccctgctttgacgcatccaaagtcaagtgctcaggccccgggctggagcgggccaccgctggggaggtgggccaattccaagtggactgctcgagcgcgggcagcgcggagctgaccattgagatctgctcggaggcggggcttccggccgaggtgtacatccaggaccacggtgatggcacgcacaccattacctacattcccctctgccccggggcctacaccgtcaccatcaagtacggcggccagcccgtgcccaacttccccagcaagctgcaggtggaacctgcggtggacacttccggtgtccagtgctatgggcctggtattgagggccagggtgtcttccgtgaggccaccactgagttcagtgtggacgcccgggctctgacacagaccggagggccgcacgtcaaggcccgtgtggccaacccctcaggcaacctgacggagacctacgttcaggaccgtggcgatggcatgtacaaagtggagtacacgccttacgaggagggactgcactccgtggacgtgacctatgacggcagtcccgtgcccagcagccccttccaggtgcccgtgaccgagggctgcgacccctcccgggtgcgtgtccacgggccaggcatccaaagtggcaccaccaacaagcccaacaagttcactgtggagaccaggggagctggcacgggcggcctgggcctggctgtagagggcccctccgaggccaagatgtcctgcatggataacaaggacggcagctgctcggtcgagtacatcccttatgaggctggcacctacagcctcaacgtcacctatggtggccatcaagtgccaggcagtcctttcaaggtccctgtgcatgatgtgacagatgcgtccaaggtcaagtgctctgggcccggcctgagcccaggcatggttcgtgccaacctccctcagtccttccaggtggacacaagcaaggctggtgtggccccattgcaggtcaaagtgcaagggcccaaaggcctggtggagccagtggacgtggtagacaacgctgatggcacccagaccgtcaattatgtgcccagccgagaagggccctacagcatctcagtactgtatggagatgaagaggtaccccggagccccttcaaggtcaaggtgctgcctactcatgatgccagcaaggtgaaggccagtggccccgggctcaacaccactggcgtgcctgccagcctgcccgtggagttcaccatcgatgcaaaggacgccggggagggcctgctggctgtccagatcacggatcccgaaggcaagccgaagaagacacacatccaagacaaccatgacggcacgtatacagtggcctacgtgccagacgtgacaggtcgctacaccatcctcatcaagtacggtggtgacgagatccccttctccccgtaccgcgtgcgtgccgtgcccaccggggacgccagcaagtgcactgtcacaggtgctggcatcggccccaccattcagattggggaggagacggtgatcactgtggacactaaggcggcaggcaaaggcaaagtgacgtgcaccgtgtgcacgcctgatggctcagaggtggatgtggacgtggtggagaatgaggacggcactttcgacatcttctacacggccccccagccgggcaaatacgtcatctgtgtgcgctttggtggcgagcacgtgcccaacagccccttccaagtgacggctctggctggggaccagccctcggtgcagccccctctacggtctcagcagctggccccacagtacacctacgcccagggcggccagcagacttgggccccggagaggcccctggtgggtgtcaatgggctggatgtgaccagcctgaggccctttgaccttgtcatccccttcaccatcaagaagggcgagatcacaggggaggttcggatgccctcaggcaaggtggcgcagcccaccatcactgacaacaaagacggcaccgtgaccgtgcggtatgcacccagcgaggctggcctgcacgagatggacatccgctatgacaacatgcacatcccaggaagccccttgcagttctatgtggattacgtcaactgtggccatgtcactgcctatgggcctggcctcacccatggagtagtgaacaagcctgccaccttcaccgtcaacaccaaggatgcaggagaggggggcctgtctctggccattgagggcccgtccaaagcagaaatcagctgcactgacaaccaggatgggacatgcagcgtgtcctacctgcctgtgctgccgggggactacagcattctagtcaagtacaatgaacagcacgtcccaggcagccccttcactgctcgggtcacaggtgacgactccatgcgtatgtcccacctaaaggtcggctctgctgccgacatccccatcaacatctcagagacggatctcagcctgctgacggccactgtggtcccgccctcgggccgggaggagccctgtttgctgaagcggctgcgtaatggccacgtggggatttcattcgtgcccaaggagacgggggagcacctggtgcatgtgaagaaaaatggccagcacgtggccagcagccccatcccggtggtgatcagccagtcggaaattggggatgccagtcgtgttcgggtctctggtcagggccttcacgaaggccacacctttgagcctgcagagtttatcattgatacccgcgatgcaggctatggtgggctcagcctgtccattgagggccccagcaaggtggacatcaacacagaggacctggaggacgggacgtgcagggtcacctactgccccacagagccaggcaactacatcatcaacatcaagtttgccgaccagcacgtgcctggcagccccttctctgtgaaggtgacaggcgagggccgggtgaaagagagcatcacccgcaggcgtcgggctccttcagtggccaacgttggtagtcattgtgacctcagcctgaaaatccctgaaattagcatccaggatatgacagcccaggtgaccagcccatcgggcaagacccatgaggccgagatcgtggaaggggagaaccacacctactgcatccgctttgttcccgctgagatgggcacacacacagtcagcgtgaagtacaagggccagcacgtgcctgggagccccttccagttcaccgtggggcccctaggggaagggggagcccacaaggtccgagctgggggccctggcctggagagagctgaagctggagtgccagccgaattcagtatctggacccgggaagctggtgctggaggcctggccattgctgtcgagggccccagcaaggctgagatctcttttgaggaccgcaaggacggctcctgtggtgtggcttatgtggtccaggagccaggtgactacgaagtctcagtcaagttcaacgaggaacacattcccgacagccccttcgtggtgcctgtggcttctccgtctggcgacgcccgccgcctcactgtttctagccttcaggagtcagggctaaaggtcaaccagccagcctcttttgcagtcagcctgaacggggccaagggggcgatcgatgccaaggtgcacagcccctcaggagccctggaggagtgctatgtcacagaaattgaccaagataagtatgctgtgcgcttcatccctcgggagaatggcgtttacctgattgacgtcaagttcaacggcacccacatccctggaagccccttcaagatccgagttggggagcctgggcatggaggggacccaggcttggtgtctgcttacggagcaggtctggaaggcggtgtcacagggaacccagctgagttcgtcgtgaacacgagcaatgcgggagctggtgccctgtcggtgaccattgacggcccctccaaggtgaagatggattgccaggagtgccctgagggctaccgcgtcacctatacccccatggcacctggcagctacctcatctccatcaagtacggcggcccctaccacattgggggcagccccttcaaggccaaagtcacaggcccccgtctcgtcagcaaccacagcctccacgagacatcatcagtgtttgtagactctctgaccaaggccacctgtgccccccagcatggggccccgggtcctgggcctgctgacgccagcaaggtggtggccaagggcctggggctgagcaaggcctacgtaggccagaagagcagcttcacagtagactgcagcaaagcaggcaacaacatgctgctggtgggggttcatggcccaaggaccccctgcgaggagatcctggtgaagcacgtgggcagccggctctacagcgtgtcctacctgctcaaggacaagggggagtacacactggtggtcaaatggggggacgagcacatcccaggcagcccctaccgcgttgtggtgccctgagtctggggcccgtgccagccggcagcccccaagcctgccccgctacccaagcagccccgccctcttcccctcaaccccggcccaggccgccctggccgcccgcctgtcactgcagccgcccctgccctgtgccgtgctgcgctcacctgcctccccagccagccgctgacctctcggctttcacttgggcagagggagccatttggtggcgctgcttgtcttctttggttctgggaggggtgagggatgggggtcctgtacacaaccacccactagttctcttctccagccaagaggaataaagttttgcttccatt

SEQ ID NO: 10901 - DNA, 9463 bp, Homo sapiens
  source 1..9463: mol_type = unassigned DNA
gcggccaggggcgggcggccgcagagcagcaccggccgtggctccggtagcagcaagttcgaaccccgctcccgctccgcttcggttctcgctccttcggcccttgggcctccaaacaccagtccccggcagctcgttgcgcattgcgctctccccgccaccaggatgccggtaaccgagaaggatctagctgaggacgcgccttggaagaagatccagcagaacacgttcacacgctggtgcaacgagcacctcaagtgcgtgaacaaacgcatcggcaacctgcagaccgacctgagcgacgggctgcggctcatcgcgctgctcgaggtgctcagccagaagcgcatgtaccgcaagtaccatcagcggcccacctttcgccagatgcagctcgagaatgtgtccgtggcgctcgagttcctggaccgtgagagcatcaagctcgtgtccatcgatagcaaagccattgtggatgggaacctgaagctcatcttgggtctggtgtggacgctgatcctccactactccatctccatgcccgtgtgggaggatgaaggggatgatgatgccaagaagcagacgccaaagcagaggctgctggggtggattcagaacaagatcccctacttgcccatcaccaactttaaccagaactggcaagacggcaaagccctgggagccctggtagacagctgtgctccaggtctgtgcccagactgggaatcctgggacccgcagaagcctgtggataatgcacgagaagccatgcagcaggcagatgactggctgggtgtcccacaggtcatcactcctgaagaaatcattcacccggatgtggacgagcactcagttatgacttacctgtcccagttccccaaagccaagctcaagccgggggctcctctcaaacccaaactcaacccgaagaaagccagggcctatggcagaggaatcgagcccactggaaacatggtgaagcagccagccaagttcactgtggacaccatcagcgccgggcaaggagacgtgatggtgtttgttgaggacccagaagggaacaaagaggaggcacaagtgacccctgacagtgacaagaacaagacatactctgtggagtatctgcccaaggtcaccgggctacacaaagtcacagtcctctttgcaggacagcacatctccaagagcccatttgaagtgagtgttgacaaggcccagggagatgccagtaaagtcactgcaaaaggtccagggttggaagctgtagggaacatcgccaataagcccacctactttgacatctatacggcaggagctggtgtgggtgacattggtgtggaggtggaagatccccaggggaagaacaccgtggagttgctcgtggaagacaaaggaaaccaggtgtatcgatgtgtgtacaaacccatgcagcctggccctcacgtggtcaagatcttctttgctggggacactattcctaagagtcccttcgttgtgcaggttggggaagcctgcaatccaaatgcctgccgggccagtggccgaggcctacaacccaaaggcgtccgtatccgggagaccacagatttcaaggttgacaccaaagctgcaggaagtggggagctcggtgtaaccatgaagggtcctaagggtctggaggagctggtgaagcagaaagactttctggatggggtctacgcattcgagtattaccccagcaccccggggagatacagcattgccatcacatgggggggacaccacattccaaagagcccctttgaagttcaagttggccctgaagcgggtatgcagaaagtccgtgcttggggccctgggctccatggtgggattgtcgggcggtcagcggacttcgtggtagaatccattggctctgaagtggggtctctggggtttgccattgaaggcccctctcaggcaaagattgagtacaacgaccagaatgatggatcgtgtgatgtcaaatactggcccaaggagcctggcgaatatgctgttcacatcatgtgtgacgacgaagacatcaaggacagcccgtacatggccttcatccacccagccacgggaggctacaaccctgatctggttcgagcatacgggccaggtttggagaaatctggatgcattgtcaacaacctggccgagttcactgtggatcctaaggatgctggaaaagctcccttaaagatatttgctcaggatggggaaggccaacgcattgacatccagatgaagaaccggatggacggcacatatgcatgctcatacaccccggtgaaggccatcaagcacaccattgctgtggtctggggaggcgtgaacatcccgcacagcccctacagggtcaacatcgggcaaggtagccatcctcagaaggtcaaagtgtttgggccaggtgtggagagaagtggtctgaaggcaaatgaacctacacacttcacggtggactgtactgaggctggggaaggtgatgtcagtgttggcattaagtgtgatgcccgggtgttaagtgaagatgaggaagacgtggattttgacattattcacaatgccaatgatacgttcacagtcaaatatgtgcctcctgctgctgggcgatacactatcaaagttctctttgcatctcaggaaatccccgccagccctttcagagtcaaagttgacccttcccacgatgccagcaaagtgaaggcagaaggcccagggctcagcaaagcaggtgtggaaaatgggaaaccgacccacttcactgtctacaccaagggggctgggaaagccccgctcaacgtgcagttcaacagccctcttcctggcgatgcagtgaaggatttggatatcatcgataattatgactactctcacacggttaaatatacacccacccaacagggcaacatgcaggttctggtgacttacggtggcgatcccatccctaaaagccctttcactgtgggtgttgctgcaccgctggatctgagcaagataaaactcaatgggctggaaaacagggtggaagttgggaaggatcaggagttcaccgttgataccaggggggcaggaggccaggggaagctggacgtgacaatcctcagcccctctcggaaggtcgtgccatgcctagtgacacctgtgacaggccgggagaacagcacggccaagttcatccctcgggaggaggggctgtatgctgtagacgtgacctacgatggacaccctgtgcccgggagcccctacacagtggaggcctcgctgccaccagatcccagcaaggtgaaggcccacggtcccggcctcgaaggtggtctcgtgggcaagcctgccgagttcaccatcgataccaaaggagctggtactggaggtctgggcttaacggtggaaggtccgtgcgaggccaaaatcgagtgctccgacaatggtgatgggacctgctccgtctcttaccttcccacaaaacccggggagtacttcgtcaacatcctctttgaagaagtccacatacctgggtctcccttcaaagctgacattgaaatgccctttgacccctctaaagtcgtggcatcggggccaggtctcgagcacgggaaggtgggtgaagctggcctccttagcgtcgactgctcggaagcgggaccgggggccctgggcctggaagctgtctcggactcgggaacaaaagccgaagtcagtattcagaacaacaaagatggcacctacgcggtgacctacgtgcccctgacggccggcatgtacacgttgaccatgaagtatggtggcgaactcgtgccacacttccccgcccgggtcaaggtggagcccgccgtggacaccagcaggatcaaagtctttggaccaggaatagaagggaaagatgtgttccgggaagctaccaccgactttacagttgactctcggccgctgacccaggttgggggtgaccacatcaaggcccacattgccaacccctcaggggcctccaccgagtgctttgtcacagacaatgcggatgggacctaccaggtggaatacacaccctttgagaaaggtctccatgtagtggaggtgacatatgatgacgtgcctatcccaaacagtcccttcaaggtggctgtcactgaaggctgccagccatctagggtgcaagcccaaggacctggattgaaagaggcctttaccaacaagcccaatgtcttcaccgtggttaccagaggcgcaggaattggtgggcttggcataactgttgagggaccatcagagtcgaagataaattgcagagacaacaaggatggcagctgcagtgctgagtacattcctttcgcaccgggggattacgatgttaatatcacatatggaggagcccacatccccggcagccccttcagggttcctgtgaaggatgttgtggaccccagcaaggtcaagattgccggccccgggctgggctcaggcgtccgagcccgtgtcctgcagtccttcacggtggacagcagcaaggctggcctggctccgctggaagtgagggttctgggcccacgaggcttggtggagccagtgaacgtggtggacaatggagatggcacacacacagtaacctacaccccatctcaggagggaccttacatggtctcagttaaatatgctgatgaagagattcctcgcagtcccttcaaggtcaaggtccttcccacatatgatgccagcaaagtgactgccagtggccccggccttagttcctatggtgtgcctgccagtctacctgtggactttgcaattgatgcccgagatgccggggaaggcctgcttgctgttcaaataacggaccaagaaggaaaacccaaaagagccattgtccatgacaataaagatggcacgtatgctgtcacctacatccccgacaagactgggcgctatatgattggagtcacctacgggggtgacgacatcccactttctccttatcgcatccgagccacacagacgggtgatgccagcaagtgcctggccacgggtcctggaatcgcctccactgtgaaaactggcgaagaagtaggctttgtggttgatgccaagactgccgggaagggtaaagtgacctgcacggttctgaccccagatggcactgaggccgaggccgatgtcattgagaatgaagatggaacctatgacatcttctacacagctgccaagccgggcacatatgtgatctatgtgcgcttcggtggtgttgatattcctaacagccccttcactgtcatggccacagatggggaagtcacagccgtggaggaggcaccggtaaatgcatgtccccctggattcaggccctgggtgaccgaagaggcctatgtcccagtgagtgacatgaacggcctgggatttaagccttttgacctggtcattccgtttgctgtcaggaaaggagaaatcactggagaggtccacatgccttctgggaagacagccacacctgagattgtggacaacaaggacggcacggtcactgttagatatgcccccactgaggtcgggctccatgagatgcacatcaaatacatgggcagccacatccctgagagcccactccagttctacgtgaactaccccaacagtggaagtgtttctgcatacggtccaggcctcgtgtatggagtggccaacaaaactgccaccttcaccatcgtcacagaggatgcaggagaaggtggtctggacttggctattgagggcccctcaaaagcagaaatcagctgcattgacaataaagatgggacatgcacagtgacctacctgccgactctgccaggcgactacagcattctggtcaagtacaatgacaagcacatccctggcagccccttcacagccaagatcacagatgacagcaggcggtgctcccaggtgaagttgggctcagccgctgacttcctgctcgacatcagtgagactgacctcagcagcctgacggccagcattaaggccccatctggccgagacgagccctgtctcctgaagaggctgcccaacaaccacattggcatctccttcatcccccgggaagtgggcgaacatctggtcagcatcaagaaaaatggcaaccatgtggccaacagccccgtgtctatcatggtggtccagtcggagattggtgacgcccgccgagccaaagtctatggccgcggcctgtcagaaggccggactttcgagatgtctgacttcatcgtggacacaagggatgcaggttatggtggcatatccttggcggtggaaggccccagcaaagtggacatccagacggaggacctggaagatggcacctgcaaagtctcctacttccctaccgtgcctggggtttatatcgtctccaccaaattcgctgacgagcacgtgcctgggagcccatttaccgtgaagatcagtggggagggaagagtcaaagagagcatcacccgcaccagtcgggccccgtccgtggccactgtcgggagcatttgtgacctgaacctgaaaatcccagaaatcaacagcagtgatatgtcggcccacgtcaccagcccctctggccgtgtgactgaggcagagattgtgcccatggggaagaactcacactgcgtccggtttgtgccccaggagatgggcgtgcacacggtcagcgtcaagtaccgtgggcagcacgtcaccggcagccccttccagttcaccgtggggccacttggtgaaggaggcgcccacaaggtgcgggcaggaggccctggcctggagagaggagaagcgggagtcccagctgagttcagcatttggacccgggaagcaggcgctggaggcctctccatcgctgttgagggccccagtaaggccgagattacattcgatgaccataaaaatgggtcgtgcggtgtatcttatattgcccaagagcctggtaactacgaggtgtccatcaagttcaatgatgagcacatcccggaaagcccctacctggtgccggtcatcgcaccctccgacgacgcccgccgcctcactgttatgagccttcaggaatcgggattaaaagttaaccagccagcatcctttgctataaggttgaatggcgcaaaaggcaagattgatgcaaaggtgcacagcccctctggagccgtggaggagtgccacgtgtctgagctggagccagataagtatgctgttcgcttcatccctcatgagaatggtgtccacaccatcgatgtcaagttcaatgggagccacgtggttggaagccccttcaaagtgcgcgttggggagcctggacaagcggggaaccctgccctggtgtccgcctatggcacgggactcgaagggggcaccacaggtatccagtcggaattctttattaacaccacccgagcaggtccagggacattatccgtcaccatcgaaggcccatccaaggttaaaatggattgccaggaaacacctgaagggtacaaagtcatgtacacccccatggctcctggtaactacctgatcagcgtcaaatacggtgggcccaaccacatcgtgggcagtcccttcaaggccaaggtgacaggccagcgtctagttagccctggctcagccaacgagacctcatccatcctggtggagtcagtgaccaggtcgtctacagagacctgctatagcgccattcccaaggcatcctcggacgccagcaaggtgacctctaagggggcagggctctcaaaggcctttgtgggccagaagagttccttcctggtggactgcagcaaagctggctccaacatgctgctgatcggggtccatgggcccaccaccccctgcgaggaggtctccatgaagcatgtaggcaaccagcaatacaacgtcacatacgtcgtcaaggagaggggcgattatgtgctggctgtgaagtggggggaggaacacatccctggcagcccttttcatgtcacagtgccttaaaacagttttctcaaatcctggagagagttcttgtggttgcttttgttgcttgtttgtaattcattttatacaaagccctccagcctgtttgtggggctgaaaccccatccctaaaatattgctgttgtaaaatgccttcagaaataagtcctagactggactcttgagggacatattggagaatcttaagaaatgcaagcttgttcagggggctgagaagatcctgagtacactaggtgcaaaccagaactcttggtggaacagaccagccactgcagcagacagaccaggaacacaatgagactgacatttcaaaaaaacaaaactggctagcctgagctgctggttcactcttcagcatttatgaaacaaggctaggggaagatgggcagagaaaaaggggacacctagtttggttgtcatttggcaaaggagatgacttaaaatccgcttaatctcttccagtgtccgtgttaatgtatttggctattagatcactagcactgctttaccgctcctcatcgccaacacccccatgctctgtggccttcttacacttctcagagggcagagtggcagccgggcaccctacagaaactcagagggcagagtggcagccaggcccacatgtctctcaagtacctgtcccctcgctctggtgattatttcttgcagaatcaccacacgagaccatcccggcagtcatggttttgctttagttttccaagtccgtttcagtcccttccttggtctgaagaaattctgcagtggcgagcagtttcccacttgccaaagatcccttttaaccaacactagcccttgtttttaacacacgctccagcccttcatcagcctgggcagtcttaccaaaatgtttaaagtgatctcagaggggcccatggattaacgccctcatcccaaggtccgtcccatgacataacactccacacccgccccagccaacttcatgggtcactttttctggaaaataatgatctgtacagacaggacagaatgaaactcctgcgggtctttggcctgaaagttgggaatggttgggggagagaagggcagcagcttattggtggtcttttcaccattggcagaaacagtgagagctgtgtggtgcagaaatccagaaatgaggtgtagggaattttgcctgccttcctgcagacctgagctggctttggaatgaggttaaagtgtcagggacgttgcctgagcccaaatgtgtagtgtggtctgggcaggcagacctttaggttttgctgcttagtcctgaggaagtggccactcttgtggcaggtgtagtatctggggcgagtgttgggggtaaaagcccaccctacagaaagtggaacagcccggagcctgatgtgaaaggaccacgggtgttgtaagctgggacacggaagccaaactggaatcaaacgccgactgtaaattgtatcttataacttattaaataaaacatttgctccgtaaa

SEQ ID NO: 10902 - DNA, 9344 bp, Homo sapiens
  source 1..9344: mol_type = unassigned DNA
gcggccaggggcgggcggccgcagagcagcaccggccgtggctccggtagcagcaagttcgaaccccgctcccgctccgcttcggttctcgctccttcggcccttgggcctccaaacaccagtccccggcagctcgttgcgcattgcgctctccccgccaccaggatgccggtaaccgagaaggatctagctgaggacgcgccttggaagaagatccagcagaacacgttcacacgctggtgcaacgagcacctcaagtgcgtgaacaaacgcatcggcaacctgcagaccgacctgagcgacgggctgcggctcatcgcgctgctcgaggtgctcagccagaagcgcatgtaccgcaagtaccatcagcggcccacctttcgccagatgcagctcgagaatgtgtccgtggcgctcgagttcctggaccgtgagagcatcaagctcgtgtccatcgatagcaaagccattgtggatgggaacctgaagctcatcttgggtctggtgtggacgctgatcctccactactccatctccatgcccgtgtgggaggatgaaggggatgatgatgccaagaagcagacgccaaagcagaggctgctggggtggattcagaacaagatcccctacttgcccatcaccaactttaaccagaactggcaagacggcaaagccctgggagccctggtagacagctgtgctccaggtctgtgcccagactgggaatcctgggacccgcagaagcctgtggataatgcacgagaagccatgcagcaggcagatgactggctgggtgtcccacaggtcatcactcctgaagaaatcattcacccggatgtggacgagcactcagttatgacttacctgtcccagttccccaaagccaagctcaagccgggggctcctctcaaacccaaactcaacccgaagaaagccagggcctatggcagaggaatcgagcccactggaaacatggtgaagcagccagccaagttcactgtggacaccatcagcgccgggcaaggagacgtgatggtgtttgttgaggacccagaagggaacaaagaggaggcacaagtgacccctgacagtgacaagaacaagacatactctgtggagtatctgcccaaggtcaccgggctacacaaagtcacagtcctctttgcaggacagcacatctccaagagcccatttgaagtgagtgttgacaaggcccagggagatgccagtaaagtcactgcaaaaggtccagggttggaagctgtagggaacatcgccaataagcccacctactttgacatctatacggcaggagctggtgtgggtgacattggtgtggaggtggaagatccccaggggaagaacaccgtggagttgctcgtggaagacaaaggaaaccaggtgtatcgatgtgtgtacaaacccatgcagcctggccctcacgtggtcaagatcttctttgctggggacactattcctaagagtcccttcgttgtgcaggttggggaagcctgcaatccaaatgcctgccgggccagtggccgaggcctacaacccaaaggcgtccgtatccgggagaccacagatttcaaggttgacaccaaagctgcaggaagtggggagctcggtgtaaccatgaagggtcctaagggtctggaggagctggtgaagcagaaagactttctggatggggtctacgcattcgagtattaccccagcaccccggggagatacagcattgccatcacatgggggggacaccacattccaaagagcccctttgaagttcaagttggccctgaagcgggtatgcagaaagtccgtgcttggggccctgggctccatggtgggattgtcgggcggtcagcggacttcgtggtagaatccattggctctgaagtggggtctctggggtttgccattgaaggcccctctcaggcaaagattgagtacaacgaccagaatgatggatcgtgtgatgtcaaatactggcccaaggagcctggcgaatatgctgttcacatcatgtgtgacgacgaagacatcaaggacagcccgtacatggccttcatccacccagccacgggaggctacaaccctgatctggttcgagcatacgggccaggtttggagaaatctggatgcattgtcaacaacctggccgagttcactgtggatcctaaggatgctggaaaagctcccttaaagatatttgctcaggatggggaaggccaacgcattgacatccagatgaagaaccggatggacggcacatatgcatgctcatacaccccggtgaaggccatcaagcacaccattgctgtggtctggggaggcgtgaacatcccgcacagcccctacagggtcaacatcgggcaaggtagccatcctcagaaggtcaaagtgtttgggccaggtgtggagagaagtggtctgaaggcaaatgaacctacacacttcacggtggactgtactgaggctggggaaggtgatgtcagtgttggcattaagtgtgatgcccgggtgttaagtgaagatgaggaagacgtggattttgacattattcacaatgccaatgatacgttcacagtcaaatatgtgcctcctgctgctgggcgatacactatcaaagttctctttgcatctcaggaaatccccgccagccctttcagagtcaaagttgacccttcccacgatgccagcaaagtgaaggcagaaggcccagggctcagcaaagcaggtgtggaaaatgggaaaccgacccacttcactgtctacaccaagggggctgggaaagccccgctcaacgtgcagttcaacagccctcttcctggcgatgcagtgaaggatttggatatcatcgataattatgactactctcacacggttaaatatacacccacccaacagggcaacatgcaggttctggtgacttacggtggcgatcccatccctaaaagccctttcactgtgggtgttgctgcaccgctggatctgagcaagataaaactcaatgggctggaaaacagggtggaagttgggaaggatcaggagttcaccgttgataccaggggggcaggaggccaggggaagctggacgtgacaatcctcagcccctctcggaaggtcgtgccatgcctagtgacacctgtgacaggccgggagaacagcacggccaagttcatccctcgggaggaggggctgtatgctgtagacgtgacctacgatggacaccctgtgcccgggagcccctacacagtggaggcctcgctgccaccagatcccagcaaggtgaaggcccacggtcccggcctcgaaggtggtctcgtgggcaagcctgccgagttcaccatcgataccaaaggagctggtactggaggtctgggcttaacggtggaaggtccgtgcgaggccaaaatcgagtgctccgacaatggtgatgggacctgctccgtctcttaccttcccacaaaacccggggagtacttcgtcaacatcctctttgaagaagtccacatacctgggtctcccttcaaagctgacattgaaatgccctttgacccctctaaagtcgtggcatcggggccaggtctcgagcacgggaaggtgggtgaagctggcctccttagcgtcgactgctcggaagcgggaccgggggccctgggcctggaagctgtctcggactcgggaacaaaagccgaagtcagtattcagaacaacaaagatggcacctacgcggtgacctacgtgcccctgacggccggcatgtacacgttgaccatgaagtatggtggcgaactcgtgccacacttccccgcccgggtcaaggtggagcccgccgtggacaccagcaggatcaaagtctttggaccaggaatagaagggaaagatgtgttccgggaagctaccaccgactttacagttgactctcggccgctgacccaggttgggggtgaccacatcaaggcccacattgccaacccctcaggggcctccaccgagtgctttgtcacagacaatgcggatgggacctaccaggtggaatacacaccctttgagaaaggtctccatgtagtggaggtgacatatgatgacgtgcctatcccaaacagtcccttcaaggtggctgtcactgaaggctgccagccatctagggtgcaagcccaaggacctggattgaaagaggcctttaccaacaagcccaatgtcttcaccgtggttaccagaggcgcaggaattggtgggcttggcataactgttgagggaccatcagagtcgaagataaattgcagagacaacaaggatggcagctgcagtgctgagtacattcctttcgcaccgggggattacgatgttaatatcacatatggaggagcccacatccccggcagccccttcagggttcctgtgaaggatgttgtggaccccagcaaggtcaagattgccggccccgggctgggctcaggcgtccgagcccgtgtcctgcagtccttcacggtggacagcagcaaggctggcctggctccgctggaagtgagggttctgggcccacgaggcttggtggagccagtgaacgtggtggacaatggagatggcacacacacagtaacctacaccccatctcaggagggaccttacatggtctcagttaaatatgctgatgaagagattcctcgcagtcccttcaaggtcaaggtccttcccacatatgatgccagcaaagtgactgccagtggccccggccttagttcctatggtgtgcctgccagtctacctgtggactttgcaattgatgcccgagatgccggggaaggcctgcttgctgttcaaataacggaccaagaaggaaaacccaaaagagccattgtccatgacaataaagatggcacgtatgctgtcacctacatccccgacaagactgggcgctatatgattggagtcacctacgggggtgacgacatcccactttctccttatcgcatccgagccacacagacgggtgatgccagcaagtgcctggccacgggtcctggaatcgcctccactgtgaaaactggcgaagaagtaggctttgtggttgatgccaagactgccgggaagggtaaagtgacctgcacggttctgaccccagatggcactgaggccgaggccgatgtcattgagaatgaagatggaacctatgacatcttctacacagctgccaagccgggcacatatgtgatctatgtgcgcttcggtggtgttgatattcctaacagccccttcactgtcatggccacagatggggaagtcacagccgtggaggaggcaccggtaaatgcatgtccccctggattcaggccctgggtgaccgaagaggcctatgtcccagtgagtgacatgaacggcctgggatttaagccttttgacctggtcattccgtttgctgtcaggaaaggagaaatcactggagaggtccacatgccttctgggaagacagccacacctgagattgtggacaacaaggacggcacggtcactgttagatatgcccccactgaggtcgggctccatgagatgcacatcaaatacatgggcagccacatccctgagagcccactccagttctacgtgaactaccccaacagtggaagtgtttctgcatacggtccaggcctcgtgtatggagtggccaacaaaactgccaccttcaccatcgtcacagaggatgcaggagaaggtggtctggacttggctattgagggcccctcaaaagcagaaatcagctgcattgacaataaagatgggacatgcacagtgacctacctgccgactctgccaggcgactacagcattctggtcaagtacaatgacaagcacatccctggcagccccttcacagccaagatcacagatgacagcaggcggtgctcccaggtgaagttgggctcagccgctgacttcctgctcgacatcagtgagactgacctcagcagcctgacggccagcattaaggccccatctggccgagacgagccctgtctcctgaagaggctgcccaacaaccacattggcatctccttcatcccccgggaagtgggcgaacatctggtcagcatcaagaaaaatggcaaccatgtggccaacagccccgtgtctatcatggtggtccagtcggagattggtgacgcccgccgagccaaagtctatggccgcggcctgtcagaaggccggactttcgagatgtctgacttcatcgtggacacaagggatgcaggttatggtggcatatccttggcggtggaaggccccagcaaagtggacatccagacggaggacctggaagatggcacctgcaaagtctcctacttccctaccgtgcctggggtttatatcgtctccaccaaattcgctgacgagcacgtgcctgaaatcaacagcagtgatatgtcggcccacgtcaccagcccctctggccgtgtgactgaggcagagattgtgcccatggggaagaactcacactgcgtccggtttgtgccccaggagatgggcgtgcacacggtcagcgtcaagtaccgtgggcagcacgtcaccggcagccccttccagttcaccgtggggccacttggtgaaggaggcgcccacaaggtgcgggcaggaggccctggcctggagagaggagaagcgggagtcccagctgagttcagcatttggacccgggaagcaggcgctggaggcctctccatcgctgttgagggccccagtaaggccgagattacattcgatgaccataaaaatgggtcgtgcggtgtatcttatattgcccaagagcctggtaactacgaggtgtccatcaagttcaatgatgagcacatcccggaaagcccctacctggtgccggtcatcgcaccctccgacgacgcccgccgcctcactgttatgagccttcaggaatcgggattaaaagttaaccagccagcatcctttgctataaggttgaatggcgcaaaaggcaagattgatgcaaaggtgcacagcccctctggagccgtggaggagtgccacgtgtctgagctggagccagataagtatgctgttcgcttcatccctcatgagaatggtgtccacaccatcgatgtcaagttcaatgggagccacgtggttggaagccccttcaaagtgcgcgttggggagcctggacaagcggggaaccctgccctggtgtccgcctatggcacgggactcgaagggggcaccacaggtatccagtcggaattctttattaacaccacccgagcaggtccagggacattatccgtcaccatcgaaggcccatccaaggttaaaatggattgccaggaaacacctgaagggtacaaagtcatgtacacccccatggctcctggtaactacctgatcagcgtcaaatacggtgggcccaaccacatcgtgggcagtcccttcaaggccaaggtgacaggccagcgtctagttagccctggctcagccaacgagacctcatccatcctggtggagtcagtgaccaggtcgtctacagagacctgctatagcgccattcccaaggcatcctcggacgccagcaaggtgacctctaagggggcagggctctcaaaggcctttgtgggccagaagagttccttcctggtggactgcagcaaagctggctccaacatgctgctgatcggggtccatgggcccaccaccccctgcgaggaggtctccatgaagcatgtaggcaaccagcaatacaacgtcacatacgtcgtcaaggagaggggcgattatgtgctggctgtgaagtggggggaggaacacatccctggcagcccttttcatgtcacagtgccttaaaacagttttctcaaatcctggagagagttcttgtggttgcttttgttgcttgtttgtaattcattttatacaaagccctccagcctgtttgtggggctgaaaccccatccctaaaatattgctgttgtaaaatgccttcagaaataagtcctagactggactcttgagggacatattggagaatcttaagaaatgcaagcttgttcagggggctgagaagatcctgagtacactaggtgcaaaccagaactcttggtggaacagaccagccactgcagcagacagaccaggaacacaatgagactgacatttcaaaaaaacaaaactggctagcctgagctgctggttcactcttcagcatttatgaaacaaggctaggggaagatgggcagagaaaaaggggacacctagtttggttgtcatttggcaaaggagatgacttaaaatccgcttaatctcttccagtgtccgtgttaatgtatttggctattagatcactagcactgctttaccgctcctcatcgccaacacccccatgctctgtggccttcttacacttctcagagggcagagtggcagccgggcaccctacagaaactcagagggcagagtggcagccaggcccacatgtctctcaagtacctgtcccctcgctctggtgattatttcttgcagaatcaccacacgagaccatcccggcagtcatggttttgctttagttttccaagtccgtttcagtcccttccttggtctgaagaaattctgcagtggcgagcagtttcccacttgccaaagatcccttttaaccaacactagcccttgtttttaacacacgctccagcccttcatcagcctgggcagtcttaccaaaatgtttaaagtgatctcagaggggcccatggattaacgccctcatcccaaggtccgtcccatgacataacactccacacccgccccagccaacttcatgggtcactttttctggaaaataatgatctgtacagacaggacagaatgaaactcctgcgggtctttggcctgaaagttgggaatggttgggggagagaagggcagcagcttattggtggtcttttcaccattggcagaaacagtgagagctgtgtggtgcagaaatccagaaatgaggtgtagggaattttgcctgccttcctgcagacctgagctggctttggaatgaggttaaagtgtcagggacgttgcctgagcccaaatgtgtagtgtggtctgggcaggcagacctttaggttttgctgcttagtcctgaggaagtggccactcttgtggcaggtgtagtatctggggcgagtgttgggggtaaaagcccaccctacagaaagtggaacagcccggagcctgatgtgaaaggaccacgggtgttgtaagctgggacacggaagccaaactggaatcaaacgccgactgtaaattgtatcttataacttattaaataaaacatttgctccgtaaagttg

SEQ ID NO: 10903 - DNA, 9537 bp, Homo sapiens
  source 1..9537: mol_type = unassigned DNA
gcggccaggggcgggcggccgcagagcagcaccggccgtggctccggtagcagcaagttcgaaccccgctcccgctccgcttcggttctcgctccttcggcccttgggcctccaaacaccagtccccggcagctcgttgcgcattgcgctctccccgccaccaggatgccggtaaccgagaaggatctagctgaggacgcgccttggaagaagatccagcagaacacgttcacacgctggtgcaacgagcacctcaagtgcgtgaacaaacgcatcggcaacctgcagaccgacctgagcgacgggctgcggctcatcgcgctgctcgaggtgctcagccagaagcgcatgtaccgcaagtaccatcagcggcccacctttcgccagatgcagctcgagaatgtgtccgtggcgctcgagttcctggaccgtgagagcatcaagctcgtgtccatcgatagcaaagccattgtggatgggaacctgaagctcatcttgggtctggtgtggacgctgatcctccactactccatctccatgcccgtgtgggaggatgaaggggatgatgatgccaagaagcagacgccaaagcagaggctgctggggtggattcagaacaagatcccctacttgcccatcaccaactttaaccagaactggcaagacggcaaagccctgggagccctggtagacagctgtgctccaggtctgtgcccagactgggaatcctgggacccgcagaagcctgtggataatgcacgagaagccatgcagcaggcagatgactggctgggtgtcccacaggtcatcactcctgaagaaatcattcacccggatgtggacgagcactcagttatgacttacctgtcccagttccccaaagccaagctcaagccgggggctcctctcaaacccaaactcaacccgaagaaagccagggcctatggcagaggaatcgagcccactggaaacatggtgaagcagccagccaagttcactgtggacaccatcagcgccgggcaaggagacgtgatggtgtttgttgaggacccagaagggaacaaagaggaggcacaagtgacccctgacagtgacaagaacaagacatactctgtggagtatctgcccaaggtcaccgggctacacaaagtcacagtcctctttgcaggacagcacatctccaagagcccatttgaagtgagtgttgacaaggcccagggagatgccagtaaagtcactgcaaaaggtccagggttggaagctgtagggaacatcgccaataagcccacctactttgacatctatacggcaggagctggtgtgggtgacattggtgtggaggtggaagatccccaggggaagaacaccgtggagttgctcgtggaagacaaaggaaaccaggtgtatcgatgtgtgtacaaacccatgcagcctggccctcacgtggtcaagatcttctttgctggggacactattcctaagagtcccttcgttgtgcaggttggggaagcctgcaatccaaatgcctgccgggccagtggccgaggcctacaacccaaaggcgtccgtatccgggagaccacagatttcaaggttgacaccaaagctgcaggaagtggggagctcggtgtaaccatgaagggtcctaagggtctggaggagctggtgaagcagaaagactttctggatggggtctacgcattcgagtattaccccagcaccccggggagatacagcattgccatcacatgggggggacaccacattccaaagagcccctttgaagttcaagttggccctgaagcgggtatgcagaaagtccgtgcttggggccctgggctccatggtgggattgtcgggcggtcagcggacttcgtggtagaatccattggctctgaagtggggtctctggggtttgccattgaaggcccctctcaggcaaagattgagtacaacgaccagaatgatggatcgtgtgatgtcaaatactggcccaaggagcctggcgaatatgctgttcacatcatgtgtgacgacgaagacatcaaggacagcccgtacatggccttcatccacccagccacgggaggctacaaccctgatctggttcgagcatacgggccaggtttggagaaatctggatgcattgtcaacaacctggccgagttcactgtggatcctaaggatgctggaaaagctcccttaaagatatttgctcaggatggggaaggccaacgcattgacatccagatgaagaaccggatggacggcacatatgcatgctcatacaccccggtgaaggccatcaagcacaccattgctgtggtctggggaggcgtgaacatcccgcacagcccctacagggtcaacatcgggcaaggtagccatcctcagaaggtcaaagtgtttgggccaggtgtggagagaagtggtctgaaggcaaatgaacctacacacttcacggtggactgtactgaggctggggaaggtgatgtcagtgttggcattaagtgtgatgcccgggtgttaagtgaagatgaggaagacgtggattttgacattattcacaatgccaatgatacgttcacagtcaaatatgtgcctcctgctgctgggcgatacactatcaaagttctctttgcatctcaggaaatccccgccagccctttcagagtcaaagttgacccttcccacgatgccagcaaagtgaaggcagaaggcccagggctcagcaaagcaggtgtggaaaatgggaaaccgacccacttcactgtctacaccaagggggctgggaaagccccgctcaacgtgcagttcaacagccctcttcctggcgatgcagtgaaggatttggatatcatcgataattatgactactctcacacggttaaatatacacccacccaacagggcaacatgcaggttctggtgacttacggtggcgatcccatccctaaaagccctttcactgtgggtgttgctgcaccgctggatctgagcaagataaaactcaatgggctggaaaacagggtggaagttgggaaggatcaggagttcaccgttgataccaggggggcaggaggccaggggaagctggacgtgacaatcctcagcccctctcggaaggtcgtgccatgcctagtgacacctgtgacaggccgggagaacagcacggccaagttcatccctcgggaggaggggctgtatgctgtagacgtgacctacgatggacaccctgtgcccgggagcccctacacagtggaggcctcgctgccaccagatcccagcaaggtgaaggcccacggtcccggcctcgaaggtggtctcgtgggcaagcctgccgagttcaccatcgataccaaaggagctggtactggaggtctgggcttaacggtggaaggtccgtgcgaggccaaaatcgagtgctccgacaatggtgatgggacctgctccgtctcttaccttcccacaaaacccggggagtacttcgtcaacatcctctttgaagaagtccacatacctgggtctcccttcaaagctgacattgaaatgccctttgacccctctaaagtcgtggcatcggggccaggtctcgagcacgggaaggtgggtgaagctggcctccttagcgtcgactgctcggaagcgggaccgggggccctgggcctggaagctgtctcggactcgggaacaaaagccgaagtcagtattcagaacaacaaagatggcacctacgcggtgacctacgtgcccctgacggccggcatgtacacgttgaccatgaagtatggtggcgaactcgtgccacacttccccgcccgggtcaaggtggagcccgccgtggacaccagcaggatcaaagtctttggaccaggaatagaagggaaagatgtgttccgggaagctaccaccgactttacagttgactctcggccgctgacccaggttgggggtgaccacatcaaggcccacattgccaacccctcaggggcctccaccgagtgctttgtcacagacaatgcggatgggacctaccaggtggaatacacaccctttgagaaaggtctccatgtagtggaggtgacatatgatgacgtgcctatcccaaacagtcccttcaaggtggctgtcactgaaggctgccagccatctagggtgcaagcccaaggacctggattgaaagaggcctttaccaacaagcccaatgtcttcaccgtggttaccagaggcgcaggaattggtgggcttggcataactgttgagggaccatcagagtcgaagataaattgcagagacaacaaggatggcagctgcagtgctgagtacattcctttcgcaccgggggattacgatgttaatatcacatatggaggagcccacatccccggcagccccttcagggttcctgtgaaggatgttgtggaccccagcaaggtcaagattgccggccccgggctgggctcaggcgtccgagcccgtgtcctgcagtccttcacggtggacagcagcaaggctggcctggctccgctggaagtgagggttctgggcccacgaggcttggtggagccagtgaacgtggtggacaatggagatggcacacacacagtaacctacaccccatctcaggagggaccttacatggtctcagttaaatatgctgatgaagagattcctcgcagtcccttcaaggtcaaggtccttcccacatatgatgccagcaaagtgactgccagtggccccggccttagttcctatggtgtgcctgccagtctacctgtggactttgcaattgatgcccgagatgccggggaaggcctgcttgctgttcaaataacggaccaagaaggaaaacccaaaagagccattgtccatgacaataaagatggcacgtatgctgtcacctacatccccgacaagactgggcgctatatgattggagtcacctacgggggtgacgacatcccactttctccttatcgcatccgagccacacagacgggtgatgccagcaagtgcctggccacgggtcctggaatcgcctccactgtgaaaactggcgaagaagtaggctttgtggttgatgccaagactgccgggaagggtaaagtgacctgcacggttctgaccccagatggcactgaggccgaggccgatgtcattgagaatgaagatggaacctatgacatcttctacacagctgccaagccgggcacatatgtgatctatgtgcgcttcggtggtgttgatattcctaacagccccttcactgtcatggccacagatggggaagtcacagccgtggaggaggcaccggtaaatgcatgtccccctggattcaggccctgggtgaccgaagaggcctatgtcccagtgagtgacatgaacggcctgggatttaagccttttgacctggtcattccgtttgctgtcaggaaaggagaaatcactggagaggtccacatgccttctgggaagacagccacacctgagattgtggacaacaaggacggcacggtcactgttagatatgcccccactgaggtcgggctccatgagatgcacatcaaatacatgggcagccacatccctgagagcccactccagttctacgtgaactaccccaacagtggaagtgtttctgcatacggtccaggcctcgtgtatggagtggccaacaaaactgccaccttcaccatcgtcacagaggatgcaggagaaggtggtctggacttggctattgagggcccctcaaaagcagaaatcagctgcattgacaataaagatgggacatgcacagtgacctacctgccgactctgccaggcgactacagcattctggtcaagtacaatgacaagcacatccctggcagccccttcacagccaagatcacagatgacagcaggcggtgctcccaggtgaagttgggctcagccgctgacttcctgctcgacatcagtgagactgacctcagcagcctgacggccagcattaaggccccatctggccgagacgagccctgtctcctgaagaggctgcccaacaaccacattggcatctccttcatcccccgggaagtgggcgaacatctggtcagcatcaagaaaaatggcaaccatgtggccaacagccccgtgtctatcatggtggtccagtcggagattggtgacgcccgccgagccaaagtctatggccgcggcctgtcagaaggccggactttcgagatgtctgacttcatcgtggacacaagggatgcaggttatggtggcatatccttggcggtggaaggccccagcaaagtggacatccagacggaggacctggaagatggcacctgcaaagtctcctacttccctaccgtgcctggggtttatatcgtctccaccaaattcgctgacgagcacgtgcctgggagcccatttaccgtgaagatcagtggggagggaagagtcaaagagagcatcacccgcaccagtcgggccccgtccgtggccactgtcgggagcatttgtgacctgaacctgaaaatcccaggggtcagagtcatgaactgctctgcccagatcctgtggggctggagggtgcagtttcatactggctctagaaatcaacagcagtgatatgtcggcccacgtcaccagcccctctggccgtgtgactgaggcagagattgtgcccatggggaagaactcacactgcgtccggtttgtgccccaggagatgggcgtgcacacggtcagcgtcaagtaccgtgggcagcacgtcaccggcagccccttccagttcaccgtggggccacttggtgaaggaggcgcccacaaggtgcgggcaggaggccctggcctggagagaggagaagcgggagtcccagctgagttcagcatttggacccgggaagcaggcgctggaggcctctccatcgctgttgagggccccagtaaggccgagattacattcgatgaccataaaaatgggtcgtgcggtgtatcttatattgcccaagagcctggtaactacgaggtgtccatcaagttcaatgatgagcacatcccggaaagcccctacctggtgccggtcatcgcaccctccgacgacgcccgccgcctcactgttatgagccttcaggaatcgggattaaaagttaaccagccagcatcctttgctataaggttgaatggcgcaaaaggcaagattgatgcaaaggtgcacagcccctctggagccgtggaggagtgccacgtgtctgagctggagccagataagtatgctgttcgcttcatccctcatgagaatggtgtccacaccatcgatgtcaagttcaatgggagccacgtggttggaagccccttcaaagtgcgcgttggggagcctggacaagcggggaaccctgccctggtgtccgcctatggcacgggactcgaagggggcaccacaggtatccagtcggaattctttattaacaccacccgagcaggtccagggacattatccgtcaccatcgaaggcccatccaaggttaaaatggattgccaggaaacacctgaagggtacaaagtcatgtacacccccatggctcctggtaactacctgatcagcgtcaaatacggtgggcccaaccacatcgtgggcagtcccttcaaggccaaggtgacaggccagcgtctagttagccctggctcagccaacgagacctcatccatcctggtggagtcagtgaccaggtcgtctacagagacctgctatagcgccattcccaaggcatcctcggacgccagcaaggtgacctctaagggggcagggctctcaaaggcctttgtgggccagaagagttccttcctggtggactgcagcaaagctggctccaacatgctgctgatcggggtccatgggcccaccaccccctgcgaggaggtctccatgaagcatgtaggcaaccagcaatacaacgtcacatacgtcgtcaaggagaggggcgattatgtgctggctgtgaagtggggggaggaacacatccctggcagcccttttcatgtcacagtgccttaaaacagttttctcaaatcctggagagagttcttgtggttgcttttgttgcttgtttgtaattcattttatacaaagccctccagcctgtttgtggggctgaaaccccatccctaaaatattgctgttgtaaaatgccttcagaaataagtcctagactggactcttgagggacatattggagaatcttaagaaatgcaagcttgttcagggggctgagaagatcctgagtacactaggtgcaaaccagaactcttggtggaacagaccagccactgcagcagacagaccaggaacacaatgagactgacatttcaaaaaaacaaaactggctagcctgagctgctggttcactcttcagcatttatgaaacaaggctaggggaagatgggcagagaaaaaggggacacctagtttggttgtcatttggcaaaggagatgacttaaaatccgcttaatctcttccagtgtccgtgttaatgtatttggctattagatcactagcactgctttaccgctcctcatcgccaacacccccatgctctgtggccttcttacacttctcagagggcagagtggcagccgggcaccctacagaaactcagagggcagagtggcagccaggcccacatgtctctcaagtacctgtcccctcgctctggtgattatttcttgcagaatcaccacacgagaccatcccggcagtcatggttttgctttagttttccaagtccgtttcagtcccttccttggtctgaagaaattctgcagtggcgagcagtttcccacttgccaaagatcccttttaaccaacactagcccttgtttttaacacacgctccagcccttcatcagcctgggcagtcttaccaaaatgtttaaagtgatctcagaggggcccatggattaacgccctcatcccaaggtccgtcccatgacataacactccacacccgccccagccaacttcatgggtcactttttctggaaaataatgatctgtacagacaggacagaatgaaactcctgcgggtctttggcctgaaagttgggaatggttgggggagagaagggcagcagcttattggtggtcttttcaccattggcagaaacagtgagagctgtgtggtgcagaaatccagaaatgaggtgtagggaattttgcctgccttcctgcagacctgagctggctttggaatgaggttaaagtgtcagggacgttgcctgagcccaaatgtgtagtgtggtctgggcaggcagacctttaggttttgctgcttagtcctgaggaagtggccactcttgtggcaggtgtagtatctggggcgagtgttgggggtaaaagcccaccctacagaaagtggaacagcccggagcctgatgtgaaaggaccacgggtgttgtaagctgggacacggaagccaaactggaatcaaacgccgactgtaaattgtatcttataacttattaaataaaacatttgctccgtaaagttg

SEQ ID NO: 10904 - DNA, 9391 bp, Homo sapiens
  source 1..9391: mol_type = unassigned DNA
gcggccaggggcgggcggccgcagagcagcaccggccgtggctccggtagcagcaagttcgaaccccgctcccgctccgcttcggttctcgctccttcggcccttgggcctccaaacaccagtccccggcagctcgttgcgcattgcgctctccccgccaccaggatgccggtaaccgagaaggatctagctgaggacgcgccttggaagaagatccagcagaacacgttcacacgctggtgcaacgagcacctcaagtgcgtgaacaaacgcatcggcaacctgcagaccgacctgagcgacgggctgcggctcatcgcgctgctcgaggtgctcagccagaagcgcatgtaccgcaagtaccatcagcggcccacctttcgccagatgcagctcgagaatgtgtccgtggcgctcgagttcctggaccgtgagagcatcaagctcgtgtccatcgatagcaaagccattgtggatgggaacctgaagctcatcttgggtctggtgtggacgctgatcctccactactccatctccatgcccgtgtgggaggatgaaggggatgatgatgccaagaagcagacgccaaagcagaggctgctggggtggattcagaacaagatcccctacttgcccatcaccaactttaaccagaactggcaagacggcaaagccctgggagccctggtagacagctgtgctccaggtctgtgcccagactgggaatcctgggacccgcagaagcctgtggataatgcacgagaagccatgcagcaggcagatgactggctgggtgtcccacaggtcatcactcctgaagaaatcattcacccggatgtggacgagcactcagttatgacttacctgtcccagttccccaaagccaagctcaagccgggggctcctctcaaacccaaactcaacccgaagaaagccagggcctatggcagaggaatcgagcccactggaaacatggtgaagcagccagccaagttcactgtggacaccatcagcgccgggcaaggagacgtgatggtgtttgttgaggacccagaagggaacaaagaggaggcacaagtgacccctgacagtgacaagaacaagacatactctgtggagtatctgcccaaggtcaccgggctacacaaagtcacagtcctctttgcaggacagcacatctccaagagcccatttgaagtgagtgttgacaaggcccagggagatgccagtaaagtcactgcaaaaggtccagggttggaagctgtagggaacatcgccaataagcccacctactttgacatctatacggcaggagctggtgtgggtgacattggtgtggaggtggaagatccccaggggaagaacaccgtggagttgctcgtggaagacaaaggaaaccaggtgtatcgatgtgtgtacaaacccatgcagcctggccctcacgtggtcaagatcttctttgctggggacactattcctaagagtcccttcgttgtgcaggttggggaagcctgcaatccaaatgcctgccgggccagtggccgaggcctacaacccaaaggcgtccgtatccgggagaccacagatttcaaggttgacaccaaagctgcaggaagtggggagctcggtgtaaccatgaagggtcctaagggtctggaggagctggtgaagcagaaagactttctggatggggtctacgcattcgagtattaccccagcaccccggggagatacagcattgccatcacatgggggggacaccacattccaaagagcccctttgaagttcaagttggccctgaagcgggtatgcagaaagtccgtgcttggggccctgggctccatggtgggattgtcgggcggtcagcggacttcgtggtagaatccattggctctgaagtggggtctctggggtttgccattgaaggcccctctcaggcaaagattgagtacaacgaccagaatgatggatcgtgtgatgtcaaatactggcccaaggagcctggcgaatatgctgttcacatcatgtgtgacgacgaagacatcaaggacagcccgtacatggccttcatccacccagccacgggaggctacaaccctgatctggttcgagcatacgggccaggtttggagaaatctggatgcattgtcaacaacctggccgagttcactgtggatcctaaggatgctggaaaagctcccttaaagatatttgctcaggatggggaaggccaacgcattgacatccagatgaagaaccggatggacggcacatatgcatgctcatacaccccggtgaaggccatcaagcacaccattgctgtggtctggggaggcgtgaacatcccgcacagcccctacagggtcaacatcgggcaaggtagccatcctcagaaggtcaaagtgtttgggccaggtgtggagagaagtggtctgaaggcaaatgaacctacacacttcacggtggactgtactgaggctggggaaggtgatgtcagtgttggcattaagtgtgatgcccgggtgttaagtgaagatgaggaagacgtggattttgacattattcacaatgccaatgatacgttcacagtcaaatatgtgcctcctgctgctgggcgatacactatcaaagttctctttgcatctcaggaaatccccgccagccctttcagagtcaaagttgacccttcccacgatgccagcaaagtgaaggcagaaggcccagggctcagcaaagcaggtgtggaaaatgggaaaccgacccacttcactgtctacaccaagggggctgggaaagccccgctcaacgtgcagttcaacagccctcttcctggcgatgcagtgaaggatttggatatcatcgataattatgactactctcacacggttaaatatacacccacccaacagggcaacatgcaggttctggtgacttacggtggcgatcccatccctaaaagccctttcactgtgggtgttgctgcaccgctggatctgagcaagataaaactcaatgggctggaaaacagggtggaagttgggaaggatcaggagttcaccgttgataccaggggggcaggaggccaggggaagctggacgtgacaatcctcagcccctctcggaaggtcgtgccatgcctagtgacacctgtgacaggccgggagaacagcacggccaagttcatccctcgggaggaggggctgtatgctgtagacgtgacctacgatggacaccctgtgcccgggagcccctacacagtggaggcctcgctgccaccagatcccagcaaggtgaaggcccacggtcccggcctcgaaggtggtctcgtgggcaagcctgccgagttcaccatcgataccaaaggagctggtactggaggtctgggcttaacggtggaaggtccgtgcgaggccaaaatcgagtgctccgacaatggtgatgggacctgctccgtctcttaccttcccacaaaacccggggagtacttcgtcaacatcctctttgaagaagtccacatacctgggtctcccttcaaagctgacattgaaatgccctttgacccctctaaagtcgtggcatcggggccaggtctcgagcacgggaaggtgggtgaagctggcctccttagcgtcgactgctcggaagcgggaccgggggccctgggcctggaagctgtctcggactcgggaacaaaagccgaagtcagtattcagaacaacaaagatggcacctacgcggtgacctacgtgcccctgacggccggcatgtacacgttgaccatgaagtatggtggcgaactcgtgccacacttccccgcccgggtcaaggtggagcccgccgtggacaccagcaggatcaaagtctttggaccaggaatagaagggaaagatgtgttccgggaagctaccaccgactttacagttgactctcggccgctgacccaggttgggggtgaccacatcaaggcccacattgccaacccctcaggggcctccaccgagtgctttgtcacagacaatgcggatgggacctaccaggtggaatacacaccctttgagaaaggtctccatgtagtggaggtgacatatgatgacgtgcctatcccaaacagtcccttcaaggtggctgtcactgaaggctgccagccatctagggtgcaagcccaaggacctggattgaaagaggcctttaccaacaagcccaatgtcttcaccgtggttaccagaggcgcaggaattggtgggcttggcataactgttgagggaccatcagagtcgaagataaattgcagagacaacaaggatggcagctgcagtgctgagtacattcctttcgcaccgggggattacgatgttaatatcacatatggaggagcccacatccccggcagccccttcagggttcctgtgaaggatgttgtggaccccagcaaggtcaagattgccggccccgggctgggctcaggcgtccgagcccgtgtcctgcagtccttcacggtggacagcagcaaggctggcctggctccgctggaagtgagggttctgggcccacgaggcttggtggagccagtgaacgtggtggacaatggagatggcacacacacagtaacctacaccccatctcaggagggaccttacatggtctcagttaaatatgctgatgaagagattcctcgcagtcccttcaaggtcaaggtccttcccacatatgatgccagcaaagtgactgccagtggccccggccttagttcctatggtgtgcctgccagtctacctgtggactttgcaattgatgcccgagatgccggggaaggcctgcttgctgttcaaataacggaccaagaaggaaaacccaaaagagccattgtccatgacaataaagatggcacgtatgctgtcacctacatccccgacaagactgggcgctatatgattggagtcacctacgggggtgacgacatcccactttctccttatcgcatccgagccacacagacgggtgatgccagcaagtgcctggccacgggtcctggaatcgcctccactgtgaaaactggcgaagaagtaggctttgtggttgatgccaagactgccgggaagggtaaagtgacctgcacggttctgaccccagatggcactgaggccgaggccgatgtcattgagaatgaagatggaacctatgacatcttctacacagctgccaagccgggcacatatgtgatctatgtgcgcttcggtggtgttgatattcctaacagccccttcactgtcatggtgaccgaagaggcctatgtcccagtgagtgacatgaacggcctgggatttaagccttttgacctggtcattccgtttgctgtcaggaaaggagaaatcactggagaggtccacatgccttctgggaagacagccacacctgagattgtggacaacaaggacggcacggtcactgttagatatgcccccactgaggtcgggctccatgagatgcacatcaaatacatgggcagccacatccctgagagcccactccagttctacgtgaactaccccaacagtggaagtgtttctgcatacggtccaggcctcgtgtatggagtggccaacaaaactgccaccttcaccatcgtcacagaggatgcaggagaaggtggtctggacttggctattgagggcccctcaaaagcagaaatcagctgcattgacaataaagatgggacatgcacagtgacctacctgccgactctgccaggcgactacagcattctggtcaagtacaatgacaagcacatccctggcagccccttcacagccaagatcacagatgacagcaggcggtgctcccaggtgaagttgggctcagccgctgacttcctgctcgacatcagtgagactgacctcagcagcctgacggccagcattaaggccccatctggccgagacgagccctgtctcctgaagaggctgcccaacaaccacattggcatctccttcatcccccgggaagtgggcgaacatctggtcagcatcaagaaaaatggcaaccatgtggccaacagccccgtgtctatcatggtggtccagtcggagattggtgacgcccgccgagccaaagtctatggccgcggcctgtcagaaggccggactttcgagatgtctgacttcatcgtggacacaagggatgcaggttatggtggcatatccttggcggtggaaggccccagcaaagtggacatccagacggaggacctggaagatggcacctgcaaagtctcctacttccctaccgtgcctggggtttatatcgtctccaccaaattcgctgacgagcacgtgcctgggagcccatttaccgtgaagatcagtggggagggaagagtcaaagagagcatcacccgcaccagtcgggccccgtccgtggccactgtcgggagcatttgtgacctgaacctgaaaatcccagaaatcaacagcagtgatatgtcggcccacgtcaccagcccctctggccgtgtgactgaggcagagattgtgcccatggggaagaactcacactgcgtccggtttgtgccccaggagatgggcgtgcacacggtcagcgtcaagtaccgtgggcagcacgtcaccggcagccccttccagttcaccgtggggccacttggtgaaggaggcgcccacaaggtgcgggcaggaggccctggcctggagagaggagaagcgggagtcccagctgagttcagcatttggacccgggaagcaggcgctggaggcctctccatcgctgttgagggccccagtaaggccgagattacattcgatgaccataaaaatgggtcgtgcggtgtatcttatattgcccaagagcctggtaactacgaggtgtccatcaagttcaatgatgagcacatcccggaaagcccctacctggtgccggtcatcgcaccctccgacgacgcccgccgcctcactgttatgagccttcaggaatcgggattaaaagttaaccagccagcatcctttgctataaggttgaatggcgcaaaaggcaagattgatgcaaaggtgcacagcccctctggagccgtggaggagtgccacgtgtctgagctggagccagataagtatgctgttcgcttcatccctcatgagaatggtgtccacaccatcgatgtcaagttcaatgggagccacgtggttggaagccccttcaaagtgcgcgttggggagcctggacaagcggggaaccctgccctggtgtccgcctatggcacgggactcgaagggggcaccacaggtatccagtcggaattctttattaacaccacccgagcaggtccagggacattatccgtcaccatcgaaggcccatccaaggttaaaatggattgccaggaaacacctgaagggtacaaagtcatgtacacccccatggctcctggtaactacctgatcagcgtcaaatacggtgggcccaaccacatcgtgggcagtcccttcaaggccaaggtgacaggccagcgtctagttagccctggctcagccaacgagacctcatccatcctggtggagtcagtgaccaggtcgtctacagagacctgctatagcgccattcccaaggcatcctcggacgccagcaaggtgacctctaagggggcagggctctcaaaggcctttgtgggccagaagagttccttcctggtggactgcagcaaagctggctccaacatgctgctgatcggggtccatgggcccaccaccccctgcgaggaggtctccatgaagcatgtaggcaaccagcaatacaacgtcacatacgtcgtcaaggagaggggcgattatgtgctggctgtgaagtggggggaggaacacatccctggcagcccttttcatgtcacagtgccttaaaacagttttctcaaatcctggagagagttcttgtggttgcttttgttgcttgtttgtaattcattttatacaaagccctccagcctgtttgtggggctgaaaccccatccctaaaatattgctgttgtaaaatgccttcagaaataagtcctagactggactcttgagggacatattggagaatcttaagaaatgcaagcttgttcagggggctgagaagatcctgagtacactaggtgcaaaccagaactcttggtggaacagaccagccactgcagcagacagaccaggaacacaatgagactgacatttcaaaaaaacaaaactggctagcctgagctgctggttcactcttcagcatttatgaaacaaggctaggggaagatgggcagagaaaaaggggacacctagtttggttgtcatttggcaaaggagatgacttaaaatccgcttaatctcttccagtgtccgtgttaatgtatttggctattagatcactagcactgctttaccgctcctcatcgccaacacccccatgctctgtggccttcttacacttctcagagggcagagtggcagccgggcaccctacagaaactcagagggcagagtggcagccaggcccacatgtctctcaagtacctgtcccctcgctctggtgattatttcttgcagaatcaccacacgagaccatcccggcagtcatggttttgctttagttttccaagtccgtttcagtcccttccttggtctgaagaaattctgcagtggcgagcagtttcccacttgccaaagatcccttttaaccaacactagcccttgtttttaacacacgctccagcccttcatcagcctgggcagtcttaccaaaatgtttaaagtgatctcagaggggcccatggattaacgccctcatcccaaggtccgtcccatgacataacactccacacccgccccagccaacttcatgggtcactttttctggaaaataatgatctgtacagacaggacagaatgaaactcctgcgggtctttggcctgaaagttgggaatggttgggggagagaagggcagcagcttattggtggtcttttcaccattggcagaaacagtgagagctgtgtggtgcagaaatccagaaatgaggtgtagggaattttgcctgccttcctgcagacctgagctggctttggaatgaggttaaagtgtcagggacgttgcctgagcccaaatgtgtagtgtggtctgggcaggcagacctttaggttttgctgcttagtcctgaggaagtggccactcttgtggcaggtgtagtatctggggcgagtgttgggggtaaaagcccaccctacagaaagtggaacagcccggagcctgatgtgaaaggaccacgggtgttgtaagctgggacacggaagccaaactggaatcaaacgccgactgtaaattgtatcttataacttattaaataaaacatttgctccgtaaa

SEQ ID NO: 10905 - DNA, 8762 bp, Homo sapiens
  source 1..8762: mol_type = unassigned DNA
atgcaagaacatagcacccggaggagaagtctcagtctgtgcccagactgggaatcctgggacccgcagaagcctgtggataatgcacgagaagccatgcagcaggcagatgactggctgggtgtcccacaggtcatcactcctgaagaaatcattcacccggatgtggacgagcactcagttatgacttacctgtcccagttccccaaagccaagctcaagccgggggctcctctcaaacccaaactcaacccgaagaaagccagggcctatggcagaggaatcgagcccactggaaacatggtgaagcagccagccaagttcactgtggacaccatcagcgccgggcaaggagacgtgatggtgtttgttgaggacccagaagggaacaaagaggaggcacaagtgacccctgacagtgacaagaacaagacatactctgtggagtatctgcccaaggtcaccgggctacacaaagtcacagtcctctttgcaggacagcacatctccaagagcccatttgaagtgagtgttgacaaggcccagggagatgccagtaaagtcactgcaaaaggtccagggttggaagctgtagggaacatcgccaataagcccacctactttgacatctatacggcaggagctggtgtgggtgacattggtgtggaggtggaagatccccaggggaagaacaccgtggagttgctcgtggaagacaaaggaaaccaggtgtatcgatgtgtgtacaaacccatgcagcctggccctcacgtggtcaagatcttctttgctggggacactattcctaagagtcccttcgttgtgcaggttggggaagcctgcaatccaaatgcctgccgggccagtggccgaggcctacaacccaaaggcgtccgtatccgggagaccacagatttcaaggttgacaccaaagctgcaggaagtggggagctcggtgtaaccatgaagggtcctaagggtctggaggagctggtgaagcagaaagactttctggatggggtctacgcattcgagtattaccccagcaccccggggagatacagcattgccatcacatgggggggacaccacattccaaagagcccctttgaagttcaagttggccctgaagcgggtatgcagaaagtccgtgcttggggccctgggctccatggtgggattgtcgggcggtcagcggacttcgtggtagaatccattggctctgaagtggggtctctggggtttgccattgaaggcccctctcaggcaaagattgagtacaacgaccagaatgatggatcgtgtgatgtcaaatactggcccaaggagcctggcgaatatgctgttcacatcatgtgtgacgacgaagacatcaaggacagcccgtacatggccttcatccacccagccacgggaggctacaaccctgatctggttcgagcatacgggccaggtttggagaaatctggatgcattgtcaacaacctggccgagttcactgtggatcctaaggatgctggaaaagctcccttaaagatatttgctcaggatggggaaggccaacgcattgacatccagatgaagaaccggatggacggcacatatgcatgctcatacaccccggtgaaggccatcaagcacaccattgctgtggtctggggaggcgtgaacatcccgcacagcccctacagggtcaacatcgggcaaggtagccatcctcagaaggtcaaagtgtttgggccaggtgtggagagaagtggtctgaaggcaaatgaacctacacacttcacggtggactgtactgaggctggggaaggtgatgtcagtgttggcattaagtgtgatgcccgggtgttaagtgaagatgaggaagacgtggattttgacattattcacaatgccaatgatacgttcacagtcaaatatgtgcctcctgctgctgggcgatacactatcaaagttctctttgcatctcaggaaatccccgccagccctttcagagtcaaagttgacccttcccacgatgccagcaaagtgaaggcagaaggcccagggctcagcaaagcaggtgtggaaaatgggaaaccgacccacttcactgtctacaccaagggggctgggaaagccccgctcaacgtgcagttcaacagccctcttcctggcgatgcagtgaaggatttggatatcatcgataattatgactactctcacacggttaaatatacacccacccaacagggcaacatgcaggttctggtgacttacggtggcgatcccatccctaaaagccctttcactgtgggtgttgctgcaccgctggatctgagcaagataaaactcaatgggctggaaaacagggtggaagttgggaaggatcaggagttcaccgttgataccaggggggcaggaggccaggggaagctggacgtgacaatcctcagcccctctcggaaggtcgtgccatgcctagtgacacctgtgacaggccgggagaacagcacggccaagttcatccctcgggaggaggggctgtatgctgtagacgtgacctacgatggacaccctgtgcccgggagcccctacacagtggaggcctcgctgccaccagatcccagcaaggtgaaggcccacggtcccggcctcgaaggtggtctcgtgggcaagcctgccgagttcaccatcgataccaaaggagctggtactggaggtctgggcttaacggtggaaggtccgtgcgaggccaaaatcgagtgctccgacaatggtgatgggacctgctccgtctcttaccttcccacaaaacccggggagtacttcgtcaacatcctctttgaagaagtccacatacctgggtctcccttcaaagctgacattgaaatgccctttgacccctctaaagtcgtggcatcggggccaggtctcgagcacgggaaggtgggtgaagctggcctccttagcgtcgactgctcggaagcgggaccgggggccctgggcctggaagctgtctcggactcgggaacaaaagccgaagtcagtattcagaacaacaaagatggcacctacgcggtgacctacgtgcccctgacggccggcatgtacacgttgaccatgaagtatggtggcgaactcgtgccacacttccccgcccgggtcaaggtggagcccgccgtggacaccagcaggatcaaagtctttggaccaggaatagaagggaaagatgtgttccgggaagctaccaccgactttacagttgactctcggccgctgacccaggttgggggtgaccacatcaaggcccacattgccaacccctcaggggcctccaccgagtgctttgtcacagacaatgcggatgggacctaccaggtggaatacacaccctttgagaaaggtctccatgtagtggaggtgacatatgatgacgtgcctatcccaaacagtcccttcaaggtggctgtcactgaaggctgccagccatctagggtgcaagcccaaggacctggattgaaagaggcctttaccaacaagcccaatgtcttcaccgtggttaccagaggcgcaggaattggtgggcttggcataactgttgagggaccatcagagtcgaagataaattgcagagacaacaaggatggcagctgcagtgctgagtacattcctttcgcaccgggggattacgatgttaatatcacatatggaggagcccacatccccggcagccccttcagggttcctgtgaaggatgttgtggaccccagcaaggtcaagattgccggccccgggctgggctcaggcgtccgagcccgtgtcctgcagtccttcacggtggacagcagcaaggctggcctggctccgctggaagtgagggttctgggcccacgaggcttggtggagccagtgaacgtggtggacaatggagatggcacacacacagtaacctacaccccatctcaggagggaccttacatggtctcagttaaatatgctgatgaagagattcctcgcagtcccttcaaggtcaaggtccttcccacatatgatgccagcaaagtgactgccagtggccccggccttagttcctatggtgtgcctgccagtctacctgtggactttgcaattgatgcccgagatgccggggaaggcctgcttgctgttcaaataacggaccaagaaggaaaacccaaaagagccattgtccatgacaataaagatggcacgtatgctgtcacctacatccccgacaagactgggcgctatatgattggagtcacctacgggggtgacgacatcccactttctccttatcgcatccgagccacacagacgggtgatgccagcaagtgcctggccacgggtcctggaatcgcctccactgtgaaaactggcgaagaagtaggctttgtggttgatgccaagactgccgggaagggtaaagtgacctgcacggttctgaccccagatggcactgaggccgaggccgatgtcattgagaatgaagatggaacctatgacatcttctacacagctgccaagccgggcacatatgtgatctatgtgcgcttcggtggtgttgatattcctaacagccccttcactgtcatggccacagatggggaagtcacagccgtggaggaggcaccggtgaccgaagaggcctatgtcccagtgagtgacatgaacggcctgggatttaagccttttgacctggtcattccgtttgctgtcaggaaaggagaaatcactggagaggtccacatgccttctgggaagacagccacacctgagattgtggacaacaaggacggcacggtcactgttagatatgcccccactgaggtcgggctccatgagatgcacatcaaatacatgggcagccacatccctgagagcccactccagttctacgtgaactaccccaacagtggaagtgtttctgcatacggtccaggcctcgtgtatggagtggccaacaaaactgccaccttcaccatcgtcacagaggatgcaggagaaggtggtctggacttggctattgagggcccctcaaaagcagaaatcagctgcattgacaataaagatgggacatgcacagtgacctacctgccgactctgccaggcgactacagcattctggtcaagtacaatgacaagcacatccctggcagccccttcacagccaagatcacagatgacagcaggcggtgctcccaggtgaagttgggctcagccgctgacttcctgctcgacatcagtgagactgacctcagcagcctgacggccagcattaaggccccatctggccgagacgagccctgtctcctgaagaggctgcccaacaaccacattggcatctccttcatcccccgggaagtgggcgaacatctggtcagcatcaagaaaaatggcaaccatgtggccaacagccccgtgtctatcatggtggtccagtcggagattggtgacgcccgccgagccaaagtctatggccgcggcctgtcagaaggccggactttcgagatgtctgacttcatcgtggacacaagggatgcaggttatggtggcatatccttggcggtggaaggccccagcaaagtggacatccagacggaggacctggaagatggcacctgcaaagtctcctacttccctaccgtgcctggggtttatatcgtctccaccaaattcgctgacgagcacgtgcctgggagcccatttaccgtgaagatcagtggggagggaagagtcaaagagagcatcacccgcaccagtcgggccccgtccgtggccactgtcgggagcatttgtgacctgaacctgaaaatcccagaaatcaacagcagtgatatgtcggcccacgtcaccagcccctctggccgtgtgactgaggcagagattgtgcccatggggaagaactcacactgcgtccggtttgtgccccaggagatgggcgtgcacacggtcagcgtcaagtaccgtgggcagcacgtcaccggcagccccttccagttcaccgtggggccacttggtgaaggaggcgcccacaaggtgcgggcaggaggccctggcctggagagaggagaagcgggagtcccagctgagttcagcatttggacccgggaagcaggcgctggaggcctctccatcgctgttgagggccccagtaaggccgagattacattcgatgaccataaaaatgggtcgtgcggtgtatcttatattgcccaagagcctggtaactacgaggtgtccatcaagttcaatgatgagcacatcccggaaagcccctacctggtgccggtcatcgcaccctccgacgacgcccgccgcctcactgttatgagccttcaggaatcgggattaaaagttaaccagccagcatcctttgctataaggttgaatggcgcaaaaggcaagattgatgcaaaggtgcacagcccctctggagccgtggaggagtgccacgtgtctgagctggagccagataagtatgctgttcgcttcatccctcatgagaatggtgtccacaccatcgatgtcaagttcaatgggagccacgtggttggaagccccttcaaagtgcgcgttggggagcctggacaagcggggaaccctgccctggtgtccgcctatggcacgggactcgaagggggcaccacaggtatccagtcggaattctttattaacaccacccgagcaggtccagggacattatccgtcaccatcgaaggcccatccaaggttaaaatggattgccaggaaacacctgaagggtacaaagtcatgtacacccccatggctcctggtaactacctgatcagcgtcaaatacggtgggcccaaccacatcgtgggcagtcccttcaaggccaaggtgacaggccagcgtctagttagccctggctcagccaacgagacctcatccatcctggtggagtcagtgaccaggtcgtctacagagacctgctatagcgccattcccaaggcatcctcggacgccagcaaggtgacctctaagggggcagggctctcaaaggcctttgtgggccagaagagttccttcctggtggactgcagcaaagctggctccaacatgctgctgatcggggtccatgggcccaccaccccctgcgaggaggtctccatgaagcatgtaggcaaccagcaatacaacgtcacatacgtcgtcaaggagaggggcgattatgtgctggctgtgaagtggggggaggaacacatccctggcagcccttttcatgtcacagtgccttaaaacagttttctcaaatcctggagagagttcttgtggttgcttttgttgcttgtttgtaattcattttatacaaagccctccagcctgtttgtggggctgaaaccccatccctaaaatattgctgttgtaaaatgccttcagaaataagtcctagactggactcttgagggacatattggagaatcttaagaaatgcaagcttgttcagggggctgagaagatcctgagtacactaggtgcaaaccagaactcttggtggaacagaccagccactgcagcagacagaccaggaacacaatgagactgacatttcaaaaaaacaaaactggctagcctgagctgctggttcactcttcagcatttatgaaacaaggctaggggaagatgggcagagaaaaaggggacacctagtttggttgtcatttggcaaaggagatgacttaaaatccgcttaatctcttccagtgtccgtgttaatgtatttggctattagatcactagcactgctttaccgctcctcatcgccaacacccccatgctctgtggccttcttacacttctcagagggcagagtggcagccgggcaccctacagaaactcagagggcagagtggcagccaggcccacatgtctctcaagtacctgtcccctcgctctggtgattatttcttgcagaatcaccacacgagaccatcccggcagtcatggttttgctttagttttccaagtccgtttcagtcccttccttggtctgaagaaattctgcagtggcgagcagtttcccacttgccaaagatcccttttaaccaacactagcccttgtttttaacacacgctccagcccttcatcagcctgggcagtcttaccaaaatgtttaaagtgatctcagaggggcccatggattaacgccctcatcccaaggtccgtcccatgacataacactccacacccgccccagccaacttcatgggtcactttttctggaaaataatgatctgtacagacaggacagaatgaaactcctgcgggtctttggcctgaaagttgggaatggttgggggagagaagggcagcagcttattggtggtcttttcaccattggcagaaacagtgagagctgtgtggtgcagaaatccagaaatgaggtgtagggaattttgcctgccttcctgcagacctgagctggctttggaatgaggttaaagtgtcagggacgttgcctgagcccaaatgtgtagtgtggtctgggcaggcagacctttaggttttgctgcttagtcctgaggaagtggccactcttgtggcaggtgtagtatctggggcgagtgttgggggtaaaagcccaccctacagaaagtggaacagcccggagcctgatgtgaaaggaccacgggtgttgtaagctgggacacggaagccaaactggaatcaaacgccgactgtaaattgtatcttataacttattaaataaaacatttgctccgtaaagttg

SEQ ID NO: 10906 - DNA, 9430 bp, Homo sapiens
  source 1..9430: mol_type = unassigned DNA
gcggccaggggcgggcggccgcagagcagcaccggccgtggctccggtagcagcaagttcgaaccccgctcccgctccgcttcggttctcgctccttcggcccttgggcctccaaacaccagtccccggcagctcgttgcgcattgcgctctccccgccaccaggatgccggtaaccgagaaggatctagctgaggacgcgccttggaagaagatccagcagaacacgttcacacgctggtgcaacgagcacctcaagtgcgtgaacaaacgcatcggcaacctgcagaccgacctgagcgacgggctgcggctcatcgcgctgctcgaggtgctcagccagaagcgcatgtaccgcaagtaccatcagcggcccacctttcgccagatgcagctcgagaatgtgtccgtggcgctcgagttcctggaccgtgagagcatcaagctcgtgtccatcgatagcaaagccattgtggatgggaacctgaagctcatcttgggtctggtgtggacgctgatcctccactactccatctccatgcccgtgtgggaggatgaaggggatgatgatgccaagaagcagacgccaaagcagaggctgctggggtggattcagaacaagatcccctacttgcccatcaccaactttaaccagaactggcaagacggcaaagccctgggagccctggtagacagctgtgctccaggtctgtgcccagactgggaatcctgggacccgcagaagcctgtggataatgcacgagaagccatgcagcaggcagatgactggctgggtgtcccacaggtcatcactcctgaagaaatcattcacccggatgtggacgagcactcagttatgacttacctgtcccagttccccaaagccaagctcaagccgggggctcctctcaaacccaaactcaacccgaagaaagccagggcctatggcagaggaatcgagcccactggaaacatggtgaagcagccagccaagttcactgtggacaccatcagcgccgggcaaggagacgtgatggtgtttgttgaggacccagaagggaacaaagaggaggcacaagtgacccctgacagtgacaagaacaagacatactctgtggagtatctgcccaaggtcaccgggctacacaaagtcacagtcctctttgcaggacagcacatctccaagagcccatttgaagtgagtgttgacaaggcccagggagatgccagtaaagtcactgcaaaaggtccagggttggaagctgtagggaacatcgccaataagcccacctactttgacatctatacggcaggagctggtgtgggtgacattggtgtggaggtggaagatccccaggggaagaacaccgtggagttgctcgtggaagacaaaggaaaccaggtgtatcgatgtgtgtacaaacccatgcagcctggccctcacgtggtcaagatcttctttgctggggacactattcctaagagtcccttcgttgtgcaggttggggaagcctgcaatccaaatgcctgccgggccagtggccgaggcctacaacccaaaggcgtccgtatccgggagaccacagatttcaaggttgacaccaaagctgcaggaagtggggagctcggtgtaaccatgaagggtcctaagggtctggaggagctggtgaagcagaaagactttctggatggggtctacgcattcgagtattaccccagcaccccggggagatacagcattgccatcacatgggggggacaccacattccaaagagcccctttgaagttcaagttggccctgaagcgggtatgcagaaagtccgtgcttggggccctgggctccatggtgggattgtcgggcggtcagcggacttcgtggtagaatccattggctctgaagtggggtctctggggtttgccattgaaggcccctctcaggcaaagattgagtacaacgaccagaatgatggatcgtgtgatgtcaaatactggcccaaggagcctggcgaatatgctgttcacatcatgtgtgacgacgaagacatcaaggacagcccgtacatggccttcatccacccagccacgggaggctacaaccctgatctggttcgagcatacgggccaggtttggagaaatctggatgcattgtcaacaacctggccgagttcactgtggatcctaaggatgctggaaaagctcccttaaagatatttgctcaggatggggaaggccaacgcattgacatccagatgaagaaccggatggacggcacatatgcatgctcatacaccccggtgaaggccatcaagcacaccattgctgtggtctggggaggcgtgaacatcccgcacagcccctacagggtcaacatcgggcaaggtagccatcctcagaaggtcaaagtgtttgggccaggtgtggagagaagtggtctgaaggcaaatgaacctacacacttcacggtggactgtactgaggctggggaaggtgatgtcagtgttggcattaagtgtgatgcccgggtgttaagtgaagatgaggaagacgtggattttgacattattcacaatgccaatgatacgttcacagtcaaatatgtgcctcctgctgctgggcgatacactatcaaagttctctttgcatctcaggaaatccccgccagccctttcagagtcaaagttgacccttcccacgatgccagcaaagtgaaggcagaaggcccagggctcagcaaagcaggtgtggaaaatgggaaaccgacccacttcactgtctacaccaagggggctgggaaagccccgctcaacgtgcagttcaacagccctcttcctggcgatgcagtgaaggatttggatatcatcgataattatgactactctcacacggttaaatatacacccacccaacagggcaacatgcaggttctggtgacttacggtggcgatcccatccctaaaagccctttcactgtgggtgttgctgcaccgctggatctgagcaagataaaactcaatgggctggaaaacagggtggaagttgggaaggatcaggagttcaccgttgataccaggggggcaggaggccaggggaagctggacgtgacaatcctcagcccctctcggaaggtcgtgccatgcctagtgacacctgtgacaggccgggagaacagcacggccaagttcatccctcgggaggaggggctgtatgctgtagacgtgacctacgatggacaccctgtgcccgggagcccctacacagtggaggcctcgctgccaccagatcccagcaaggtgaaggcccacggtcccggcctcgaaggtggtctcgtgggcaagcctgccgagttcaccatcgataccaaaggagctggtactggaggtctgggcttaacggtggaaggtccgtgcgaggccaaaatcgagtgctccgacaatggtgatgggacctgctccgtctcttaccttcccacaaaacccggggagtacttcgtcaacatcctctttgaagaagtccacatacctgggtctcccttcaaagctgacattgaaatgccctttgacccctctaaagtcgtggcatcggggccaggtctcgagcacgggaaggtgggtgaagctggcctccttagcgtcgactgctcggaagcgggaccgggggccctgggcctggaagctgtctcggactcgggaacaaaagccgaagtcagtattcagaacaacaaagatggcacctacgcggtgacctacgtgcccctgacggccggcatgtacacgttgaccatgaagtatggtggcgaactcgtgccacacttccccgcccgggtcaaggtggagcccgccgtggacaccagcaggatcaaagtctttggaccaggaatagaagggaaagatgtgttccgggaagctaccaccgactttacagttgactctcggccgctgacccaggttgggggtgaccacatcaaggcccacattgccaacccctcaggggcctccaccgagtgctttgtcacagacaatgcggatgggacctaccaggtggaatacacaccctttgagaaaggtctccatgtagtggaggtgacatatgatgacgtgcctatcccaaacagtcccttcaaggtggctgtcactgaaggctgccagccatctagggtgcaagcccaaggacctggattgaaagaggcctttaccaacaagcccaatgtcttcaccgtggttaccagaggcgcaggaattggtgggcttggcataactgttgagggaccatcagagtcgaagataaattgcagagacaacaaggatggcagctgcagtgctgagtacattcctttcgcaccgggggattacgatgttaatatcacatatggaggagcccacatccccggcagccccttcagggttcctgtgaaggatgttgtggaccccagcaaggtcaagattgccggccccgggctgggctcaggcgtccgagcccgtgtcctgcagtccttcacggtggacagcagcaaggctggcctggctccgctggaagtgagggttctgggcccacgaggcttggtggagccagtgaacgtggtggacaatggagatggcacacacacagtaacctacaccccatctcaggagggaccttacatggtctcagttaaatatgctgatgaagagattcctcgcagtcccttcaaggtcaaggtccttcccacatatgatgccagcaaagtgactgccagtggccccggccttagttcctatggtgtgcctgccagtctacctgtggactttgcaattgatgcccgagatgccggggaaggcctgcttgctgttcaaataacggaccaagaaggaaaacccaaaagagccattgtccatgacaataaagatggcacgtatgctgtcacctacatccccgacaagactgggcgctatatgattggagtcacctacgggggtgacgacatcccactttctccttatcgcatccgagccacacagacgggtgatgccagcaagtgcctggccacgggtcctggaatcgcctccactgtgaaaactggcgaagaagtaggctttgtggttgatgccaagactgccgggaagggtaaagtgacctgcacggttctgaccccagatggcactgaggccgaggccgatgtcattgagaatgaagatggaacctatgacatcttctacacagctgccaagccgggcacatatgtgatctatgtgcgcttcggtggtgttgatattcctaacagccccttcactgtcatggccacagatggggaagtcacagccgtggaggaggcaccggtgaccgaagaggcctatgtcccagtgagtgacatgaacggcctgggatttaagccttttgacctggtcattccgtttgctgtcaggaaaggagaaatcactggagaggtccacatgccttctgggaagacagccacacctgagattgtggacaacaaggacggcacggtcactgttagatatgcccccactgaggtcgggctccatgagatgcacatcaaatacatgggcagccacatccctgagagcccactccagttctacgtgaactaccccaacagtggaagtgtttctgcatacggtccaggcctcgtgtatggagtggccaacaaaactgccaccttcaccatcgtcacagaggatgcaggagaaggtggtctggacttggctattgagggcccctcaaaagcagaaatcagctgcattgacaataaagatgggacatgcacagtgacctacctgccgactctgccaggcgactacagcattctggtcaagtacaatgacaagcacatccctggcagccccttcacagccaagatcacagatgacagcaggcggtgctcccaggtgaagttgggctcagccgctgacttcctgctcgacatcagtgagactgacctcagcagcctgacggccagcattaaggccccatctggccgagacgagccctgtctcctgaagaggctgcccaacaaccacattggcatctccttcatcccccgggaagtgggcgaacatctggtcagcatcaagaaaaatggcaaccatgtggccaacagccccgtgtctatcatggtggtccagtcggagattggtgacgcccgccgagccaaagtctatggccgcggcctgtcagaaggccggactttcgagatgtctgacttcatcgtggacacaagggatgcaggttatggtggcatatccttggcggtggaaggccccagcaaagtggacatccagacggaggacctggaagatggcacctgcaaagtctcctacttccctaccgtgcctggggtttatatcgtctccaccaaattcgctgacgagcacgtgcctgggagcccatttaccgtgaagatcagtggggagggaagagtcaaagagagcatcacccgcaccagtcgggccccgtccgtggccactgtcgggagcatttgtgacctgaacctgaaaatcccagaaatcaacagcagtgatatgtcggcccacgtcaccagcccctctggccgtgtgactgaggcagagattgtgcccatggggaagaactcacactgcgtccggtttgtgccccaggagatgggcgtgcacacggtcagcgtcaagtaccgtgggcagcacgtcaccggcagccccttccagttcaccgtggggccacttggtgaaggaggcgcccacaaggtgcgggcaggaggccctggcctggagagaggagaagcgggagtcccagctgagttcagcatttggacccgggaagcaggcgctggaggcctctccatcgctgttgagggccccagtaaggccgagattacattcgatgaccataaaaatgggtcgtgcggtgtatcttatattgcccaagagcctggtaactacgaggtgtccatcaagttcaatgatgagcacatcccggaaagcccctacctggtgccggtcatcgcaccctccgacgacgcccgccgcctcactgttatgagccttcaggaatcgggattaaaagttaaccagccagcatcctttgctataaggttgaatggcgcaaaaggcaagattgatgcaaaggtgcacagcccctctggagccgtggaggagtgccacgtgtctgagctggagccagataagtatgctgttcgcttcatccctcatgagaatggtgtccacaccatcgatgtcaagttcaatgggagccacgtggttggaagccccttcaaagtgcgcgttggggagcctggacaagcggggaaccctgccctggtgtccgcctatggcacgggactcgaagggggcaccacaggtatccagtcggaattctttattaacaccacccgagcaggtccagggacattatccgtcaccatcgaaggcccatccaaggttaaaatggattgccaggaaacacctgaagggtacaaagtcatgtacacccccatggctcctggtaactacctgatcagcgtcaaatacggtgggcccaaccacatcgtgggcagtcccttcaaggccaaggtgacaggccagcgtctagttagccctggctcagccaacgagacctcatccatcctggtggagtcagtgaccaggtcgtctacagagacctgctatagcgccattcccaaggcatcctcggacgccagcaaggtgacctctaagggggcagggctctcaaaggcctttgtgggccagaagagttccttcctggtggactgcagcaaagctggctccaacatgctgctgatcggggtccatgggcccaccaccccctgcgaggaggtctccatgaagcatgtaggcaaccagcaatacaacgtcacatacgtcgtcaaggagaggggcgattatgtgctggctgtgaagtggggggaggaacacatccctggcagcccttttcatgtcacagtgccttaaaacagttttctcaaatcctggagagagttcttgtggttgcttttgttgcttgtttgtaattcattttatacaaagccctccagcctgtttgtggggctgaaaccccatccctaaaatattgctgttgtaaaatgccttcagaaataagtcctagactggactcttgagggacatattggagaatcttaagaaatgcaagcttgttcagggggctgagaagatcctgagtacactaggtgcaaaccagaactcttggtggaacagaccagccactgcagcagacagaccaggaacacaatgagactgacatttcaaaaaaacaaaactggctagcctgagctgctggttcactcttcagcatttatgaaacaaggctaggggaagatgggcagagaaaaaggggacacctagtttggttgtcatttggcaaaggagatgacttaaaatccgcttaatctcttccagtgtccgtgttaatgtatttggctattagatcactagcactgctttaccgctcctcatcgccaacacccccatgctctgtggccttcttacacttctcagagggcagagtggcagccgggcaccctacagaaactcagagggcagagtggcagccaggcccacatgtctctcaagtacctgtcccctcgctctggtgattatttcttgcagaatcaccacacgagaccatcccggcagtcatggttttgctttagttttccaagtccgtttcagtcccttccttggtctgaagaaattctgcagtggcgagcagtttcccacttgccaaagatcccttttaaccaacactagcccttgtttttaacacacgctccagcccttcatcagcctgggcagtcttaccaaaatgtttaaagtgatctcagaggggcccatggattaacgccctcatcccaaggtccgtcccatgacataacactccacacccgccccagccaacttcatgggtcactttttctggaaaataatgatctgtacagacaggacagaatgaaactcctgcgggtctttggcctgaaagttgggaatggttgggggagagaagggcagcagcttattggtggtcttttcaccattggcagaaacagtgagagctgtgtggtgcagaaatccagaaatgaggtgtagggaattttgcctgccttcctgcagacctgagctggctttggaatgaggttaaagtgtcagggacgttgcctgagcccaaatgtgtagtgtggtctgggcaggcagacctttaggttttgctgcttagtcctgaggaagtggccactcttgtggcaggtgtagtatctggggcgagtgttgggggtaaaagcccaccctacagaaagtggaacagcccggagcctgatgtgaaaggaccacgggtgttgtaagctgggacacggaagccaaactggaatcaaacgccgactgtaaattgtatcttataacttattaaataaaacatttgctccgtaaa

SEQ ID NO: 10907 - DNA, 404 bp, Homo sapiens
  source 1..404: mol_type = unassigned DNA
cttggcggtggaaggccccagcaaagtggacatccagacggaggacctggaagatggcacctgcaaagtctcctacttccctaccgtgcctggggtttatatcgtctccaccaaattcgctgacgagcacgtgcctgaaatcaacagcagtgatatgtcggcccacgtcaccagcccctctggccgtgtgactgaggcagagattgtgcccatggggaagaactcacactgcgtccggtttgtgccccaggagatgggcgtgcacacggtcagcgtcaagtaccgtgggcagcacgtcaccggcagccccttccagttcaccgtggggccacttggtgaaggaggcgcccacaaggtgcgggcaggaggccctggcctggagagaggagaagcgggagtcccag

SEQ ID NO: 10908 - DNA, 8079 bp, Homo sapiens
  source 1..8079: mol_type = unassigned DNA
gcggccaggggcgggcggccgcagagcagcaccggccgtggctccggtagcagcaagttcgaaccccgctcccgctccgcttcggttctcgctccttcggcccttgggcctccaaacaccagtccccggcagctcgttgcgcattgcgctctccccgccaccaggatgccggtaaccgagaaggatctagctgaggacgcgccttggaagaagatccagcagaacacgttcacacgctggtgcaacgagcacctcaagtgcgtgaacaaacgcatcggcaacctgcagaccgacctgagcgacgggctgcggctcatcgcgctgctcgaggtgctcagccagaagcgcatgtaccgcaagtaccatcagcggcccacctttcgccagatgcagctcgagaatgtgtccgtggcgctcgagttcctggaccgtgagagcatcaagctcgtgtccatcgatagcaaagccattgtggatgggaacctgaagctcatcttgggtctggtgtggacgctgatcctccactactccatctccatgcccgtgtgggaggatgaaggggatgatgatgccaagaagcagacgccaaagcagaggctgctggggtggattcagaacaagatcccctacttgcccatcaccaactttaaccagaactggcaagacggcaaagccctgggagccctggtagacagctgtgctccaggtctgtgcccagactgggaatcctgggacccgcagaagcctgtggataatgcacgagaagccatgcagcaggcagatgactggctgggtgtcccacaggtcatcactcctgaagaaatcattcacccggatgtggacgagcactcagttatgacttacctgtcccagttccccaaagccaagctcaagccgggggctcctctcaaacccaaactcaacccgaagaaagccagggcctatggcagaggaatcgagcccactggaaacatggtgaagcagccagccaagttcactgtggacaccatcagcgccgggcaaggagacgtgatggtgtttgttgaggacccagaagggaacaaagaggaggcacaagtgacccctgacagtgacaagaacaagacatactctgtggagtatctgcccaaggtcaccgggctacacaaagtcacagtcctctttgcaggacagcacatctccaagagcccatttgaagtgagtgttgacaaggcccagggagatgccagtaaagtcactgcaaaaggtccagggttggaagctgtagggaacatcgccaataagcccacctactttgacatctatacggcaggagctggtgtgggtgacattggtgtggaggtggaagatccccaggggaagaacaccgtggagttgctcgtggaagacaaaggaaaccaggtgtatcgatgtgtgtacaaacccatgcagcctggccctcacgtggtcaagatcttctttgctggggacactattcctaagagtcccttcgttgtgcaggttggggaagcctgcaatccaaatgcctgccgggccagtggccgaggcctacaacccaaaggcgtccgtatccgggagaccacagatttcaaggttgacaccaaagctgcaggaagtggggagctcggtgtaaccatgaagggtcctaagggtctggaggagctggtgaagcagaaagactttctggatggggtctacgcattcgagtattaccccagcaccccggggagatacagcattgccatcacatgggggggacaccacattccaaagagcccctttgaagttcaagttggccctgaagcgggtatgcagaaagtccgtgcttggggccctgggctccatggtgggattgtcgggcggtcagcggacttcgtggtagaatccattggctctgaagtggggtctctggggtttgccattgaaggcccctctcaggcaaagattgagtacaacgaccagaatgatggatcgtgtgatgtcaaatactggcccaaggagcctggcgaatatgctgttcacatcatgtgtgacgacgaagacatcaaggacagcccgtacatggccttcatccacccagccacgggaggctacaaccctgatctggttcgagcatacgggccaggtttggagaaatctggatgcattgtcaacaacctggccgagttcactgtggatcctaaggatgctggaaaagctcccttaaagatatttgctcaggatggggaaggccaacgcattgacatccagatgaagaaccggatggacggcacatatgcatgctcatacaccccggtgaaggccatcaagcacaccattgctgtggtctggggaggcgtgaacatcccgcacagcccctacagggtcaacatcgggcaaggtagccatcctcagaaggtcaaagtgtttgggccaggtgtggagagaagtggtctgaaggcaaatgaacctacacacttcacggtggactgtactgaggctggggaaggtgatgtcagtgttggcattaagtgtgatgcccgggtgttaagtgaagatgaggaagacgtggattttgacattattcacaatgccaatgatacgttcacagtcaaatatgtgcctcctgctgctgggcgatacactatcaaagttctctttgcatctcaggaaatccccgccagccctttcagagtcaaagttgacccttcccacgatgccagcaaagtgaaggcagaaggcccagggctcagcaaagcaggtgtggaaaatgggaaaccgacccacttcactgtctacaccaagggggctgggaaagccccgctcaacgtgcagttcaacagccctcttcctggcgatgcagtgaaggatttggatatcatcgataattatgactactctcacacggttaaatatacacccacccaacagggcaacatgcaggttctggtgacttacggtggcgatcccatccctaaaagccctttcactgtgggtgttgctgcaccgctggatctgagcaagataaaactcaatgggctggaaaacagggtggaagttgggaaggatcaggagttcaccgttgataccaggggggcaggaggccaggggaagctggacgtgacaatcctcagcccctctcggaaggtcgtgccatgcctagtgacacctgtgacaggccgggagaacagcacggccaagttcatccctcgggaggaggggctgtatgctgtagacgtgacctacgatggacaccctgtgcccgggagcccctacacagtggaggcctcgctgccaccagatcccagcaaggtgaaggcccacggtcccggcctcgaaggtggtctcgtgggcaagcctgccgagttcaccatcgataccaaaggagctggtactggaggtctgggcttaacggtggaaggtccgtgcgaggccaaaatcgagtgctccgacaatggtgatgggacctgctccgtctcttaccttcccacaaaacccggggagtacttcgtcaacatcctctttgaagaagtccacatacctgggtctcccttcaaagctgacattgaaatgccctttgacccctctaaagtcgtggcatcggggccaggtctcgagcacgggaaggtgggtgaagctggcctccttagcgtcgactgctcggaagcgggaccgggggccctgggcctggaagctgtctcggactcgggaacaaaagccgaagtcagtattcagaacaacaaagatggcacctacgcggtgacctacgtgcccctgacggccggcatgtacacgttgaccatgaagtatggtggcgaactcgtgccacacttccccgcccgggtcaaggtggagcccgccgtggacaccagcaggatcaaagtctttggaccaggaatagaagggaaagatgtgttccgggaagctaccaccgactttacagttgactctcggccgctgacccaggttgggggtgaccacatcaaggcccacattgccaacccctcaggggcctccaccgagtgctttgtcacagacaatgcggatgggacctaccaggtggaatacacaccctttgagaaaggtctccatgtagtggaggtgacatatgatgacgtgcctatcccaaacagtcccttcaaggtggctgtcactgaaggctgccagccatctagggtgcaagcccaaggacctggattgaaagaggcctttaccaacaagcccaatgtcttcaccgtggttaccagaggcgcaggaattggtgggcttggcataactgttgagggaccatcagagtcgaagataaattgcagagacaacaaggatggcagctgcagtgctgagtacattcctttcgcaccgggggattacgatgttaatatcacatatggaggagcccacatccccggcagccccttcagggttcctgtgaaggatgttgtggaccccagcaaggtcaagattgccggccccgggctgggctcaggcgtccgagcccgtgtcctgcagtccttcacggtggacagcagcaaggctggcctggctccgctggaagtgagggttctgggcccacgagctgacgacacggattcccagtcatggcgcagccccttgaaagccctttcagagttctttaaaggtgacccgaagggtgactttaataagacaggcttggtggagccagtgaacgtggtggacaatggagatggcacacacacagtaacctacaccccatctcaggagggaccttacatggtctcagttaaatatgctgatgaagagattcctcgcagtcccttcaaggtcaaggtccttcccacatatgatgccagcaaagtgactgccagtggccccggccttagttcctatggtgtgcctgccagtctacctgtggactttgcaattgatgcccgagatgccggggaaggcctgcttgctgttcaaataacggaccaagaaggaaaacccaaaagagccattgtccatgacaataaagatggcacgtatgctgtcacctacatccccgacaagactgggcgctatatgattggagtcacctacgggggtgacgacatcccactttctccttatcgcatccgagccacacagacgggtgatgccagcaagtgcctggccacgggtcctggaatcgcctccactgtgaaaactggcgaagaagtaggctttgtggttgatgccaagactgccgggaagggtaaagtgacctgcacggttctgaccccagatggcactgaggccgaggccgatgtcattgagaatgaagatggaacctatgacatcttctacacagctgccaagccgggcacatatgtgatctatgtgcgcttcggtggtgttgatattcctaacagccccttcactgtcatggccacagatggggaagtcacagccgtggaggaggcaccggtaaatgcatgtccccctggattcaggccctgggtgaccgaagaggcctatgtcccagtgagtgacatgaacggcctgggatttaagccttttgacctggtcattccgtttgctgtcaggaaaggagaaatcactggagaggtccacatgccttctgggaagacagccacacctgagattgtggacaacaaggacggcacggtcactgttagatatgcccccactgaggtcgggctccatgagatgcacatcaaatacatgggcagccacatccctgagagcccactccagttctacgtgaactaccccaacagtggaagtgtttctgcatacggtccaggcctcgtgtatggagtggccaacaaaactgccaccttcaccatcgtcacagaggatgcaggagaaggtggtctggacttggctattgagggcccctcaaaagcagaaatcagctgcattgacaataaagatgggacatgcacagtgacctacctgccgactctgccaggcgactacagcattctggtcaagtacaatgacaagcacatccctggcagccccttcacagccaagatcacagatgacagcaggcggtgctcccaggtgaagttgggctcagccgctgacttcctgctcgacatcagtgagactgacctcagcagcctgacggccagcattaaggccccatctggccgagacgagccctgtctcctgaagaggctgcccaacaaccacattggcatctccttcatcccccgggaagtgggcgaacatctggtcagcatcaagaaaaatggcaaccatgtggccaacagccccgtgtctatcatggtggtccagtcggagattggtgacgcccgccgagccaaagtctatggccgcggcctgtcagaaggccggactttcgagatgtctgacttcatcgtggacacaagggatgcaggttatggtggcatatccttggcggtggaaggccccagcaaagtggacatccagacggaggacctggaagatggcacctgcaaagtctcctacttccctaccgtgcctggggtttatatcgtctccaccaaattcgctgacgagcacgtgcctgggagcccatttaccgtgaagatcagtggggagggaagagtcaaagagagcatcacccgcaccagtcgggccccgtccgtggccactgtcgggagcatttgtgacctgaacctgaaaatcccagaaatcaacagcagtgatatgtcggcccacgtcaccagcccctctggccgtgtgactgaggcagagattgtgcccatggggaagaactcacactgcgtccggtttgtgccccaggagatgggcgtgcacacggtcagcgtcaagtaccgtgggcagcacgtcaccggcagccccttccagttcaccgtggggccacttggtgaaggaggcgcccacaaggtgcgggcaggaggccctggcctggagagaggagaagcgggagtcccagctgagttcagcatttggacccgggaagcaggcgctggaggcctctccatcgctgttgagggccccagtaaggccgagattacattcgatgaccataaaaatgggtcgtgcggtgtatcttatattgcccaagagcctggtaactacgaggtgtccatcaagttcaatgatgagcacatcccggaaagcccctacctggtgccggtcatcgcaccctccgacgacgcccgccgcctcactgttatgagccttcaggaatcgggattaaaagttaaccagccagcatcctttgctataaggttgaatggcgcaaaaggcaagattgatgcaaaggtgcacagcccctctggagccgtggaggagtgccacgtgtctgagctggagccagataagtatgctgttcgcttcatccctcatgagaatggtgtccacaccatcgatgtcaagttcaatgggagccacgtggttggaagccccttcaaagtgcgcgttggggagcctggacaagcggggaaccctgccctggtgtccgcctatggcacgggactcgaagggggcaccacaggtatccagtcggaattctttattaacaccacccgagcaggtccagggacattatccgtcaccatcgaaggcccatccaaggttaaaatggattgccaggaaacacctgaagggtacaaagtcatgtacacccccatggctcctggtaactacctgatcagcgtcaaatacggtgggcccaaccacatcgtgggcagtcccttcaaggccaaggtgacaggccagcgtctagttagccctggctcagccaacgagacctcatccatcctggtggagtcagtgaccaggtcgtctacagagacctgctatagcgccattcccaaggcatcctcggacgccagcaaggtgacctctaagggggcagggctctcaaaggcctttgtgggccagaagagttccttcctggtggactgcagcaaagctggctccaacatgctgctgatcggggtccatgggcccaccaccccctgcgaggaggtctccatgaagcatgtaggcaaccagcaatacaacgtcacatacgtcgtcaaggagaggggcgattatgtgctggctgtgaagtggggggaggaacacatccctggcagcccttttcatgtcacagtgccttaaaacagttttctc

SEQ ID NO: 10909 - DNA, 9188 bp, Homo sapiens
  source 1..9188: mol_type = unassigned DNA
ttcttaaaccccccgccccggcccagcccgcccttcccgagcaccgctccggccctggagggagagagagccagagagcggccgagcgcctaggaggcccgccgagcctcgccgagccccgccagccccggcgcgagagaagttggagaggagagcagcgcagcgcagcgagtcccgtggtcgcgccccaacagcgcccgacagcccccgatagcccaaaccgcggccctagccccggccgcacccccagcccgcgccagcatgatgaacaacagcggctactcagacgccggcctcggcctgggcgatgagacagacgagatgccgtccacggagaaggacctggcggaggacgcgccgtggaagaagatccagcagaacacattcacgcgctggtgcaatgagcacctcaagtgcgtgggcaagcgcctgaccgacctgcagcgcgacctcagcgacgggctccggctcatcgcgctgctcgaggtgctcagccagaagcgcatgtaccgcaagttccatccgcgccccaacttccgccaaatgaagctggagaacgtgtccgtggccctcgagttcctcgagcgcgagcacatcaagctcgtgtccatagacagcaaggccatcgtggatgggaacctgaagctgatcctgggcctgatctggacgctgatcctgcactactccatctccatgcccatgtgggaggatgaagatgatgaggatgcccgcaaacagacgcccaagcagcggctgcttggctggatccagaacaaggtgccccagctgcccatcaccaacttcaaccgtgactggcaggacggcaaagctctgggcgccctggtggacaactgcgcccccggtctctgccccgactgggaggcctgggaccccaaccagcccgtggagaacgcccgggaggccatgcagcaggccgacgactggcttggggtgccccaggtcattgcccctgaggagattgtggaccccaacgtggatgagcattctgttatgacctacctgtcccagttccccaaggccaagctcaaacctggtgcccctgttcgatccaagcagctgaaccccaagaaagccatcgcctatgggcctggcatcgagccacagggcaacaccgtgctgcagcctgcccacttcaccgtgcagacggtggacgcgggcgtgggcgaggtgctggtctacatcgaggaccctgaaggccacaccgaggaggctaaggtggttcccaacaatgacaaggatcgcacctatgctgtctcctatgtgcccaaggtcgctgggttacacaaggtgaccgtgctctttgctggccagaacattgaacgcagtccctttgaggtgaacgtgggcatggccctgggagatgccaacaaggtgtcagcccgtggccctggcctggaacctgtgggcaatgtggccaacaaacccacctactttgacatctacactgcgggggccggcactggcgatgttgctgtggtgatcgtggacccacagggccggcgggacacagtggaggtggccctggaggacaagggtgacagcacgttccgctgcacatacagacctgccatggaggggccacataccgtgcatgtggcctttgcgggtgcccccatcacccgcagtcccttccctgtccatgtgtcggaagcctgtaaccccaacgcctgccgcgcctctgggcgaggcctgcagcccaagggtgttcgcgtgaaagaggtggctgacttcaaggtgtttaccaagggtgccggcagcggggagctcaaggtcacggtcaaggggccaaagggcacagaggagccagtgaaggtgcgggaggctggggatggtgtgttcgagtgcgagtactacccggtggtgcctgggaagtatgtggtgaccatcacgtggggcggctacgccatccctcgcagcccctttgaggtacaggtgagcccagaggcaggagtgcaaaaggtccgggcctggggtcctggtttggagactggccaggtgggcaagtcagccgattttgtggtggaagccattggcaccgaggtggggacactgggcttctccatcgaggggccctcacaagccaagatcgaatgtgacgacaagggggatggctcctgcgatgtgcggtactggcccacggagcctggggagtacgctgtgcacgtcatctgtgacgatgaggacatccgagactcacccttcattgcccacatcctgcccgccccacctgactgcttcccagataaggtgaaggcctttgggcctggcctggagcctaccggctgcatcgtggacaagcccgctgagttcaccattgatgctcgtgcagctggcaagggagacctgaagctctatgcccaggacgccgacggctgtcccatcgacatcaaggtgatccccaacggcgacggcaccttccgctgctcctacgtgcccaccaagcccattaagcacaccatcatcatctcctggggaggcgtaaacgtgcccaagagccccttccgggtgaacgtgggcgagggcagccaccccgagcgggtaaaggtgtacggccccggagtggagaagacaggcctcaaggccaatgagcccacctacttcacggtggactgcagcgaggcggggcaaggcgacgtgagcatcggcatcaagtgcgccccaggcgtggtgggccctgcagaggctgacattgacttcgacatcatcaagaatgacaacgacaccttcaccgtcaagtacacgccaccaggggcgggccgctacaccatcatggtgctgtttgccaaccaggagatccccgccagccccttccacatcaaggtggacccatcccacgatgccagcaaagtcaaggccgagggccctgggctgaatcgcacaggtgtggaagtcgggaagcccacccacttcacggtgctgaccaagggagccggcaaggccaagctggatgtgcagtttgcagggacagccaagggcgaggttgtgcgggactttgagatcatagacaaccatgactactcctacactgtcaagtacaccgctgtccagcagggcaacatggcagtgacagtgacttatggcggggaccctgtccccaagagcccctttgtggtgaatgtggcacccccgctggacctcagcaaaatcaaagttcagggccttaatagcaaggtggctgtgggacaggaacaagcattctctgtgaacacacgaggggctggcggtcagggccaactggatgtgcggatgacttcgccctctcgccggcccatcccctgcaagctggagccaggcggtggagcggaagcccaggctgtgcgctacatgcccccggaggaggggccctacaaggtggatatcacctacgatggtcacccggtgcctggcagcccgtttgctgtggagggtgtcctgccccctgatccctccaaggtctgtgcttatggcccgggtctcaagggtggactggtaggcacccccgcgccattctccatcgacaccaagggggctggcacaggtggcctggggctgaccgtagagggcccctgcgaggccaagatcgagtgccaggacaatggtgatggctcatgtgctgtcagctacctgcccacggagcctggcgagtacaccatcaacatcctgtttgctgaggcccacatccctggctcgcccttcaaagccaccattcggcctgtgtttgacccgagcaaggtgcgggccagtggaccgggcctggagcgcggcaaggtcggtgaggcagccaccttcactgtggactgctcagaggcaggcgaggcggagctgaccattgagatcctgtcggatgccggggtcaaggccgaggtgctgatccacaacaacgcggatggcacctaccacatcacctacagccctgccttccctggcacctacaccattaccatcaagtatggcgggcatcccgtgcccaaattccccacccgtgtccatgtgcagcctgcggtcgataccagtggcgtcaaggtctcagggcctggtgttgagccacacggtgtcctgcgggaggtgaccactgagttcactgtggatgcaagatccctaacagccacaggcggcaaccacgtgacggctcgtgtgctcaacccctcgggggccaagacagacacctatgtgacagacaatggggacggcacctaccgagtgcagtacaccgcctacgaggagggcgtgcatctggtggaggtcctgtatgatgaggtcgctgtgcccaagagccccttccgagtgggcgtgaccgagggctgtgatcccacccgcgtccgagccttcgggccaggcctggagggtggcttggtcaacaaggccaaccgattcactgtggagaccaggggagcgggcaccgggggccttggcctagccatcgagggtccctcggaagccaagatgtcctgcaaggacaacaaggatggtagctgcaccgtggagtacatccccttcactcctggagactatgacgtcaacatcaccttcggggggcggcccatcccagggagcccgttccgcgtgccagtgaaggatgtggtggaccctgggaaggtgaagtgctcagggccagggctgggggctggtgtcagggcccgggttcctcagaccttcacagtggattgcagtcaagctggccgggcgcccctgcaggtggctgtgctgggccccacaggtgtggccgagcctgtggaggtgcgggacaatggagatggcacccacactgtccactacaccccagccactgacgggccctacacggtagccgtcaagtatgctgaccaggaggtgccacgcagccccttcaagatcaaggtcctcccagctcatgatgccagcaaggtgcgggccagcggcccaggcctcaacgcctctggcatccctgccagcctgcctgtggagttcaccatcgacgcacgggacgcgggcgaggggttgctcactgtccagatcttggaccccgagggtaagcccaagaaggccaacatccgggacaatggggatggcacgtacactgtgtcctacctgccggacatgagtggccggtacaccatcaccatcaagtatggcggtgatgagatcccctactcgcccttccgcatccatgctctgcccactggggatgccagcaagtgcctcgtcacagtgtccattggaggccatggcctgggtgcctgcctgggccctcgaatccagattgggcaggagacggtgatcacggtggatgccaaggcagccggtgaggggaaggtgacatgcacggtgtccacgccggatggggcagagctcgatgtggatgtggttgagaaccatgacggtacctttgacatctactacacagcgcccgagccgggcaagtacgtcatcaccatccgcttcgggggtgagcacatccccaacagccccttccacgtgctggcgtgtgaccccctgccgcacgaggaggagccctctgaagtgccacagctgcgccagccctacgctcctccccggcccggcgcccgccccacacactgggccacagaggagccagtggtgcctgtggagccaatggagtccatgctgaggcccttcaacctggtcatccccttcgcggtgcagaaaggggagctcacaggagaggtgcggatgccctcggggaagacggcacggcccaacatcaccgacaacaaggacggcaccatcacggtgaggtatgcacccactgagaaaggcctgcaccagatggggatcaagtatgacggcaaccacatccctgggagccccttacagttctatgtggatgccatcaacagccgccatgtcagtgcctatgggccaggcctgagccatggcatggtcaacaagccagccaccttcactattgtcaccaaagatgctggagaagggggtctgtcactggccgtggagggcccatccaaggcagagatcacctgtaaggacaacaaggatggcacctgcaccgtgtcctatctgccgactgcgcctggagactacagcatcatcgtgcgcttcgatgacaagcacatcccggggagccccttcacagccaagatcacaggtgatgactccatgaggacctcacagctgaatgtgggcacctccacggacgtgtcactgaagatcaccgagagtgatctgagccagctgaccgccagcatccgtgccccctcgggcaacgaggagccctgcctgctgaagcgcctgcccaaccggcacattgggatctccttcacccccaaggaggtcggggagcacgtggtgagcgtgcgcaagagtggcaagcatgtcaccaacagccccttcaagatcctggtggggccatctgagatcggggacgccagcaaggtgcgggtctggggcaaggggctttccgagggacacacattccaggtggcagagttcatcgtggacactcgcaatgcaggttatgggggcttggggctgagtattgaaggcccaagcaaggtggacatcaactgtgaggacatggaggacgggacatgcaaagtcacctactgccccaccgagcccggcacctacatcatcaacatcaagtttgctgacaagcacgtgcctggaagccccttcactgtgaaggtgaccggcgagggccgcatgaaggagagcatcacccggcggagacaggcaccttccatcgccaccatcggcagcacctgtgacctcaacctcaagatcccaggaaactggttccagatggtgtctgcccaggagcgcctgacacgcaccttcacacgcagcagccacacctacacccgcacggagcgcacggagatcagcaagacgcggggcggggagacaaagcgcgaggtgcgggtggaggagtccacccaggtcggcggggaccccttccctgctgtgtttggggacttcctgggccgggagcgcctgggatccttcggcagcatcacccggcagcaggagggtgaggccagctctcaggacatgactgcacaggtgaccagcccatcgggcaaggtggaagccgcagagatcgtcgagggcgaggacagcgcctacagcgtgcgctttgtgccccaggaaatggggccccatacggtcgctgtcaagtaccgtggccagcacgtgcccggcagcccctttcagttcactgtggggccgctgggtgaaggtggtgcccacaaggtgcgggccggaggcacagggctggagcgaggtgtggccggcgtgccagccgagttcagcatctggacccgggaggctggcgctgggggcctgtccattgctgtggagggtcctagcaaagcggagattgcatttgaggatcgcaaagatggctcctgcggcgtctcctatgtcgtccaggaaccaggtgactatgaggtctccatcaagttcaatgatgagcacatcccagacagcccctttgtggtgcctgtggcctccctctcggatgacgctcgccgtctcactgtcaccagcctccaggagacggggctcaaggtgaaccagccagcgtcctttgccgtgcagctgaacggtgcccggggcgtgattgatgcccgggtgcacacaccctcgggggctgtggaggagtgctacgtctctgagctggacagtgacaagcacaccatccgcttcatcccccacgagaatggcgtccactccatcgatgtcaagttcaacggtgcccacatccctggaagtcccttcaagatccgcgttggggagcagagccaggctggggacccaggcttggtgtcagcctacggtcctgggctcgagggaggcactaccggtgtgtcatcagagttcatcgtgaacaccctgaatgccggctcgggggccttgtctgtcaccattgatggcccctccaaggtgcagctggactgtcgggagtgtcctgagggccatgtggtcacttatactcccatggcccctggcaactacctcattgccatcaagtacggtggcccccagcacatcgtgggcagccccttcaaggccaaggtcactggtccgaggctgtccggaggccacagccttcacgaaacatccacggttctggtggagactgtgaccaagtcctcctcaagccggggctccagctacagctccatccccaagttctcctcagatgccagcaaggtggtgactcggggccctgggctgtcccaggccttcgtgggccagaagaactccttcaccgtggactgcagcaaagcaggcaccaacatgatgatggtgggcgtgcacggccccaagaccccctgtgaggaggtgtacgtgaagcacatggggaaccgggtgtacaatgtcacctacactgtcaaggagaaaggggactacatcctcattgtcaagtggggtgacgaaagtgtccctggaagccccttcaaagtcaaggtcccttgaatcccaaaagtgcctccccagcctcagcccccacctccagccacacacacattacacacacacacacacacacacaaatgtgccacacccagacacgcacagaatcagacactacaaacacctgccttgggggtgaagtgaaggcccagcctccccaccccaccgcgccccaggggttggaggaccttgtctgtgtcaggacagtgtccctccctgggaatgtgacatgagggccgactggggccaggctcaggggcagaggctgggacacaaggggctggcgagggctgcgaggccagggaagccctgagtttctggcggggctgagcagtgggggagcattgtgttgtgggtgtctgtgtgtgaggtcaccctcaaactgcaccgccggccagataccctcctgaccccgaggacttggtctggtctctctggtggctacaaccccagagttttaaggacttggaaaggaaagcacaatcagagaagaaaacagcccccgaaccagcaggagtggcctggcacatggaccggcctgagcgatgtgcactccacccaagccaggctcccagggggcctgatttctctctcactgtctctttttttaaaatggttgcacggctctgccccatggggggccttttttacacactgcgaggcccagctttctaggggacttttgcacatgtcatgcagctcagctgggagctgcttaggtggaaaactccaaataaagtgcggctgtcgca

SEQ ID NO: 10910 - DNA, 9042 bp, Homo sapiens
  source 1..9042: mol_type = unassigned DNA
cggccctggagggagagagagccagagagcggccgagcgcctaggaggcccgccgagcctcgccgagccccgccagccccggcgcgagagaagttggagaggagagcagcgcagcgcagcgagtcccgtggtcgcgccccaacagcgcccgacagcccccgatagcccaaaccgcggccctagccccggccgcacccccagcccgcgccagcatgatgaacaacagcggctactcagacgccggcctcggcctgggcgatgagacagacgagatgccgtccacggagaaggacctggcggaggacgcgccgtggaagaagatccagcagaacacattcacgcgctggtgcaatgagcacctcaagtgcgtgggcaagcgcctgaccgacctgcagcgcgacctcagcgacgggctccggctcatcgcgctgctcgaggtgctcagccagaagcgcatgtaccgcaagttccatccgcgccccaacttccgccaaatgaagctggagaacgtgtccgtggccctcgagttcctcgagcgcgagcacatcaagctcgtgtccatagacagcaaggccatcgtggatgggaacctgaagctgatcctgggcctgatctggacgctgatcctgcactactccatctccatgcccatgtgggaggatgaagatgatgaggatgcccgcaaacagacgcccaagcagcggctgcttggctggatccagaacaaggtgccccagctgcccatcaccaacttcaaccgtgactggcaggacggcaaagctctgggcgccctggtggacaactgcgcccccggtctctgccccgactgggaggcctgggaccccaaccagcccgtggagaacgcccgggaggccatgcagcaggccgacgactggcttggggtgccccaggtcattgcccctgaggagattgtggaccccaacgtggatgagcattctgttatgacctacctgtcccagttccccaaggccaagctcaaacctggtgcccctgttcgatccaagcagctgaaccccaagaaagccatcgcctatgggcctggcatcgagccacagggcaacaccgtgctgcagcctgcccacttcaccgtgcagacggtggacgcgggcgtgggcgaggtgctggtctacatcgaggaccctgaaggccacaccgaggaggctaaggtggttcccaacaatgacaaggatcgcacctatgctgtctcctatgtgcccaaggtcgctgggttacacaaggtgaccgtgctctttgctggccagaacattgaacgcagtccctttgaggtgaacgtgggcatggccctgggagatgccaacaaggtgtcagcccgtggccctggcctggaacctgtgggcaatgtggccaacaaacccacctactttgacatctacactgcgggggccggcactggcgatgttgctgtggtgatcgtggacccacagggccggcgggacacagtggaggtggccctggaggacaagggtgacagcacgttccgctgcacatacagacctgccatggaggggccacataccgtgcatgtggcctttgcgggtgcccccatcacccgcagtcccttccctgtccatgtgtcggaagcctgtaaccccaacgcctgccgcgcctctgggcgaggcctgcagcccaagggtgttcgcgtgaaagaggtggctgacttcaaggtgtttaccaagggtgccggcagcggggagctcaaggtcacggtcaaggggccaaagggcacagaggagccagtgaaggtgcgggaggctggggatggtgtgttcgagtgcgagtactacccggtggtgcctgggaagtatgtggtgaccatcacgtggggcggctacgccatccctcgcagcccctttgaggtacaggtgagcccagaggcaggagtgcaaaaggtccgggcctggggtcctggtttggagactggccaggtgggcaagtcagccgattttgtggtggaagccattggcaccgaggtggggacactgggcttctccatcgaggggccctcacaagccaagatcgaatgtgacgacaagggggatggctcctgcgatgtgcggtactggcccacggagcctggggagtacgctgtgcacgtcatctgtgacgatgaggacatccgagactcacccttcattgcccacatcctgcccgccccacctgactgcttcccagataaggtgaaggcctttgggcctggcctggagcctaccggctgcatcgtggacaagcccgctgagttcaccattgatgctcgtgcagctggcaagggagacctgaagctctatgcccaggacgccgacggctgtcccatcgacatcaaggtgatccccaacggcgacggcaccttccgctgctcctacgtgcccaccaagcccattaagcacaccatcatcatctcctggggaggcgtaaacgtgcccaagagccccttccgggtgaacgtgggcgagggcagccaccccgagcgggtaaaggtgtacggccccggagtggagaagacaggcctcaaggccaatgagcccacctacttcacggtggactgcagcgaggcggggcaaggcgacgtgagcatcggcatcaagtgcgccccaggcgtggtgggccctgcagaggctgacattgacttcgacatcatcaagaatgacaacgacaccttcaccgtcaagtacacgccaccaggggcgggccgctacaccatcatggtgctgtttgccaaccaggagatccccgccagccccttccacatcaaggtggacccatcccacgatgccagcaaagtcaaggccgagggccctgggctgaatcgcacaggtgtggaagtcgggaagcccacccacttcacggtgctgaccaagggagccggcaaggccaagctggatgtgcagtttgcagggacagccaagggcgaggttgtgcgggactttgagatcatagacaaccatgactactcctacactgtcaagtacaccgctgtccagcagggcaacatggcagtgacagtgacttatggcggggaccctgtccccaagagcccctttgtggtgaatgtggcacccccgctggacctcagcaaaatcaaagttcagggccttaatagcaaggtggctgtgggacaggaacaagcattctctgtgaacacacgaggggctggcggtcagggccaactggatgtgcggatgacttcgccctctcgccggcccatcccctgcaagctggagccaggcggtggagcggaagcccaggctgtgcgctacatgcccccggaggaggggccctacaaggtggatatcacctacgatggtcacccggtgcctggcagcccgtttgctgtggagggtgtcctgccccctgatccctccaaggtctgtgcttatggcccgggtctcaagggtggactggtaggcacccccgcgccattctccatcgacaccaagggggctggcacaggtggcctggggctgaccgtagagggcccctgcgaggccaagatcgagtgccaggacaatggtgatggctcatgtgctgtcagctacctgcccacggagcctggcgagtacaccatcaacatcctgtttgctgaggcccacatccctggctcgcccttcaaagccaccattcggcctgtgtttgacccgagcaaggtgcgggccagtggaccgggcctggagcgcggcaaggtcggtgaggcagccaccttcactgtggactgctcagaggcaggcgaggcggagctgaccattgagatcctgtcggatgccggggtcaaggccgaggtgctgatccacaacaacgcggatggcacctaccacatcacctacagccctgccttccctggcacctacaccattaccatcaagtatggcgggcatcccgtgcccaaattccccacccgtgtccatgtgcagcctgcggtcgataccagtggcgtcaaggtctcagggcctggtgttgagccacacggtgtcctgcgggaggtgaccactgagttcactgtggatgcaagatccctaacagccacaggcggcaaccacgtgacggctcgtgtgctcaacccctcgggggccaagacagacacctatgtgacagacaatggggacggcacctaccgagtgcagtacaccgcctacgaggagggcgtgcatctggtggaggtcctgtatgatgaggtcgctgtgcccaagagccccttccgagtgggcgtgaccgagggctgtgatcccacccgcgtccgagccttcgggccaggcctggagggtggcttggtcaacaaggccaaccgattcactgtggagaccaggggagcgggcaccgggggccttggcctagccatcgagggtccctcggaagccaagatgtcctgcaaggacaacaaggatggtagctgcaccgtggagtacatccccttcactcctggagactatgacgtcaacatcaccttcggggggcggcccatcccagggagcccgttccgcgtgccagtgaaggatgtggtggaccctgggaaggtgaagtgctcagggccagggctgggggctggtgtcagggcccgggttcctcagaccttcacagtggattgcagtcaagctggccgggcgcccctgcaggtggctgtgctgggccccacaggtgtggccgagcctgtggaggtgcgggacaatggagatggcacccacactgtccactacaccccagccactgacgggccctacacggtagccgtcaagtatgctgaccaggaggtgccacgcagccccttcaagatcaaggtcctcccagctcatgatgccagcaaggtgcgggccagcggcccaggcctcaacgcctctggcatccctgccagcctgcctgtggagttcaccatcgacgcacgggacgcgggcgaggggttgctcactgtccagatcttggaccccgagggtaagcccaagaaggccaacatccgggacaatggggatggcacgtacactgtgtcctacctgccggacatgagtggccggtacaccatcaccatcaagtatggcggtgatgagatcccctactcgcccttccgcatccatgctctgcccactggggatgccagcaagtgcctcgtcacagtgtccattggaggccatggcctgggtgcctgcctgggccctcgaatccagattgggcaggagacggtgatcacggtggatgccaaggcagccggtgaggggaaggtgacatgcacggtgtccacgccggatggggcagagctcgatgtggatgtggttgagaaccatgacggtacctttgacatctactacacagcgcccgagccgggcaagtacgtcatcaccatccgcttcgggggtgagcacatccccaacagccccttccacgtgctggccacagaggagccagtggtgcctgtggagccaatggagtccatgctgaggcccttcaacctggtcatccccttcgcggtgcagaaaggggagctcacaggagaggtgcggatgccctcggggaagacggcacggcccaacatcaccgacaacaaggacggcaccatcacggtgaggtatgcacccactgagaaaggcctgcaccagatggggatcaagtatgacggcaaccacatccctgggagccccttacagttctatgtggatgccatcaacagccgccatgtcagtgcctatgggccaggcctgagccatggcatggtcaacaagccagccaccttcactattgtcaccaaagatgctggagaagggggtctgtcactggccgtggagggcccatccaaggcagagatcacctgtaaggacaacaaggatggcacctgcaccgtgtcctatctgccgactgcgcctggagactacagcatcatcgtgcgcttcgatgacaagcacatcccggggagccccttcacagccaagatcacaggtgatgactccatgaggacctcacagctgaatgtgggcacctccacggacgtgtcactgaagatcaccgagagtgatctgagccagctgaccgccagcatccgtgccccctcgggcaacgaggagccctgcctgctgaagcgcctgcccaaccggcacattgggatctccttcacccccaaggaggtcggggagcacgtggtgagcgtgcgcaagagtggcaagcatgtcaccaacagccccttcaagatcctggtggggccatctgagatcggggacgccagcaaggtgcgggtctggggcaaggggctttccgagggacacacattccaggtggcagagttcatcgtggacactcgcaatgcaggttatgggggcttggggctgagtattgaaggcccaagcaaggtggacatcaactgtgaggacatggaggacgggacatgcaaagtcacctactgccccaccgagcccggcacctacatcatcaacatcaagtttgctgacaagcacgtgcctggaagccccttcactgtgaaggtgaccggcgagggccgcatgaaggagagcatcacccggcggagacaggcaccttccatcgccaccatcggcagcacctgtgacctcaacctcaagatcccaggaaactggttccagatggtgtctgcccaggagcgcctgacacgcaccttcacacgcagcagccacacctacacccgcacggagcgcacggagatcagcaagacgcggggcggggagacaaagcgcgaggtgcgggtggaggagtccacccaggtcggcggggaccccttccctgctgtgtttggggacttcctgggccgggagcgcctgggatccttcggcagcatcacccggcagcaggagggtgaggccagctctcaggacatgactgcacaggtgaccagcccatcgggcaaggtggaagccgcagagatcgtcgagggcgaggacagcgcctacagcgtgcgctttgtgccccaggaaatggggccccatacggtcgctgtcaagtaccgtggccagcacgtgcccggcagcccctttcagttcactgtggggccgctgggtgaaggtggtgcccacaaggtgcgggccggaggcacagggctggagcgaggtgtggccggcgtgccagccgagttcagcatctggacccgggaggctggcgctgggggcctgtccattgctgtggagggtcctagcaaagcggagattgcatttgaggatcgcaaagatggctcctgcggcgtctcctatgtcgtccaggaaccaggtgactatgaggtctccatcaagttcaatgatgagcacatcccagacagcccctttgtggtgcctgtggcctccctctcggatgacgctcgccgtctcactgtcaccagcctccaggagacggggctcaaggtgaaccagccagcgtcctttgccgtgcagctgaacggtgcccggggcgtgattgatgcccgggtgcacacaccctcgggggctgtggaggagtgctacgtctctgagctggacagtgacaagcacaccatccgcttcatcccccacgagaatggcgtccactccatcgatgtcaagttcaacggtgcccacatccctggaagtcccttcaagatccgcgttggggagcagagccaggctggggacccaggcttggtgtcagcctacggtcctgggctcgagggaggcactaccggtgtgtcatcagagttcatcgtgaacaccctgaatgccggctcgggggccttgtctgtcaccattgatggcccctccaaggtgcagctggactgtcgggagtgtcctgagggccatgtggtcacttatactcccatggcccctggcaactacctcattgccatcaagtacggtggcccccagcacatcgtgggcagccccttcaaggccaaggtcactggtccgaggctgtccggaggccacagccttcacgaaacatccacggttctggtggagactgtgaccaagtcctcctcaagccggggctccagctacagctccatccccaagttctcctcagatgccagcaaggtggtgactcggggccctgggctgtcccaggccttcgtgggccagaagaactccttcaccgtggactgcagcaaagcaggcaccaacatgatgatggtgggcgtgcacggccccaagaccccctgtgaggaggtgtacgtgaagcacatggggaaccgggtgtacaatgtcacctacactgtcaaggagaaaggggactacatcctcattgtcaagtggggtgacgaaagtgtccctggaagccccttcaaagtcaaggtcccttgaatcccaaaagtgcctccccagcctcagcccccacctccagccacacacacattacacacacacacacacacacacaaatgtgccacacccagacacgcacagaatcagacactacaaacacctgccttgggggtgaagtgaaggcccagcctccccaccccaccgcgccccaggggttggaggaccttgtctgtgtcaggacagtgtccctccctgggaatgtgacatgagggccgactggggccaggctcaggggcagaggctgggacacaaggggctggcgagggctgcgaggccagggaagccctgagtttctggcggggctgagcagtgggggagcattgtgttgtgggtgtctgtgtgtgaggtcaccctcaaactgcaccgccggccagataccctcctgaccccgaggacttggtctggtctctctggtggctacaaccccagagttttaaggacttggaaaggaaagcacaatcagagaagaaaacagcccccgaaccagcaggagtggcctggcacatggaccggcctgagcgatgtgcactccacccaagccaggctcccagggggcctgatttctctctcactgtctctttttttaaaatggttgcacggctctgccccatggggggccttttttacacactgcgaggcccagctttctaggggacttttgcacatgtcatgcagctcagctgggagctgcttaggtggaaaactccaaataaagtgcggctgtcgcaga

SEQ ID NO: 10911 - DNA, 461 bp, Homo sapiens
  source 1..461: mol_type = unassigned DNA
gacgcgccctcgcttcttcctctttctcgactccatcttcgcggtagctgggaccgccgttcagtcgccaatatgcagctctttgtccgcgcccaggagctacacaccttcgaggtgaccggccaggaaacggtcgcccagatcaaggctcatgtagcctcactggagggcattgccccggaagatcaagtcgtgctcctggcaggcgcgcccctggaggatgaggccactctgggccagtgcggggtggaggccctgactaccctggaagtagcaggccgcatgcttggaggtggccaaacaggagaagaagaagaagaagacaggtcgggctaagcggcggatgcagtacaaccggcgctttgtcaacgttgtgcccacctttggcaagaagaagggccccaatgccaactcttaagtcttttgtaattctggctttctctaataaaaaagccacttag

SEQ ID NO: 10912 - DNA, 533 bp, Homo sapiens
  source 1..533: mol_type = unassigned DNA
gacacgcagcccacggtctgtactgacgcgccctcgcttcttcctctttctcgactccatcttcgcggtagctgggaccgccgttcagtcgccaatatgcagctctttgtccgcgcccaggagctacacaccttcgaggtgaccggccaggaaacggtcgcccagatcaaggctcatgtagcctcactggagggcattgccccggaagatcaagtcgtgctcctggcaggcgcgcccctggaggatgaggccactctgggccagtgcggggtggaggccctgactaccctggaagtagcaggccgcatgcttggaggtgagtgagagaggaatgttctttgaagtaccggtaagcgtctagtgagtgtggggtgcatagtcctgacagctgagtgtcacacctatggtaatagagtacttctcactgtcttcagttcagagtgattcttcctgtttacatccctcatgttgaacacagacgtccatgggagactgagccagagtgtagttgtatttcagtcacatcacgagat

SEQ ID NO: 10913 - DNA, 355 bp, Homo sapiens
  source 1..355: mol_type = unassigned DNA
tcgccaatatgcagctctttgtccgcgcccaggagctacacaccttcgaggtgaccggccaggaaacggtcgcccagatcaaggccctgactaccctggaagtagcaggccgcatgcttggaggtaaagtccatggttccctggcccgtgctggaaaagtgagaggtcagactcctaaggtggccaaacaggagaagaagaagaagaagacaggtcgggctaagcggcggatgcagtacaaccggcgctttgtcaacgttgtgcccacctttggcaagaagaagggccccaatgccaactcttaagtcttttgtaattctggctttctctaataaaaaagccacttagttcagtc

SEQ ID NO: 10914 - DNA, 507 bp, Homo sapiens
  source 1..507: mol_type = unassigned DNA
gcggtagctgggaccgccgttcaggtaagaatggggccttggctggatccgaagggcttgtagcaggttggctgcggggtcagaaggcgcggggggaaccgaagaacggggcctgctccgtggccctgctccagtccctatccgaactccttgggaggcctggccttccccactcgccaatatgcagctctttgtccgcgcccaggagctacacaccttcgaggtgaccggccaggaaacggtcgcccagatcaaggctcatgtagcctcactggagggcattgccccggaagatcaagtcgtgctcctggcaggcgcgcccctggaggatgaggccactctgggccagtgcggggtggaggccctgactaccctggaagtagcaggccgcatgcttggaggtaaagtccatggttccctggcccgtgctggaaaagtgagaggtcagactcctaaggtggccaaacaggagaagaagaagaagaagacaggtcgggctaagcggcg

SEQ ID NO: 10915 - DNA, 538 bp, Homo sapiens
  source 1..538: mol_type = unassigned DNA
gcggtagctgggaccgccgttcaggtaagaatggggccttggctggatccgaagggcttgtagcaggttggctgcgggtcgccaatatgcagctctttgtccgcgcccaggagctacacaccttcgaggtgaccggccaggaaacggtcgcccagatcaaggctcatgtagcctcactggagggcattgccccggaagatcaagtcgtgctcctggcaggcgcgcccctggaggatgaggccactctgggccagtgcggggtggaggccctgactaccctggaagtagcaggccgcatgcttggaggtaaagtccatggttccctggcccgtgctggaaaagtgagaggtcagactcctaaggtggccaaacaggagaagaagaagaagaagacaggtcgggctaagcggcggatgcagtacaaccggcgctttgtcaacgttgtgcccacctttggcaagaagaagggccccaatgccaactcttaagtcttttgtaattctggctttctctaataaaaaagccacttagttcagtc

SEQ ID NO: 10916 - DNA, 1125 bp, Homo sapiens
  source 1..1125: mol_type = unassigned DNA
tcgcgatcgtttctggaccgctttccactcccaaatctcctttatcccagagcatttcttggcttctcttacaagccgtcttttctttactcagtcgccaatatgcagctctttgtccgcgcccaggagctacacaccttcgaggtgaccggccaggaaacggtcgcccagatcaaggctcatgtagcctcactggagggcattgccccggaagatcaagtcgtgctcctggcaggcgcgcccctggaggatgaggccactctgggccagtgcggggtggaggccctgactaccctggaagtagcaggccgcatgcttggaggtgagtgagagaggaatgttctttgaagtaccggtaagcgtctagtgagtgtggggtgcatagtcctgacagctgagtgtcacacctatggtaatagagtacttctcactgtcttcagttcagagtgattcttcctgtttacatccctcatgttgaacacagacgtccatgggagactgagccagagtgtagttgtatttcagtcacatcacgagatcctagtctggttatcagcttccacactaaaattaggtcagaccagggcccccaaagtgctctataaaattagaagctggaagatcctgaaatgaaacttaagatttcaaggtcaaatatctgcaactttgttctcattacctattgggcgcagcttctctttaaaggcttgaattgagaaaagaggggttctgctgggtggcaccttcttgctcttacctgctggtgccttcctttcccactacaggtaaagtccatggttccctggcccgtgctggaaaagtgagaggtcagactcctaaggtgagtgagagtattagtggtcatggtgttaggactttttttcctttcacagctaaaccaagtccctgggctcttactcggtttgccttctccctccctggagatgagcctgagggaagggatgctaggtgtggaagacaggaaccagggcctgattaaccttcccttctccaggtggccaaacaggagaagaagaagaagaagacaggtcgggctaagcggcggatgcagtacaaccggcgctttgtcaacgttgtgcccacctttggcaagaagaagggccc

SEQ ID NO: 10917 - DNA, 847 bp, Homo sapiens
  source 1..847: mol_type = unassigned DNA
gagcctcacacccacgcgatgccctcagctcctcgctcagcgctctcaccaacagccgtagcccgcagccccgctggacaccggttctccatccccgcagcgtagcccggaacatggtagctgccatctttacctgctacgccagccttctgtgcgcgcaactgtctggtcccgccccgtcctgcgcgagctgcctgcccaggcaggttcgccggtgcgagcgtaaaggggcggagctaggactgccttgggcggtacaaatagcagggaaccgcgcggtcgctcagcagtgacgtgacacgcagcccacggtctgtactgacgcgccctcgcttcttcctctttctcgactccatcttcgcggtagctgggaccgccgttcagtcgccaatatgcagctctttgtccgcgcccaggagctacacaccttcgaggtgaccggccaggaaacggtcgcccagatcaaggctcatgtagcctcactggagggcattgccccggaagatcaagtcgtgctcctggcaggcgcgcccctggaggatgaggccactctgggccagtgcggggtggaggccctgactaccctggaagtagcaggccgcatgcttggaggtaaagtccatggttccctggcccgtgctggaaaagtgagaggtcagactcctaaggtggccaaacaggagaagaagaagaagaagacaggtcgggctaagcggcggatgcagtacaaccggcgctttgtcaacgttgtgcccacctttggcaagaagaagggccccaatgccaactcttaagtcttttgtaattctggctttctctaataaaaaagccacttagttcagtcatc

SEQ ID NO: 10918 - DNA, 697 bp, Homo sapiens
  source 1..697: mol_type = unassigned DNA
cttgtagcaggttggctgcggggtcagaaggcgcggggggaaccgaagaacggggcctgctccgtggccctgctccagtccctatccgaactccttgggaggcctggccttccccacgtgagccgccgcgaccaccatcccgtcgcgatcgtttctggaccgctttccactcccaaatctcctttatcccagagcatttcttggcttctcttacaagccgtcttttctttactcagtcgccaatatgcagctctttgtccgcgcccaggagctacacaccttcgaggtgaccggccaggaaacggtcgcccagatcaaggctcatgtagcctcactggagggcattgccccggaagatcaagtcgtgctcctggcaggcgcgcccctggaggatgaggccactctgggccagtgcggggtggaggccctgactaccctggaagtagcaggccgcatgcttggaggtaaagtccatggttccctggcccgtgctggaaaagtgagaggtcagactcctaaggtggccaaacaggagaagaagaagaagaagacaggtcgggctaagcggcggatgcagtacaaccggcgctttgtcaacgttgtgcccacctttggcaagaagaagggccccaatgccaactcttaagtcttttgtaattctggctttctctaataaaaaagccacttagttcagtca

SEQ ID NO: 10919 - DNA, 1878 bp, Homo sapiens
  source 1..1878: mol_type = unassigned DNA
gccttcctgggattggagtctcgagctttcttcgttcgttcgtcggcgggttcgcgcccttctcgcgcctcggggctgcgaggctggggaaggggttggagggggctgttgatcgccgcgtttaagttgcgctcggggcggccatgtcggccggcgaggtcgagcgcctagtgtcggagctgagcggcgggaccggaggggatgaggaggaagagtggctctatggcgatgaaaatgaagttgaaaggccagaagaagaaaatgccagtgctaatcctccatctggaattgaagatgaaactgctgaaaatggtgtaccaaaaccgaaagtgactgagaccgaagatgatagtgatagtgacagcgatgatgatgaagatgatgttcatgtcactataggagacattaaaacgggagcaccacagtatgggagttatggtacagcacctgtaaatcttaacatcaagacagggggaagagtttatggaactacagggacaaaagtcaaaggagtagaccttgatgcacctggaagcattaatggagttccactcttagaggtagatttggattcttttgaagataaaccatggcgtaaacctggtgctgatctttctgattattttaattatgggtttaatgaagatacctggaaagcttactgtgaaaaacaaaagaggatacgaatgggacttgaagttataccagtaacctctactacaaataaaattacggtacagcagggaagaactggaaactcagagaaagaaactgcccttccatctacaaaagctgagtttacttctcctccttctttgttcaagactgggcttccaccgagcaggagattacctggggcaattgatgttatcggtcagactataactatcagccgagtagaaggcaggcgacgggcaaatgagaacagcaacatacaggtcctttctgaaagatctgctactgaagtagacaacaattttagcaaaccacctccgtttttccctccaggagctcctcccactcaccttccacctcctccatttcttccacctcctccgactgtcagcactgctccacctctgattccaccaccgggttttcctcctccaccaggcgctccacctccatctcttataccaacaatagaaagtggacattcctctggttatgatagtcgttctgcacgtgcatttccatatggcaatgttgcctttccccatcttcctggttctgctccttcgtggcctagtcttgtggacaccagcaagcagtgggactattatgccagaagagagaaagaccgagatagagagagagacagagacagagagcgagaccgtgatcgggacagagaaagagaacgcaccagagagagagagagggagcgtgatcacagtcctacaccaagtgttttcaacagcgatgaagaacgatacagatacagggaatatgcagaaagaggttatgagcgtcacagagcaagtcgagaaaaagaagaacgacatagagaaagacgacacagggagaaagaggaaaccagacataagtcttctcgaagtaatagtagacgtcgccatgaaagtgaagaaggagatagtcacaggagacacaaacacaaaaaatctaaaagaagcaaagaaggaaaagaagcgggcagtgagcctgcccctgaacaggagagcaccgaagctacacctgcagaataggcatggttttggccttttgtgtatattagtaccagaagtagatactataaatcttgttatttttctggataatgtttaagaaatttaccttaaatcttgttctgtttgttagtatgaaaagttaactttttttccaaaataaaagagtgaatttttcatgttaagttaaaaa

SEQ ID NO: 10920 - DNA, 2198 bp, Homo sapiens
  source 1..2198: mol_type = unassigned DNA
atgcgcagacggacctgcgctggaggcttcatctttgccgccgctgccgtcgccttcctgggattggagtctcgagctttcttcgttcgttcgtcggcgggttcgcgcccttctcgcgcctcggggctgcgaggctggggaaggggttggagggggctgttgatcgccgcgtttaagttgcgctcggggcggccatgtcggccggcgaggtcgagcgcctagtgtcggagctgagcggcgggaccggaggggatgaggaggaagagtggctctatggcggcccatgggacgtgcatgtgcacagtgatttggcaaaggacctagatgaaaatgaagttgaaaggccagaagaagaaaatgccagtgctaatcctccatctggaattgaagatgaaactgctgaaaatggtgtaccaaaaccgaaagtgactgagaccgaagatgatagtgatagtgacagcgatgatgatgaagatgatgttcatgtcactataggagacattaaaacgggagcaccacagtatgggagttatggtacagcacctgtaaatcttaacatcaagacagggggaagagtttatggaactacagggacaaaagtcaaaggagtagaccttgatgcacctggaagcattaatggagttccactcttagaggtagatttggattcttttgaagataaaccatggcgtaaacctggtgctgatctttctgattattttaattatgggtttaatgaagatacctggaaagcttactgtgaaaaacaaaagaggatacgaatgggacttgaagttataccagtaacctctactacaaataaaattacggccgaagactgtactatggaagttacaccaggtgcagagatccaagatggcagattcaatctttttaaggtacagcagggaagaactggaaactcagagaaagaaactgcccttccatctacaaaagctgagtttacttctcctccttctttgttcaagactgggcttccaccgagcagaaacagcacttcttctcagtctcagacaagtactgcctccagaaaagccaattcaagcgttgggaagtggcaggatcgatatgggagggccgaatcacctgatctaaggagattacctggggcaattgatgttatcggtcagactataactatcagccgagtagaaggcaggcgacgggcaaatgagaacagcaacatacaggtcctttctgaaagatctgctactgaagtagacaacaattttagcaaaccacctccgtttttccctccaggagctcctcccactcaccttccacctcctccatttcttccacctcctccgactgtcagcactgctccacctctgattccaccaccgggttttcctcctccaccaggcgctccacctccatctcttataccaacaatagaaagtggacattcctctggttatgatagtcgttctgcacgtgcatttccatatggcaatgttgcctttccccatcttcctggttctgctccttcgtggcctagtcttgtggacaccagcaagcagtgggactattatgccagaagagagaaagaccgagatagagagagagacagagacagagagcgagaccgtgatcgggacagagaaagagaacgcaccagagagagagagagggagcgtgatcacagtcctacaccaagtgttttcaacagcgatgaagaacgatacagatacagggaatatgcagaaagaggttatgagcgtcacagagcaagtcgagaaaaagaagaacgacatagagaaagacgacacagggagaaagaggaaaccagacataagtcttctcgaagtaatagtagacgtcgccatgaaagtgaagaaggagatagtcacaggagacacaaacacaaaaaatctaaaagaagcaaagaaggaaaagaagcgggcagtgagcctgcccctgaacaggagagcaccgaagctacacctgcagaataggcatggttttggccttttgtgtatattagtaccagaagtagatactataaatcttgttatttttctggataatgtttaagaaatttaccttaaatcttgttctgtttgttagtatgaaaagttaactttttttccaaaataaaagagtgaatttttcatgttaagttaaaaatctttgtcttgtactatttcaaaaataaaaagacagcaatgacttta

SEQ ID NO: 10921 - DNA, 2180 bp, Homo sapiens
  source 1..2180: mol_type = unassigned DNA
atgcgcagacggacctgcgctggaggcttcatctttgccgccgctgccgtcgccttcctgggattggagtctcgagctttcttcgttcgttcgtcggcgggttcgcgcccttctcgcgcctcggggctgcgaggctggggaaggggttggagggggctgttgatcgccgcgtttaagttgcgctcggggcggccatgtcggccggcgaggtcgagcgcctagtgtcggagctgagcggcgggaccggaggggatgaggaggaagagtggctctatggcgatgaaaatgaagttgaaaggccagaagaagaaaatgccagtgctaatcctccatctggaattgaagatgaaactgctgaaaatggtgtaccaaaaccgaaagtgactgagaccgaagatgatagtgatagtgacagcgatgatgatgaagatgatgttcatgtcactataggagacattaaaacgggagcaccacagtatgggagttatggtacagcacctgtaaatcttaacatcaagacagggggaagagtttatggaactacagggacaaaagtcaaaggagtagaccttgatgcacctggaagcattaatggagttccactcttagaggtagatttggattcttttgaagataaaccatggcgtaaacctggtgctgatctttctgattattttaattatgggtttaatgaagatacctggaaagcttactgtgaaaaacaaaagaggatacgaatgggacttgaagttataccagtaacctctactacaaataaaattacggccgaagactgtactatggaagttacaccaggtgcagagatccaagatggcagattcaatctttttaaggtacagcagggaagaactggaaactcagagaaagaaactgcccttccatctacaaaagctgagtttacttctcctccttctttgttcaagactgggcttccaccgagcagaaacagcacttcttctcagtctcagacaagtactgcctccagaaaagccaattcaagcgttgggaagtggcaggatcgatatgggagggccgaatcacctgatctaaggagattacctggggcaattgatgttatcggtcagactataactatcagccgagtagaaggcaggcgacgggcaaatgagaacagcaacatacaggtcctttctgaaagatctgctactgaagtagacaacaattttagcaaaccacctccgtttttccctccaggagctcctcccactcaccttccacctcctccatttcttccacctcctccgactgtcagcactgctccacctctgattccaccaccgggtattccaataactgtaccacctccaggttttcctcctccaccaggcgctccacctccatctcttataccaacaatagaaagtggacattcctctggttatgatagtcgttctgcacgtgcatttccatatggcaatgttgcctttccccatcttcctggttctgctccttcgtggcctagtcttgtggacaccagcaagcagtgggactattatgccagaagagagaaagaccgagatagagagagagacagagacagagagcgagaccgtgatcgggacagagaaagagaacgcaccagagagagagagagggagcgtgatcacagtcctacaccaagtgttttcaacagcgatgaagaacgatacagatacagggaatatgcagaaagaggttatgagcgtcacagagcaagtcgagaaaaagaagaacgacatagagaaagacgacacagggagaaagaggaaaccagacataagtcttctcgaagtaatagtagacgtcgccatgaaagtgaagaaggagatagtcacaggagacacaaacacaaaaaatctaaaagaagcaaagaaggaaaagaagcgggcagtgagcctgcccctgaacaggagagcaccgaagctacacctgcagaataggcatggttttggccttttgtgtatattagtaccagaagtagatactataaatcttgttatttttctggataatgtttaagaaatttaccttaaatcttgttctgtttgttagtatgaaaagttaactttttttccaaaataaaagagtgaatttttcatgttaagttaaaaatctttgtcttgtactatttcaaaaataaaaagacagcaatgacttta

SEQ ID NO: 10922 - DNA, 734 bp, Homo sapiens
  source 1..734: mol_type = unassigned DNA
agtggttctccgcccctgccactgggccatggagactgtggcacagtagactgtagtgtgaggctcgcgggggcagtggccatggaggccgtgctgaacgagctggtgtctgtggaggacctgctgaagtttgaaaagaaatttcagtctgagaaggcagcaggctcggtgtccaagagcacgcagtttgagtacgcctggtgcctggtgcggagcaagtacaatgatgacatccgtaaaggcatcgtgctgctcgaggagctgctgcccaaagggagcaaggaggaacagcgggattacgtcttctacctggccgtggggaactaccggctcaaggaatacgagaaggccttaaagtacgtccgcgggttgctgcagacagagccccagaacaaccaggccaaggaactggagcggctcattgacaaggccatgaagaaagatggactcgtgggcatggccatcgtgggaggcatggccctgggtgtggcgggactggccggactcatcggacttgctgtgtccaagtccaaatcctgaaggagacgcgggagcccacggagaacgctccaggagggcctgtccatcctcgctgtcctttccctgttctccccctgccccccgtctctatcctctgtggccttcagctaatttctgctcccctgagattcgtccttcagccccatcatgtgctttgggatgagtgtaaataaaacggggctgtggcttgggaa

SEQ ID NO: 10923 - DNA, 2541 bp, Homo sapiens
  source 1..2541: mol_type = unassigned DNA
cccgagcctctctccctggccaggccccaggtctcgcagccagggatggagatggggggagggggaacctagagttctttgtagtgcctccctcagactctaacacactcagcctggccccctcctcctattgcaaccccctcccccgctcctcccggccaggccagctcagtcttcccagcccccattccacgtggaccagccagggcgggggtagggaaagaggacaggaagagggggagccagttctgggaggcggggggaaggaggttggtggcgactccctcgctcgccctcactgccggcggtcccaactccaggcaccatgttccccgcgggcccccccagccacagcctcctccggctccccctgctgcagttgctgctactggtggtgcaggccgtggggagggggctgggccgcgccagcccggccgggggccccctggaagatgtggtcatcgagaggtaccacatccccagggcctgtccccgggaagtgcagatgggggattttgtgcgctaccactacaacggcacttttgaagatggcaagaagtttgattcaagctatgatcgcaacaccttggtggccatcgtggtgggtgtggggcgcctcatcactggcatggaccgaggcctcatgggcatgtgtgtcaacgagcggcgacgcctcattgtgcctccccacctgggctatgggagcatcggcctggcggggctcattccaccggatgccaccctctacttcgatgtggttctgctggatgtgtggaacaaggaagacaccgtgcaggtgagcacattgctgcgcccgccccactgcccccgcatggtccaggacggcgactttgtccgctaccactacaatggcaccctgctggacggcacctccttcgacaccagctactcccgcaaccacacctacaatacctatatcgggcagggttacatcatccccgggatggaccaggggctgcagggtgcctgcatgggggaacgccggagaattaccatccccccgcacctcgcctatggggagaatggaactggagacaagatccctggctctgccgtgctaatcttcaacgtccatgtcattgacttccacaaccctgcggatgtggtggaaatcaggacactgtcccggccatctgagacctgcaatgagaccaccaagcttggggactttgttcgataccattacaactgttctttgctggacggcacccagctgttcacctcgcatgactacggggccccccaggaggcgactctcggggccaacaaggtgatcgaaggcctggacacgggcctgcagggcatgtgtgtgggagagaggcggcagctcatcgtgcccccgcacctggcccacggggagagtggagcccggggagtcccaggcagtgctgtgctgctgtttgaggtggagctggtgtcccgggaggatgggctgcccacaggctacctgtttgtgtggcacaaggaccctcctgccaacctgtttgaagacatggacctcaacaaggatggcgaggtccctccggaggagttctccaccttcatcaaggctcaagtgagtgagggcaaaggacgcctcatgcctgggcaggaccctgagaaaaccataggagacatgttccagaaccaggaccgcaaccaggacggcaagatcacagtcgacgagctcaagctgaagtcagatgaggacgaggagcgggtccacgaggagctctgaggggcagggagcctggccaggcctgagacacagaggcccactgcgagggggacagtggcggtgggactgacctgctgacagtcaccctccctctgctgggatgaggtccaggagccaactaaaacaatggcagaggagacatctctggtgttcccaccaccctagatgaaaatccacagcacagacctctaccgtgtttctcttccatccctaaaccacttccttaaaatgtttggatttgcaaagccaatttggggcctgtggagcctggggttggatagggccatggctggtcccccaccatacctcccctccacatcactgacacagctgagcttgttatccatctccccaaactttctctttctttgtacttcttgtcatccccactcccagccccttttcctctatgtgacagctccctaggacccctctgccttcctccccaatcctgactggctcctagggaaggggaaggctcctggagggcagccctacctctcccatgccctttgccctcctccctcgcctccagtggaggctgagctgaccctgggctgctggaggccagactgggctgtagttagcttttcatccctaaagaaggctcctttccctaaggaaccatagaagagaggaagaaaacaaagggcatgtgtgagggaagctgcttgggtgggtgttagggctatgaaatcttggatttggggctgaggggtgggagggagggcagagctctgcacactcaaaggctaaactggtgtcagtccttttttcctttgttccaaataaaagattaaacc

SEQ ID NO: 10924 - DNA, 2658 bp, Homo sapiens
  source 1..2658: mol_type = unassigned DNA
agaggacaggaagagggggagccagttctgggaggcggggggaaggaggttggtggcgactccctcgctcgccctcactgccggcggtcccaactccaggcaccatgttccccgcgggcccccccagccacagcctcctccggctccccctgctgcagttgctgctactggtggtgcaggccgtggggagggggctgggccgcgccagcccggccgggggccccctggaagatgtggtcatcgagaggtaccacatccccagggcctgtccccgggaagtgcagatgggggattttgtgcgctaccactacaacggcacttttgaagatggcaagaagtttgattcaagctatgatcgcaacaccttggtggccatcgtggtgggtgtggggcgcctcatcactggcatggaccgaggcctcatgggcatgtgtgtcaacgagcggcgacgcctcattgtgcctccccacctgggctatgggagcatcggcctggcggggctcattccaccggatgccaccctctacttcgatgtggttctgctggatgtgtggaacaaggaagacaccgtgcaggtgagcacattgctgcgcccgccccactgcccccgcatggtccaggacggcgactttgtccgctaccactacaatggcaccctgctggacggcacctccttcgacaccagctacagtaagggcggcacttatgacacctacgtcggctctggttggctgatcaagggcatggaccaggggctgctgggcatgtgtcctggagagagaaggaagattatcatccctccattcctggcctatggcgagaaaggctatgggacagtgatccccccacaggcctcgctggtctttcacgtcctcctgattgacgtgcacaacccgaaggacgctgtccagctagagacgctggagctcccccccggctgtgtccgcagagccggggccggggacttcatgcgctaccactacaatggctccttgatggacggcaccctcttcgattccagctactcccgcaaccacacctacaatacctatatcgggcagggttacatcatccccgggatggaccaggggctgcagggtgcctgcatgggggaacgccggagaattaccatccccccgcacctcgcctatggggagaatggaactggagacaagatccctggctctgccgtgctaatcttcaacgtccatgtcattgacttccacaaccctgcggatgtggtggaaatcaggacactgtcccggccatctgagacctgcaatgagaccaccaagcttggggactttgttcgataccattacaactgttctttgctggacggcacccagctgttcacctcgcatgactacggggccccccaggaggcgactctcggggccaacaaggtgatcgaaggcctggacacgggcctgcagggcatgtgtgtgggagagaggcggcagctcatcgtgcccccgcacctggcccacggggagagtggagcccggggagtcccaggcagtgctgtgctgctgtttgaggtggagctggtgtcccgggaggatgggctgcccacaggctacctgtttgtgtggcacaaggaccctcctgccaacctgtttgaagacatggacctcaacaaggatggcgaggtccctccggaggagttctccaccttcatcaaggctcaagtgagtgagggcaaaggacgcctcatgcctgggcaggaccctgagaaaaccataggagacatgttccagaaccaggaccgcaaccaggacggcaagatcacagtcgacgagctcaagctgaagtcagatgaggacgaggagcgggtccacgaggagctctgaggggcagggagcctggccaggcctgagacacagaggcccactgcgagggggacagtggcggtgggactgacctgctgacagtcaccctccctctgctgggatgaggtccaggagccaactaaaacaatggcagaggagacatctctggtgttcccaccaccctagatgaaaatccacagcacagacctctaccgtgtttctcttccatccctaaaccacttccttaaaatgtttggatttgcaaagccaatttggggcctgtggagcctggggttggatagggccatggctggtcccccaccatacctcccctccacatcactgacacagctgagcttgttatccatctccccaaactttctctttctttgtacttcttgtcatccccactcccagccccttttcctctatgtgacagctccctaggacccctctgccttcctccccaatcctgactggctcctagggaaggggaaggctcctggagggcagccctacctctcccatgccctttgccctcctccctcgcctccagtggaggctgagctgaccctgggctgctggaggccagactgggctgtagttagcttttcatccctaaagaaggctcctttccctaaggaaccatagaagagaggaagaaaacaaagggcatgtgtgagggaagctgcttgggtgggtgttagggctatgaaatcttggatttggggctgaggggtgggagggagggcagagctctgcacactcaaaggctaaactggtgtcagtccttttttcctttgttccaaataaaagattaaaccaa

SEQ ID NO: 10925 - DNA, 2581 bp, Homo sapiens
  source 1..2581: mol_type = unassigned DNA
ctcactgccggcggtcccaactccaggcaccatgttccccgcgggcccccccagccacagcctcctccggctccccctgctgcagttgctgctactggtggtgcaggccgtggggagggggctgggccgcgccagcccggccgggggccccctggaagatgtggtcatcgagaggtaccacatccccagggcctgtccccgggaagtgcagatgggggattttgtgcgctaccactacaacggcacttttgaagatggcaagaagtttgattcaagctatgatcgcaacaccttggtggccatcgtggtgggtgtggggcgcctcatcactggcatggaccgaggcctcatgggcatgtgtgtcaacgagcggcgacgcctcattgtgcctccccacctgggctatgggagcatcggcctggcggggctcattccaccggatgccaccctctacttcgatgtggttctgctggatgtgtggaacaaggaagacaccgtgcaggtgagcacattgctgcgcccgccccactgcccccgcatggtccaggacggcgactttgtccgctaccactacaatggcaccctgctggacggcacctccttcgacaccagctacagtaagggcggcacttatgacacctacgtcggctctggttggctgatcaagggcatggaccaggggctgctgggcatgtgtcctggagagagaaggaagattatcatccctccattcctggcctatggcgagaaaggctatgggacagtgatccccccacaggcctcgctggtctttcacgtcctcctgattgacgtgcacaacccgaaggacgctgtccagctagagacgctggagctcccccccggctgtgtccgcagagccggggccggggacttcatgcgctaccactacaatggctccttgatggacggcaccctcttcgattccagctactcccgcaaccacacctacaatacctatatcgggcagggttacatcatccccgggatggaccaggggctgcagggtgcctgcatgggggaacgccggagaattaccatccccccgcacctcgcctatggggagaatggaactggagacaagatccctggctctgccgtgctaatcttcaacgtccatgtcattgacttccacaaccctgcggatgtggtggaaatcaggacactgtcccggccatctgagacctgcaatgagaccaccaagcttggggactttgttcgataccattacaactgttctttgctggacggcacccagctgttcacctcgcatgactacggggccccccaggaggcgactctcggggccaacaaggtgatcgaaggcctggacacgggcctgcagggcatgtgtgtgggagagaggcggcagctcatcgtgcccccgcacctggcccacggggagagtggagcccggggagtcccaggcagtgctgtgctgctgtttgaggtggagctggtgtcccgggaggatgggctgcccacaggctacctgtttgtgtggcacaaggaccctcctgccaacctgtttgaagacatggacctcaacaaggatggcgaggtccctccggaggagttctccaccttcatcaaggctcaagtgagtgagggcaaaggacctcatgcctgggcaggaccctgagaaaaccataggagacatgttccagaaccaggaccgcaaccaggacggcaagatcacagtcgacgagctcaagctgaagtcagatgaggacgaggagcgggtccacgaggagctctgaggggcagggagcctggccaggcctgagacacagaggcccactgcgagggggacagtggcggtgggactgacctgctgacagtcaccctccctctgctgggatgaggtccaggagccaactaaaacaatggcagaggagacatctctggtgttcccaccaccctagatgaaaatccacagcacagacctctaccgtgtttctcttccatccctaaaccacttccttaaaatgtttggatttgcaaagccaatttggggcctgtggagcctggggttggatagggccatggctggtcccccaccatacctcccctccacatcactgacacagctgagcttgttatccatctccccaaactttctctttctttgtacttcttgtcatccccactcccagccccttttcctctatgtgacagctccctaggacccctctgccttcctccccaatcctgactggctcctagggaaggggaaggctcctggagggcagccctacctctcccatgccctttgccctcctccctcgcctccagtggaggctgagctgaccctgggctgctggaggccagactgggctgtagttagcttttcatccctaaagaaggctcctttccctaaggaaccatagaagagaggaagaaaacaaagggcatgtgtgagggaagctgcttgggtgggtgttagggctatgaaatcttggatttggggctgaggggtgggagggagggcagagctctgcacactcaaaggctaaactggtgtcagtccttttttcctttgttccaaataaaagattaaacc

SEQ ID NO: 10926 - DNA, 398 bp, Homo sapiens
  source 1..398: mol_type = unassigned DNA
gtagtgcctccctcagactctaacacactcagcctggccccctcctcctattgcaaccccctcccccgctcctcccggccaggccagctcagtcttcccagcccccattccacgtggaccagccagggcggggggcctgtccccgggaagtgcagatgggggattttgtgcgctaccactacaacggcacttttgaagatggcaagaagtttgattcaagctatgatcgcaacaccttggtggccatcgtggtgggtgtggggcgcctcatcactggcatggaccgaggcctcatgggcatgtgtgtcaacgagcggcgacgcctcattgtgcctccccacctgggctatgggagcatcggcctggcggggctcattccaccggatgccaccctctac

SEQ ID NO: 10927 - DNA, 1965 bp, Homo sapiens
  source 1..1965: mol_type = unassigned DNA
tgattgacgtgcacaacccgaaggacgctgtccagctagagacgctggagctcccccccggctgtgtccgcagagccggggccggggacttcatgcgctaccactacaatggctccttgatggacggcaccctcttcgattccagctactcccgcaaccacacctacaatacctatatcgggcagggttacatcatccccgggatggaccaggggctgcagggtgcctgcatgggggaacgccggagaattaccatccccccgcacctcgcctatggggagaatggaactgactccatcggtttcctccagggcagcgccccacttcgccccttccgcagtggagaagggcagccaagtttggggagggagggtggttatggaaaaacagaaccagcatacccccaggacccagctgtgctgggagcctcagtgtcctcacctgtcaagtgggcaagccatgctgatccgcagggagacaagatccctggctctgccgtgctaatcttcaacgtccatgtcattgacttccacaaccctgcggatgtggtggaaatcaggacactgtcccggccatctgagacctgcaatgagaccaccaagcttggggactttgttcgataccattacaactgttctttgctggacggcacccagctgttcacctcgcatgactacggggccccccaggaggcgactctcggggccaacaaggtgatcgaaggcctggacacgggcctgcagggcatgtgtgtgggagagaggcggcagctcatcgtgcccccgcacctggcccacggggagagtggagcccggggagtcccaggcagtgctgtgctgctgtttgaggtggagctggtgtcccgggaggatgggctgcccacaggctacctgtttgtgtggcacaaggaccctcctgccaacctgtttgaagacatggacctcaacaaggatggcgaggtccctccggaggagttctccaccttcatcaaggctcaagtgagtgagggcaaaggacgcctcatgcctgggcaggaccctgagaaaaccataggagacatgttccagaaccaggaccgcaaccaggacggcaagatcacagtcgacgagctcaagctgaagtcagatgaggacgaggagcgggtccacgaggagctctgaggggcagggagcctggccaggcctgagacacagaggcccactgcgagggggacagtggcggtgggactgacctgctgacagtcaccctccctctgctgggatgaggtccaggagccaactaaaacaatggcagaggagacatctctggtgttcccaccaccctagatgaaaatccacagcacagacctctaccgtgtttctcttccatccctaaaccacttccttaaaatgtttggatttgcaaagccaatttggggcctgtggagcctggggttggatagggccatggctggtcccccaccatacctcccctccacatcactgacacagctgagcttgttatccatctccccaaactttctctttctttgtacttcttgtcatccccactcccagccccttttcctctatgtgacagctccctaggacccctctgccttcctccccaatcctgactggctcctagggaaggggaaggctcctggagggcagccctacctctcccatgccctttgccctcctccctcgcctccagtggaggctgagctgaccctgggctgctggaggccagactgggctgtagttagcttttcatccctaaagaaggctcctttccctaaggaaccatagaagagaggaagaaaacaaagggcatgtgtgagggaagctgcttgggtgggtgttagggctatgaaatcttggatttggggctgaggggtgggagggagggcagagctctgcacactcaaaggctaaactggtgtcagtccttttttcctttgttccaaataaaagattaaaccaa

SEQ ID NO: 10928 - DNA, 1926 bp, Homo sapiens
  source 1..1926: mol_type = unassigned DNA
agagacgctggagctcccccccggctgtgtccgcagagccggggccggggacttcatgcgctaccactacaatggctccttgatggacggcaccctcttcgattccagctactcccgcaaccacacctacaatacctatatcgggcagggttacatcatccccgggatggaccaggggctgcagggtgcctgcatgggggaacgccggagaattaccatccccccgcacctcgcctatggggagaatggaactgactccatcggtttcctccagggcagcgccccacttcgccccttccgcagtggagaagggcagccaagtttggggagggagggtggttatggaaaaacagaaccagcatacccccaggacccagctgtgctgggagcctcagtgtcctcacctgtcaagtgggcaagccatgctgatccgcagggagacaagatccctggctctgccgtgctaatcttcaacgtccatgtcattgacttccacaaccctgcggatgtggtggaaatcaggacactgtcccggccatctgagacctgcaatgagaccaccaagcttggggactttgttcgataccattacaactgttctttgctggacggcacccagctgttcacctcgcatgactacggggccccccaggaggcgactctcggggccaacaaggtgatcgaaggcctggacacgggcctgcagggcatgtgtgtgggagagaggcggcagctcatcgtgcccccgcacctggcccacggggagagtggagcccggggagtcccaggcagtgctgtgctgctgtttgaggtggagctggtgtcccgggaggatgggctgcccacaggctacctgtttgtgtggcacaaggaccctcctgccaacctgtttgaagacatggacctcaacaaggatggcgaggtccctccggaggagttctccaccttcatcaaggctcaagtgagtgagggcaaaggacgcctcatgcctgggcaggaccctgagaaaaccataggagacatgttccagaaccaggaccgcaaccaggacggcaagatcacagtcgacgagctcaagctgaagtcagatgaggacgaggagcgggtccacgaggagctctgaggggcagggagcctggccaggcctgagacacagaggcccactgcgagggggacagtggcggtgggactgacctgctgacagtcaccctccctctgctgggatgaggtccaggagccaactaaaacaatggcagaggagacatctctggtgttcccaccaccctagatgaaaatccacagcacagacctctaccgtgtttctcttccatccctaaaccacttccttaaaatgtttggatttgcaaagccaatttggggcctgtggagcctggggttggatagggccatggctggtcccccaccatacctcccctccacatcactgacacagctgagcttgttatccatctccccaaactttctctttctttgtacttcttgtcatccccactcccagccccttttcctctatgtgacagctccctaggacccctctgccttcctccccaatcctgactggctcctagggaaggggaaggctcctggagggcagccctacctctcccatgccctttgccctcctccctcgcctccagtggaggctgagctgaccctgggctgctggaggccagactgggctgtagttagcttttcatccctaaagaaggctcctttccctaaggaaccatagaagagaggaagaaaacaaagggcatgtgtgagggaagctgcttgggtgggtgttagggctatgaaatcttggatttggggctgaggggtgggagggagggcagagctctgcacactcaaaggctaaactggtgtcagtccttttttcctttgttccaaataaaagattaaacc

SEQ ID NO: 10929 - DNA, 952 bp, Homo sapiens
  source 1..952: mol_type = unassigned DNA
gactccagccgcacctcctccggctctgcagtggcggcgaggaggcgagccggagcgacggcggggctggggccggagccgagccggggtcgggcagcagcagggaccccccagaggcggggcctgtgggaccgctatgggcgtggagatcgagaccatctcccccggagacggaaggacattccccaagaagggccaaacgtgtgtggtgcactacacaggaatgctccaaaatgggaagaagtttgattcatccagagacagaaacaaacctttcaagttcagaattggcaaacaggaagtcatcaaaggttttgaagagggtgcagcccagatgagcttggggcagagggcgaagctgacctgcacccctgatgtggcatatggagccacgggccaccccggtgtcatccctcccaatgccaccctcatctttgacgtggagctgctcaacttagagtgaaggcaggaaggaactcaaggtggctggagatggctgctgctcaccctcctagcctgctctgccactgggacggctcctgcttttggggctcttgatcagtgtgctaacctcactgcctcatggcatcatccattctctctgcccaagttgctctgtatgtgttcgtcagtgttcatgcgaattcttgcttgaggaaacttcggttgcagattgaagcatttcaggttgtgcattttgtgtgatgcatgtagtagcctttcctgatgacagaacacagatctcttgttcgcacaatctacactgccttaccttcacttaaaccacacacacaaggtgctcagacatgaaatgtacatggcgtaccgtacacagagggacttgagccagttacctttgctgtcactttctctcttataaattctgttagctgctcacttaaacaatgtcctctttgagaaaatgtaaaataaaggctctgtgcttgacaaa

SEQ ID NO: 10930 - DNA, 1010 bp, Homo sapiens
  source 1..1010: mol_type = unassigned DNA
ccgcgcaggtcccgactccagccgcacctcctccggctctgcagtggcggcgaggaggcgagccggagcgacggcggggctggggccggagccgagccggggtcgggcagcagcagggaccccccagaggcggggcctgtgggaccgctatgggcgtggagatcgagaccatctcccccggagacggaaggacattccccaagaagggccaaacgtgtgtggtgcactacacaggaatgctccaaaatgggaagaagtttgattcatccagagacagaaacaaacctttcaagttcagaattggcaaacaggaagtcatcaaaggttttgaagagggtgcagcccagctgggtcctctttctcctctccccatctgcccccatccctgctagatgagcttggggcagagggcgaagctgacctgcacccctgatgtggcatatggagccacgggccaccccggtgtcatccctcccaatgccaccctcatctttgacgtggagctgctcaacttagagtgaaggcaggaaggaactcaaggtggctggagatggctgctgctcaccctcctagcctgctctgccactgggacggctcctgcttttggggctcttgatcagtgtgctaacctcactgcctcatggcatcatccattctctctgcccaagttgctctgtatgtgttcgtcagtgttcatgcgaattcttgcttgaggaaacttcggttgcagattgaagcatttcaggttgtgcattttgtgtgatgcatgtagtagcctttcctgatgacagaacacagatctcttgttcgcacaatctacactgccttaccttcacttaaaccacacacacaaggtgctcagacatgaaatgtacatggcgtaccgtacacagagggacttgagccagttacctttgctgtcactttctctcttataaattctgttagctgctcacttaaacaatgtcctctttgagaaaatgtaaaataaaggctctgtgcttgacaaa

SEQ ID NO: 10931 - DNA, 657 bp, Homo sapiens
  source 1..657: mol_type = unassigned DNA
ggcgtgtggccgcgggtttcgcacggtccaataagggagggcggcgtggcccggcctggtagcgacgaggacgcgcctgcgcagaggcggcagcaccaccggggttgactccgggggcgcggcgaggagagacatgaggctgagctggttccgggtcctgacagtactgtccatctgcctgagcgccgtggccacggccacgggggccgagggcaaaaggaagctgcagatcggggtcaagaagcgggtggaccactgtcccatcaaatcgcgcaaaggggatgtcctgcacatgcactacacggggaagctggaagatgggacagagtttgacagcagcctgccccagaaccagccctttgtcttctcccttggcacaggccaggtcatcaagggctgggaccaggggctgctggggatgtgtgagggggaaaagcgcaagctggtgatcccatccgagctagggtatggagagcggggagctcccccaaagattccaggtggtgcaaccctggtgttcgaggtggagctgctcaaaatagagcgacgaactgagctgtaaccagactggggaggggcagggggagaggcccccatcagggaccagactgttccaaaaaaaaaacaaaaaacaaaaacaaacaaaaaaacacttaa

SEQ ID NO: 10932 - DNA, 1002 bp, Homo sapiens
  source 1..1002: mol_type = unassigned DNA
gtggtgtgggtggagcgggctcggcggccagcagacacagggccagtctgggtgccccggagacccccaagggctcagagttggggcggcgccccgggcggaagcacagggccaggctggggggtatctcccgaggacccgggctcctcggagccacccagtggggatgtgtgggtgcctcggggccggccccctgcagcggccgcagaggtgttggtgtgctggaccgggggcagctgggtgtggcgtgagtggggccgcccagtcggggcaactgcagtgcagccagatagggtctggactttgcgtaaagggacaggcgggaactgaagagcggaggtggggactgggagggagggaaggtatgggggtgagcaaaggggcgggtccctggctgctgtggcctcccctgaccccctccccccgctgctggggtcctcggccaagcccccttctcactggactgagacatgaggctgagctggttccgggtcctgacagtactgtccatctgcctgagcgccgtggccacggccacgggggccgagggcaaaaggaagctgcagatcggggtcaagaagcgggtggaccactgtcccatcaaatcgcgcaaaggggatgtcctgcacatgcactacacggggaagctggaagatgggacagagtttgacagcagcctgccccagaaccagccctttgtcttctcccttggcacaggccaggtcatcaagggctgggaccaggggctgctggggatgtgtgagggggaaaagcgcaagctggtgatcccatccgagctagggtatggagagcggggagctcccccaaagattccaggtggtgcaaccctggtgttcgaggtggagctgctcaaaatagagcgacgaactgagctgtaaccagactggggaggggcagggggagaggcccccatcagggaccagactgttccaaaaaaaaaacaaaaaacaaaaacaaacaaaaaaacacttaaaagcccaa

SEQ ID NO: 10933 - DNA, 613 bp, Homo sapiens
  source 1..613: mol_type = unassigned DNA
ctggggggagccggggtgcaagagggcaggctggatcaggccgggcagaagcggaccgggctccgagtgtcaacgagagctagagacatgaggctgagctggttccgggtcctgacagtactgtccatctgcctgagcgccgtggccacggccacgggggccgagggcaaaaggaagctgcagatcggggtcaagaagcgggtggaccactgtcccatcaaatcgcgcaaaggggatgtcctgcacatgcactacacggggaagctggaagatgggacagagtttgacagcagcctgccccagaaccagccctttgtcttctcccttggcacaggccaggtcatcaagggctgggaccaggggctgctggggatgtgtgagggggaaaagcgcaagctggtgatcccatccgagctagggtatggagagcggggagctcccccaaagattccaggtggtgcaaccctggtgttcgaggtggagctgctcaaaatagagcgacgaactgagctgtaaccagactggggaggggcagggggagaggcccccatcagggaccagactgttccaaaaaaaaaacaaaaaacaaaaacaaacaaaaaaacacttaaaa

SEQ ID NO: 10934 - DNA, 639 bp, Homo sapiens
  source 1..639: mol_type = unassigned DNA
tggccccgggcgtcctcgcgggggtggtctccgtggtggccgggcttggggacgccgtaggccgagaactccaccgggagaggtggtgtgggtggagcgggctcggcggccagcagacacagggccagtctgggtgccccggagacccccaagggctcagagttggggcggcgccccgggcggaagcacagggccaggctggggggtatctcccgaggacccgggctcctcggagccacccagtggggatgtgtgggtgcctcggggccggccccctgcagcggccgcagaggtgttggtgtgctggaccgggggcagctgggtgtggcagacatgaggctgagctggttccgggtcctgacagtactgtccatctgcctgagcgccgtggccacggccacgggggccgagggcaaaaggaagctgcagatcggggtcaagaagcgggtggaccactgtcccatcaaatcgcgcaaaggggatgtcctgcacatgcactacacggggaagctggaagatgggacagagtttgacagcagcctgccccagaaccagccctttgtcttctcccttggcacaggccaggtcatcaagggctgggaccaggggctgctggggatgtgtgagggggaaaagcgc

SEQ ID NO: 10935 - DNA, 1684 bp, Homo sapiens
  source 1..1684: mol_type = unassigned DNA
gtcagcctacatttttttaagtaaggagtcctgatgttcaactattaaatctttattataggttatagactggactttaaaggcatagctgccttaaatgtgggtaatggttgataaatgtcgctaccatcagaggtcgcttcacaaggtgtctaattcagaatcgaagatctctagcggtcttctactcagtcgactgcagagacgaccgcggtaggtttttcaacccggactcaacaaagaagccctcatagcacagccttgacgtcactcaaagacaggccccaatcccgactgctagagcagaggcccgcccctcgacctccgtgagtggccccgccccgccctagggggcggggcgatgccgaactgcggcgggctggctcagtaaagcggaggcagcgggggaagatggcggcggccgttccacagcgggcgtggaccgtggagcagctgcgcagtgagcagctgcccaagaaggacattatcaagtttctgcaggaacacggttcagattcgtttcttgcagaacataaattattaggaaacattaaaaatgtggccaagacagctaacaaggaccacttggttacagcctataaccatctttttgaaactaagcgttttaagggtactgaaagtataagtaaagtgtctgagcaagtaaaaaatgtgaagcttaatgaagataaacccaaagaaaccaagtctgaagagaccctggatgagggtccaccaaaatatactaaatctgttctgaaaaagggagataaaaccaactttcccaaaaagggagatgttgttcactgctggtatacaggaacactacaagatgggactgtttttgatactaatattcaaacaagtgcaaagaagaagaaaaatgccaagcctttaagttttaaggtcggagtaggcaaagttatcagaggatgggatgaagctctcttgactatgagtaaaggagaaaaggctcgactggagattgaaccagaatgggcttacggaaagaaaggacagcctgatgccaaaattccaccaaatgcaaaactcacttttgaagtggaattagtggatattgattgaaatagcagtgcttcagctctaaggatattagcaacaatgataaaacttggccttgaagaaatttacacaactagttagaacttgttactattgtaaaggaagagtcaactggaaaattcaaggagttaataaaatttgtttacttggtcccagcttttgagagataaatcccttatgaatccctggtctaaaatactttcctacagctgtgtaaaatactggtcaaggagaactttttccttttacctcatgttgtaaacttaagtggctcaataaaaattgatccactgtcttgatctgactgtgatttgtttggtgttaatatattattgttctgattagggaattggaactaaggacctcatcaaaccagggagtaactcccagtaaaattatctggacagattgcctgtataatgagaaggcaaaagcataaggcttgaggggaaacaaaatgctaaaagcagaaaaatcttggcaggaagatcaagacctgaatttagaaaaggtgtacttcaaaaccaatgagccactaataaaggtgaacataaggttaatattactaattgatccccccaaaataaattcataaacaatt

SEQ ID NO: 10936 - DNA, 1346 bp, Homo sapiens
  source 1..1346: mol_type = unassigned DNA
gccccgccctagggggcggggcgatgccgaactgcggcgggctggctcagtaaagcggaggcagcgggggaagatggcggcggccgttccacagcgggcgtggaccgtggagcagctgcgcagtgagcagctgcccaagaaggacattatcaagtttctgcaggaacacggttcagattcgtttcttgcagaacataaattattaggaaacattaaaaatgtggccaagacagctaacaaggaccacttggttacagcctataaccatctttttgaaactaagcgttttaagggtactgaaagtataagtaaagtgtctgagcaagtaaaaaatgtgaagcttaatgaagataaacccaaagaaaccaagtctgaagagaccctggatgagggtccaccaaaatatactaaatctgttctgaaaaagggagataaaaccaactttcccaaaaagggagatgttgttcactgctggtatacaggaacactacaagatgggactgtttttgatactaatattcaaacaagtgcaaagaagaagaaaaatgccaagcctttaagttttaaggtcggagtaggcaaagttatcagaggatgggatgaagctctcttgactatgagtaaaggagaaaaggctcgactggagattgaaccagaatgggcttacggaaagaaaggacagcctgatgccaaaattccaccaaatgcaaaactcacttttgaagtggaattagtggatattgattgaaatagcagtgcttcagctctaaggatattagcaacaatgataaaacttggccttgaagaaatttacacaactagttagaacttgttactattgtaaaggaagagtcaactggaaaattcaaggagttaataaaatttgtttacttggtcccagcttttgagagataaatcccttatgaatccctggtctaaaatactttcctacagctgtgtaaaatactggtcaaggagaactttttccttttacctcatgttgtaaacttaagtggctcaataaaaattgatccactgtcttgatctgactgtgatttgtttggtgttaatatattattgttctgattagggaattggaactaaggacctcatcaaaccagggagtaactcccagtaaaattatctggacagattgcctgtataatgagaaggcaaaagcataaggcttgaggggaaacaaaatgctaaaagcagaaaaatcttggcaggaagatcaagacctgaatttagaaaaggtgtacttcaaaaccaatgagccactaataaaggtgaacataaggttaatattactaattgatccccccaaaataaattcataaacaatt

SEQ ID NO: 10937 - DNA, 4093 bp, Homo sapiens
  source 1..4093: mol_type = unassigned DNA
aacaaactcctacctctgtttgcaactaagagttacatcccccatgccaagaccttccgaggcgtcccaaagggggaaattcctcgctgccggactgcgcccacccttgaggacctcacattctctttgggcagagcggaagccagacagagacagggactacgaagcgacaatccccagccctgtgtgtgcaaggagcccccgaggggcaggcagccacgctgcagaaggctagactctccgacccccagggagcctggtgtgggctgcagggacagaacgcttctcagaggagggcgccgggcgctgccccggggattcgggccggctcgcgggcgctgccagtctcgggcggcggtgtccggcgcgcgggcggcctgctgggcgggctgaagggttagcggagcacgggcaaggcggagagtgacggagtcggcgagcccccgcggcgacaggttctctacttaaaagacaatgactactgatgaaggtgccaagaacaatgaagaaagccccacagccactgttgctgagcagggagaggatattacctccaaaaaagacaggggagtattaaagattgtcaaaagagtggggaatggtgaggaaacgccgatgattggagacaaagtttatgtccattacaaaggaaaattgtcaaatggaaagaagtttgattccagtcatgatagaaatgaaccatttgtctttagtcttggcaaaggccaagtcatcaaggcatgggacattggggtggctaccatgaagaaaggagagatatgccatttactgtgcaaaccagaatatgcatatggctcggctggcagtctccctaaaattccctcgaatgcaactctcttttttgagattgagctccttgatttcaaaggagaggatttatttgaagatggaggcattatccggagaaccaaacggaaaggagagggatattcaaatccaaacgaaggagcaacagtagaaatccacctggaaggccgctgtggtggaaggatgtttgactgcagagatgtggcattcactgtgggcgaaggagaagaccacgacattccaattggaattgacaaagctctggagaaaatgcagcgggaagaacaatgtattttatatcttggaccaagatatggttttggagaggcagggaagcctaaatttggcattgaacctaatgctgagcttatatatgaagttacacttaagagcttcgaaaaggccaaagaatcctgggagatggataccaaagaaaaattggagcaggctgccattgtcaaagagaagggaaccgtatacttcaagggaggcaaatacatgcaggcggtgattcagtatgggaagatagtgtcctggttagagatggaatatggtttatcagaaaaggaatcgaaagcttctgaatcatttctccttgctgcctttctgaacctggccatgtgctacctgaagcttagagaatacaccaaagctgttgaatgctgtgacaaggcccttggactggacagtgccaatgagaaaggcttgtataggaggggtgaagcccagctgctcatgaacgagtttgagtcagccaagggtgactttgagaaagtgctggaagtaaacccccagaataaggctgcaagactgcagatctccatgtgccagaaaaaggccaaggagcacaacgagcgggaccgcaggatatacgccaacatgttcaagaagtttgcagagcaggatgccaaggaagaggccaataaagcaatgggcaagaagacttcagaaggggtcactaatgaaaaaggaacagacagtcaagcaatggaagaagagaaacctgagggccacgtatgacgccacgccaaggagggaagagtcccagtgaactcggcccctcctcaatgggctttcccccaactcaggacagaacagtgtttaatgtaaagtttgttatagtctatgtgattctggaagcaaatggcaaaaccagtagcttcccaaaaacagcccccctgctgctgcccggagggttcactgaggggtggcacgggaccactccaggtggaacaaacagaaatgactgtggtgtggagggagtgagccagcagcttaagtccagctcatttcagtttctatcaaccttcaagtatccaattcagggtccctggagatcatcctaacaatgtggggctgttaggttttacctttgaactttcatagcactgcagaaacctttaaaaaaaaaatgcttcatgaatttctcctttcctacagttgggtagggtaggggaaggaggataagcttttgttttttaaatgactgaagtgctataaatgtagtctgttgcatttttaaccaacagaacccacagtagaggggtctcatgtctccccagttccacagcagtgtcacagacgtgaaagccagaacctcagaggccacttgcttgctgacttagcctcctcccaaagtccccctcctcagccagcctccttgtgagagtggctttctaccacacacagcctgtccctgggggagtaattctgtcattcctaaaacacccttcagcaatgataatgagcagatgagagtttctggattagcttttcctattttcgatgaagttctgagatactgaaatgtgaaaagagcaatcagaattgtgctttttctcccctcctctattccttttagggaataatattcaatacacagtacttcctcccagcattgctactgctcagcttcttctttcattctaatccttgctattaagaatttaagacttgtgcttacaatatttttgacctggagtggatctatttacatagtcatttaggatccatgcagctttttttgtctttttaagattattggctcataagcatatgtatactggtttatggaactttatttacactcctctatcatgcaaaaaaattttgactttttagtactaagcttaatttttaaaaacaaaatctgtagggttgacaaataaatagttgctcttctacactaggggtttcacctgcaggtttgacacgcagttgctcgcttttcctgccctgtcaagcttctctgttctggcgtgagttgtgaaagagttgaagacagcttcccatgccggtacacagccagtagcctaaatctccagtacttgagctgaccattgaactagggcaagtcttaaatgtgtacatgtagttgaatttcagtccttacgggtaaacagattgagcatggctctctattccctcagcctaagaaacactcatgggaatgcatttggcaacccaaggaaccatttgcttaaacctggaacatctcacctttttaaatcctaaaaaacactggcagttatattttaaattagtttttatttttatgatggttttatcaaaagacttttattattagattgggacccccttcaaacctaaaaatcaagttatttccttttataatacttttcttccccatggaacaaatgggatcaatttgtgagttttttcctttaatgataactaaaatccctctaatttctcatttatgcttttgtcttttttatgaaatatttcttttaaaagccccagtctcacctacgaaatatgaagagcaaaagctgattttgcttacttgctaaactgttgggaaagctctgtagagcatggttccagtgaggccaagattgaaatttgatactaaaaaggccacctagctttttgcagataacaaacaagaaagctattccaagactcagatgatgccagctgtctcccacgtgtgtattatggttcaccagggggaactggcaaaagtgtgtgtggggaggggaagggtgtgtgagtggttctgagcaaataactacagggtgcccattaccactcaagaagacacttcacgtattcttgtatcaaattcaataatcttaaacaatttgtgtagaagtccacagacatctttcaaccaccttttaggctgcatatggattgccaagtcagcatatgaggaattaaagacattgtttttaaaaaaaaaaaatcatttagatgcacttttttgtgtgttctttaaataaatccaaaaaaaatgtga

SEQ ID NO: 10938 - DNA, 3782 bp, Homo sapiens
  source 1..3782: mol_type = unassigned DNA
gattcgggccggctcgcgggcgctgccagtctcgggcggcggtgtccggcgcgcgggcggcctgctgggcgggctgaagggttagcggagcacgggcaaggcggagagtgacggagtcggcgagcccccgcggcgacaggttctctacttaaaagacaatgactactgatgaaggtgccaagaacaatgaagaaagccccacagccactgttgctgagcagggagaggatattacctccaaaaaagacaggggagtattaaagattgtcaaaagagtggggaatggtgaggaaacgccgatgattggagacaaagtttatgtccattacaaaggaaaattgtcaaatggaaagaagtttgattccagtcatgatagaaatgaaccatttgtctttagtcttggcaaaggccaagtcatcaaggcatgggacattggggtggctaccatgaagaaaggagagatatgccatttactgtgcaaaccagaatatgcatatggctcggctggcagtctccctaaaattccctcgaatgcaactctcttttttgagattgagctccttgatttcaaaggagaggatttatttgaagatggaggcattatccggagaaccaaacggaaaggagagggatattcaaatccaaacgaaggagcaacagtagaaatccacctggaaggccgctgtggtggaaggatgtttgactgcagagatgtggcattcactgtgggcgaaggagaagaccacgacattccaattggaattgacaaagctctggagaaaatgcagcgggaagaacaatgtattttatatcttggaccaagatatggttttggagaggcagggaagcctaaatttggcattgaacctaatgctgagcttatatatgaagttacacttaagagcttcgaaaaggccaaagaatcctgggagatggataccaaagaaaaattggagcaggctgccattgtcaaagagaagggaaccgtatacttcaagggaggcaaatacatgcaggcggtgattcagtatgggaagatagtgtcctggttagagatggaatatggtttatcagaaaaggaatcgaaagcttctgaatcatttctccttgctgcctttctgaacctggccatgtgctacctgaagcttagagaatacaccaaagctgttgaatgctgtgacaaggcccttggactggacagtgccaatgagaaaggcttgtataggaggggtgaagcccagctgctcatgaacgagtttgagtcagccaagggtgactttgagaaagtgctggaagtaaacccccagaataaggctgcaagactgcagatctccatgtgccagaaaaaggccaaggagcacaacgagcgggaccgcaggatatacgccaacatgttcaagaagtttgcagagcaggatgccaaggaagaggccaataaagcaatgggcaagaagacttcagaaggggtcactaatgaaaaaggaacagacagtcaagcaatggaagaagagaaacctgagggccacgtatgacgccacgccaaggagggaagagtcccagtgaactcggcccctcctcaatgggctttcccccaactcaggacagaacagtgtttaatgtaaagtttgttatagtctatgtgattctggaagcaaatggcaaaaccagtagcttcccaaaaacagcccccctgctgctgcccggagggttcactgaggggtggcacgggaccactccaggtggaacaaacagaaatgactgtggtgtggagggagtgagccagcagcttaagtccagctcatttcagtttctatcaaccttcaagtatccaattcagggtccctggagatcatcctaacaatgtggggctgttaggttttacctttgaactttcatagcactgcagaaacctttaaaaaaaaaatgcttcatgaatttctcctttcctacagttgggtagggtaggggaaggaggataagcttttgttttttaaatgactgaagtgctataaatgtagtctgttgcatttttaaccaacagaacccacagtagaggggtctcatgtctccccagttccacagcagtgtcacagacgtgaaagccagaacctcagaggccacttgcttgctgacttagcctcctcccaaagtccccctcctcagccagcctccttgtgagagtggctttctaccacacacagcctgtccctgggggagtaattctgtcattcctaaaacacccttcagcaatgataatgagcagatgagagtttctggattagcttttcctattttcgatgaagttctgagatactgaaatgtgaaaagagcaatcagaattgtgctttttctcccctcctctattccttttagggaataatattcaatacacagtacttcctcccagcattgctactgctcagcttcttctttcattctaatccttgctattaagaatttaagacttgtgcttacaatatttttgacctggagtggatctatttacatagtcatttaggatccatgcagctttttttgtctttttaagattattggctcataagcatatgtatactggtttatggaactttatttacactcctctatcatgcaaaaaaattttgactttttagtactaagcttaatttttaaaaacaaaatctgtagggttgacaaataaatagttgctcttctacactaggggtttcacctgcaggtttgacacgcagttgctcgcttttcctgccctgtcaagcttctctgttctggcgtgagttgtgaaagagttgaagacagcttcccatgccggtacacagccagtagcctaaatctccagtacttgagctgaccattgaactagggcaagtcttaaatgtgtacatgtagttgaatttcagtccttacgggtaaacagattgagcatggctctctattccctcagcctaagaaacactcatgggaatgcatttggcaacccaaggaaccatttgcttaaacctggaacatctcacctttttaaatcctaaaaaacactggcagttatattttaaattagtttttatttttatgatggttttatcaaaagacttttattattagattgggacccccttcaaacctaaaaatcaagttatttccttttataatacttttcttccccatggaacaaatgggatcaatttgtgagttttttcctttaatgataactaaaatccctctaatttctcatttatgcttttgtcttttttatgaaatatttcttttaaaagccccagtctcacctacgaaatatgaagagcaaaagctgattttgcttacttgctaaactgttgggaaagctctgtagagcatggttccagtgaggccaagattgaaatttgatactaaaaaggccacctagctttttgcagataacaaacaagaaagctattccaagactcagatgatgccagctgtctcccacgtgtgtattatggttcaccagggggaactggcaaaagtgtgtgtggggaggggaagggtgtgtgagtggttctgagcaaataactacagggtgcccattaccactcaagaagacacttcacgtattcttgtatcaaattcaataatcttaaacaatttgtgtagaagtccacagacatctttcaaccaccttttaggctgcatatggattgccaagtcagcatatgaggaattaaagacattgtttttaaaaaaaaaaaatcatttagatgcacttttttgtgtgttctttaaataaatccaaaaaaaatgtgacttcc

SEQ ID NO: 10939 - DNA, 7220 bp, Homo sapiens
  source 1..7220: mol_type = unassigned DNA
ctactgatgaaggtgccaagaacaatgaagaaagccccacagccactgttgctgagcagggagaggatattacctccaaaagacaggggagtattaaagattgtcaaaagagtggggaatggtgaggaaacgccgatgattggagacaaagtttatgtccattacaaaggaaaattgtcaaatggaaagaagtttgattccagtcatgatagaaatgaaccatttgtctttagtcttggcaaaggccaagtcatcaaggcatgggacattggggtggctaccatgaagaaaggagagatatgccatttactgtgcaaaccagaatatgcatatggctcggctggcagtctccctaaaattccctcgaatgcaactctcttttttgagattgagctccttgatttcaaaggagaggatttatttgaagatggaggcattatccggagaaccaaacggaaaggagagggatattcaaatccaaacgaaggagcaacagtagaaatccacctggaaggccgctgtggtggaaggatgtttgactgcagagatgtggcattcactgtgggcgaaggagaagaccacgacattccaattggaattgacaaagctctggagaaaatgcagcgggaagaacaatgtattttatatcttggaccaaggccaaagaatcctgggagatggataccaaagaaaaattggagcaggctgccattgtcaaagagaagggaaccgtatacttcaaggtgtgtgagtccctatgcaatcctttccatctcaaagaatttattcaagtgttggtgaattgtgctgatattccctactctgaattttgtcaacactgcttggtaagaataagctgcaatttttataaatctgtcattttcaatatgaaaaatggtgagaaaacaatcatgtggaaaaaaaaaaaagtacagattcctcttttacacattctgctctagattgtaaccttccatacaggcagaccaggtctggcatccccacccaccacagtatcactcactcctaaagcatcttgcttggtacatagttggcactcaacaagtgtttttggaatgaaaaaagaatgaatagaataattgttagcaaagaatggaattcataagggtaagtttcacatcatttttctttcttcctttttttttttttgtatgagagacagggtctccctttctttcccaggctggtctcaaacttctagcctcaagcaatcctcccacctcagcttcccaaagtgctgagattacaggcgtgagccactgcaccgggcccatcttcctttagactgtcttgatgaagtcactagagcatatgataaaaggagagaggacatgcacaaatttcaaaacaaactgacaggagagtattgattgcttctaatggccaagatgattcctgcacacttgcttttatgaggaatctccggatattcctgaatgatattcatcataaattgcttctcagaaacccttcttggagcaactaggagtgtgatattttctcacttagatcttaaacctctagatgtaagaaaaaaagaaaccgcccttcattctgttttaatcagtgttctacccattgcttccccaccccaaatatatgccttctccatgtcaagcagaaagggcttagtgatgagaattagagggagaatgggagttctgtcaaggtttctttcgttttctgccactgcaatacagaaattagatgtttttcagcagtataaagcagtgaggcataagtgtactttaacaagtctttatggggcatctgctataagacatgctattattaagttacaaccttgtcaggagggaggagtggcaatgttaatccaaatgaaacaactagagaattatgtaagaatatataatcaacccaaaattaacacagccagagggcaccatgtgttttcagaatttgagctgagacaatattgggtcatgaaatcagttttgtggaagtgtattgcaatatgttataaggatcagttttgttgcataaaactttgcttgtgtatgagtaagtactggattgcatatttcttactgtgggtggtattcaaacaaattttaaatcatgggtttagataagtataaatatataaatatgttatttatcattatttactatgtatactaaactcttatggatcaccagaaagcatgggggtatgatagaataagctcagaattgggaaaaatgggctttattgctcttcaaatgatttagtcatttaaggtccaaagaggttatattttcaagtgaaaaataggggagttagatgttccccaagtttctttccagcctgaatttctgtgagtttctaaactctcaagaacaagtgttatttttttggttttgttttgtttttaattctaattgaggtatattggatacttctaaactattcaagtaagattccaagtgggttatttgtatatccaaatacataatacactagagggaaaaatgtttctacaaaatttcttaagatcgtgagtccttaacagtattttctatatttccgaagtccataaaaatccttaactatattttatatatttcctcaatacttccaaatagaatattaacagtttgggaagatttgaggcttttggcctttgactagaattatatcgattcagtgtagtaaaacagctcagctattcagaggctctaatcggtgctatgatacagaattttggagaacattattggtaatgaaataatgttatgaagccatctgtcatatagctgtgttctgaatatatacagagagatggccagaattagtgatcagtagcagaaagcaatgagtgtctgtacagttacttaactttgttgcttatcagcatcacaactgcaagagtgatactattatgaacctacttaaaattaccaatctttggataaaatctggatcagcagtcacacacatggaaaaaattatttttaacatggaatttgataggcaaaatttttcaaaacattagtccattggggaaaaattaatgaaaggttcaaaaccactgacctgagacttttctcccagaatgtctctgaacattttgtaccactaaaaacttccctggaggcacctttataattataggtaaaagatcccagcagtagtcctagcgttagctgtaaaacttcaaaatggttagtagatagtttcctgtacatattcccttcccaactcagggcaggtttcaatctgccatactgccctcccgggccttgtctttccagggtgtctgacttggcatgttatgcatttgcacagagtccagatgtgtaggtgagagcagagatgggctgaactaaagatctgtatttcatgccatctgcatattggaattctgtttccattgatctgttggtttggtttatacctaaatgggtaaagcctctctcctgagtaggattgaattgtactcagcttttaagtgggaatgattttgccattgaagatgtaaagtcctcatttcaacctctgaatactaaagagaagaaaaatagagaactctatttggctctgaaaataattattaagtacaggtaacagcataatattaagccaggcattgtgcaagcgagttaaacagacacgatttttgccctcatagctgacagtgttctgcaggacaggagcattaactcacacctggtcagtgtttttcttttttctgacttggcagcagagtggcaagaaggctaagaacactgaagtgatgtgggattcttgcgcccccttgtgcttctcctgggaagaaagcatttctaaaacaaactagttgaggagaattgttcaacctctaaactcttcagataaatcgggctttgctatattttcaccacccttgctgttccaagataccagtaatgtgatttagaaacaagccgtttatgactctaggatttgatgttttaaaaaaaattcctaagaagagtccaccctgtctttcatctctttcctttagtgcagaatttttcaacctcagtactatcaacatttggagtgggataattcttgattgtgtggggctgtcttgtgcattgtagaatatttagcagcattcctggcctctgcccattagatgccagtagcatcctacccagttatgacaactaaaaatgcctccagacctgccaggtgttccctggggggcaaaatcaccccccagttgagaactgctttagtacctcagaagcagggagtacaagacagacttttcgctaattggaagttgaagtctaaataaagttacatgatatatatgcaagagctttcaaaaaattaaaatgccctatgtgaaggaactattaagaagtctaatacctgttttttgtgttttgttttgttttaccatggccttctaccattctgattattcagaacttattgaaatgttaagatctaggtttttgtcctccctggctcttcttttctttccctatacaatatattaggagataatcagaaaagttaagttaatcaatgcattagagagggaggaggagagaggatgaagaaatgaggcatgacaggggaaatgcctgtccttcctatctcatctcagtgaaacaacacttttcatttccacccacacattttttgctcccaatgatagcaaaaggttttgttgttggtattgtttttagagagagagggtcttactctgtcacccaggctggagtgcagtggcacaagcatagctaactgcagcttcgaactcctggacttaagagatcctcctgcctcagcttcccaaagtgctgggactataggcgtgagccaccacaccactttagaaaaagtcttgattccatatttacattcctttgatttcaatatttactcaacaaacctttattaaagacctcttggtgctaaaccctgaatattccaaaagggagaggacaatgctgcctgtcctcaaagaccagcaagagaaaaggcagtgacagaaagaaaatgccgacctgaaactggtgaggactttattcttttttttttgtagcatccaaaaaaggagtggtaggcctaagactatgacaaaatttaagtattgtcttagcttgggctgccacagtaaaataccatacactgggtggcttcaacaacaggaatttacttctggagactgtaagtcccagatcaaggtgttagcaggatcagtgtctggggagggcctctcctctggttccttgtagctcccttcttgctgtgttctcacatggcctttccacatgcatgtgagtggagagagggcagagggcagcaagcacccgagtttcttcttataaaggctctaatcccatcatgaggccccaccctcatgaccacatctaacctaattccctccccaaatgctccatctgcaaatatcacattcggggtgagggcttcaacataggaatttaggatgggggacacaattcagtccatagcaaatctaatttcctcaagaatttcagcatttaaaataaaatgccctggtttcgtgttcttatgaatgacctgtatcacacacttctgaggcagagagggtgacagactttgattttagtgccagtcttccctctcctaagtgagtgacttgggaagaaggatgttcgagggatgtagcctggccctcattcacacccaggccctccagctggaacaggtctgccccatcttcatcaccagaaaatccacaccagggcttcctttctacaggcagagctcgtttcttacatcacccacttgaagtcctgtatcacaggcatgtcctcttagacctgctctatggtttttctcttactcagactccttgggtgagggttggagtatttgtggggagagacaactcggcagtgagatgtacgcgctgcttgggctgtggtaaatcctagtaacatggtcttaacactgttggtcaggcattgaatttaatgtcctaataggtctggctgctcctctgccatctggcaggatgtatcatctgtggttttgagcttatcacctcctcaaaggagaatccccacttgtactcctgtttctatttgcgtatttaccagcgattccccagtgctttcatttaccttaaaatcacagtggacacattgtctcagccctggaggggttttgttttgttttgttttgttttgttttgtttttgaggagtctcgctctgtcacccaggctggagtgcagtggcatgatcttggctcactgcaacctctgcctcttaggttcaagcagttctcctgcctcagcctcctaagtagccgggattacaggcatatgccaccatgcctggctcatttttgtatttttagtagagacggccaggctggtctcgaactcctgacctcaggtgatccacctgtctcggcctccaaagtgctgggattacaggtatgagccactgtgctcagcccccagcgtttctcatatgagcatgtatatatatatatattatatatatattatatatgtttatatttatatatattatatataactgacagacctttctgatgtatattgttttatagttgttatttatgttgtatgctactatccaactattcatattcccattgcctatagatcaggggtcagcaaactacagtttgctggccaaatctggtccctgcctgtttttgtaagtacagtttaactgaaacacagctgcacccattgatttacatactgtctagagcagcttttgcactacaaatgataagaatttagtagttgcaacagagactggttcaaataggattggctgtgtttggaactagcacttgccagaatgtaatatttgctgtgaagtgctgaaaagaaaagtaacttccttttcatttttttagtggcatagtctaaaactgctcacaatccttttgaaagactaaagaataggccaggtgtggtggctcatgcctgtaatcccagcactttgggaggccaaggcaggcggatcacaaggtcaggagttcaagaccagcctggccaacatagtgaaacgctgtctctactaaaaatacaaaaaaaaatagctgggcttggtggcggccacctgtagtccccagctactcgggaggctgaggcaggagaatcgctggaacccgggaggcggaggttgcagtgagctgagatggcgccattgcactccagccctggagacagtgcgagactgtgtctc

SEQ ID NO: 10940 - DNA, 3940 bp, Homo sapiens
  source 1..3940: mol_type = unassigned DNA
agaacaaactcctacctctgtttgcaactaagagttacatcccccatgccaagaccttccgaggcgtcccaaagggggaaattcctcgctgccggactgcgcccacccttgaggacctcacattctctttgggcagagcggaagccagacagagacagggactacgaagcgacaatccccagccctgtgtgtgcaaggagcccccgaggggcaggcagccacgctgcagaaggctagactctccgacccccagggagcctggtgtgggctgcagggacagaacgcttctcagaggaggttctctacttaaaagacaatgactactgatgaaggtgccaagaacaatgaagaaagccccacagccactgttgctgagcagggagaggatattacctccaaaaaagacaggggagtattaaagattgtcaaaagagtggggaatggtgaggaaacgccgatgattggagacaaagtttatgtccattacaaaggaaaattgtcaaatggaaagaagtttgattccagtcatgatagaaatgaaccatttgtctttagtcttggcaaaggccaagtcatcaaggcatgggacattggggtggctaccatgaagaaaggagagatatgccatttactgtgcaaaccagaatatgcatatggctcggctggcagtctccctaaaattccctcgaatgcaactctcttttttgagattgagctccttgatttcaaaggagaggatttatttgaagatggaggcattatccggagaaccaaacggaaaggagagggatattcaaatccaaacgaaggagcaacagtagaaatccacctggaaggccgctgtggtggaaggatgtttgactgcagagatgtggcattcactgtgggcgaaggagaagaccacgacattccaattggaattgacaaagctctggagaaaatgcagcgggaagaacaatgtattttatatcttggaccaagatatggttttggagaggcagggaagcctaaatttggcattgaacctaatgctgagcttatatatgaagttacacttaagagcttcgaaaaggccaaagaatcctgggagatggataccaaagaaaaattggagcaggctgccattgtcaaagagaagggaaccgtatacttcaagggaggcaaatacatgcaggcggtgattcagtatgggaagatagtgtcctggttagagatggaatatggtttatcagaaaaggaatcgaaagcttctgaatcatttctccttgctgcctttctgaacctggccatgtgctacctgaagcttagagaatacaccaaagctgttgaatgctgtgacaaggcccttggactggacagtgccaatgagaaaggcttgtataggaggggtgaagcccagctgctcatgaacgagtttgagtcagccaagggtgactttgagaaagtgctggaagtaaacccccagaataaggctgcaagactgcagatctccatgtgccagaaaaaggccaaggagcacaacgagcgggaccgcaggatatacgccaacatgttcaagaagtttgcagagcaggatgccaaggaagaggccaataaagcaatgggcaagaagacttcagaaggggtcactaatgaaaaaggaacagacagtcaagcaatggaagaagagaaacctgagggccacgtatgacgccacgccaaggagggaagagtcccagtgaactcggcccctcctcaatgggctttcccccaactcaggacagaacagtgtttaatgtaaagtttgttatagtctatgtgattctggaagcaaatggcaaaaccagtagcttcccaaaaacagcccccctgctgctgcccggagggttcactgaggggtggcacgggaccactccaggtggaacaaacagaaatgactgtggtgtggagggagtgagccagcagcttaagtccagctcatttcagtttctatcaaccttcaagtatccaattcagggtccctggagatcatcctaacaatgtggggctgttaggttttacctttgaactttcatagcactgcagaaacctttaaaaaaaaaatgcttcatgaatttctcctttcctacagttgggtagggtaggggaaggaggataagcttttgttttttaaatgactgaagtgctataaatgtagtctgttgcatttttaaccaacagaacccacagtagaggggtctcatgtctccccagttccacagcagtgtcacagacgtgaaagccagaacctcagaggccacttgcttgctgacttagcctcctcccaaagtccccctcctcagccagcctccttgtgagagtggctttctaccacacacagcctgtccctgggggagtaattctgtcattcctaaaacacccttcagcaatgataatgagcagatgagagtttctggattagcttttcctattttcgatgaagttctgagatactgaaatgtgaaaagagcaatcagaattgtgctttttctcccctcctctattccttttagggaataatattcaatacacagtacttcctcccagcattgctactgctcagcttcttctttcattctaatccttgctattaagaatttaagacttgtgcttacaatatttttgacctggagtggatctatttacatagtcatttaggatccatgcagctttttttgtctttttaagattattggctcataagcatatgtatactggtttatggaactttatttacactcctctatcatgcaaaaaaattttgactttttagtactaagcttaatttttaaaaacaaaatctgtagggttgacaaataaatagttgctcttctacactaggggtttcacctgcaggtttgacacgcagttgctcgcttttcctgccctgtcaagcttctctgttctggcgtgagttgtgaaagagttgaagacagcttcccatgccggtacacagccagtagcctaaatctccagtacttgagctgaccattgaactagggcaagtcttaaatgtgtacatgtagttgaatttcagtccttacgggtaaacagattgagcatggctctctattccctcagcctaagaaacactcatgggaatgcatttggcaacccaaggaaccatttgcttaaacctggaacatctcacctttttaaatcctaaaaaacactggcagttatattttaaattagtttttatttttatgatggttttatcaaaagacttttattattagattgggacccccttcaaacctaaaaatcaagttatttccttttataatacttttcttccccatggaacaaatgggatcaatttgtgagttttttcctttaatgataactaaaatccctctaatttctcatttatgcttttgtcttttttatgaaatatttcttttaaaagccccagtctcacctacgaaatatgaagagcaaaagctgattttgcttacttgctaaactgttgggaaagctctgtagagcatggttccagtgaggccaagattgaaatttgatactaaaaaggccacctagctttttgcagataacaaacaagaaagctattccaagactcagatgatgccagctgtctcccacgtgtgtattatggttcaccagggggaactggcaaaagtgtgtgtggggaggggaagggtgtgtgagtggttctgagcaaataactacagggtgcccattaccactcaagaagacacttcacgtattcttgtatcaaattcaataatcttaaacaatttgtgtagaagtccacagacatctttcaaccaccttttaggctgcatatggattgccaagtcagcatatgaggaattaaagacattgtttttaaaaaaaaaaaatcatttagatgcacttttttgtgtgttctttaaataaatccaaaaaaaatgtgacttcc

SEQ ID NO: 10941 - DNA, 3827 bp, Homo sapiens
  source 1..3827: mol_type = unassigned DNA
agtctcgggcggcggtgtccggcgcgcgggcggcctgctgggcgggctgaagggttagcggagcacgggcaaggcggagagtgacggagtcggcgagcccccgcggcgacaggtaccggcgccatggccacggagatggggcggccggccgcggcgccccgggagccgaacgccctccttccaggttctctacttaaaagacaatgactactgatgaaggtgccaagaacaatgaagaaagccccacagccactgttgctgagcagggagaggatattacctccaaaaaagacaggggagtattaaagattgtcaaaagagtggggaatggtgaggaaacgccgatgattggagacaaagtttatgtccattacaaaggaaaattgtcaaatggaaagaagtttgattccagtcatgatagaaatgaaccatttgtctttagtcttggcaaaggccaagtcatcaaggcatgggacattggggtggctaccatgaagaaaggagagatatgccatttactgtgcaaaccagaatatgcatatggctcggctggcagtctccctaaaattccctcgaatgcaactctcttttttgagattgagctccttgatttcaaaggagaggatttatttgaagatggaggcattatccggagaaccaaacggaaaggagagggatattcaaatccaaacgaaggagcaacagtagaaatccacctggaaggccgctgtggtggaaggatgtttgactgcagagatgtggcattcactgtgggcgaaggagaagaccacgacattccaattggaattgacaaagctctggagaaaatgcagcgggaagaacaatgtattttatatcttggaccaagatatggttttggagaggcagggaagcctaaatttggcattgaacctaatgctgagcttatatatgaagttacacttaagagcttcgaaaaggccaaagaatcctgggagatggataccaaagaaaaattggagcaggctgccattgtcaaagagaagggaaccgtatacttcaagggaggcaaatacatgcaggcggtgattcagtatgggaagatagtgtcctggttagagatggaatatggtttatcagaaaaggaatcgaaagcttctgaatcatttctccttgctgcctttctgaacctggccatgtgctacctgaagcttagagaatacaccaaagctgttgaatgctgtgacaaggcccttggactggacagtgccaatgagaaaggcttgtataggaggggtgaagcccagctgctcatgaacgagtttgagtcagccaagggtgactttgagaaagtgctggaagtaaacccccagaataaggctgcaagactgcagatctccatgtgccagaaaaaggccaaggagcacaacgagcgggaccgcaggatatacgccaacatgttcaagaagtttgcagagcaggatgccaaggaagaggccaataaagcaatgggcaagaagacttcagaaggggtcactaatgaaaaaggaacagacagtcaagcaatggaagaagagaaacctgagggccacgtatgacgccacgccaaggagggaagagtcccagtgaactcggcccctcctcaatgggctttcccccaactcaggacagaacagtgtttaatgtaaagtttgttatagtctatgtgattctggaagcaaatggcaaaaccagtagcttcccaaaaacagcccccctgctgctgcccggagggttcactgaggggtggcacgggaccactccaggtggaacaaacagaaatgactgtggtgtggagggagtgagccagcagcttaagtccagctcatttcagtttctatcaaccttcaagtatccaattcagggtccctggagatcatcctaacaatgtggggctgttaggttttacctttgaactttcatagcactgcagaaacctttaaaaaaaaaatgcttcatgaatttctcctttcctacagttgggtagggtaggggaaggaggataagcttttgttttttaaatgactgaagtgctataaatgtagtctgttgcatttttaaccaacagaacccacagtagaggggtctcatgtctccccagttccacagcagtgtcacagacgtgaaagccagaacctcagaggccacttgcttgctgacttagcctcctcccaaagtccccctcctcagccagcctccttgtgagagtggctttctaccacacacagcctgtccctgggggagtaattctgtcattcctaaaacacccttcagcaatgataatgagcagatgagagtttctggattagcttttcctattttcgatgaagttctgagatactgaaatgtgaaaagagcaatcagaattgtgctttttctcccctcctctattccttttagggaataatattcaatacacagtacttcctcccagcattgctactgctcagcttcttctttcattctaatccttgctattaagaatttaagacttgtgcttacaatatttttgacctggagtggatctatttacatagtcatttaggatccatgcagctttttttgtctttttaagattattggctcataagcatatgtatactggtttatggaactttatttacactcctctatcatgcaaaaaaattttgactttttagtactaagcttaatttttaaaaacaaaatctgtagggttgacaaataaatagttgctcttctacactaggggtttcacctgcaggtttgacacgcagttgctcgcttttcctgccctgtcaagcttctctgttctggcgtgagttgtgaaagagttgaagacagcttcccatgccggtacacagccagtagcctaaatctccagtacttgagctgaccattgaactagggcaagtcttaaatgtgtacatgtagttgaatttcagtccttacgggtaaacagattgagcatggctctctattccctcagcctaagaaacactcatgggaatgcatttggcaacccaaggaaccatttgcttaaacctggaacatctcacctttttaaatcctaaaaaacactggcagttatattttaaattagtttttatttttatgatggttttatcaaaagacttttattattagattgggacccccttcaaacctaaaaatcaagttatttccttttataatacttttcttccccatggaacaaatgggatcaatttgtgagttttttcctttaatgataactaaaatccctctaatttctcatttatgcttttgtcttttttatgaaatatttcttttaaaagccccagtctcacctacgaaatatgaagagcaaaagctgattttgcttacttgctaaactgttgggaaagctctgtagagcatggttccagtgaggccaagattgaaatttgatactaaaaaggccacctagctttttgcagataacaaacaagaaagctattccaagactcagatgatgccagctgtctcccacgtgtgtattatggttcaccagggggaactggcaaaagtgtgtgtggggaggggaagggtgtgtgagtggttctgagcaaataactacagggtgcccattaccactcaagaagacacttcacgtattcttgtatcaaattcaataatcttaaacaatttgtgtagaagtccacagacatctttcaaccaccttttaggctgcatatggattgccaagtcagcatatgaggaattaaagacattgtttttaaaaaaaaaaaatcatttagatgcacttttttgtgtgttctttaaataaatccaaaaaaaatgtgacttcc

SEQ ID NO: 10942 - DNA, 1414 bp, Homo sapiens
  source 1..1414: mol_type = unassigned DNA
agtctcgggcggcggtgtccggcgcgcgggcggcctgctgggcgggctgaagggttagcggagcacgggcaaggcggagagtgacggagtcggcgagcccccgcggcgacagtccacctggaaggccgctgtggtggaaggatgtttgactgcagagatgtggcattcactgtgggcgaaggagaagaccacgacattccaattggaattgacaaagctctggagaaaatgcagcgggaagaacaatgtattttatatcttggaccaagatatggttttggagaggcagggaagcctaaatttggcattgaacctaatgctgagcttatatatgaagttacacttaagagcttcgaaaaggccaaagaatcctgggagatggataccaaagaaaaattggagcaggctgccattgtcaaagagaagggaaccgtatacttcaagggaggcaaatacatgcaggcggtgattcagtatgggaagatagtgtcctggttagagatggaatatggtttatcagaaaaggaatcgaaagcttctgaatcatttctccttgctgcctttctgaacctggccatgtgctacctgaagcttagagaatacaccaaagctgttgaatgctgtgacaaggcccttggactggacagtgccaatgagaaaggcttgtataggaggggtgaagcccagctgctcatgaacgagtttgagtcagccaagggtgactttgagaaagtgctggaagtaaacccccagaataaggctgcaagactgcagatctccatgtgccagaaaaaggccaaggagcacaacgagcgggaccgcaggatatacgccaacatgttcaagaagtttgcagagcaggatgccaaggaagaggccaataaagcaatgggcaagaagacttcagaaggggtcactaatgaaaaaggaacagacagtcaagcaatggaagaagagaaacctgagggccacgtatgacgccacgccaaggagggaagagtcccagtgaactcggcccctcctcaatgggctttcccccaactcaggacagaacagtgtttaatgtaaagtttgttatagtctatgtgattctggaagcaaatggcaaaaccagtagcttcccaaaaacagcccccctgctgctgcccggagggttcactgaggggtggcacgggaccactccaggtggaacaaacagaaatgactgtggtgtggagggagtgagccagcagcttaagtccagctcatttcagtttctatcaaccttcaagtatccaattcagggtccctggagatcatcctaacaatgtggggctgttaggttttacctttgaactttcatagcactgcagaaacctttaaaaaaaaaatgcttcatgaatttctcctttcctacagttgggtagggtagggg

SEQ ID NO: 10943 - DNA, 7384 bp, Homo sapiens
  source 1..7384: mol_type = unassigned DNA
gattcgggccggctcgcgggcgctgccagtctcgggcggcggtgtccggcgcgcgggcggcctgctgggcgggctgaagggttagcggagcacgggcaaggcggagagtgacggagtcggcgagcccccgcggcgacaggttctctacttaaaagacaatgactactgatgaaggtgccaagaacaatgaagaaagccccacagccactgttgctgagcagggagaggatattacctccaaaaaagacaggggagtattaaagattgtcaaaagagtggggaatggtgaggaaacgccgatgattggagacaaagtttatgtccattacaaaggaaaattgtcaaatggaaagaagtttgattccagtcatgatagaaatgaaccatttgtctttagtcttggcaaaggccaagtcatcaaggcatgggacattggggtggctaccatgaagaaaggagagatatgccatttactgtgcaaaccagaatatgcatatggctcggctggcagtctccctaaaattccctcgaatgcaactctcttttttgagattgagctccttgatttcaaaggagaggatttatttgaagatggaggcattatccggagaaccaaacggaaaggagagggatattcaaatccaaacgaaggagcaacagtagaaatccacctggaaggccgctgtggtggaaggatgtttgactgcagagatgtggcattcactgtgggcgaaggagaagaccacgacattccaattggaattgacaaagctctggagaaaatgcagcgggaagaacaatgtattttatatcttggaccaaggccaaagaatcctgggagatggataccaaagaaaaattggagcaggctgccattgtcaaagagaagggaaccgtatacttcaaggtgtgtgagtccctatgcaatcctttccatctcaaagaatttattcaagtgttggtgaattgtgctgatattccctactctgaattttgtcaacactgcttggtaagaataagctgcaatttttataaatctgtcattttcaatatgaaaaatggtgagaaaacaatcatgtggaaaaaaaaaaaagtacagattcctcttttacacattctgctctagattgtaaccttccatacaggcagaccaggtctggcatccccacccaccacagtatcactcactcctaaagcatcttgcttggtacatagttggcactcaacaagtgtttttggaatgaaaaaagaatgaatagaataattgttagcaaagaatggaattcataagggtaagtttcacatcatttttctttcttcctttttttttttttgtatgagagacagggtctccctttctttcccaggctggtctcaaacttctagcctcaagcaatcctcccacctcagcttcccaaagtgctgagattacaggcgtgagccactgcaccgggcccatcttcctttagactgtcttgatgaagtcactagagcatatgataaaaggagagaggacatgcacaaatttcaaaacaaactgacaggagagtattgattgcttctaatggccaagatgattcctgcacacttgcttttatgaggaatctccggatattcctgaatgatattcatcataaattgcttctcagaaacccttcttggagcaactaggagtgtgatattttctcacttagatcttaaacctctagatgtaagaaaaaaagaaaccgcccttcattctgttttaatcagtgttctacccattgcttccccaccccaaatatatgccttctccatgtcaagcagaaagggcttagtgatgagaattagagggagaatgggagttctgtcaaggtttctttcgttttctgccactgcaatacagaaattagatgtttttcagcagtataaagcagtgaggcataagtgtactttaacaagtctttatggggcatctgctataagacatgctattattaagttacaaccttgtcaggagggaggagtggcaatgttaatccaaatgaaacaactagagaattatgtaagaatatataatcaacccaaaattaacacagccagagggcaccatgtgttttcagaatttgagctgagacaatattgggtcatgaaatcagttttgtggaagtgtattgcaatatgttataaggatcagttttgttgcataaaactttgcttgtgtatgagtaagtactggattgcatatttcttactgtgggtggtattcaaacaaattttaaatcatgggtttagataagtataaatatataaatatgttatttatcattatttactatgtatactaaactcttatggatcaccagaaagcatgggggtatgatagaataagctcagaattgggaaaaatgggctttattgctcttcaaatgatttagtcatttaaggtccaaagaggttatattttcaagtgaaaaataggggagttagatgttccccaagtttctttccagcctgaatttctgtgagtttctaaactctcaagaacaagtgttatttttttggttttgttttgtttttaattctaattgaggtatattggatacttctaaactattcaagtaagattccaagtgggttatttgtatatccaaatacataatacactagagggaaaaatgtttctacaaaatttcttaagatcgtgagtccttaacagtattttctatatttccgaagtccataaaaatccttaactatattttatatatttcctcaatacttccaaatagaatattaacagtttgggaagatttgaggcttttggcctttgactagaattatatcgattcagtgtagtaaaacagctcagctattcagaggctctaatcggtgctatgatacagaattttggagaacattattggtaatgaaataatgttatgaagccatctgtcatatagctgtgttctgaatatatacagagagatggccagaattagtgatcagtagcagaaagcaatgagtgtctgtacagttacttaactttgttgcttatcagcatcacaactgcaagagtgatactattatgaacctacttaaaattaccaatctttggataaaatctggatcagcagtcacacacatggaaaaaattatttttaacatggaatttgataggcaaaatttttcaaaacattagtccattggggaaaaattaatgaaaggttcaaaaccactgacctgagacttttctcccagaatgtctctgaacattttgtaccactaaaaacttccctggaggcacctttataattataggtaaaagatcccagcagtagtcctagcgttagctgtaaaacttcaaaatggttagtagatagtttcctgtacatattcccttcccaactcagggcaggtttcaatctgccatactgccctcccgggccttgtctttccagggtgtctgacttggcatgttatgcatttgcacagagtccagatgtgtaggtgagagcagagatgggctgaactaaagatctgtatttcatgccatctgcatattggaattctgtttccattgatctgttggtttggtttatacctaaatgggtaaagcctctctcctgagtaggattgaattgtactcagcttttaagtgggaatgattttgccattgaagatgtaaagtcctcatttcaacctctgaatactaaagagaagaaaaatagagaactctatttggctctgaaaataattattaagtacaggtaacagcataatattaagccaggcattgtgcaagcgagttaaacagacacgatttttgccctcatagctgacagtgttctgcaggacaggagcattaactcacacctggtcagtgtttttcttttttctgacttggcagcagagtggcaagaaggctaagaacactgaagtgatgtgggattcttgcgcccccttgtgcttctcctgggaagaaagcatttctaaaacaaactagttgaggagaattgttcaacctctaaactcttcagataaatcgggctttgctatattttcaccacccttgctgttccaagataccagtaatgtgatttagaaacaagccgtttatgactctaggatttgatgttttaaaaaaaattcctaagaagagtccaccctgtctttcatctctttcctttagtgcagaatttttcaacctcagtactatcaacatttggagtgggataattcttgattgtgtggggctgtcttgtgcattgtagaatatttagcagcattcctggcctctgcccattagatgccagtagcatcctacccagttatgacaactaaaaatgcctccagacctgccaggtgttccctggggggcaaaatcaccccccagttgagaactgctttagtacctcagaagcagggagtacaagacagacttttcgctaattggaagttgaagtctaaataaagttacatgatatatatgcaagagctttcaaaaaattaaaatgccctatgtgaaggaactattaagaagtctaatacctgttttttgtgttttgttttgttttaccatggccttctaccattctgattattcagaacttattgaaatgttaagatctaggtttttgtcctccctggctcttcttttctttccctatacaatatattaggagataatcagaaaagttaagttaatcaatgcattagagagggaggaggagagaggatgaagaaatgaggcatgacaggggaaatgcctgtccttcctatctcatctcagtgaaacaacacttttcatttccacccacacattttttgctcccaatgatagcaaaaggttttgttgttggtattgtttttagagagagagggtcttactctgtcacccaggctggagtgcagtggcacaagcatagctaactgcagcttcgaactcctggacttaagagatcctcctgcctcagcttcccaaagtgctgggactataggcgtgagccaccacaccactttagaaaaagtcttgattccatatttacattcctttgatttcaatatttactcaacaaacctttattaaagacctcttggtgctaaaccctgaatattccaaaagggagaggacaatgctgcctgtcctcaaagaccagcaagagaaaaggcagtgacagaaagaaaatgccgacctgaaactggtgaggactttattcttttttttttgtagcatccaaaaaaggagtggtaggcctaagactatgacaaaatttaagtattgtcttagcttgggctgccacagtaaaataccatacactgggtggcttcaacaacaggaatttacttctggagactgtaagtcccagatcaaggtgttagcaggatcagtgtctggggagggcctctcctctggttccttgtagctcccttcttgctgtgttctcacatggcctttccacatgcatgtgagtggagagagggcagagggcagcaagcacccgagtttcttcttataaaggctctaatcccatcatgaggccccaccctcatgaccacatctaacctaattccctccccaaatgctccatctgcaaatatcacattcggggtgagggcttcaacataggaatttaggatgggggacacaattcagtccatagcaaatctaatttcctcaagaatttcagcatttaaaataaaatgccctggtttcgtgttcttatgaatgacctgtatcacacacttctgaggcagagagggtgacagactttgattttagtgccagtcttccctctcctaagtgagtgacttgggaagaaggatgttcgagggatgtagcctggccctcattcacacccaggccctccagctggaacaggtctgccccatcttcatcaccagaaaatccacaccagggcttcctttctacaggcagagctcgtttcttacatcacccacttgaagtcctgtatcacaggcatgtcctcttagacctgctctatggtttttctcttactcagactccttgggtgagggttggagtatttgtggggagagacaactcggcagtgagatgtacgcgctgcttgggctgtggtaaatcctagtaacatggtcttaacactgttggtcaggcattgaatttaatgtcctaataggtctggctgctcctctgccatctggcaggatgtatcatctgtggttttgagcttatcacctcctcaaaggagaatccccacttgtactcctgtttctatttgcgtatttaccagcgattccccagtgctttcatttaccttaaaatcacagtggacacattgtctcagccctggaggggttttgttttgttttgttttgttttgttttgtttttgaggagtctcgctctgtcacccaggctggagtgcagtggcatgatcttggctcactgcaacctctgcctcttaggttcaagcagttctcctgcctcagcctcctaagtagccgggattacaggcatatgccaccatgcctggctcatttttgtatttttagtagagacggccaggctggtctcgaactcctgacctcaggtgatccacctgtctcggcctccaaagtgctgggattacaggtatgagccactgtgctcagcccccagcgtttctcatatgagcatgtatatatatatatattatatatatattatatatgtttatatttatatatattatatataactgacagacctttctgatgtatattgttttatagttgttatttatgttgtatgctactatccaactattcatattcccattgcctatagatcaggggtcagcaaactacagtttgctggccaaatctggtccctgcctgtttttgtaagtacagtttaactgaaacacagctgcacccattgatttacatactgtctagagcagcttttgcactacaaatgataagaatttagtagttgcaacagagactggttcaaataggattggctgtgtttggaactagcacttgccagaatgtaatatttgctgtgaagtgctgaaaagaaaagtaacttccttttcatttttttagtggcatagtctaaaactgctcacaatccttttgaaagactaaagaataggccaggtgtggtggctcatgcctgtaatcccagcactttgggaggccaaggcaggcggatcacaaggtcaggagttcaagaccagcctggccaacatagtgaaacgctgtctctactaaaaatacaaaaaaaaatagctgggcttggtggcggccacctgtagtccccagctactcgggaggctgaggcaggagaatcgctggaacccgggaggcggaggttgcagtgagctgagatggcgccattgcactccagccctggagacagtgcgagactgtgtctc

SEQ ID NO: 10944 - DNA, 1776 bp, Homo sapiens
  source 1..1776: mol_type = unassigned DNA
agtctcgggcggcggtgtccggcgcgcgggcggcctgctgggcgggctgaagggttagcggagcacgggcaaggcggagagtgacggagtcggcgagcccccgcggcgacaggttctctacttaaaagacaatgactactgagcagggagaggaaacgccgatgattggagacaaagtttatgtccattacaaaggaaaattgtcaaatggaaagaagtttgattccagtcatgatagaaatgaaccatttgtctttagtcttggcaaaggccaagtcatcaaggcatgggacattggggtggctaccatgaagaaaggagagatatgccatttactgtgcaaaccagaatatgcatatggctcggctggcagtctccctaaaattccctcgaatgcaactctcttttttgagattgagctccttgatttcaaaggagaggatttatttgaagatggaggcattatccggagaaccaaacggaaaggagagggatattcaaatccaaacgaaggagcaacagtagaaatccacctggaaggccgctgtggtggaaggatgtttgactgcagagatgtggcattcactgtgggcgaaggagaagaccacgacattccaattggaattgacaaagctctggagaaaatgcagcgggaagaacaatgtattttatatcttggaccaagatatggttttggagaggcagggaagcctaaatttggcattgaacctaatgctgagcttatatatgaagttacacttaagagcttcgaaaaggccaaagaatcctgggagatggataccaaagaaaaattggagcaggctgccattgtcaaagagaagggaaccgtatacttcaagggaggcaaatacatgcaggcggtgattcagtatgggaagatagtgtcctggttagagatggaatatggtttatcagaaaaggaatcgaaagcttctgaatcatttctccttgctgcctttctgaacctggccatgtgctacctgaagcttagagaatacaccaaagctgttgaatgctgtgacaaggcccttggactggacagtgccaatgagaaaggcttgtataggaggggtgaagcccagctgctcatgaacgagtttgagtcagccaagggtgactttgagaaagtgctggaagtaaacccccagaataaggctgcaagactgcagatctccatgtgccagaaaaaggccaaggagcacaacgagcgggaccgcaggatatacgccaacatgttcaagaagtttgcagagcaggatgccaaggaagaggccaataaagcaatgggcaagaagacttcagaaggggtcactaatgaaaaaggaacagacagtcaagcaatggaagaagagaaacctgagggccacgtatgacgccacgccaaggagggaagagtcccagtgaactcggcccctcctcaatgggctttcccccaactcaggacagaacagtgtttaatgtaaagtttgttatagtctatgtgattctggaagcaaatggcaaaaccagtagcttcccaaaaacagcccccctgctgctgcccggagggttcactgaggggtggcacgggaccactccaggtggaacaaacagaaatgactgtggtgtggagggagtgagccagcagcttaagtccagctcatttcagtttctatcaaccttcaagtatccaattcagggtccctggagatcatcctaacaatgtggggctgttaggttttacctttgaactttcatagcactgcagaaaccttt

SEQ ID NO: 10945 - DNA, 1500 bp, Homo sapiens
  source 1..1500: mol_type = unassigned DNA
gtcacagccagggagggcagcggggcgcaccaggccgaaggctcacgccacagggagggcagctaggacatggggggaagcgcgttaaaccagggagtcctggaaggggacgacgcccccggccagtccctgtacgagcggttaagtcagaggatgctggacatctcgggggaccggggcgtgctgaaggacgtcatccgagaaggagctggagacctagtggcgcctgatgcttcggtgctagtgaaatactcgggatacctggaacacatggacagacccttcgattctaattactttaggaaaactcctcggctaatgaaacttggagaggatattacactgtggggcatggagctgggccttctgagcatgcggagaggagagctggccaggtttctgttcaaaccgaactacgcctatggaacgctgggctgccctcccttgatccccccaaacaccactgtcctgtttgagattgagctgcttgacttcctggactgtgctgagtcagacaagttttgtgctctctcagctgagcagcaagaccaatttccacttcagaaggtcctgaaagtggcagctacggaacgggagtttggcaactaccttttccgccagaatcgtttctatgatgccaaagtgagatataaaagggccctgttgcttctgcgccggcgatcagcaccccctgaagagcagcacctggtggaggccgccaagcttcctgttctcctgaacctgtcctttacatacctgaagctagaccgacccaccatagccctgtgctatggagagcaggctttgatcattgaccaaaagaatgccaaggccctcttcaggtgtggacaggcttgtcttctcctgactgagtatcaaaaggcccgggattttctagttcgagcccagaaggagcaacccttcaatcatgacatcaataatgagctgaagaaactggctagctgttacagggactatgtggataaagagaaagaaatgtggcaccgcatgttcgcgccctgtggcgatggttctacagcaggagaaagttgaaggttcttcacctaccaacgaggggagagagctgtggttctccatcattgggggagtggaagggagctcccagcgcagccgtggcagccaccttccaggagcaggggctggaatgtcctgtggccgcatctctcatggacgcggctgaaacgtgttttcacaggtgctgttttctgttttccgtgttcgtaacagaagggaggggaaagcgcagctactgacaagtagaacactgctactttttttaaggcagtttcttgtttttttagacggaattagtccttggcttccctcccagtcccagccctgcttccggctgcgaatgtccctgagtcaacaccaatagagattgctttgtgtattttgtagggttctctgttttgaagacagaattatgttacaaatgtttttgttgtaaataaataaaacacttccttgtccttgcaa

SEQ ID NO: 10946 - DNA, 1446 bp, Homo sapiens
  source 1..1446: mol_type = unassigned DNA
atgtttcgtgcgcttccattacggatcatacctcgcacctcaccgcgtggcctctgtagttccagagctcgcgagggccagggccgttggcggcggttggaacgaaacgatgagtgcctcctcgtggccccagaatggaatgccgccgtcgtccctgtacgagcggttaagtcagaggatgctggacatctcgggggaccggggcgtgctgaaggacgtcatccgagaaggagctggagacctagtggcgcctgatgcttcggtgctagtgaaatactcgggatacctggaacacatggacagacccttcgattctaattactttaggaaaactcctcggctaatgaaacttggagaggatattacactgtggggcatggagctgggccttctgagcatgcggagaggagagctggccaggtttctgttcaaaccgaactacgcctatggaacgctgggctgccctcccttgatccccccaaacaccactgtcctgtttgagattgagctgcttgacttcctggactgtgctgagtcagacaagttttgtgctctctcagctgagcagcaagaccaatttccacttcagaaggtcctgaaagtggcagctacggaacgggagtttggcaactaccttttccgccagaatcgtttctatgatgccaaagtgagatataaaagggccctgttgcttctgcgccggcgatcagcaccccctgaagagcagcacctggtggaggccgccaagcttcctgttctcctgaacctgtcctttacatacctgaagctagaccgacccaccatagccctgtgctatggagagcaggctttgatcattgaccaaaagaatgccaaggccctcttcaggtgtggacaggcttgtcttctcctgactgagtatcaaaaggcccgggattttctagttcgagcccagaaggagcaacccttcaatcatgacatcaataatgagctgaagaaactggctagctgttacagggactatgtggataaagagaaagaaatgtggcaccgcatgttcgcgccctgtggcgatggttctacagcaggagaaagttgaaggttcttcacctaccaacgaggggagagagctgtggttctccatcattgggggagtggaagggagctcccagcgcagccgtggcagccaccttccaggagcaggggctggaatgtcctgtggccgcatctctcatggacgcggctgaaacgtgttttcacaggtgctgttttctgttttccgtgttcgtaacagaagggaggggaaagcgcagctactgacaagtagaacactgctactttttttaaggcagtttcttgtttttttagacggaattagtccttggcttccctcccagtcccagccctgcttccggctgcgaatgtccctgagtcaacaccaatagagattgctttgtgtattttgta

SEQ ID NO: 10947 - DNA, 1766 bp, Homo sapiens
  source 1..1766: mol_type = unassigned DNA
ggccgaacctggttcccgaggcgcggcggccgcggctgggggcggggaggggggcgcaggaccccaagtgggggtcccggagccagagggccaattcctgtccccccagcagcatggcatcgtgtgctgaaccctctgagccctctgccccactgcccgccggggtcccaccgctcgaggacttcgaggtactggatggggttgaggatgcagagggtgaggaggaagaggaggaggaagaggaggaagaggatgacctgagtgagctgccaccgctggaggacatgggacaacccccggcggaggaggctgagcagcctggggccctggcccgagagttccttgctgccatggagcccgagcccgccccagccccggccccagaagagtggctggacattctggggaacgggctgttgaggaagaagacgctggtcccagggccgccaggttcgagccgcccggtcaagggccaggtggtcaccgtacatctgcagacgtcgctggagaatggcacacgggtgcaggaggagccggagctggtgttcactctgggtgactgtgacgtcatccaggccctggatctcagtgtcccactcatggacgtgggggagacggccatggtcactgctgactccaagtactgctacggcccccaaggcagcaggagcccatacatccccccgcacgcggccctgtgcctggaggtgaccctgaagacggctgtggacgggcctgacctggagatgctcacggggcaggagcgcgtggccctggccaaccggaagcgggagtgcggcaacgcccactaccagcgggcggacttcgtcctggccgccaactcctacgacctcgccatcaaggctatcacctccagcgccaaagtggacatgacgttcgaggaggaggcacagctcctgcagttgaaggtgaagtgtctgaacaacctggcggcctcgcagctgaagctcgaccactaccgcgcagccctgcgctcctgcagccttgtgctggagcaccagccagacaacatcaaggctctcttccgcaagggcaaggtgctggcccagcagggggagtacagtgaggccatccccatcctgagggcagccctgaagctggaaccttccaacaagacgatccacgcagagctctcaaagctggtgaagaagcatgcggcgcagcggagcacggagaccgccttgtaccggaaaatgctgggcaaccccagccggctgcctgctaagtgccctggcaagggtgcctggtccatcccatggaagtggctgtttggggcgactgctgttgccttggggggtgtggcactctctgtggtcatcgctgccaggaactgaccacctaggtggctgccaccccctctgcacaccatggaccctgccctgcgctccccaactcccccaggctccctgtccactgccctccctggtctggccccctcctccgggttaggggagcaaggattgggggtcgtgcagcccagccagcaggagggactgaggccctctaggaggaaagcccagagggagggggccctcattccttcagacccagttttcccccaccctccttaccccgctgggctaggtctccgccagggctggcctcagtttctcctcaacaggcctgggggcagcccttcccctgcctagtccccgcctgagtgccagccccccaccccgcctgccgccccctgtccaggttccctccccgccacagtgaaataaagcatcccaccctgcagtttc

SEQ ID NO: 10948 - DNA, 1672 bp, Homo sapiens
  source 1..1672: mol_type = unassigned DNA
gaattgtgcgggcgcggggaattatgggggtgggggctgggagggtctctcaaagtggggctccgagcccgggaggagcaggcagggccaattcctgtccccccagcagcatggcatcgtgtgctgaaccctctgagccctctgccccactgcccgccggggtcccaccgctcgaggacttcgaggtactggatggggttgaggatgcagagggtgaggaggaagaggaggaggaagaggaggaagaggatgacctgagtgagctgccaccgctggaggacatgggacaacccccggcggaggaggctgagcagcctggggccctggcccgagagttccttgctgccatggagcccgagcccgccccagccccggccccagaagagtggctggacattctggggaacgggctgttgaggaagaagacgctggtcccagggccgccaggttcgagccgcccggtcaagggccaggtggtcaccgtacatctgcagacgtcgctggagaatggcacacgggtgcaggaggagccggagctggtgttcactctgggtgactgtgacgtcatccaggccctggatctcagtgtcccactcatggacgtgggggagacggccatggtcactgctgactccaagtactgctacggcccccaaggcaggagcccatacatccccccgcacgcggccctgtgcctggaggtgaccctgaagacggctgtggacgggcctgacctggagatgctcacggggcaggagcgcgtggccctggccaaccggaagcgggagtgcggcaacgcccactaccagcgggcggacttcgtcctggccgccaactcctacgacctcgccatcaaggctatcacctccagcgccaaagtggacatgacgttcgaggaggaggcacagctcctgcagttgaaggtgaagtgtctgaacaacctggcggcctcgcagctgaagctcgaccactaccgcgcagccctgcgctcctgcagccttgtgctggagcaccagccagacaacatcaaggctctcttccgcaagggcaaggtgctggcccagcagggggagtacagtgaggccatccccatcctgagggcagccctgaagctggaaccttccaacaagacgatccacgcagagctctcaaagctggtgaagaagcatgcggcgcagcggagcacggagaccgccttgtaccggaaaatgctgggcaaccccagccggctgcctgctaagtgccctggcaagggtgcctggtccatcccatggaagtggctgtttggggcgactgctgttgccttggggggtgtggcactctctgtggtcatcgctgccaggaactgaccacctaggtggctgccaccccctctgcacaccatggaccctgccctgcgctccccaactcccccaggctccctgtccactgccctccctggtctggccccctcctccgggttaggggagcaaggattgggggtcgtgcagcccagccagcaggagggactgaggccctctaggaggaaagcccagagggagggggccctcattccttcagacccagttttcccccaccctccttaccccgctgggctaggtctccgccagggctggcctcagtttctcctcaacaggcctgggggcagcccttcccctgcctagtccccgcc

SEQ ID NO: 10949 - DNA, 1286 bp, Homo sapiens
  source 1..1286: mol_type = unassigned DNA
ggccgaacctggttcccgaggcgcggcggccgcggctgggggcggggaggggggcgcaggaccccaagtgggggtcccggagccagagggccaattcctgtccccccagcagcatggcatcgtgtgctgaaccctctgagccctctgccccactgcccgccggggtcccaccgctcgaggacttcgaggtactggatggggttgaggatgcagagggtgaggaggaagaggaggaggaagaggaggaagaggatgacctgagtgagctgccaccgctggaggacatgggacaacccccggcggaggaggctgagcagcctggggccctggcccgagagttccttgctgccatggagcccgagcccgccccagccccggccccagaagagtggctggacattctggtggacatgacgttcgaggaggaggcacagctcctgcagttgaaggtgaagtgtctgaacaacctggcggcctcgcagctgaagctcgaccactaccgcgcagccctgcgctcctgcagccttgtgctggagcaccagccagacaacatcaaggctctcttccgcaagggcaaggtgctggcccagcagggggagtacagtgaggccatccccatcctgagggcagccctgaagctggaaccttccaacaagacgatccacgcagagctctcaaagctggtgaagaagcatgcggcgcagcggagcacggagaccgccttgtaccggaaaatgctgggcaaccccagccggctgcctgctaagtgccctggcaagggtgcctggtccatcccatggaagtggctgtttggggcgactgctgttgccttggggggtgtggcactctctgtggtcatcgctgccaggaactgaccacctaggtggctgccaccccctctgcacaccatggaccctgccctgcgctccccaactcccccaggctccctgtccactgccctccctggtctggccccctcctccgggttaggggagcaaggattgggggtcgtgcagcccagccagcaggagggactgaggccctctaggaggaaagcccagagggagggggccctcattccttcagacccagttttcccccaccctccttaccccgctgggctaggtctccgccagggctggcctcagtttctcctcaacaggcctgggggcagcccttcccctgcctagtccccgcctgagtgccagccccccaccccgcctgccgccccctgtccaggttccctccccgccacagtgaaataaagcatcccaccctgcagtttc

SEQ ID NO: 10950 - DNA, 2160 bp, Homo sapiens
  source 1..2160: mol_type = unassigned DNA
cgctacagaagattcaaactgagcaaatcgcctaatcttccaaattctttttcctggcttgttagagcagccaagggtggggtggagcttgtgaataaaaagcctgcttcatcttcctcatgcaggagaacatggccaagcgagttgccattgtgggagctggggtcagcggcctggcctccatcaagtgctgtctggaagaaggactggagcccacctgctttgagaggagcgatgaccttggggggctgtggagattcaccgaacatgttgaagaaggcagagccagtctctacaagtctgtggtttccaacagctgcaaggagatgtcttgttactcagactttccattcccagaagattatccaaactatgtgccaaattctcaattcctggaatatctcaaaatgtatgcaaaccactttgaccttctgaaacacattcaattcaagaccaaagtctgcagtgtaacaaaatgctcagattctgctgtctctggccaatgggaggtggtcactatgcatgaagagaagcaagagtcagccatctttgatgctgtcatggtctgcactggctttcttactaatccttatttgccactggattcctttccaggtattaatgcctttaaaggccagtactttcatagccggcaatataagcatccagatatatttaaggacaagagagtccttgtgattggaatgggaaattctggcacagacattgctgtggaggccagccacctggcggaaaaggtgttcctcagcaccaccggagggggatgggtgatcagccgaatctttgactcgggctacccatgggacatggtgttcatgacacgctttcagaacatgttgagaaattccctcccaaccccaattgtgacttggttgatggagcgaaagataaacaactggctcaatcatgcaaattacggcttaataccagaagacaggactcagctgaaagagtttgtgctaaatgatgagctcccaggacgcatcatcactgggaaagtgttcatcaggccaagcataaaagaggtaaaggaaaactctgtcatatttaacaatacttcaaaggaagagcctattgacatcattgtctttgccactggatacacatttgctttccccttccttgatgagtctgtagtgaaagttgaagatggccaggcctcactgtacaagtatatcttccctgcacatctgcaaaagccaaccctggccattattggcctcatcaaacccttgggctccatgatacctacaggagaaacacaagctcggtgggctgttcgagtcctgaaaggtgtaaataagttaccaccaccaagtgtcatgatagaggaaattaatgcaaggaaagaaaacaagcccagttggtttggcttgtgctactgcaaggctttacaatcagattatatcacatacatagatgaactcctgacctatatcaatgcaaaacccaacctgttctctatgctcctaacggatccacatctggctctgaccgtcttctttggcccatgctcaccataccagttccgcttgactggcccaggaaaatgggaaggagccagaaatgccatcatgacccagtgggaccgaacattcaaggtcatcaaagctcgagttgtacaagagtctccatctccctttgaaagttttcttaaagtctttagctttctggctttgcttgtggctatttttctgattttcctataagtaaaagatctcctaaatggaagatgcacagagtagatttacaatgctccaattcctctcttacagcaatattgccttcacagttataaactgtattcaaatagtaaaggccaccctctcgcttccctggctggccccagggctaccactggtattcctgagcctctcccagctccacttctaatgctagagaatgataactaagacttctgtgcatttgaaggttgttggaaagttacaggttcattttagaaagaaagctgttcttgacagcactctgagccatcatacctctttcccatataaactattttcacagatctcaactaaaaccccttacttcacaaatgattgtgttgtgctgaaatggtgctcttatagtactggcttattaaaagtaaaaaataaacctaaaaattgattgttttaa

SEQ ID NO: 10951 - DNA, 2155 bp, Homo sapiens
  source 1..2155: mol_type = unassigned DNA
aggtttatccactgtgctggggactcccaagccagcactggctcatactgattcattttgatctctgctaataccagagtcctgcgtggcagagccattggcaccagaaattacaagagaacatggccaagcgagttgccattgtgggagctggggtcagcggcctggcctccatcaagtgctgtctggaagaaggactggagcccacctgctttgagaggagcgatgaccttggggggctgtggagattcaccgaacatgttgaagaaggcagagccagtctctacaagtctgtggtttccaacagctgcaaggagatgtcttgttactcagactttccattcccagaagattatccaaactatgtgccaaattctcaattcctggaatatctcaaaatgtatgcaaaccactttgaccttctgaaacacattcaattcaagaccaaagtctgcagtgtaacaaaatgctcagattctgctgtctctggccaatgggaggtggtcactatgcatgaagagaagcaagagtcagccatctttgatgctgtcatggtctgcactggctttcttactaatccttatttgccactggattcctttccaggtattaatgcctttaaaggccagtactttcatagccggcaatataagcatccagatatatttaaggacaagagagtccttgtgattggaatgggaaattctggcacagacattgctgtggaggccagccacctggcggaaaaggtgttcctcagcaccaccggagggggatgggtgatcagccgaatctttgactcgggctacccatgggacatggtgttcatgacacgctttcagaacatgttgagaaattccctcccaaccccaattgtgacttggttgatggagcgaaagataaacaactggctcaatcatgcaaattacggcttaataccagaagacaggactcagctgaaagagtttgtgctaaatgatgagctcccaggacgcatcatcactgggaaagtgttcatcaggccaagcataaaagaggtaaaggaaaactctgtcatatttaacaatacttcaaaggaagagcctattgacatcattgtctttgccactggatacacatttgctttccccttccttgatgagtctgtagtgaaagttgaagatggccaggcctcactgtacaagtatatcttccctgcacatctgcaaaagccaaccctggccattattggcctcatcaaacccttgggctccatgatacctacaggagaaacacaagctcggtgggctgttcgagtcctgaaaggtgtaaataagttaccaccaccaagtgtcatgatagaggaaattaatgcaaggaaagaaaacaagcccagttggtttggcttgtgctactgcaaggctttacaatcagattatatcacatacatagatgaactcctgacctatatcaatgcaaaacccaacctgttctctatgctcctaacggatccacatctggctctgaccgtcttctttggcccatgctcaccataccagttccgcttgactggcccaggaaaatgggaaggagccagaaatgccatcatgacccagtgggaccgaacattcaaggtcatcaaagctcgagttgtacaagagtctccatctccctttgaaagttttcttaaagtctttagctttctggctttgcttgtggctatttttctgattttcctataagtaaaagatctcctaaatggaagatgcacagagtagatttacaatgctccaattcctctcttacagcaatattgccttcacagttataaactgtattcaaatagtaaaggccaccctctcgcttccctggctggccccagggctaccactggtattcctgagcctctcccagctccacttctaatgctagagaatgataactaagacttctgtgcatttgaaggttgttggaaagttacaggttcattttagaaagaaagctgttcttgacagcactctgagccatcatacctctttcccatataaactattttcacagatctcaactaaaaccccttacttcacaaatgattgtgttgtgctgaaatggtgctcttatagtactggcttattaaaagtaaaaaataaacctaaaaattgattgttttaagtga

SEQ ID NO: 10952 - DNA, 1572 bp, Homo sapiens
  source 1..1572: mol_type = unassigned DNA
tcattttgatctctgctaataccagagtcctgcgtggcagagccattggcaccagaaattacaagtacgtaaagagaacatggccaagcgagttgccattgtgggagctggggtcagcggcctggcctccatcaagtgctgtctggaagaaggactggagcccacctgctttgagaggagcgatgaccttggggggctgtggagattcaccaccaaagtctgcagtgtaacaaaatgctcagattctgctgtctctggccaatgggaggtggtcactatgcatgaagagaagcaagagtcagccatctttgatgctgtcatggtctgcactggctttcttactaatccttatttgccactggattcctttccaggtattaatgcctttaaaggccagtactttcatagccggcaatataagcatccagatatatttaaggacaagagagtccttgtgattggaatgggaaattctggcacagacattgctgtggaggccagccacctggcggaaaaggtgttcctcagcaccaccggagggggatgggtgatcagccgaatctttgactcgggctacccatgggacatggtgttcatgacacgctttcagaacatgttgagaaattccctcccaaccccaattgtgacttggttgatggagcgaaagataaacaactggctcaatcatgcaaattacggcttaataccagaagacaggactcagctgaaagagtttgtgctaaatgatgagctcccaggacgcatcatcactgggaaagtgttcatcaggccaagcataaaagaggtaaaggaaaactctgtcatatttaacaatacttcaaaggaagagcctattgacatcattgtctttgccactggatacacatttgctttccccttccttgatgagtctgtagtgaaagttgaagatggccaggcctcactgtacaagtatatcttccctgcacatctgcaaaagccaaccctggccattattggcctcatcaaacccttgggctccatgatacctacaggagaaacacaagctcggtgggctgttcgagtcctgaaaggtgtaaataagttaccaccaccaagtgtcatgatagaggaaattaatgcaaggaaagaaaacaagcccagttggtttggcttgtgctactgcaaggctttacaatcagattatatcacatacatagatgaactcctgacctatatcaatgcaaaacccaacctgttctctatgctcctaacggatccacatctggctctgaccgtcttctttggcccatgctcaccataccagttccgcttgactggcccaggaaaatgggaaggagccagaaatgccatcatgacccagtgggaccgaacattcaaggtcatcaaagctcgagttgtacaagagtctccatctccctttgaaagttttcttaaagtctttagctttctggctttgcttgtggctatttttctgattttcctataagtaaaagatctcctaaatggaagatgcacagagtagatttacaatgctccaattcctctcttacagcaatattgccttcacag

SEQ ID NO: 10953 - DNA, 757 bp, Homo sapiens
  source 1..757: mol_type = unassigned DNA
aggtttatccactgtgctggggactcccaagccagcactggctcatactgattcattttgatctctgctaataccagagtcctgcgtggcagagccattggcaccagaaattacaagtacgtaaagagaacatggccaagcgagttgccattgtgggagctggggtcagcggcctggcctccatcaagtgctgtctggaagaaggactggagcccacctgctttgagaggagcgatgaccttggggggctgtggagattcaccgaacatgttgaagaaggcagagccagtctctacaagtctgtggtttccaacagctgcaaggagatgtcttgttactcagactttccattcccagaagattatccaaactatgtgccaaattctcaattcctggaatatctcaaaatgtatgcaaaccactttgaccttctgaaacacattcaattcaagaccaaagtctgcagtgtaacaaaatgctcagattctgctgtctctggccaatgggaggtggtcactatgcatgaagagaagcaagagtcagccatctttgatgctgtcatggtctgcactggctttcttactaatccttatttgccactggattcctttccaggtattaatgcctttaaaggccagtactttcatagccggcaatataagcatccagatatatttaaggacaagagagtccttgtgattggaatgggaaattctggcacagacattgctgtggaggccagccacctggcggaaaa

SEQ ID NO: 10954 - DNA, 3851 bp, Homo sapiens
  source 1..3851: mol_type = unassigned DNA
ttcagctggaagaatgctggaggaatacggaactcctcccatttctcacagccacctccaactcttaaaaacgcttccaactgcctcccagcacacaaccaagggagaaaactattctgtcaaagagacggtgccaaaaggcaaaaacaaaggagctgatggcaaagaaggtagctgtgattggagctggggtcagtggcctaatttctctgaagtgctgtgtggatgagggacttgagcccacttgctttgagagaactgaagatattggaggagtgtggaggttcaaagagaatgtggaagatggccgagcaagtatctatcaatctgtcgttaccaacaccagcaaagaaatgtcctgtttcagtgactttccaatgcctgaagattttccaaacttcctgcataattctaaacttctggaatatttcaggatttttgctaaaaaatttgatctgctaaaatatattcagttccagacaactgtccttagtgtgagaaaatgtccagatttctcatcctctggccaatggaaggttgtcactcagagcaacggcaaggagcagagtgctgtctttgacgcagttatggtttgcagtggccaccacattctacctcatatcccactgaagtcatttccaggtatggagaggttcaaaggccaatatttccatagccgccaatacaagcatccagatggatttgagggaaaacgcatcctggtgattggaatgggaaactcaggctcagatattgctgttgagctgagtaagaatgctgctcaggtttttatcagcaccaggcatggcacctgggtcatgagccgtatctctgaagatggctatccttgggactcagtgttccacacccggtttcgttctatgctccgcaatgtactgccacgaacagctgtaaaatggatgatagaacaacagatgaatcggtggttcaaccatgaaaattatggccttgagcctcaaaacaaatacattatgaaggaacctgtactaaatgatgatgtcccaagtcgtctactctgtggagccatcaaggtgaaatctacagtgaaagagctcacagaaacttctgccatctttgaggatggaacagtggaggagaacattgatgtcatcatttttgcaacaggatatagtttctcttttcccttccttgaagattcactcgttaaagtagagaataatatggtctcactgtataaatacatattccccgctcacctggacaagtcaaccctcgcgtgcattggtctcatccagcccctaggttccattttcccaactgctgaacttcaagctcgttgggtgacaagagttttcaaaggcttgtgtagcctgccctcagagagaactatgatgatggacattatcaaaaggaatgaaaaaagaattgacctgtttggagaaagccagagccagacgttgcagaccaattatgttgactacttggacgagctcgccttagagataggtgcgaagccagatttctgctctctcttgttcaaagatcctaaactggctgtgagactctatttcggaccctgcaactcctattagtatcgcctggttgggcctgggcaatgggaaggagccagaaatgccatcttcacccagaaacaaagaatactgaagccactcaagactcgggccctgaaggattcatctaatttctcagtttcttttctgttgaaaatcctgggccttcttgctgttgttgtggcctttttttgccaacttcaatggtcctagtcagcataatgctttgggctttattatcttgtcagtcactacctcctaaagaaaaaaaaaaaggctagaagaaaaaacattacattcatgttctaattatagattttagagttaggtagtacaggtaagggggaaattgtaaagaattagcagaattaggcatatgtacaaaaccaaaattttgtcatgaaattttgcctttccacgcttccctcagttcaccaaagttaccaaaatgtaaaataaaataagactggctcaggtaagtagtgctgccaaccctgatataggggagttgtatggaaaaatagtagaattacacagcatgaaaagcagcccatggtttaaattattggacaatttaaattgtgggtaaatatttaaaactcctgaacaatgtttctgatggtcttctatccaccctacttggtaacaaagttctcagatgttaggtcatgtttcatttgctcagtcggggatcactcaaaactactagacaaaaaagtgagaggatagatttagaaaacatcagtgatgctcagataaacttttaggacctcatattaagagctaagcaaatggccacatttcctatattttgacagagatactgctggaaaaattaaaattaaaatgccataatagctacctaacaaatatatatgtttaatgtttatcataggccagacattgtgctatgtgcatatcatatgtattatttcatttaattctcacaacaattctgtgaaatggttacagctattatagtcatttcacagatgatgaaactaagattcagagcagctgatcttgtgaggcagctggaattggaactcagatttgttgaactctagaactaaagatcataatgttgtcttgtaatatatttatttacaaaacacttcattatttataaagaatttactaacagtttatcttatttatacccatacatctgctactttgggaggccctttacatagaaaacagcattctttttgccaaatatgaccaaattacttttatttataatttttgatttatatttcagctagatctaaaaagcatctgaaggaatttacaatgaaagatacctatgcaataacatttaggataatctttgacattttggaaaaataagaattgaggaaaaaaagtgtatctttcaagtagatgcaaagcattataatgactgacacttgtatctaactccagtcttacagataactaaggcaaaaagctaaataaacaatatgtaacctctaacatttggtaaaaggaagtatactggtctgttagcagagacaaactttttttagaattgaagtctgaaacaaacaaaagcaattcaatgtcaatagacattaagcaacataatagacaaacatctcctaagggaacatttgttacagctgctccttccctgaactgtgctttggaagataagctctgtcctgagtccaaaccaagcccttccaagagagaacaaaggtcagagatgttgaagattccagcaaatttctcctcttatttctaccaagcctttgtgaacattgctcttcattttggcctgtacttctccctcagggacgtagaacaatggaatgtcagtcagtctctgtagttaaaactttttctttaaaattcaattaaggtacttctccctcagggacgtagaacaatggaatgtcagtcagtctctgtagttaaaactttttctttaaaattcaattaaggtacttctccctcagggacgtagaacaatggaatgtcagtcagtctctgtagttaaaactttttctttaaaattcaattaagttacaccagaatttacaggcaagattttttttttcattgctcccataagcaaatttgttttaaaataattgtaaatgaggtatatacttagttcttggttaaaaaatatattgctttgttaagtattaaagattatttgtaagtcattgtattaataatactaataaaatttatcaagcctttatagcaagggtcagtgaattaccactgcctgtgggccaaatctagctcactatctgtttttgtaaataaaattttataatagta

SEQ ID NO: 10955 - DNA, 5181 bp, Homo sapiens
  source 1..5181: mol_type = unassigned DNA
tttctcacagccacctccaactcttaaaaacgcttccaactgcctcccagcacacaaccaagggagaaaactattctgtcaaagagacggtgccaaaaggcaaaaacaaaggagctgatggcaaagaaggtagctgtgattggagctggggtcagtggcctaatttctctgaagtgctgtgtggatgagggacttgagcccacttgctttgagagaactgaagatattggaggagtgtggaggttcaaagagaatgtggaagatggccgagcaagtatctatcaatctgtcgttaccaacaccagcaaagaaatgtcctgtttcagtgactttccaatgcctgaagattttccaaacttcctgcataattctaaacttctggaatatttcaggatttttgctaaaaaatttgatctgctaaaatatattcagttccagacaactgtccttagtgtgagaaaatgtccagatttctcatcctctggccaatggaaggttgtcactcagagcaacggcaaggagcagagtgctgtctttgacgcagttatggtttgcagtggccaccacattctacctcatatcccactgaagtcatttccaggtatggagaggttcaaaggccaatatttccatagccgccaatacaagcatccagatggatttgagggaaaacgcatcctggtgattggaatgggaaactcaggctcagatattgctgttgagctgagtaagaatgctgctcaggtttttatcagcaccaggcatggcacctgggtcatgagccgtatctctgaagatggctatccttgggactcagtgttccacacccggtttcgttctatgctccgcaatgtactgccacgaacagctgtaaaatggatgatagaacaacagatgaatcggtggttcaaccatgaaaattatggccttgagcctcaaaacaaatacattatgaaggaacctgtactaaatgatgatgtcccaagtcgtctactctgtggagccatcaaggtgaaatctacagtgaaagagctcacagaaacttctgccatctttgaggatggaacagtggaggagaacattgatgtcatcatttttgcaacaggatatagtttctcttttcccttccttgaagattcactcgttaaagtagagaataatatggtctcactgtataaatacatattccccgctcacctggacaagtcaaccctcgcgtgcattggtctcatccagcccctaggttccattttcccaactgctgaacttcaagctcgttgggtgacaagagttttcaaaggcttgtgtagcctgccctcagagagaactatgatgatggacattatcaaaaggaatgaaaaaagaattgacctgtttggagaaagccagagccagacgttgcagaccaattatgttgactacttggacgagctcgccttagagataggtgcgaagccagatttctgctctctcttgttcaaagatcctaaactggctgtgagactctatttcggaccctgcaactcctattagtatcgcctggttgggcctgggcaatgggaaggagccagaaatgccatcttcacccagaaacaaagaatactgaagccactcaagactcgggccctgaaggattcatctaatttctcagtttcttttctgttgaaaatcctgggccttcttgctgttgttgtggcctttttttgccaacttcaatggtcctagtcagcataatgctttgggctttattatcttgtcagtcactacctcctaaagaaaaaaaaaaaggctagaagaaaaaacattacattcatgttctaattatagattttagagttaggtagtacaggtaagggggaaattgtaaagaattagcagaattaggcatatgtacaaaaccaaaattttgtcatgaaattttgcctttccacgcttccctcagttcaccaaagttaccaaaatgtaaaataaaataagactggctcaggtaagtagtgctgccaaccctgatataggggagttgtatggaaaaatagtagaattacacagcatgaaaagcagcccatggtttaaattattggacaatttaaattgtgggtaaatatttaaaactcctgaacaatgtttctgatggtcttctatccaccctacttggtaacaaagttctcagatgttaggtcatgtttcatttgctcagtcggggatcactcaaaactactagacaaaaaagtgagaggatagatttagaaaacatcagtgatgctcagataaacttttaggacctcatattaagagctaagcaaatggccacatttcctatattttgacagagatactgctggaaaaattaaaattaaaatgccataatagctacctaacaaatatatatgtttaatgtttatcataggccagacattgtgctatgtgcatatcatatgtattatttcatttaattctcacaacaattctgtgaaatggttacagctattatagtcatttcacagatgatgaaactaagattcagagcagctgatcttgtgaggcagctggaattggaactcagatttgttgaactctagaactaaagatcataatgttgtcttgtaatatatttatttacaaaacacttcattatttataaagaatttactaacagtttatcttatttatacccatacatctgctactttgggaggccctttacatagaaaacagcattctttttgccaaatatgaccaaattacttttatttataatttttgatttatatttcagctagatctaaaaagcatctgaaggaatttacaatgaaagatacctatgcaataacatttaggataatctttgacattttggaaaaataagaattgaggaaaaaaagtgtatctttcaagtagatgcaaagcattataatgactgacacttgtatctaactccagtcttacagataactaaggcaaaaagctaaataaacaatatgtaacctctaacatttggtaaaaggaagtatactggtctgttagcagagacaaactttttttagaattgaagtctgaaacaaacaaaagcaattcaatgtcaatagacattaagcaacataatagacaaacatctcctaagggaacatttgttacagctgctccttccctgaactgtgctttggaagataagctctgtcctgagtccaaaccaagcccttccaagagagaacaaaggtcagagatgttgaagattccagcaaatttctcctcttatttctaccaagcctttgtgaacattgctcttcattttggcctgtacttctccctcagggacgtagaacaatggaatgtcagtcagtctctgtagttaaaactttttctttaaaattcaattaaggtacttctccctcagggacgtagaacaatggaatgtcagtcagtctctgtagttaaaactttttctttaaaattcaattaagttacaccagaatttacaggcaagattttttttttcattgctcccataagcaaatttgttttaaaataattgtaaatgaggtatatacttagttcttggttaaaaaatatattgctttgttaagtattaaagattatttgtaagtcattgtattaataatactaataaaatttatcaagcctttatagcaagggtcagtgaattaccactgcctgtgggccaaatctagctcactatctgtttttgtaaataaaattttataatagtacacagccacactcattcatttattttctgtggttgctttcaagctacaattgtagagttgggtagtcgcaacagaatctctgtggcccacaaggctaaaatatttacattctcacccattacagaaaaagtttgataattcctgctttataatatgtaaggcattgtcccattttgcataacttgccttatttcatcattatcactacccatttagtagctatggttgttatcttacttctacagtggaagagattgaaaagcatttgtcaggttaatgctaaatcagtgcggaaatatagctccactaggaaaatattattaaatttatatccctaaaatttttagaaatctctcaaaatctttccaaatgttctggtatctttgaaaaatgtaaatagtttatttatagagaaccctacctctgaggttgactcaaaggttaaagaaggctcatcagtctatccttctgcctccatatatcctgaacatcaaactatcccaggaaaaccatctagagtagtttgtttcaaaatattagccacagaccacctacatcacaataactcagggagcttatagaagtgaagattcctgaatataaacatagtaataattcaacctactgaatggaaatctctgctgaaatccacagttttcataagctccccagatgattcctgtgtacattaaatctagaaaccattagtttgagatctctcaaaaataaaaataaaaattgctttcagagagtagcccatgaaatttcccattcttcaaggacaaattccttctgttcagccttggtcctccaactgcagtttacaatttttgttcttctcctgtaaagaatgtcaatggttatcaccttcaatagtttcaatatgtcccccaaagttatgtgtttgaaacttgcaatagtattgggagatggggcctaatgaggtgattaggtgaagtctctgccctcatgaaaagattaatcccattatctcaggagtgtgttggttataaaagcaagtttggctccctcttttcctcacacactctttttcccttctgccttcacctttgccgtgggtggacacagcaagaaggccctcatcagatgctggccccttggtcttgaatttcctagcctctacaactaagccaaataaatttctgtttattataaataacccagtctcagatattctgttacagaaacacaaaatggactaagacaccacccttttccaaaatctctccttgtgatggctccctttactaacctttcttttagctattccctttatgatagtttcttaattttttctatcaaaagctaaatatggcacacttgttctttacagaaaaataaagatattttaaacaaaatactagggccatggtatgtaataaaatttgaaacaataatttcaaataataaagattgaaaatgcttaacccag

SEQ ID NO: 10956 - DNA, 2087 bp, Homo sapiens
  source 1..2087: mol_type = unassigned DNA
gtaggctcactagaacattttctctttcaaactgcccagacggttggacaggacgtagacacacagaagaaaagaagacaaagaacgggtaggaaaattaaaaaggttaccatggggaagaaagtggccatcattggagctggtgtgagtggcttggcctccatcaggagctgtctggaagaggggctggagcccacctgctttgagaagagcaatgacattgggggcctgtggaaattttcagaccatgcagaggagggcagggctagcatttacaaatcagtcttttccaactcttccaaagagatgatgtgtttcccagacttcccatttcccgatgacttccccaactttatgcacaacagcaagatccaggaatatatcattgcatttgccaaagaaaagaacctcctgaagtacatacaatttaagacatttgtatccagtgtaaataaacatcctgattttgcaactactggccagtgggatgttaccactgaaagggatggtaaaaaagaatcggctgtctttgatgctgtaatggtttgttccggacatcatgtgtatcccaacctaccaaaagagtcctttccaggactaaaccactttaaaggcaaatgcttccacagcagggactataaagaaccaggtgtattcaatggaaagcgtgtcctggtggttggcctggggaattcgggctgtgatattgccacagaactcagccgcacagcagaacaggtcatgatcagttccagaagtggctcctgggtgatgagccgggtctgggacaatggttatccttgggacatgctgctcgtcactcgatttggaaccttcctcaagaacaatttaccgacagccatctctgactggttgtacgtgaagcagatgaatgcaagattcaagcatgaaaactatggcttgatgcctttaaatggagtcctgaggaaagagcctgtatttaacgatgagctcccagcaagcattctgtgtggcattgtgtccgtaaagcctaacgtgaaggaattcacagagacctcggccatttttgaggatgggaccatatttgagggcattgactgtgtaatctttgcaacagggtatagttttgcctaccccttccttgatgagtctatcatcaaaagcagaaacaatgagatcattttatttaaaggagtatttcctcctctacttgagaagtcaaccatagcagtgattggctttgtccagtcccttggggctgccattcccacagttgacctccagtcccgctgggcagcacaagtaataaagggaacttgtactttgccttctatggaagacatgatgaatgatattaatgagaaaatggagaaaaagcgcaaatggtttggcaaaagcgagaccatacagacagattacattgtttatatggatgaactctcctccttcattggggcaaagcccaacatcccatggctgtttctcacagatcccaaattggccatggaagtttattttggcccttgtagtccctaccagtttaggctggtgggcccagggcagtggccaggagccagaaatgccatactgacccagtgggaccggtcgttgaaacccatgcagacacgagtggtcgggagacttcagaagccttgcttctttttccattggctgaagctctttgcaattcctattctgttaatcgctgttttccttgtgttgacctaatcatcattttctctaggatttctgaaagttactgacaatacccagacaggggctttgctatttaaaaattaaaattttcacaccacctgcttttctattcagcatcttttgcagtactctgtagacattagtcagtaatacagtgttatttctaggctctgaaatagccactttaagaatcatgtcatgatcttaagagagcactaatcatttctgtttgagttccactaacacttcaaaatcagaactatgttctttatatctaacttaaatcatttcctgaaacattttgacatgattcctttttccttttaaacaatgtatgaaagatgtattttaaatctaaataaagagcaaattaagcagaataattataa

SEQ ID NO: 10957 - DNA, 2066 bp, Homo sapiens
  source 1..2066: mol_type = unassigned DNA
gtaggctcactagaacattttctctttcaaactgcccagacggttggacaggacgtagacacacagaagaaaagaagacaaagaacgggttaccatggggaagaaagtggccatcattggagctggtgtgagtggcttggcctccatcaggagctgtctggaagaggggctggagcccacctgctttgagaagagcaatgacattgggggcctgtggaaattttcagaccatgcagaggagggcagggctagcatttacaaatcagtcttttccaactcttccaaagagatgatgtgtttcccagacttcccatttcccgatgacttccccaactttatgcacaacagcaagatccaggaatatatcattgcatttgccaaagaaaagaacctcctgaagtacatacaatttaagacatttgtatccagtgtaaataaacatcctgattttgcaactactggccagtgggatgttaccactgaaagggatggtaaaaaagaatcggctgtctttgatgctgtaatggtttgttccggacatcatgtgtatcccaacctaccaaaagagtcctttccaggactaaaccactttaaaggcaaatgcttccacagcagggactataaagaaccaggtgtattcaatggaaagcgtgtcctggtggttggcctggggaattcgggctgtgatattgccacagaactcagccgcacagcagaacaggtcatgatcagttccagaagtggctcctgggtgatgagccgggtctgggacaatggttatccttgggacatgctgctcgtcactcgatttggaaccttcctcaagaacaatttaccgacagccatctctgactggttgtacgtgaagcagatgaatgcaagattcaagcatgaaaactatggcttgatgcctttaaatggagtcctgaggaaagagcctgtatttaacgatgagctcccagcaagcattctgtgtggcattgtgtccgtaaagcctaacgtgaaggaattcacagagacctcggccatttttgaggatgggaccatatttgagggcattgactgtgtaatctttgcaacagggtatagttttgcctaccccttccttgatgagtctatcatcaaaagcagaaacaatgagatcattttatttaaaggagtatttcctcctctacttgagaagtcaaccatagcagtgattggctttgtccagtcccttggggctgccattcccacagttgacctccagtcccgctgggcagcacaagtaataaagggaacttgtactttgccttctatggaagacatgatgaatgatattaatgagaaaatggagaaaaagcgcaaatggtttggcaaaagcgagaccatacagacagattacattgtttatatggatgaactctcctccttcattggggcaaagcccaacatcccatggctgtttctcacagatcccaaattggccatggaagtttattttggcccttgtagtccctaccagtttaggctggtgggcccagggcagtggccaggagccagaaatgccatactgacccagtgggaccggtcgttgaaacccatgcagacacgagtggtcgggagacttcagaagccttgcttctttttccattggctgaagctctttgcaattcctattctgttaatcgctgttttccttgtgttgacctaatcatcattttctctaggatttctgaaagttactgacaatacccagacaggggctttgctatttaaaaattaaaattttcacaccacctgcttttctattcagcatcttttgcagtactctgtagacattagtcagtaatacagtgttatttctaggctctgaaatagccactttaagaatcatgtcatgatcttaagagagcactaatcatttctgtttgagttccactaacacttcaaaatcagaactatgttctttatatctaacttaaatcatttcctgaaacattttgacatgattcctttttccttttaaacaatgtatgaaagatgtattttaaatctaaataaagagcaaattaagcagaataatt

SEQ ID NO: 10958 - DNA, 1508 bp, Homo sapiens
  source 1..1508: mol_type = unassigned DNA
aaactgcccagacggttggacaggacgtagacacacagaagaaaagaagacaaagaacgggtaggaaaattaaaaaggttaccatggggaagaaagtggccatcattggagctggtgtgagtggcttggcctccatcaggagctgtctggaagaggggctggagcccacctgctttgagaagagcaatgacattgggggcctgtggaaattttcaacatttgtatccagtgtaaataaacatcctgattttgcaactactggccagtgggatgttaccactgaaagggatggtaaaaaagaatcggctgtctttgatgctgtaatggtttgttccggacatcatgtgtatcccaacctaccaaaagagtcctttccaggactaaaccactttaaaggcaaatgcttccacagcagggactataaagaaccaggtgtattcaatggaaagcgtgtcctggtggttggcctggggaattcgggctgtgatattgccacagaactcagccgcacagcagaacaggtcatgatcagttccagaagtggctcctgggtgatgagccgggtctgggacaatggttatccttgggacatgctgctcgtcactcgatttggaaccttcctcaagaacaatttaccgacagccatctctgactggttgtacgtgaagcagatgaatgcaagattcaagcatgaaaactatggcttgatgcctttaaatggagtcctgaggaaagagcctgtatttaacgatgagctcccagcaagcattctgtgtggcattgtgtccgtaaagcctaacgtgaaggaattcacagagacctcggccatttttgaggatgggaccatatttgagggcattgactgtgtaatctttgcaacagggtatagttttgcctaccccttccttgatgagtctatcatcaaaagcagaaacaatgagatcattttatttaaaggagtatttcctcctctacttgagaagtcaaccatagcagtgattggctttgtccagtcccttggggctgccattcccacagttgacctccagtcccgctgggcagcacaagtaataaagggaacttgtactttgccttctatggaagacatgatgaatgatattaatgagaaaatggagaaaaagcgcaaatggtttggcaaaagcgagaccatacagacagattacattgtttatatggatgaactctcctccttcattggggcaaagcccaacatcccatggctgtttctcacagatcccaaattggccatggaagtttattttggcccttgtagtccctaccagtttaggctggtgggcccagggcagtggccaggagccagaaatgccatactgacccagtgggaccggtcgttgaaacccatgcagacacgagtggtcgggagacttcagaagccttgcttctttttccattggctgaagctctttgcaattcctattctgttaatcgctgttttccttgtgttgacctaatcatcattttctcta

SEQ ID NO: 10959 - DNA, 1822 bp, Homo sapiens
  source 1..1822: mol_type = unassigned DNA
ctttcaaactgcccagacggttggacaggacgtagacacacagaagaaaagaagacaaagaacgggttaccatggggaagaaagtggccatcattggagctggtgtgagtggcttggcctccatcaggagctgtctggaagaggggctggagcccacctgctttgagaagagcaatgacattgggggcctgtggaaattttcaaggagccatgagtgaaggcgtacaagaggggtcttgccactgaaaaaaataagaaatgccagcatccaccagaagccagaagcggcaaggaatggattctctcctggagcctctgaaaatgaacatggaccatgcagaggagggcagggctagcatttacaaatcagtcttttccaactcttccaaagagatgatgtgtttcccagacttcccatttcccgatgacttccccaactttatgcacaacagcaagatccaggaatatatcattgcatttgccaaagaaaagaacctcctgaagtacatacaatttaagacatttgtatccagtgtaaataaacatcctgattttgcaactactggccagtgggatgttaccactgaaagggatggtaaaaaagaatcggctgtctttgatgctgtaatggtttgttccggacatcatgtgtatcccaacctaccaaaagagtcctttccaggactaaaccactttaaaggcaaatgcttccacagcagggactataaagaaccaggtgtattcaatggaaagcgtgtcctggtggttggcctggggaattcgggctgtgatattgccacagaactcagccgcacagcagaacaggtcatgatcagttccagaagtggctcctgggtgatgagccgggtctgggacaatggttatccttgggacatgctgctcgtcactcgatttggaaccttcctcaagaacaatttaccgacagccatctctgactggttgtacgtgaagcagatgaatgcaagattcaagcatgaaaactatggcttgatgcctttaaatggagtcctgaggaaagagcctgtatttaacgatgagctcccagcaagcattctgtgtggcattgtgtccgtaaagcctaacgtgaaggaattcacagagacctcggccatttttgaggatgggaccatatttgagggcattgactgtgtaatctttgcaacagggtatagttttgcctaccccttccttgatgagtctatcatcaaaagcagaaacaatgagatcattttatttaaaggagtatttcctcctctacttgagaagtcaaccatagcagtgattggctttgtccagtcccttggggctgccattcccacagttgacctccagtcccgctgggcagcacaagtaataaagggaacttgtactttgccttctatggaagacatgatgaatgatattaatgagaaaatggagaaaaagcgcaaatggtttggcaaaagcgagaccatacagacagattacattgtttatatggatgaactctcctccttcattggggcaaagcccaacatcccatggctgtttctcacagatcccaaattggccatggaagtttattttggcccttgtagtccctaccagtttaggctggtgggcccagggcagtggccaggagccagaaatgccatactgacccagtgggaccggtcgttgaaacccatgcagacacgagtggtcgggagacttcagaagccttgcttctttttccattggctgaagctctttgcaattcctattctgttaatcgctgttttccttgtgttgacctaatcatcattttctctaggatttctga

SEQ ID NO: 10960 - DNA, 2252 bp, Homo sapiens
  source 1..2252: mol_type = unassigned DNA
agaaaagacgaatggcttttgttttaaactgagggcacttttacaaaagtcatctttccatttatttttctttcagaaaaaagaatttgggttttgagcttttttaaaaaaaaaagacaaacactttccttgactttgagaaataatttaagtcaaagaatctgctctatgctaaccaagagatagagcacagcaaagatctgccagccccaggcctctacctagtggcctggaaattcaagtattcttattggtggaggccatttgtttctgattagaagctgtctaaacctcctactcctcaactcaaaggaaaacacagagcataccatggccaagaaagttgcagtgattggagctggtgtgagtggcctctcctccatcaaatgctgtgtggatgaggacctggagcccacctgctttgagagaagtgatgacattgggggattatggaagtttactgaatcttccaaagatgggatgaccagggtctataagtcattagtgacaaatgtctgtaaggaaatgtcatgttacagtgacttccctttccacgaagattatcctaatttcatgaaccatgaaaaattttgggactatctccaagaatttgctgagcactttgacctcctgaaatacattcagtttaagaccactgtgtgcagcataacgaagcgtccagacttctccgaaactggtcagtgggatgttgtcacagagacagagggcaagcaaaatagagctgtctttgatgctgttatggtttgcactggacatttcctgaatccccatttacctttggaagcctttcctggaattcataagtttaaaggtcagatcctgcatagtcaagagtacaagatcccagaaggctttcagggcaaacgcgtcttggtgattggtcttgggaacactggaggagacattgctgtggaactcagtcgaacggcagctcaggtacttctcagtactagaactggtacctgggttcttgggcgctcttcagattggggctatccttataatatgatggttacaagaagatgctgtagttttattgcacaagttctgccttcacgttttctaaactggattcaagaaaggaagttgaataagagatttaatcatgaggattatggattaagtattaccaaagggaaaaaagcaaaattcattgtgaatgatgagctgccaaactgtatcctctgtggggcaatcactatgaaaaccagcgtgattgaatttacagaaacctctgctgtctttgaagatgggacagtggaagaaaacattgatgttgtgatcttcactacaggatatacattttcttttccattttttgaagaacctcttaaaagcctctgtacaaagaagatatttctatacaagcaagtctttcccttaaacctagagagagcgacattagccatcatcggccttatcggccttaaaggatccatcttatcaggcacagagctccaagcacgatgggtcacaagagtattcaaaggactctgtaagatacctccatcccaaaaattgatgatggaggctactgaaaaggaacagctcattaaaaggggagtgtttaaagacaccagcaaagacaaatttgactacattgcctacatggatgatatcgctgcctgcataggcacaaagcccagcatcccacttctgttcctcaaggatcccagactagcttgggaagttttctttggaccatgtactccttatcagtaccgcctcatgggccctggaaaatgggatggagccagaaatgccatcctgacccagtgggacagaacattgaaacctttaaaaactcgaattgtccctgattcctccaagcctgcctccatgtcacattatttaaaagcctggggggcacctgtcctacttgcctctcttctacttatctgtaaatcttcacttttcttgaaattggtgagagataaactacaggacagaatgtccccttacctagtaagtctttggcgaggatgaacctgattgttacaagggttacacaaagtcatgctaattctatctccaagtatcttgtgcatccctcctctgctctccatcataactgctattagccaaattcaggcccagtcatctcctatctgaattattgtattatcttcttctttgttttcagtaccctctttcttgccaccctttccaatgcatcttctaccctgctacctcagtgattattctaaaataaatatatatgatatggttta

SEQ ID NO: 10961 - DNA, 2632 bp, Homo sapiens
  source 1..2632: mol_type = unassigned DNA
aaaaaccaggaagttaaaagtggatgcagaagcgagcacagacggggctaggggtttcagagaaagtaattgagagtgctggcaacagcagctgaaatatagagaagttgtaggattaactttttcgcccaaagcagcttcagcccacgttttattcccatcgagggagggagaatgggtgccgctgagtgggcgggggagtggtccctgaaaggaggtggagtgctacagcccctccccgttggctctcgctgtttgtccgttgttggtttatactaatttgacaacagccgcctgttgagtctcctccagatcgcagctgaaggatctgttgagcgcttcaggaaaggcggacaggcgacactaacaggtgaagatctcgggagaccatgactaagaaaagaattgctgtgattgggggaggagtgagcgggctctcttccatcaagtgctgcgtagaagaaggcttggaacctgtctgctttgaaaggactgatgacatcggagggctctggaggttccaggaaaatcctgaagaaggaagggccagtatttacaaatcagtgatcatcaatacttctaaagagatgatgtgcttcagtgactatccaatcccagatcattatcccaacttcatgcataatgcccaggtcctggagtatttcaggatgtatgccaaagaatttgaccttctaaagtatattcgatttaagaccactgtgtgcagtgtgaagaagcagcctgattttgccacttcaggccaatgggaagtggtcactgaatctgaagggaaaaaggagatgaatgtctttgatggagtcatggtttgcactggccatcacaccaatgctcatctacctctggaaagcttccctggaattgagaagttcaaagggcagtacttccacagtcgagactataagaacccagagggattcactggaaagagagtcattataattggcattgggaattctggaggggatctggctgtagagattagccaaacagccaagcaggttttcctcagcaccaggagaggggcttggatcctgaatcgtgtaggggactacggatatcctgctgatgtgttgttctcttctcgacttacacattttatatggaagatctgtggccaatcattagcaaacaaatatttggaaaaaaagataaaccaaaggtttgaccatgaaatgtttggcctgaagcctaaacacagagctctgagtcagcatccaaccttaaatgatgacctgccaaatcgtatcatttctggcttggtgaaagtgaaaggaaatgtgaaggaattcacggagacagctgccatatttgaggatggctccagggaggatgacattgatgctgttatctttgccacaggctatagctttgactttccgtttctggaagattccgtcaaagtggtcaaaaacaagatatccctgtataaaaaggtcttccctcctaacctggaaaggccaactcttgcaatcataggcttgattcagcccttaggagccattatgcccatttcagagctccaaggacgctgggccactcaggtatttaaaggtctaaagacattgccctcacagagtgaaatgatggcagaaatatctaaagctcaagaggaaattgacaaaaggtatgtggagagccaacgccataccattcagggagactacatagataccatggaagagcttgctgatttggtgggggtcaggcccaatctgctgtctctggccttcactgaccccaagctggcattacacttattactgggaccctgcactccaatccactatcgtgtacagggccctggaaagtgggatggggctcgaaaagctatcctcaccacagatgatcgcatcaggaagcctctgatgacaagagtagttgaaaggagtagttctatgacttcaacaatgacaataggcaagtttatgctagctcttgccttctttgctataattatagcttacttctagttgtcctattgtcactgccctgtttttcattgggaagcttatctacagatgccttcagaatctgacgagattgactctcagtttcatattgcccagaaatctactttaatgtctctttcgaaagcattaattcactttcctttttcctacaatgaaacctgttttccatttgtattaactcatctcccttccactcatgatccgtcactcttccttgtggtaatccctagactgggagctcaggtactcttttagtcatctttgtatgtctttagcagagttcttgacatgtggtaggtgcttaataaatgtttgttgtttatcaaattttatggtagggagagtaagtcagcatcggtataaaatcgcttactccacgtaactcttcttctgatagggtttgattttctattagaagctcaattttagttttttttcatattataactaaatatgtttcctgagagataagagaaataatgttcctacaatagttgtatgtatctaagataagacatatagatgcttaagacattttgtttcacttgctattcactagtgtacttgaaacatggtcatttttagcccttttccttaggaaccatgtctttattttctcaataaagaaattactttcaact

SEQ ID NO: 10962 - DNA, 2168 bp, Homo sapiens
  source 1..2168: mol_type = unassigned DNA
tgttgagcgcttcaggaaaggcggtgagatccggtaccgcagcagagcactctcagctctgggtcttgcaggcgcagggctcccccatgccagcagaaagatttcctctggtgaagaggaccgtcgaatctgtcctcctcaagacacctcttgtacagaatttattcgaatgccacggccaaggtcttccttgaaaaatgttaaccgatgtgtgctttttgtcttttgtcatcctttctttaggacaggcgacactaacaggtgaagatctcgggagaccatgactaagaaaagaattgctgtgattgggggaggagtgagcgggctctcttccatcaagtgctgcgtagaagaaggcttggaacctgtctgctttgaaaggactgatgacatcggagggctctggaggttccaggaaaatcctgaagaaggaagggccagtatttacaaatcagtgatcatcaatacttctaaagagatgatgtgcttcagtgactatccaatcccagatcattatcccaacttcatgcataatgcccaggtcctggagtatttcaggatgtatgccaaagaatttgaccttctaaagtatattcgatttaagaccactgtgtgcagtgtgaagaagcagcctgattttgccacttcaggccaatgggaagtggtcactgaatctgaagggaaaaaggagatgaatgtctttgatggagtcatggtttgcactggccatcacaccaatgctcatctacctctggaaagcttccctggaattgagaagttcaaagggcagtacttccacagtcgagactataagaacccagagggattcactggaaagagagtcattataattggcattgggaattctggaggggatctggctgtagagattagccaaacagccaagcaggttttcctcagcaccaggagaggggcttggatcctgaatcgtgtaggggactacggatatcctgctgatgtgttgttctcttctcgacttacacattttatatggaagatctgtggccaatcattagcaaacaaatatttggaaaaaaagataaaccaaaggtttgaccatgaaatgtttggcctgaagcctaaacacaggtctaaagacattgccctcacagagtgaaatgatggcagaaatatctaaagctcaagaggaaattgacaaaaggtatgtggagagccaacgccataccattcagggagactacatagataccatggaagagcttgctgatttggtgggggtcaggcccaatctgctgtctctggccttcactgaccccaagctggcattacacttattactgggaccctgcactccaatccactatcgtgtacagggccctggaaagtgggatggggctcgaaaagctatcctcaccacagatgatcgcatcaggaagcctctgatgacaagagtagttgaaaggagtagttctatgacttcaacaatgacaataggcaagtttatgctagctcttgccttctttgctataattatagcttacttctagttgtcctattgtcactgccctgtttttcattgggaagcttatctacagatgccttcagaatctgacgagattgactctcagtttcatattgcccagaaatctactttaatgtctctttcgaaagcattaattcactttcctttttcctacaatgaaacctgttttccatttgtattaactcatctcccttccactcatgatccgtcactcttccttgtggtaatccctagactgggagctcaggtactcttttagtcatctttgtatgtctttagcagagttcttgacatgtggtaggtgcttaataaatgtttgttgtttatcaaattttatggtagggagagtaagtcagcatcggtataaaatcgcttactccacgtaactcttcttctgatagggtttgattttctattagaagctcaattttagttttttttcatattataactaaatatgtttcctgagagataagagaaataatgttcctacaatagttgtatgtatctaagataagacatatagatgcttaagacattttgtttcacttgctattcactagtgtacttgaaacatggtcatttttagcccttttccttaggaaccatgtctttattttctcaataaagaaattactttcaa

SEQ ID NO: 10963 - DNA, 1696 bp, Homo sapiens
  source 1..1696: mol_type = unassigned DNA
aacagccgcctgttgagtctcctccagatcgcagctgaaggatctgttgagcgcttcaggaaaggcggtgagatccggacaggcgacactaacaggtgaagatctcgggagaccatgactaagaaaagaattgctgtgattgggggaggagtgagcgggctctcttccatcaagtgctgcgtagaagaaggcttggaacctgtctgctttgaaaggactgatgacatcggagggctctggaggttccaggaaaatcctgaagaaggaagggccagtatttacaaatcagtgatcatcaatacttctaaagagatgatgtgcttcagtgactatccaatcccagatcattatcccaacttcatgcataatgcccaggtcctggagtatttcaggatgtatgccaaagaatttgaccttctaaagtatattcgatttaagaccactgtgtgcagtgtgaagaagcagcctgattttgccacttcaggccaatgggaagtggtcactgaatctgaagggaaaaaggagatgaatgtctttgatggagtcatggtttgcactggccatcacaccaatgctcatctacctctggaaagcttccctggaattgagaagttcaaagggcagtacttccacagtcgagactataagaacccagagggattcactggaaagagagtcattataattggcattgggaattctggaggggatctggctgtagagattagccaaacagccaagcaggttttcctcagcaccaggagaggggcttggatcctgaatcgtgtaggggactacggatatcctgctgatgtgttgttctcttctcgacttacacattttatatggaagatctgtggccaatcattagcaaacaaatatttggaaaaaaagataaaccaaaggtttgaccatgaaatgtttggcctgaagcctaaacacagagctctgagtcagcatccaaccttaaatgatgacctgccaaatcgtatcatttctggcttggtgaaagtgaaaggaaatgtgaaggaattcacggagacagctgccatatttgaggatggctccagggaggatgacattgatgctgttatctttgccacaggctatagctttgactttccgtttctggaagattccgtcaaagtggtcaaaaacaagatatccctgtataaaaaggtcttccctcctaacctggaaaggccaactcttgcaatcataggcttgattcagcccttaggagccattatgcccatttcagagctccaaggacgctgggccactcaggtatttaaaggtctaaagacattgccctcacagagtgaaatgatggcagaaatatctaaagctcaagaggaaattgacaaaagtctaaccatgagaaaaacatcagacaaacccaagttgaagaatattctacaaatacctgactacctcaaaactgtcaagatcatcaacaaagaaagtctgagaaattgtcccggaataaaggggcctaaggagacataacatctaaatgtaatgtagtatcctggatggactcctgcaacagaaaaagaactttaagtaaaaattaagggaatattaataaagtatgcattttggttaataatgtatcaatattggtttattagttgtgacaaatgtaccagaggaatgtaaaatgtcaacaataaaggaaattggatgtggggta

SEQ ID NO: 10964 - DNA, 671 bp, Homo sapiens
  source 1..671: mol_type = unassigned DNA
aggaagttaaaagtggatgcagaagcgagcacagacggggctaggggtttcagagaaagacaggcgacactaacaggtgaagatctcgggagaccatgactaagaaaagaattgctgtgattgggggaggagtgagcgggctctcttccatcaagtgctgcgtagaagaaggcttggaacctgtctgctttgaaaggactgatgacatcggagggctctggaggttccaggaaaatcctgaagaaggaagggccagtatttacaaatcagtgatcatcaatacttctaaagagatgatgtgcttcagtgactatccaatcccagatcattatcccaacttcatgcataatgcccaggtcctggagtatttcaggatgtatgccaaagaatttgaccttctaaagtatattcgatttaagaccactgtgtgcagtgtgaagaagcagcctgattttgccacttcaggccaatgggaagtggtcactgaatctgaagggaaaaaggagatgaatgtctttgatggagtcatggtttgcactggccatcacaccaatgctcatctacctctggaaagcttccctggaattgagaagttcaaagggcagtacttccacagtcgagactataagaacccagagggattcactggaaagagagtcattataattggc

SEQ ID NO: 10965 - DNA, 618 bp, Homo sapiens
  source 1..618: mol_type = unassigned DNA
ctttttcggggagctcggctcttaagacgcgagtctgccgacgctcccggccgaataaaaacctcttccttttttaattcggtgtctgaggagttttgtctgtggctcatcctgctacaatctgtttgaacagatcacctgaaaggacaggcgacactaacaggtgaagatctcgggagaccatgactaagaaaagaattgctgtgattgggggaggagtgagcgggctctcttccatcaagtgctgcgtagaagaaggcttggaacctgtctgctttgaaaggactgatgacatcggagggctctggaggttccaggaaaatcctgaagaaggaagggccagtatttacaaatcagtgatcatcaatacttctaaagagatgatgtgcttcagtgactatccaatcccagatcattatcccaacttcatgcataatgcccaggtcctggagtatttcaggatgtatgccaaagaatttgaccttctaaagtatattcgatttaagaccactgtgtgcagtgtgaagaagcagcctgattttgccacttcaggccaatgggaagtggtcactgaatctgaagggaaaaaggagatgaatgtctttgatggagtcatgg

SEQ ID NO: 10966 - DNA, 4164 bp, Homo sapiens
  source 1..4164: mol_type = unassigned DNA
cctcgccccggcgctccctagcccggcgcggcccggcagcgagagcggcgccatggaggccaccggggtgctgccgttcgtgcgtggcgtggacctcagcggcaacgacttcaagggcggctacttccctgagaatgtcaaggccatgaccagcctgcggtggctgaagctgaaccgcactggcctctgctacctgcccgaggagctggccgccctgcagaagctggaacacttgtctgtgagccacaacaacctgaccacgcttcatggggagctgtccagcctgccatcgctgcgcgccatcgtggcccgagccaacagtctgaagaattccggagtccccgatgacatcttcaagctagatgatctctcagtcctggacttgagccacaaccagctgacagagtgcccgcgggagctggagaacgccaagaacatgctggtgctgaacctcagccacaacagcatcgacaccatccccaaccagctcttcatcaacctcactgacctactatacctggacctcagcgagaaccgcctggagagcctgcccccgcagatgcgccgcctggtgcacctgcagacgctcgtgctcaatggaaaccccctgctgcatgcacagctccggcagctcccagcgatgacggccctgcagaccctgcacctgcggagcacccagcgcacccagagcaacctgcccaccagcctggagggtctgagcaacctcgcagacgtggatctgtcctgcaatgacctgacacgggtgcccgagtgtctgtacaccctccccagcctgcgccgcctcaacctcagcagcaaccagatcacggagctgtccctgtgcatagaccagtgggtgcacgtggaaactctgaacctgtcccgaaatcagctcacctcactgccctcagccatttgcaagctgagcaagctgaagaagctgtacctgaattccaacaagctggactttgacgggctgccctcaggcattggcaagctcaccaacctggaagagttcatggctgccaacaacaacctggagctggtccctgaaagtctctgcaggtgcccaaagctgaggaaacttgtcctgaacaagaaccacctggtgaccctcccagaagccatccatttcctgacggagatcgaggtcctggatgtgcgggagaaccccaacctggtcatgccgcccaagcccgcagaccgtgccgctgagtggtacaacatcgacttctcgctgcagaaccagctgcggctagcgggtgcctctcctgctaccgtggctgcagctgcagctgcagggagtgggcccaaggaccctatggctcgcaagatgcgactgcggaggcgcaaggattcagcccaggatgaccaggccaagcaggtgctgaagggcatgtcagatgttgcccaggagaagaacaaaaagcaggaggagagcgcagatgcccgggcccccagcgggaaggtgcggcgttgggaccagggcctggagaagccccgccttgactactccgagttcttcacggaggacgtgggccagctgcccggactgaccatctggcagatagagaacttcgtgcctgtgctggtggaggaagccttccacggcaagttctacgaggctgactgctacattgtgctcaagacctttctggatgacagcggctccctcaactgggagatctactactggattggcggggaggccacactcgacaagaaagcttgctctgccatccacgctgtcaacttgcgcaactacctgggtgctgagtgccgcactgtccgggaggagatgggcgatgagagcgaggagttcctgcaggtgtttgacaacgacatctcctacattgagggtggaacagccagtggcttctacactgtggaagacacacactatgtcaccaggatgtatcgtgtgtatgggaaaaagaacatcaagttggagcctgtgcccctcaaggggacctctctggacccaaggtttgttttcctgctggaccgagggctagacatctacgtatggcggggggcccaggccacactgagcagcaccaccaaggccaggctctttgcagagaaaattaacaagaatgagcggaaagggaaggctgagatcacactgctggtgcagggccaggagctcccagagttctgggaggcactgggtggggagccctctgagatcaagaagcacgtgcctgaagacttctggccgccgcagcccaagctgtacaaggtgggcctgggcttgggctacctggagctgccacagatcaactacaagctctccgtggaacataagcagcgtcccaaggtggagctgatgccaagaatgcggctgctgcagagtctgctggacacgcgctgcgtgtacattctggactgttggtccgacgtgttcatctggctcggccgcaagtccccgcgcctggtgcgcgctgccgccctcaagctgggtcaggagctgtgcgggatgctgcaccggccacgccatgccacggtcagccgcagcctcgagggcaccgaggcgcaggtgttcaaggccaagttcaagaattgggacgatgtgttgacggtggactacacacgcaatgcggaggccgtgctgcagagcccgggtctctccgggaaggtgaaacgcgacgccgagaagaaagaccagatgaaggctgacctcactgcgcttttcctgccgcggcagccgcccatgtcgctggccgaggcggagcagctgatggaggagtggaacgaagacctagacggcatggagggtttcgtgctggagggcaagaagtttgcgcggctgccggaagaggagtttggccacttctacacgcaggactgctacgtcttcctctgcaggtactgggtgcctgtggagtacgaggaggaggaaaagaaggaagacaaggaggagaaggccgagggcaaagaaggcgaggaagcaaccgctgaggcagaggagaagcagccagaggaggacttccagtgcatcgtgtacttctggcagggccgtgaagcctccaatatgggctggctcaccttcaccttcagcctgcaaaagaagttcgagagcctcttccctgggaagctggaggtggtacgcatgacgcagcagcaggagaaccccaagttcctgtcccatttcaagaggaagttcatcatccaccggggcaagaggaaggcggtccagggcgcccaacagcccagcctctaccagatccgcaccaacggcagcgccctctgcacccggtgcatccagatcaacaccgactccagcctcctcaactccgagttctgcttcatcctcaaggttccctttgagagtgaggacaaccagggcatcgtgtatgcctgggtgggccgggcatcagaccctgacgaagccaagttggcagaagacatcctgaacaccatgtttgacacctcctacagcaagcaggttatcaacgaaggtgaggagcctgagaacttcttctgggtgggcattggggcacagaagccctatgatgacgatgccgagtacatgaaacacacacgtctcttccggtgctccaacgagaagggctactttgcagtgactgagaaatgctccgacttttgccaagatgacctggcagatgatgacatcatgttgctagacaatggccaagaggtctacatgtgggtggggacccagactagccaggtggagatcaagctgagcctgaaggcctgccaggtatatatccagcacatgcggtccaaggaacatgagcggccgcgccggctgcgcctggtccgcaagggcaatgagcagcacgcctttacccgctgcttccacgcctggagcgccttctgcaaggccctggcctaagacaggctggcacagccccaggcttggtgaggaagaggaaggggcctcatccactgtctgctagcaaagaatgtactcaggtgacaccacctgctccagccacgtccagtgccacagtccccagtagcctcaagcagcaccaatggggatgaccctgacaggtgccctcaggggtctgggaaatccaactctctccacagtgtgagtgcacgtgtgaagccccctcactcttccgctagggataaagcagatgtggatgccctttaagagatattaaatgcttttattttcaatattaaaaa

SEQ ID NO: 10967 - DNA, 3975 bp, Homo sapiens
  source 1..3975: mol_type = unassigned DNA
agcccggcgcggcccggcagcgagagcggcgccatggaggccaccggggtgctgccgttcgtgcgtggcgtggacctcagcggcaacgacttcaagggcggctacttccctgagaatgtcaaggccatgaccagcctgcggtggctgaagctgaaccgcactggcctctgctacctgcccgaggagctggccgccctgcagaagctggaacacttgtctgtgagccacaacaacctgaccacgcttcatggggagctgtccagcctgccatcgctgcgcgccatcgtggcccgagccaacagtctgaagaattccggagtccccgatgacatcttcaagctagatgatctctcagtcctggacttgagccacaaccagctgacagagtgcccgcgggagctggagaacgccaagaacatgctggtgctgaacctcagccacaacaggcagctcccagcgatgacggccctgcagaccctgcacctgcggagcacccagcgcacccagagcaacctgcccaccagcctggagggtctgagcaacctcgcagacgtggatctgtcctgcaatgacctgacacgggtgcccgagtgtctgtacaccctccccagcctgcgccgcctcaacctcagcagcaaccagatcacggagctgtccctgtgcatagaccagtgggtgcacgtggaaactctgaacctgtcccgaaatcagctcacctcactgccctcagccatttgcaagctgagcaagctgaagaagctgtacctgaattccaacaagctggactttgacgggctgccctcaggcattggcaagctcaccaacctggaagagttcatggctgccaacaacaacctggagctggtccctgaaagtctctgcaggtgcccaaagctgaggaaacttgtcctgaacaagaaccacctggtgaccctcccagaagccatccatttcctgacggagatcgaggtcctggatgtgcgggagaaccccaacctggtcatgccgcccaagcccgcagaccgtgccgctgagtggtacaacatcgacttctcgctgcagaaccagctgcggctagcgggtgcctctcctgctaccgtggctgcagctgcagctgggagtgggcccaaggaccctatggctcgcaagatgcgactgcggaggcgcaaggattcagcccaggatgaccaggccaagcaggtgctgaagggcatgtcagatgttgcccaggagaagaacaaaaagcaggaggagagcgcagatgcccgggcccccagcgggaaggtgcggcgttgggaccagggcctggagaagccccgccttgactactccgagttcttcacggaggacgtgggccagctgcccggactgaccatctggcagatagagaacttcgtgcctgtgctggtggaggaagccttccacggcaagttctacgaggctgactgctacattgtgctcaagacctttctggatgacagcggctccctcaactgggagatctactactggattggcggggaggccacactcgacaagaaagcttgctctgccatccacgctgtcaacttgcgcaactacctgggtgctgagtgccgcactgtccgggaggagatgggcgatgagagcgaggagttcctgcaggtgtttgacaacgacatctcctacattgagggtggaacagccagtggcttctacactgtggaagacacacactatgtcaccaggatgtatcgtgtgtatgggaaaaagaacatcaagttggagcctgtgcccctcaaggggacctctctggacccaaggtttgttttcctgctggaccgagggctagacatctacgtatggcggggggcccaggccacactgagcagcaccaccaaggccaggctctttgcagagaaaattaacaagaatgagcggaaagggaaggctgagatcacactgctggtgcagggccaggagctcccagagttctgggaggcactgggtggggagccctctgagatcaagaagcacgtgcctgaagacttctggccgccgcagcccaagctgtacaaggtgggcctgggcttgggctacctggagctgccacagatcaactacaagctctccgtggaacataagcagcgtcccaaggtggagctgatgccaagaatgcggctgctgcagagtctgctggacacgcgctgcgtgtacattctggactgttggtccgacgtgttcatctggctcggccgcaagtccccgcgcctggtgcgcgctgccgccctcaagctgggtcaggagctgtgcgggatgctgcaccggccacgccatgccacggtcagccgcagcctcgagggcaccgaggcgcaggtgttcaaggccaagttcaagaattgggacgatgtgttgacggtggactacacacgcaatgcggaggccgtgctgcagagcccgggtctctccgggaaggtgaaacgcgacgccgagaagaaagaccagatgaaggctgacctcactgcgcttttcctgccgcggcagccgcccatgtcgctggccgaggcggagcagctgatggaggagtggaacgaagacctagacggcatggagggtttcgtgctggagggcaagaagtttgcgcggctgccggaagaggagtttggccacttctacacgcaggactgctacgtcttcctctgcaggtactgggtgcctgtggagtacgaggaggaggaaaagaaggaagacaaggaggagaaggccgagggcaaagaaggcgaggaagcaaccgctgaggcagaggagaagcagccagaggaggacttccagtgcatcgtgtacttctggcagggccgtgaagcctccaatatgggctggctcaccttcaccttcagcctgcaaaagaagttcgagagcctcttccctgggaagctggaggtggtacgcatgacgcagcagcaggagaaccccaagttcctgtcccatttcaagaggaagttcatcatccaccggggcaagaggaaggcggtccagggcgcccaacagcccagcctctaccagatccgcaccaacggcagcgccctctgcacccggtgcatccagatcaacaccgactccagcctcctcaactccgagttctgcttcatcctcaaggttccctttgagagtgaggacaaccagggcatcgtgtatgcctgggtgggccgggcatcagaccctgacgaagccaagttggcagaagacatcctgaacaccatgtttgacacctcctacagcaagcaggttatcaacgaaggtgaggagcctgagaacttcttctgggtgggcattggggcacagaagccctatgatgacgatgccgagtacatgaaacacacacgtctcttccggtgctccaacgagaagggctactttgcagtgactgagaaatgctccgacttttgccaagatgacctggcagatgatgacatcatgttgctagacaatggccaagaggtctacatgtgggtggggacccagactagccaggtggagatcaagctgagcctgaaggcctgccaggtatatatccagcacatgcggtccaaggaacatgagcggccgcgccggctgcgcctggtccgcaagggcaatgagcagcacgcctttacccgctgcttccacgcctggagcgccttctgcaaggccctggcctaagacaggctggcacagccccaggcttggtgaggaagaggaaggggcctcatccactgtctgctagcaaagaatgtactcaggtgacaccacctgctccagccacgtccagtgccacagtccccagtagcctcaagcagcaccaatggggatgaccctgacaggtgccctcaggggtctgggaaatccaactctctccacagtgtgagtgcacgtgtgaagccccctcactcttccgctagggataaagcagatgtggatgccctttaagagatattaaatgcttttattttcaatatt

SEQ ID NO: 10968 - DNA, 3795 bp, Homo sapiens
  source 1..3795: mol_type = unassigned DNA
ctcgccccggcgctccctagcccggcgcggcccggcagcgagagcggcgccatggaggccaccggggtgctgccgttcgtgcgtggcgtggacctcagcggcaacgacttcaagggcggctacttccctgagaatgtcaaggccatgaccagcctgcggtggctgaagctgaaccgcactggcctctgctacctgcccgaggagctggccgccctgcagaagctggaacacttgtctgtgagccacaacaacctgaccacgcttcatggggagctgtccagcctgccatcgctgcgcgccatcgtggcccgagccaacagtctgaagaattccggagtccccgatgacatcttcaagctagatgatctctcagtcctggacttgagccacaaccagctgacagagtgcccgcgggagctggagaacgccaagaacatgctggtgctgaacctcagccacaacagcatcgacaccatccccaaccagctcttcatcaacctcactgacctactatacctggacctcagcgagaaccgcctggagagcctgcccccgcagatgcgccgcctggtgcacctgcagacgctcgtgctcaatggaaaccccctgctgcatgcacagctccggcagctcccagcgatgacggccctgcagaccctgcacctgcggagcacccagcgcacccagagcaacctgcccaccagcctggagggtctgagcaacctcgcagacgtggatctgtcctgcaatgacctgacacgggtgcccgagtgtctgtacaccctccccagcctgcgccgcctcaacctcagcagcaaccagatcacggagctgtccctgtgcatagaccagtgggtgcacgtggaaactctgaacctgtcccgaaatcagctcacctcactgccctcagccatttgcaagctgagcaagctgaagaagctgtacctgaattccaacaagctggactttgacgggctgccctcaggcattggcaagctcaccaacctggaagagttcatggctgccaacaacaacctggagctggtccctgaaagtctctgcaggtgcccaaagctgaggaaacttgtcctgaacaagaaccacctggtgaccctcccagaagccatccatttcctgacggagatcgaggtcctggatgtgcgggagaaccccaacctggtcatgccgcccaagcccgcagaccgtgccgctgagtggtacaacatcgacttctcgctgcagaaccagctgcggctagcgggtgcctctcctgctaccgtggctgcagctgcagctgcagggagtgggcccaaggaccctatggctcgcaagatgcgactgcggaggcgcaaggattcagcccaggatgaccaggccaagcaggtgctgaagggcatgtcagatgttgcccaggagaagaacaaaaagcaggaggagagcgcagatgcccgggcccccagcgggaaggtgcggcgttgggaccagggcctggagaagccccgccttgactactccgagttcttcacggaggacgtgggccagctgcccggactgaccatctggcagatagagaacttcgtgcctgtgctggtggaggaagccttccacggcaagttctacgaggctgactgctacattgtgctcaagacctttctggatgacagcggctccctcaactgggagatctactactggattggcggggaggccacactcgacaagaaagcttgctctgccatccacgctgtcaacttgcgcaactacctgggtgctgagtgccgcactgtccgggaggagatgggcgatgagagcgaggagttcctgcaggtgtttgacaacgacatctcctacattgagggtggaacagccagtggcttctacactgtggaagacacacactatgtcaccaggatgtatcgtgtgtatgggaaaaagaacatcaagttggagcctgtgcccctcaaggggacctctctggacccaaggtttgttttcctgctggaccgagggctagacatctacgtatggcggggggcccaggccacactgagcagcaccaccaaggccaggctctttgcagagaaaattaacaagaatgagcggaaagggaaggctgagatcacactgctggtgcagggccaggagctcccagagttctgggaggcactgggtggggagccctctgagatcaagaagaattgggacgatgtgttgacggtggactacacacgcaatgcggaggccgtgctgcagagcccgggtctctccgggaaggtgaaacgcgacgccgagaagaaagaccagatgaaggctgacctcactgcgcttttcctgccgcggcagccgcccatgtcgctggccgaggcggagcagctgatggaggagtggaacgaagacctagacggcatggagggtttcgtgctggagggcaagaagtttgcgcggctgccggaagaggagtttggccacttctacacgcaggactgctacgtcttcctctgcaggtactgggtgcctgtggagtacgaggaggaggaaaagaaggaagacaaggaggagaaggccgagggcaaagaaggcgaggaagcaaccgctgaggcagaggagaagcagccagaggaggacttccagtgcatcgtgtacttctggcagggccgtgaagcctccaatatgggctggctcaccttcaccttcagcctgcaaaagaagttcgagagcctcttccctgggaagctggaggtggtacgcatgacgcagcagcaggagaaccccaagttcctgtcccatttcaagaggaagttcatcatccaccggggcaagaggaaggcggtccagggcgcccaacagcccagcctctaccagatccgcaccaacggcagcgccctctgcacccggtgcatccagatcaacaccgactccagcctcctcaactccgagttctgcttcatcctcaaggttccctttgagagtgaggacaaccagggcatcgtgtatgcctgggtgggccgggcatcagaccctgacgaagccaagttggcagaagacatcctgaacaccatgtttgacacctcctacagcaagcaggttatcaacgaaggtgaggagcctgagaacttcttctgggtgggcattggggcacagaagccctatgatgacgatgccgagtacatgaaacacacacgtctcttccggtgctccaacgagaagggctactttgcagtgactgagaaatgctccgacttttgccaagatgacctggcagatgatgacatcatgttgctagacaatggccaagaggtctacatgtgggtggggacccagactagccaggtggagatcaagctgagcctgaaggcctgccaggtatatatccagcacatgcggtccaaggaacatgagcggccgcgccggctgcgcctggtccgcaagggcaatgagcagcacgcctttacccgctgcttccacgcctggagcgccttctgcaaggccctggcctaagacaggctggcacagccccaggcttggtgaggaagaggaaggggcctcatccactgtctgctagcaaagaatgtactcaggtgacaccacctgctccagccacgtccagtgccacagtccccagtagcctcaagcagcaccaatggggatgaccctgacaggtgccctcaggggtctgggaaatccaactctctccacagtgtgagtgcacgtgtgaagccccctcactcttccgctagggataaagcagatgtggatgccctttaagagatattaaatgcttttattttcaatatt

SEQ ID NO: 10969 - DNA, 1912 bp, Homo sapiens
  source 1..1912: mol_type = unassigned DNA
ggcggggcgaagtgggggtgcttagtccgttgcggggggcggggtcgcgtctgccgcagcaacggggtgcggcagggtggggaacgcgggagcggggccagctcccaggaaagctggtctgcgagcggcccctgcccggctcccaggtccctgcgcgaccccgcccttcccgagaccccagccgggctgccgcccgcgtcccggaagctccagcctgaaccatgtttttcacttgtggcccaaatgaggccatggtggtctccgggttctgccgaagccccccagtcatggtggctggagggcgtgtctttgtcctgccctgcatccaacagatccagaggatctctctcaacacactgaccctcaatgtcaagagtgaaaaggtttacactcgccatggggtccccatctcagtcactggcattgcccaggtaaaaatccaggggcagaacaaggagatgttggcggccgcctgtcagatgttcctggggaagacggaggctgagattgcccacattgccctggagacgttagagggccaccagagggccatcatggcccacatgactgtggaggagatctataaggacaggcagaaattctcagaacaggttttcaaagtggcctcctcagacctggtcaacatgggcatcagtgtggttagctacactctgaaggacattcacgatgaccaggactatttgcactctttggggaaggctcgaacagctcaagtccaaaaagatgcacggattggagaagcagaggccaagagagatgctgggatccgggaagctaaagccaagcaggaaaaggtgtctgctcagtacctgagtgagatcgagatggccaaggcacagagagattacgaactgaagaaggccgcctatgacatcgaggtcaacacccgccgagcacaggctgacctggcctatcagcttcaggtggccaagactaagcagcagattgaggagcagcgggtgcaggtgcaggtggtggagcgggcccagcaggtggcagtgcaggagcaggagatcgcccggcgggagaaggagctggaggcccgggtgcggaagccagcggaagcggagcgctacaagctggagcgcctagccgaggcagagaagtcccaactaattatgcaggcggaggcagaagccgcgtctgtgcggatgcgtggggaagctgaggcctttgccataggggcccgagcccgagccgaggctgagcagatggccaagaaggcagaagccttccagctgtaccaagaggctgctcagctggacatgctgctagagaagctgccccaggtggcagaggagatcagtggtcccttgacttcagccaataagatcacactggtgtccagcggcagtgggaccatgggggcagccaaagtgactggggaagtactggacattctaactcgcctgccagagagtgtggaaagactcacaggcgtgagcatctcccaggtgaatcacaagcctttgagaacagcctgagccttcagccctcacagatgcccagcctcatagctgaagttgcctgaatgatcctcctgttgcatgtaacccactggcctccctgagcatgtccattgacagtgaggtcccacccctcatctctccttgccaaatagtttgtgccttgtcttgaagggggttgctccccttgccaacctcacactgctatgattgccaactccagcggtcccatgtcagccttctgatgatcccactccaccccacctcaacttatttaacttcctaattaaatcagactgtttgagcctgttgtctagaatattttcctgaccaagactgagggatgggctggaggttttcaactttgctacccaaataaattgctgtaagtaagtactaataaaacagaagcaactggaaattaa

SEQ ID NO: 10970 - DNA, 1912 bp, Homo sapiens; identical to SEQ ID NO: 10969
  source 1..1912: mol_type = unassigned DNA

SEQ ID NO: 10971 - DNA, 1912 bp, Homo sapiens; identical to SEQ ID NO: 10969
  source 1..1912: mol_type = unassigned DNA

SEQ ID NO: 10972 - DNA, 457 bp, Homo sapiens
  source 1..457: mol_type = unassigned DNA
agggaaaagccttagcggacccatgggtgtagaagggacgggccgtggcggatgcagactgggagggcctgacgggaaagggaaaggatgggcccctgtggacgccacagcgcgccttccccatccgcaaaggctttccctccctctcctccagctccagcctgaaccatgtttttcacttgtggcccaaatgaggccatggtggtctccggactatttgcactctttggggaaggctcgaacagctcaagtccaaaaagatgcacggattggagaagcagaggccaagagagatgctgggatccgggaagctaaagccaagcaggaaaaggtgtctgctcagtacctgagtgagatcgagatggccaaggcacagagagattacgaactgaagaaggccgcctatgacatcgaggtcaacacccgccgagcacaggctgacctggcctatcagctt

SEQ ID NO: 10973 - DNA, 592 bp, Homo sapiens
  source 1..592: mol_type = unassigned DNA
ctccagcctgaaccatgtttttcacttgtggcccaaatgaggccatggtggtctccgggttctgccgaagccccccagtcatggtggctggagggcgtgtctttgtcctgccctgcatccaacagatccagaggatctctctcaacacactgaccctcaatgtcaagagtgaaaaggtaaaaatccaggggcagaacaaggagatgttggcggccgcctgtcagatgttcctggggaagacggaggctgagattgcccacattgccctggagacgttagagggccaccagagggccatcatggcccacatgactgtggaggagatctataaggacaggcagaaattctcagaacaggttttcaaagtggcctcctcagacctggtcaacatgggcatcagtgtggttagctacactctgaaggacattcacgatgaccaggactatttgcactctttggggaaggctcgaacagctcaagtccaaaaagatgcacggattggagaagcagaggccaagagagatgctgggatccgggaagctaaagccaagcaggaaaaggtgtctgctcagtacctgagtgagatcgagat

SEQ ID NO: 10974 - DNA, 592 bp, Homo sapiens; identical to SEQ ID NO: 10973
  source 1..592: mol_type = unassigned DNA

SEQ ID NO: 10975 - DNA, 856 bp, Homo sapiens
  source 1..856: mol_type = unassigned DNA
gatgcagactgggagggcctgacgggaaagggaaaggatgggcccctgtggacgccacagcgcgccttccccatccgcaaaggctttccctccctctcctccagctccagcctgaaccatgtttttcacttgtggcccaaatgaggccatggtggtctccggtaaaaatccaggggcagaacaaggagatgttggcggccgcctgtcagatgttcctggggaagacggaggctgagattgcccacattgccctggagacgttagagggccaccagagggccatcatggcccacatgactgtggaggagatctataaggacaggcagaaattctcagaacaggttttcaaagtggcctcctcagacctggtcaacatgggcatcagtgtggttagctacactctgaaggacattcacgatgaccaggactatttgcactctttggggaaggctcgaacagctcaagtccaaaaagatgcacggattggagaagcagaggccaagagagatgctgggatccgggaagctaaagccaagcaggaaaaggtgtctgctcagtacctgagtgagatcgagatggccaaggcacagagagattacgaactgaagaaggccgcctatgacatcgaggtcaacacccgccgagcacaggctgacctggcctatcagcttcaggtggccaagactaagcagcagattgaggagcagcgggtgcaggtgcaggtggtggagcgggcccagcaggtggcagtgcaggagcaggagatcgcccggcgggagaaggagctggaggcccgggtgcggaagccagcggaagcggagcgctacaagctggagcgcctagccgaggcagagaa

SEQ ID NO: 10976 - DNA, 592 bp, Homo sapiens; identical to SEQ ID NO: 10973
  source 1..592: mol_type = unassigned DNA

SEQ ID NO: 10977 - DNA, 592 bp, Homo sapiens; identical to SEQ ID NO: 10973
  source 1..592: mol_type = unassigned DNA

SEQ ID NO: 10978 - DNA, 457 bp, Homo sapiens; identical to SEQ ID NO: 10972
  source 1..457: mol_type = unassigned DNA

SEQ ID NO: 10979 - DNA, 678 bp, Homo sapiens
  source 1..678: mol_type = unassigned DNA
ggccaagaaggcagaagccttccagctgtaccaagaggctgctcagctggacatgctgctagagaagctgccccaggtggcagaggagatcagtggtcccttgacttcagccaataagatcacactggtgtccagcggcagtgggaccatgggggcagccaaagtgactggggaagtactggacattctaactcgcctgccagagagtgtggaaagactcacaggcgtgagcatctcccaggtgaatcacaagcctttgagaacagcctgagccttcagccctcacagatgcccagcctcatagctgaagttgcctgaatgatcctcctgttgcatgtaacccactggcctccctgagcatgtccattgacagtgaggtcccacccctcatctctccttgccaaatagtttgtgccttgtcttgaagggggttgctccccttgccaacctcacactgctatgattgccaactccagcggtcccatgtcagccttctgatgatcccactccaccccacctcaacttatttaacttcctaattaaatcagactgtttgagcctgttgtctagaatattttcctgaccaagactgagggatgggctggaggttttcaactttgctacccaaataaattgctgtaagtaagtactaataaaacagaagcaactggaaattaa

SEQ ID NO: 10980 - DNA, 792 bp, Homo sapiens
  source 1..792: mol_type = unassigned DNA
gaaaggatgggcccctgtggacgccacagcgcgccttccccatccgcaaaggctttccctccctctcctccagctccagcctgaaccatgtttttcacttgtggcccaaatgaggccatggtggtctccgggttctgccgaagccccccagtcatggtggctggagggcgtgtctttgtcctgccctgcatccaacagatccagaggatctctctcaacacactgaccctcaatgtcaagagtgaaaaggtttacactcgccatggggtccccatctcagtcactggcattgcccaggtaaaaatccaggggcagaacaaggagatgttggcggccgcctgtcagatgttcctggggaagacggaggctgagattgcccacattgccctggagacgttagagggccaccagagggccatcatggcccacatgactgtggaggagatctataaggacaggcagaaattctcagaacaggttttcaaagtggcctcctcagacctggtcaacatgggcatcagtgtggttagctacactctgaaggacattcacgatgaccaggactatttgcactctttggggaaggctcgaacagctcaagtccaaaaagatgcacggattggagaagcagaggccaagagagatgctgggatccgggaagctaaagccaagcaggaaaaggtgtctgctcagtacctgagtgagatcgagatggccaaggcacagagagattacgaactgaagaaggccgcctatgacatcgaggtcaacacccgccgagcacaggctgac

SEQ ID NO: 10981 - DNA, 856 bp, Homo sapiens; identical to SEQ ID NO: 10975
  source 1..856: mol_type = unassigned DNA

SEQ ID NO: 10982 - DNA, 416 bp, Homo sapiens
  source 1..416: mol_type = unassigned DNA
gtaaaaatccaggggcagaacaaggagatgttggcggccgcctgtcagatgttcctggggaagacggaggctgagattgcccacattgccctggagacgttagagggccaccagagggccatcatggcccacatgactgtggaggagatctataaggacaggcagaaattctcagaacaggttttcaaagtggcctcctcagacctggtcaacatgggcatcagtgtggttagctacactctgaaggacattcacgatgaccaggactatttgcactctttggggaaggctcgaacagctcaagtccaaaaagatgcacggattggagaagcagaggccaagagagatgctgggatccgggaagctaaagccaagcaggaaaaggtgtctgctcagtacctgagtgagatcgagat

SEQ ID NO: 10983 - DNA, 629 bp, Homo sapiens
  source 1..629: mol_type = unassigned DNA
gagtgggggaggggagatggagcctggggctgccgagaagcagggagagaggggaaagctccagcctgaaccatgtttttcacttgtggcccaaatgaggccatggtggtctccgggttctgccgaagccccccagtcatggtggctggagggcgtgtctttgtcctgccctgcatccaacagatccagaggatctctctcaacacactgaccctcaatgtcaagagtgaaaaggtttacactcgccatggggtccccatctcagtcactggcattgcccaggtaaaaatccaggggcagaacaaggagatgttggcggccgcctgtcagatgttcctggggaagacggaggctgagattgcccacattgccctggagacgttagagggccaccagagggccatcatggcccacatgactgtggaggagatctataaggacaggcagaaattctcagaacaggttttcaaagtggcctcctcagacctggtcaacatgggcatcagtgtggttagctacactctgaaggacattcacgatgaccaggactatttgcactctttggggaaggctcgaacagctcaagtccaaaaagatgcacggattggagaagcagaggccaagagaga

SEQ ID NO: 10984 - DNA, 367 bp, Homo sapiens
  source 1..367: mol_type = unassigned DNA
agggaaaagccttagcggacccatgggtgtagaagggacgggccgtggcggatgcagactgggagggcctgacgggaaagggaaaggatgggcccctgtggacgccacagcgcgccttccccatccgcaaaggctttccctccctctcctccagctccagcctgaaccatgtttttcacttgtggcccaaatgaggccatggtggtctccggactatttgcactctttggggaaggctcgaacagctcaagtccaaaaagatgcacggattggagaagcagaggccaagagagatgctgggatccgggaagctaaagccaagcaggaaaaggtgtctgctcagtacctgagtgagatcgagatggcc

SEQ ID NO: 10985 - DNA, 968 bp, Homo sapiens
  source 1..968: mol_type = unassigned DNA
gtggccaagactaagcagcagattgaggagcagcgggtgcaggtgcaggtggtggagcgggcccagcaggtggcagtgcaggagcaggagatcgcccggcgggagaaggagctggaggcccgggtgcggaagccagcggaagcggagcgctacaagctggagcgcctagccgaggcagagaagtcccaactaattatgcaggcggaggcagaagccgcgtctgtgcggatgcgtggggaagctgaggcctttgccataggggcccgagcccgagccgaggctgagcagatggccaagaaggcagaagccttccagctgtaccaagaggctgctcagctggacatgctgctagagaagctgccccaggtggcagaggagatcagtggtcccttgacttcagccaataagatcacactggtgtccagcggcagtgggaccatgggggcagccaaagtgactggggaagtactggacattctaactcgcctgccagagagtgtggaaagactcacaggcgtgagcatctcccaggtgaatcacaagcctttgagaacagcctgagccttcagccctcacagatgcccagcctcatagctgaagttgcctgaatgatcctcctgttgcatgtaacccactggcctccctgagcatgtccattgacagtgaggtcccacccctcatctctccttgccaaatagtttgtgccttgtcttgaagggggttgctccccttgccaacctcacactgctatgattgccaactccagcggtcccatgtcagccttctgatgatcccactccaccccacctcaacttatttaacttcctaattaaatcagactgtttgagcctgttgtctagaatattttcctgaccaagactgagggatgggctggaggttttcaactttgctacccaaataaattgctgtaagtaagtactaataaaacagaagcaactggaaattaa

SEQ ID NO: 10986 - DNA, 457 bp, Homo sapiens; identical to SEQ ID NO: 10972
  source 1..457: mol_type = unassigned DNA

SEQ ID NO: 10987 - DNA, 629 bp, Homo sapiens; identical to SEQ ID NO: 10983
  source 1..629: mol_type = unassigned DNA

SEQ ID NO: 10988 - DNA, 717 bp, Homo sapiens
  source 1..717: mol_type = unassigned DNA
gaaaggatgggcccctgtggacgccacagcgcgccttccccatccgcaaaggctttccctccctctcctccagctccagcctgaaccatgtttttcacttgtggcccaaatgaggccatggtggtctccgggttctgccgaagccccccagtcatggtggctggagggcgtgtctttgtcctgccctgcatccaacagatccagaggatctctctcaacacactgaccctcaatgtcaagagtgaaaaggtttacactcgccatggggtccccatctcagtcactggcattgcccaggtaaaaatccaggggcagaacaaggagatgttggcggccgcctgtcagatgttcctggggaagacggaggctgagattgcccacattgccctggagacgttagagggccaccagagggccatcatggcccacatgactgtggaggagatctataaggacaggcagaaattctcagaacaggttttcaaagtggcctcctcagacctggtcaacatgggcatcagtgtggttagctacactctgaaggacattcacgatgaccaggactatttgcactctttggggaaggctcgaacagctcaagtccaaaaagatgcacggattggagaagcagaggccaagagagatgctgggatccgggaagctaaagccaagcaggaaaaggtgtctgctcagtacctgagtgagatcgagatggcc

SEQ ID NO: 10989 - DNA, 851 bp, Homo sapiens
  source 1..851: mol_type = unassigned DNA
ggcggggcgaagtgggggtgcttagtccgttgcggggggcggggtcgcgtctgccgcagcaacggggtgcggcagggtggggaacgcgggagcggggccagctcccaggaaagctggtctgcgagcggcccctgcccggctcccaggtccctgcgcgaccccgcccttcccgagaccccagccgggctgccgcccgcgtcccggaagctccagcctgaaccatgtttttcacttgtggcccaaatgaggccatggtggtctccgggttctgccgaagccccccagtcatggtggctggagggcgtgtctttgtcctgccctgcatccaacagatccagaggatctctctcaacacactgaccctcaatgtcaagagtgaaaaggtttacactcgccatggggtccccatctcagtcactggcattgcccaggtaaaaatccaggggcagaacaaggagatgttggcggccgcctgtcagatgttcctggggaagacggaggctgagattgcccacattgccctggagacgttagagggccaccagagggccatcatggcccacatgactgtggaggagatctataaggacaggcagaaattctcagaacaggttttcaaagtggcctcctcagacctggtcaacatgggcatcagtgtggttagctacactctgaaggacattcacgatgaccaggactatttgcactctttggggaaggctcgaacagctcaagtccaaaaagatgcacggattggagaagcagaggccaagagagatgctgggatccgggaagctaaagccaagcaggaaaaggtgtctgctcagtacctgagtgagatcgagatggcc

SEQ ID NO: 10990 - DNA, 888 bp, Homo sapiens
  source 1..888: mol_type = unassigned DNA
tggggctgccgagaagcagggagagaggggaaaggtctgcaggcctctgggcgcgggggacctttatcaaagggagcggcgaggggaagggagggaccatacgcaggcggagaagagctccagcctgaaccatgtttttcacttgtggcccaaatgaggccatggtggtctccgggttctgccgaagccccccagtcatggtggctggagggcgtgtctttgtcctgccctgcatccaacagatccagaggatctctctcaacacactgaccctcaatgtcaagagtgaaaaggtttacactcgccatggggtccccatctcagtcactggcattgcccaggtaaaaatccaggggcagaacaaggagatgttggcggccgcctgtcagatgttcctggggaagacggaggctgagattgcccacattgccctggagacgttagagggccaccagagggccatcatggcccacatgactgtggaggagatctataaggacaggcagaaattctcagaacaggttttcaaagtggcctcctcagacctggtcaacatgggcatcagtgtggttagctacactctgaaggacattcacgatgaccaggactatttgcactctttggggaaggctcgaacagctcaagtccaaaaagatgcacggattggagaagcagaggccaagagagatgctgggatccgggaagctaaagccaagcaggaaaaggtgtctgctcagtacctgagtgagatcgagatggccaaggcacagagagattacgaactgaagaaggccgcctatgacatcgaggtcaacacccgccgagcacaggctgacctggcctatcagcttcaggtggccaagactaagcagcagattgaggagcagc

SEQ ID NO: 10991 - DNA, 581 bp, Homo sapiens
  source 1..581: mol_type = unassigned DNA
gatgcagactgggagggcctgacgggaaagggaaaggatgggcccctgtggacgccacagcgcgccttccccatccgcaaaggctttccctccctctcctccagctccagcctgaaccatgtttttcacttgtggcccaaatgaggccatggtggtctccggtaaaaatccaggggcagaacaaggagatgttggcggccgcctgtcagatgttcctggggaagacggaggctgagattgcccacattgccctggagacgttagagggccaccagagggccatcatggcccacatgactgtggaggagatctataaggacaggcagaaattctcagaacaggttttcaaagtggcctcctcagacctggtcaacatgggcatcagtgtggttagctacactctgaaggacattcacgatgaccaggactatttgcactctttggggaaggctcgaacagctcaagtccaaaaagatgcacggattggagaagcagaggccaagagagatgctgggatccgggaagctaaagccaagcaggaaaaggtgtctgctcagtacctgagtgagatcgagatggcc

SEQ ID NO: 10992 - DNA, 547 bp, Homo sapiens
  source 1..547: mol_type = unassigned DNA
gtaaaaatccaggggcagaacaaggagatgttggcggccgcctgtcagatgttcctggggaagacggaggctgagattgcccacattgccctggagacgttagagggccaccagagggccatcatggcccacatgactgtggaggagatctataaggacaggcagaaattctcagaacaggttttcaaagtggcctcctcagacctggtcaacatgggcatcagtgtggttagctacactctgaaggacattcacgatgaccaggactatttgcactctttggggaaggctcgaacagctcaagtccaaaaagatgcacggattggagaagcagaggccaagagagatgctgggatccgggaagctaaagccaagcaggaaaaggtgtctgctcagtacctgagtgagatcgagatggccaaggcacagagagattacgaactgaagaaggccgcctatgacatcgaggtcaacacccgccgagcacaggctgacctggcctatcagcttcaggtggccaagactaagcagcagattgaggagcagc

SEQ ID NO: 10993 - DNA, 347 bp, Homo sapiens
  source 1..347: mol_type = unassigned DNA
gtaaaaatccaggggcagaacaaggagatgttggcggccgcctgtcagatgttcctggggaagacggaggctgagattgcccacattgccctggagacgttagagggccaccagagggccatcatggcccacatgactgtggaggagatctataaggacaggcagaaattctcagaacaggttttcaaagtggcctcctcagacctggtcaacatgggcatcagtgtggttagctacactctgaaggacattcacgatgaccaggactatttgcactctttggggaaggctcgaacagctcaagtccaaaaagatgcacggattggagaagcagaggccaagagaga

SEQ ID NO: 10994 - DNA, 792 bp, Homo sapiens; identical to SEQ ID NO: 10980
  source 1..792: mol_type = unassigned DNA

SEQ ID NO: 10995 - DNA, 1912 bp, Homo sapiens; identical to SEQ ID NO: 10969
  source 1..1912: mol_type = unassigned DNA

SEQ ID NO: 10996 - DNA, 495 bp, Homo sapiens
  source 1..495: mol_type = unassigned DNA
gtaaaaatccaggggcagaacaaggagatgttggcggccgcctgtcagatgttcctggggaagacggaggctgagattgcccacattgccctggagacgttagagggccaccagagggccatcatggcccacatgactgtggaggagatctataaggacaggcagaaattctcagaacaggttttcaaagtggcctcctcagacctggtcaacatgggcatcagtgtggttagctacactctgaaggacattcacgatgaccaggactatttgcactctttggggaaggctcgaacagctcaagtccaaaaagatgcacggattggagaagcagaggccaagagagatgctgggatccgggaagctaaagccaagcaggaaaaggtgtctgctcagtacctgagtgagatcgagatggccaaggcacagagagattacgaactgaagaaggccgcctatgacatcgaggtcaacacccgccgagcacaggctgac

SEQ ID NO: 10997 - DNA, 457 bp, Homo sapiens; identical to SEQ ID NO: 10972
  source 1..457: mol_type = unassigned DNA

SEQ ID NO: 10998 - DNA, 888 bp, Homo sapiens; identical to SEQ ID NO: 10990
  source 1..888: mol_type = unassigned DNA

SEQ ID NO: 10999 - DNA, 888 bp, Homo sapiens; identical to SEQ ID NO: 10990
  source 1..888: mol_type = unassigned DNA

SEQ ID NO: 11000 - DNA, 246 bp, Homo sapiens
  source 1..246: mol_type = unassigned DNA
gactatttgcactctttggggaaggctcgaacagctcaagtccaaaaagatgcacggattggagaagcagaggccaagagagatgctgggatccgggaagctaaagccaagcaggaaaaggtgtctgctcagtacctgagtgagatcgagatggccaaggcacagagagattacgaactgaagaaggccgcctatgacatcgaggtcaacacccgccgagcacaggctgacctggcctatcagctt

SEQ ID NO: 11001 - DNA, 629 bp, Homo sapiens; identical to SEQ ID NO: 10983
  source 1..629: mol_type = unassigned DNA

SEQ ID NO: 11002 - DNA, 888 bp, Homo sapiens; identical to SEQ ID NO: 10990
  source 1..888: mol_type = unassigned DNA

SEQ ID NO: 11003 - DNA, 629 bp, Homo sapiens; identical to SEQ ID NO: 10983
  source 1..629: mol_type = unassigned DNA

SEQ ID NO: 11004 - DNA, 856 bp, Homo sapiens; identical to SEQ ID NO: 10975
  source 1..856: mol_type = unassigned DNA

SEQ ID NO: 11005 - DNA, 1912 bp, Homo sapiens; identical to SEQ ID NO: 10969
  source 1..1912: mol_type = unassigned DNA

SEQ ID NO: 11006 - DNA, 592 bp, Homo sapiens; identical to SEQ ID NO: 10973
  source 1..592: mol_type = unassigned DNA

SEQ ID NO: 11007 - DNA, 792 bp, Homo sapiens; identical to SEQ ID NO: 10980
  source 1..792: mol_type = unassigned DNA

SEQ ID NO: 11008 - DNA, 182 bp, Homo sapiens
  source 1..182: mol_type = unassigned DNA
gtggccaagactaagcagcagattgaggagcagcgggtgcaggtgcaggtggtggagcgggcccagcaggtggcagtgcaggagcaggagatcgcccggcgggagaaggagctggaggcccgggtgcggaagccagcggaagcggagcgctacaagctggagcgcctagccgaggcagagaa

SEQ ID NO: 11009 - DNA, 856 bp, Homo sapiens; identical to SEQ ID NO: 10975
  source 1..856: mol_type = unassigned DNA

SEQ ID NO: 11010 - DNA, 792 bp, Homo sapiens; identical to SEQ ID NO: 10980
  source 1..792: mol_type = unassigned DNA

SEQ ID NO: 11011 - DNA, 1481 bp, Homo sapiens
  source 1..1481: mol_type = unassigned DNA
gtaaaaatccaggggcagaacaaggagatgttggcggccgcctgtcagatgttcctggggaagacggaggctgagattgcccacattgccctggagacgttagagggccaccagagggccatcatggcccacatgactgtggaggagatctataaggacaggcagaaattctcagaacaggttttcaaagtggcctcctcagacctggtcaacatgggcatcagtgtggttagctacactctgaaggacattcacgatgaccaggactatttgcactctttggggaaggctcgaacagctcaagtccaaaaagatgcacggattggagaagcagaggccaagagagatgctgggatccgggaagctaaagccaagcaggaaaaggtgtctgctcagtacctgagtgagatcgagatggccaaggcacagagagattacgaactgaagaaggccgcctatgacatcgaggtcaacacccgccgagcacaggctgacctggcctatcagcttcaggtggccaagactaagcagcagattgaggagcagcgggtgcaggtgcaggtggtggagcgggcccagcaggtggcagtgcaggagcaggagatcgcccggcgggagaaggagctggaggcccgggtgcggaagccagcggaagcggagcgctacaagctggagcgcctagccgaggcagagaagtcccaactaattatgcaggcggaggcagaagccgcgtctgtgcggatgcgtggggaagctgaggcctttgccataggggcccgagcccgagccgaggctgagcagatggccaagaaggcagaagccttccagctgtaccaagaggctgctcagctggacatgctgctagagaagctgccccaggtggcagaggagatcagtggtcccttgacttcagccaataagatcacactggtgtccagcggcagtgggaccatgggggcagccaaagtgactggggaagtactggacattctaactcgcctgccagagagtgtggaaagactcacaggcgtgagcatctcccaggtgaatcacaagcctttgagaacagcctgagccttcagccctcacagatgcccagcctcatagctgaagttgcctgaatgatcctcctgttgcatgtaacccactggcctccctgagcatgtccattgacagtgaggtcccacccctcatctctccttgccaaatagtttgtgccttgtcttgaagggggttgctccccttgccaacctcacactgctatgattgccaactccagcggtcccatgtcagccttctgatgatcccactccaccccacctcaacttatttaacttcctaattaaatcagactgtttgagcctgttgtctagaatattttcctgaccaagactgagggatgggctggaggttttcaactttgctacccaaataaattgctgtaagtaagtactaataaaacagaagcaactggaaattaa

SEQ ID NO: 11012 - DNA, 34 bp, Homo sapiens
  source 1..34: mol_type = unassigned DNA
gtggccaagactaagcagcagattgaggagcagc

SEQ ID NO: 11013 - DNA, 888 bp, Homo sapiens; identical to SEQ ID NO: 10990
  source 1..888: mol_type = unassigned DNA

SEQ ID NO: 11014 - DNA, 792 bp, Homo sapiens; identical to SEQ ID NO: 10980
  source 1..792: mol_type = unassigned DNA

SEQ ID NO: 11015 - DNA, 629 bp, Homo sapiens; identical to SEQ ID NO: 10983
  source 1..629: mol_type = unassigned DNA

SEQ ID NO: 11016 - DNA, 457 bp, Homo sapiens; identical to SEQ ID NO: 10972
  source 1..457: mol_type = unassigned DNA

SEQ ID NO: 11017 - DNA, 856 bp, Homo sapiens; identical to SEQ ID NO: 10975
  source 1..856: mol_type = unassigned DNA

SEQ ID NO: 11018 - DNA, 1380 bp, Homo sapiens
  source 1..1380: mol_type = unassigned DNA
gtctgccgcagcaacggggtgcggcagggtggggaacgcgggagcggggccagctcccaggaaagctggtctgcgagcggcccctgcccggctcccaggtccctgcgcgaccccgcccttcccgagaccccagccgggctgccgcccgcgtcccggaagctccagcctgaaccatgtttttcacttgtggcccaaatgaggccatggtggtctccgggttctgccgaagccccccagtcatggtggctggagggcgtgtctttgtcctgccctgcatccaacagatccagaggatctctctcaacacactgaccctcaatgtcaagagtgaaaaggtttacactcgccatggggtccccatctcagtcactggcattgcccaggagatctataaggacaggcagaaattctcagaacaggttttcaaagtggcctcctcagacctggtcaacatgggcatcagtgtggttagctacactctgaaggacattcacgatgaccaggactatttgcactctttggggaaggctcgaacagctcaagtccaaaaagatgcacggattggagaagcagaggccaagagagatgctgggatccgggaagctaaagccaagcaggaaaaggtgtctgctcagtacctgagtgagatcgagatggccaaggcacagagagattacgaactgaagaaggccgcctatgacatcgaggtcaacacccgccgagcacaggctgacctggcctatcagcttcaggtggccaagactaagcagcagattgaggagcagcgggtgcaggtgcaggtggtggagcgggcccagcaggtggcagtgcaggagcaggagatcgcccggcgggagaaggagctggaggcccgggtgcggaagccagcggaagcggagcgctacaagctggagcgcctagccgaggcagagaagtcccaactaattatgcaggcggaggcagaagccgcgtctgtgcggatgcgtggggaagctgaggcctttgccataggggcccgagcccgagccgaggctgagcagatggccaagaaggcagaagccttccagctgtaccaagaggctgctcagctggacatgctgctagagaagctgccccaggtggcagaggagatcagtggtcccttgacttcagccaataagatcacactggtgtccagcggcagtgggaccatgggggcagccaaagtgactggggaagtactggacattctaactcgcctgccagagagtgtggaaagactcacaggcgtgagcatctcccaggtgaatcacaagcctttgagaacagcctgagccttcagccctcacagatgcccagcctcatagctgaagttgcctgaatgatcctcctgttgcatgt

SEQ ID NO: 11019 - DNA, 629 bp, Homo sapiens; identical to SEQ ID NO: 10983
  source 1..629: mol_type = unassigned DNA

SEQ ID NO: 11020 - DNA, 695 bp, Homo sapiens
  source 1..695: mol_type = unassigned DNA
gtaaaaatccaggggcagaacaaggagatgttggcggccgcctgtcagatgttcctggggaagacggaggctgagattgcccacattgccctggagacgttagagggccaccagagggccatcatggcccacatgactgtggaggagatctataaggacaggcagaaattctcagaacaggttttcaaagtggcctcctcagacctggtcaacatgggcatcagtgtggttagctacactctgaaggacattcacgatgaccaggactatttgcactctttggggaaggctcgaacagctcaagtccaaaaagatgcacggattggagaagcagaggccaagagagatgctgggatccgggaagctaaagccaagcaggaaaaggtgtctgctcagtacctgagtgagatcgagatggccaaggcacagagagattacgaactgaagaaggccgcctatgacatcgaggtcaacacccgccgagcacaggctgacctggcctatcagcttcaggtggccaagactaagcagcagattgaggagcagcgggtgcaggtgcaggtggtggagcgggcccagcaggtggcagtgcaggagcaggagatcgcccggcgggagaaggagctggaggcccgggtgcggaagccagcggaagcggagcgctacaagctggagcgcctagccgaggcagagaa

SEQ ID NO: 11021 - DNA, 761 bp, Homo sapiens
  source 1..761: mol_type = unassigned DNA
tggggctgccgagaagcagggagagaggggaaaggtctgcaggcctctgggcgcgggggacctttatcaaagggagcggcgaggggaagggagggaccatacgcaggcggagaagagctccagcctgaaccatgtttttcacttgtggcccaaatgaggccatggtggtctccgggttctgccgaagccccccagtcatggtggctggagggcgtgtctttgtcctgccctgcatccaacagatccagaggatctctctcaacacactgaccctcaatgtcaagagtgaaaaggtttacactcgccatggggtccccatctcagtcactggcattgcccaggtaaaaatccaggggcagaacaaggagatgttggcggccgcctgtcagatgttcctggggaagacggaggctgagattgcccacattgccctggagacgttagagggccaccagagggccatcatggcccacatgactgtggaggagatctataaggacaggcagaaattctcagaacaggttttcaaagtggcctcctcagacctggtcaacatgggcatcagtgtggttagctacactctgaaggacattcacgatgaccaggactatttgcactctttggggaaggctcgaacagctcaagtccaaaaagatgcacggattggagaagcagaggccaagagagatgctgggatccgggaagctaaagccaagcaggaaaaggtgtctgctcagtacctgagtgagatcgagatggcc

SEQ ID NO: 11022 - DNA, 592 bp, Homo sapiens; identical to SEQ ID NO: 10973
  source 1..592: mol_type = unassigned DNA

SEQ ID NO: 11023 - DNA, 1380 bp, Homo sapiens; identical to SEQ ID NO: 11018
  source 1..1380: mol_type = unassigned DNA

SEQ ID NO: 11024 - DNA, 1380 bp, Homo sapiens; identical to SEQ ID NO: 11018
  source 1..1380: mol_type = unassigned DNA

SEQ ID NO: 11025 - DNA, 1380 bp, Homo sapiens; identical to SEQ ID NO: 11018
  source 1..1380: mol_type = unassigned DNA

SEQ ID NO: 11026 - DNA, 1380 bp, Homo sapiens; identical to SEQ ID NO: 11018
  source 1..1380: mol_type = unassigned DNA

SEQ ID NO: 11027 - DNA, 1199 bp, Homo sapiens
  source 1..1199: mol_type = unassigned DNA
aggagatctataaggacaggcagaaattctcagaacaggttttcaaagtggcctcctcagacctggtcaacatgggcatcagtgtggttagctacactctgaaggacattcacgatgaccaggactatttgcactctttggggaaggctcgaacagctcaagtccaaaaagatgcacggattggagaagcagaggccaagagagatgctgggatccgggaagctaaagccaagcaggaaaaggtgtctgctcagtacctgagtgagatcgagatggccaaggcacagagagattacgaactgaagaaggccgcctatgacatcgaggtcaacacccgccgagcacaggctgacctggcctatcagcttcaggtggccaagactaagcagcagattgaggagcagcgggtgcaggtgcaggtggtggagcgggcccagcaggtggcagtgcaggagcaggagatcgcccggcgggagaaggagctggaggcccgggtgcggaagccagcggaagcggagcgctacaagctggagcgcctagccgaggcagagaagtcccaactaattatgcaggcggaggcagaagccgcgtctgtgcggatgcgtggggaagctgaggcctttgccataggggcccgagcccgagccgaggctgagcagatggccaagaaggcagaagccttccagctgtaccaagaggctgctcagctggacatgctgctagagaagctgccccaggtggcagaggagatcagtggtcccttgacttcagccaataagatcacactggtgtccagcggcagtgggaccatgggggcagccaaagtgactggggaagtactggacattctaactcgcctgccagagagtgtggaaagactcacaggcgtgagcatctcccaggtgaatcacaagcctttgagaacagcctgagccttcagccctcacagatgcccagcctcatagctgaagttgcctgaatgatcctcctgttgcatgtaacccactggcctccctgagcatgtccattgacagtgaggtcccacccctcatctctccttgccaaatagtttgtgccttgtcttgaagggggttgctccccttgccaacctcacactgctatgattgccaactccagcggtcccatgtcagccttctgatgatcccactccaccccacctcaacttatttaacttccta

SEQ ID NO: 11028 - DNA, 2713 bp, Homo sapiens
  source 1..2713: mol_type = unassigned DNA
gtgcggtcccgagggccctccgtgccgccggcgccatgggcaattgccacacggtggggcccaacgaggcgctggtggtttcagggggctgttgtggttccgactataaacagtacgtgtttggcggctgggcctgggcctggtggtgtatctccgacactcagagactgtctctggaggttatgaccatcctgtgtcgctgtgagaatattgagacgtcggagggggttccactattcgtaacaggggttgcacaggtcccttgcccttgcctattggactgcaagtggggaaacagcaagggattctggaagctctgccaagtctgccagatttccctagagattatgacgttgcagccccgctgcgaggacgtagagacggccgagggggtagctttaactgtgacgggtgtcgcccaggtgaagatcatgacggagaaggaactcctggccgtggcttgtgagcagtttctgggtaagaatgtgcaggacatcaaaaacgtcgtcctgcagaccctggagggacatctgcgctccatcctcgggaccctgacagtggagcagatttatcaggaccgggaccagtttgccaagctggtgcgggaggtggcagcccctgatgttggccgcatgggcattgagatcctcagcttcaccatcaaggacgtgtatgacaaagtggactatctgagctccctgggcaagacgcagactgccgtggtgcagagagatgctgacattggcgtggccgaggctgaacgggacgcaggcatccgggaagctgagtgcaagaaggagatgctggatgtgaagttcatggcagacaccaagattgctgactctaagcgagccttcgagctgcaaaagtcagccttcagtgaggaggttaacatcaagacagctgaggcccagttggcctatgagctgcagggggcccgtgaacagcagaagatccggcaggaagagattgagattgaggttgtgcagcgcaagaaacagattgccgtggaggcacaggagatcctgcgtacggacaaggagctcatcgctacagtgcgccggcctgccgaggccgaggcccaccgcatccagcagattgccgagggtgaaaaggtgaagcaggtcctcttggcacaggcagaggctgagaagatccgcaaaatcggggaggcggaagcggcagtcatcgaggcgatgggcaaggcagaggctgagcggatgaagctcaaggcagaagcctaccagaaatacggggatgcagccaagatggccttggtgctagaggccctgccccagattgctgccaaaatcgctgccccacttaccaaggtcgatgagattgtggtcctcagtggagacaacagtaaggtcacatcagaagtgaaccgactgctggccgagctgcctgcctctgtgcatgccctcacaggcgtggacctgtctaagatacccctgatcaagaaggccactggtgtgcaggtgtgaggctcctgcaggcccactctcttcagcagccacccggccctccctccagcacccgttttaatcccacagaacaacgggaacgttactgactctggtgccttatctcgaagggaccagaagtgctgcgtgttcaggccatctctggctgtcttcctgtctctcctgtctgtccacctcctcctcttcctctcctttaccccactttcactgccactttcatcaggtttgtgtctcatctccctgcgtgtcttttcctttgtctgtctttttctttcccccatgcacatcatgtagattaagctgaagatgtttattacaatcactctctgtggggggtggccctgctgctcctcagaatcctggtgccttgaagttctctgtgcatctgtccatcctccctatggccctggccagagctcagcatgggcaggggttctgggtaggacggtcactgtcctctctcctggactggtcttcccagccctaaaccctgccccaggaagcccacagcctcacctgctgctgcccctctaggtctgggcagccatgacctgcagggcccagagacactgtccttcccctcatccacccaaggccccagccagcgctcataccctgtcctttctccctgaccccaagggcacagaggcaaggcctcctgtctacagcagcttcctcagtttcctactgccttaggaggcccctgcttgtgctcagggaaggcctcttcatgggcatgttcctgctggggcggtgcggtttggtcccaactctgctaagttttctgagatgagggtctagccctgttggggacagaaaagtgtgtagaccttcttcctgctagggctgcactgtcctgggtgttgggcccttctggtggacaaggctgtgccaaccctgtacagaatcgagtgctgtagcctggccagaccccagagcccttgtgccatctttcttcctggccagagtgatggggttccagccatggggaagcaacccaatcctctgtctccttgctccaatggaggcagaagagcccaggacccaagcgtcttggcaggggtgctgtgaatgtccagtggtcccagctccccaccctggccctgccccagcctgtgtagctcttcctgcatgtggatgctgcatgtctggtctggggcttggatgttgcactgccccactgcctgtcccttctggtaaaataaagaactcttaatgcccacccc

SEQ ID NO: 11029 - DNA, 2548 bp, Homo sapiens
  source 1..2548: mol_type = unassigned DNA
gtgcggtcccgagggccctccgtgccgccggcgccatgggcaattgccacacggtggggcccaacgaggcgctggtggtttcagggggctgttgtggttccgactataaacagtacgtgtttggcggctgggcctgggcctggtggtgtatctccgacactcagaggatttccctagagattatgacgttgcagccccgctgcgaggacgtagagacggccgagggggtagctttaactgtgacgggtgtcgcccaggtgaagatcatgacggagaaggaactcctggccgtggcttgtgagcagtttctgggtaagaatgtgcaggacatcaaaaacgtcgtcctgcagaccctggagggacatctgcgctccatcctcgggaccctgacagtggagcagatttatcaggaccgggaccagtttgccaagctggtgcgggaggtggcagcccctgatgttggccgcatgggcattgagatcctcagcttcaccatcaaggacgtgtatgacaaagtggactatctgagctccctgggcaagacgcagactgccgtggtgcagagagatgctgacattggcgtggccgaggctgaacgggacgcaggcatccgggaagctgagtgcaagaaggagatgctggatgtgaagttcatggcagacaccaagattgctgactctaagcgagccttcgagctgcaaaagtcagccttcagtgaggaggttaacatcaagacagctgaggcccagttggcctatgagctgcagggggcccgtgaacagcagaagatccggcaggaagagattgagattgaggttgtgcagcgcaagaaacagattgccgtggaggcacaggagatcctgcgtacggacaaggagctcatcgctacagtgcgccggcctgccgaggccgaggcccaccgcatccagcagattgccgagggtgaaaaggtgaagcaggtcctcttggcacaggcagaggctgagaagatccgcaaaatcggggaggcggaagcggcagtcatcgaggcgatgggcaaggcagaggctgagcggatgaagctcaaggcagaagcctaccagaaatacggggatgcagccaagatggccttggtgctagaggccctgccccagattgctgccaaaatcgctgccccacttaccaaggtcgatgagattgtggtcctcagtggagacaacagtaaggtcacatcagaagtgaaccgactgctggccgagctgcctgcctctgtgcatgccctcacaggcgtggacctgtctaagatacccctgatcaagaaggccactggtgtgcaggtgtgaggctcctgcaggcccactctcttcagcagccacccggccctccctccagcacccgttttaatcccacagaacaacgggaacgttactgactctggtgccttatctcgaagggaccagaagtgctgcgtgttcaggccatctctggctgtcttcctgtctctcctgtctgtccacctcctcctcttcctctcctttaccccactttcactgccactttcatcaggtttgtgtctcatctccctgcgtgtcttttcctttgtctgtctttttctttcccccatgcacatcatgtagattaagctgaagatgtttattacaatcactctctgtggggggtggccctgctgctcctcagaatcctggtgccttgaagttctctgtgcatctgtccatcctccctatggccctggccagagctcagcatgggcaggggttctgggtaggacggtcactgtcctctctcctggactggtcttcccagccctaaaccctgccccaggaagcccacagcctcacctgctgctgcccctctaggtctgggcagccatgacctgcagggcccagagacactgtccttcccctcatccacccaaggccccagccagcgctcataccctgtcctttctccctgaccccaagggcacagaggcaaggcctcctgtctacagcagcttcctcagtttcctactgccttaggaggcccctgcttgtgctcagggaaggcctcttcatgggcatgttcctgctggggcggtgcggtttggtcccaactctgctaagttttctgagatgagggtctagccctgttggggacagaaaagtgtgtagaccttcttcctgctagggctgcactgtcctgggtgttgggcccttctggtggacaaggctgtgccaaccctgtacagaatcgagtgctgtagcctggccagaccccagagcccttgtgccatctttcttcctggccagagtgatggggttccagccatggggaagcaacccaatcctctgtctccttgctccaatggaggcagaagagcccaggacccaagcgtcttggcaggggtgctgtgaatgtccagtggtcccagctccccaccctggccctgccccagcctgtgtagctcttcctgcatgtggatgctgcatgtctggtctggggcttggatgttgcactgccccactgcctgtcccttctggtaaaataaagaactcttaatgcccacccc

SEQ ID NO: 11030 - DNA, 3842 bp, Homo sapiens
  source 1..3842: mol_type = unassigned DNA
acctgcagcgcgaggcgcgccgctccaggcggcatcgcagggctgggccggcgcggcctggggaccccgggctccggaggccatgccggcgttggcgcgcgacggcggccagctgccgctgctcgttgttttttctgcaatgatatttgggactattacaaatcaagatctgcctgtgatcaagtgtgttttaatcaatcataagaacaatgattcatcagtggggaagtcatcatcatatcccatggtatcagaatccccggaagacctcgggtgtgcgttgagaccccagagctcagggacagtgtacgaagctgccgctgtggaagtggatgtatctgcttccatcacactgcaagtgctggtcgacgccccagggaacatttcctgtctctgggtctttaagcacagctccctgaattgccagccacattttgatttacaaaacagaggagttgtttccatggtcattttgaaaatgacagaaacccaagctggagaatacctactttttattcagagtgaagctaccaattacacaatattgtttacagtgagtataagaaataccctgctttacacattaagaagaccttactttagaaaaatggaaaaccaggacgccctggtctgcatatctgagagcgttccagagccgatcgtggaatgggtgctttgcgattcacagggggaaagctgtaaagaagaaagtccagctgttgttaaaaaggaggaaaaagtgcttcatgaattatttgggacggacataaggtgctgtgccagaaatgaactgggcagggaatgcaccaggctgttcacaatagatctaaatcaaactcctcagaccacattgccacaattatttcttaaagtaggggaacccttatggataaggtgcaaagctgttcatgtgaaccatggattcgggctcacctgggaattagaaaacaaagcactcgaggagggcaactactttgagatgagtacctattcaacaaacagaactatgatacggattctgtttgcttttgtatcatcagtggcaagaaacgacaccggatactacacttgttcctcttcaaagcatcccagtcaatcagctttggttaccatcgtagaaaagggatttataaatgctaccaattcaagtgaagattatgaaattgaccaatatgaagagttttgtttttctgtcaggtttaaagcctacccacaaatcagatgtacgtggaccttctctcgaaaatcatttccttgtgagcaaaagggtcttgataacggatacagcatatccaagttttgcaatcataagcaccagccaggagaatatatattccatgcagaaaatgatgatgcccaatttaccaaaatgttcacgctgaatataagaaggaaacctcaagtgctcgcagaagcatcggcaagtcaggcgtcctgtttctcggatggatacccattaccatcttggacctggaagaagtgttcagacaagtctcccaactgcacagaagagatcacagaaggagtctggaatagaaaggctaacagaaaagtgtttggacagtgggtgtcgagcagtactctaaacatgagtgaagccataaaagggttcctggtcaagtgctgtgcatacaattcccttggcacatcttgtgagacgatccttttaaactctccaggccccttccctttcatccaagacaacatctcattctatgcaacaattggtgtttgtctcctcttcattgtcgttttaaccctgctaatttgtcacaagtacaaaaagcaatttaggtatgaaagccagctacagatggtacaggtgaccggctcctcagataatgagtacttctacgttgatttcagagaatatgaatatgatctcaaatgggagtttccaagagaaaatttagagtttgggaaggtactaggatcaggtgcttttggaaaagtgatgaacgcaacagcttatggaattagcaaaacaggagtctcaatccaggttgccgtcaaaatgctgaaagaaaaagcagacagctctgaaagagaggcactcatgtcagaactcaagatgatgacccagctgggaagccacgagaatattgtgaacctgctgggggcgtgcacactgtcaggaccaatttacttgatttttgaatactgttgctatggtgatcttctcaactatctaagaagtaaaagagaaaaatttcacaggacttggacagagattttcaaggaacacaatttcagtttttaccccactttccaatcacatccaaattccagcatgcctggttcaagagaagttcagatacacccggactcggatcaaatctcagggcttcatgggaattcatttcactctgaagatgaaattgaatatgaaaaccaaaaaaggctggaagaagaggaggacttgaatgtgcttacatttgaagatcttctttgctttgcatatcaagttgccaaaggaatggaatttctggaatttaagtcgtgtgttcacagagacctggccgccaggaacgtgcttgtcacccacgggaaagtggtgaagatatgtgactttggattggctcgagatatcatgagtgattccaactatgttgtcaggggcaatgcccgtctgcctgtaaaatggatggcccccgaaagcctgtttgaaggcatctacaccattaagagtgatgtctggtcatatggaatattactgtgggaaatcttctcacttggtgtgaatccttaccctggcattccggttgatgctaacttctacaaactgattcaaaatggatttaaaatggatcagccattttatgctacagaagaaatatacattataatgcaatcctgctgggcttttgactcaaggaaacggccatccttccctaatttgacttcgtttttaggatgtcagctggcagatgcagaagaagcgatgtatcagaatgtggatggccgtgtttcggaatgtcctcacacctaccaaaacaggcgacctttcagcagagagatggatttggggctactctctccgcaggctcaggtcgaagattcgtagaggaacaatttagttttaaggacttcatccctccacctatccctaacaggctgtagattaccaaaacaagattaatttcatcactaaaagaaaatctattatcaactgctgcttcaccagacttttctctagaagctgtctgcgtttactcttgttttcaaagggacttttgtaaaatcaaatcatcctgtcacaaggcaggaggagctgataatgaactttattggagcattgatctgcatccaaggccttctcaggctggcttgagtgaattgtgtacctgaagtacagtatattcttgtaaatacataaaacaaaagcattttgctaaggagaagctaatatgattttttaagtctatgttttaaaataatatgtaaatttttcagctatttagtgatatattttatgggtgggaataaaatttctactacagaattgcccattattgaattatttacatggtataattagggcaagtcttaactggagttcacgaaccccctgaaattgtgcacccatagccacctacacattccttccagagcacgtgtgcttttaccccaagatacaaggaatgtgtaggcagctatggttgtcacagcctaagatttctgcaacaacaggggttgtattgggggaagtttataatgaataggtgttctaccataaagagtaatacatcacctagacactttggcggccttcccagactcagggccagtcagaagtaacatggaggattagtattttcaataaagttactcttgtccccaca

SEQ ID NO: 11031 - DNA, 3848 bp, Homo sapiens
  source 1..3848: mol_type = unassigned DNA
acctgcagcgcgaggcgcgccgctccaggcggcatcgcagggctgggccggcgcggcctggggaccccgggctccggaggccatgccggcgttggcgcgcgacggcggccagctgccgctgctcgttgttttttctgcaatgatatttgggactattacaaatcaagatctgcctgtgatcaagtgtgttttaatcaatcataagaacaatgattcatcagtggggaagtcatcatcatatcccatggtatcagaatccccggaagacctcgggtgtgcgttgagaccccagagctcagggacagtgtacgaagctgccgctgtggaagtggatgtatctgcttccatcacactgcaagtgctggtcgacgccccagggaacatttcctgtctctgggtctttaagcacagctccctgaattgccagccacattttgatttacaaaacagaggagttgtttccatggtcattttgaaaatgacagaaacccaagctggagaatacctactttttattcagagtgaagctaccaattacacaatattgtttacagtgagtataagaaataccctgctttacacattaagaagaccttactttagaaaaatggaaaaccaggacgccctggtctgcatatctgagagcgttccagagccgatcgtggaatgggtgctttgcgattcacagggggaaagctgtaaagaagaaagtccagctgttgttaaaaaggaggaaaaagtgcttcatgaattatttgggacggacataaggtgctgtgccagaaatgaactgggcagggaatgcaccaggctgttcacaatagatctaaatcaaactcctcagaccacattgccacaattatttcttaaagtaggggaacccttatggataaggtgcaaagctgttcatgtgaaccatggattcgggctcacctgggaattagaaaacaaagcactcgaggagggcaactactttgagatgagtacctattcaacaaacagaactatgatacggattctgtttgcttttgtatcatcagtggcaagaaacgacaccggatactacacttgttcctcttcaaagcatcccagtcaatcagctttggttaccatcgtagaaaagggatttataaatgctaccaattcaagtgaagattatgaaattgaccaatatgaagagttttgtttttctgtcaggtttaaagcctacccacaaatcagatgtacgtggaccttctctcgaaaatcatttccttgtgagcaaaagggtcttgataacggatacagcatatccaagttttgcaatcataagcaccagccaggagaatatatattccatgcagaaaatgatgatgcccaatttaccaaaatgttcacgctgaatataagaaggaaacctcaagtgctcgcagaagcatcggcaagtcaggcgtcctgtttctcggatggatacccattaccatcttggacctggaagaagtgttcagacaagtctcccaactgcacagaagagatcacagaaggagtctggaatagaaaggctaacagaaaagtgtttggacagtgggtgtcgagcagtactctaaacatgagtgaagccataaaagggttcctggtcaagtgctgtgcatacaattcccttggcacatcttgtgagacgatccttttaaactctccaggccccttccctttcatccaagacaacatctcattctatgcaacaattggtgtttgtctcctcttcattgtcgttttaaccctgctaatttgtcacaagtacaaaaagcaatttaggtatgaaagccagctacagatggtacaggtgaccggctcctcagataatgagtacttctacgttgatttcagagaatatgaatatgatctcaaatgggagtttccaagagaaaatttagagtttgggaaggtactaggatcaggtgcttttggaaaagtgatgaacgcaacagcttatggaattagcaaaacaggagtctcaatccaggttgccgtcaaaatgctgaaagaaaaagcagacagctctgaaagagaggcactcatgtcagaactcaagatgatgacccagctgggaagccacgagaatattgtgaacctgctgggggcgtgcacactgtcaggaccaatttacttgatttttgaatactgttgctatggtgatcttctcaactatctaagaagtaaaagagaaaaatttcacaggacttggacagagattttcaaggaacacaatttcagtttttaccccactttccaatcacatccaaattccagcatgcctggttcaagagaagttcagatacacccggactcggatcaaatctcagggcttcatgggaattcatttcactctgaagatgaaattgaatatgaaaaccaaaaaaggctggaagaagaggaggacttgaatgtgcttacatttgaagatcttctttgctttgcatatcaagttgccaaaggaatggaatttctggaatttaagtcgtgtgttcacagagacctggccgccaggaacgtgcttgtcacccacgggaaagtggtgaagatatgtgactttggattggctcgagatatcatgagtgattccaactatgttgtcaggggcaatgtgaggctggcccgtctgcctgtaaaatggatggcccccgaaagcctgtttgaaggcatctacaccattaagagtgatgtctggtcatatggaatattactgtgggaaatcttctcacttggtgtgaatccttaccctggcattccggttgatgctaacttctacaaactgattcaaaatggatttaaaatggatcagccattttatgctacagaagaaatatacattataatgcaatcctgctgggcttttgactcaaggaaacggccatccttccctaatttgacttcgtttttaggatgtcagctggcagatgcagaagaagcgatgtatcagaatgtggatggccgtgtttcggaatgtcctcacacctaccaaaacaggcgacctttcagcagagagatggatttggggctactctctccgcaggctcaggtcgaagattcgtagaggaacaatttagttttaaggacttcatccctccacctatccctaacaggctgtagattaccaaaacaagattaatttcatcactaaaagaaaatctattatcaactgctgcttcaccagacttttctctagaagctgtctgcgtttactcttgttttcaaagggacttttgtaaaatcaaatcatcctgtcacaaggcaggaggagctgataatgaactttattggagcattgatctgcatccaaggccttctcaggctggcttgagtgaattgtgtacctgaagtacagtatattcttgtaaatacataaaacaaaagcattttgctaaggagaagctaatatgattttttaagtctatgttttaaaataatatgtaaatttttcagctatttagtgatatattttatgggtgggaataaaatttctactacagaattgcccattattgaattatttacatggtataattagggcaagtcttaactggagttcacgaaccccctgaaattgtgcacccatagccacctacacattccttccagagcacgtgtgcttttaccccaagatacaaggaatgtgtaggcagctatggttgtcacagcctaagatttctgcaacaacaggggttgtattgggggaagtttataatgaataggtgttctaccataaagagtaatacatcacctagacactttggcggccttcccagactcagggccagtcagaagtaacatggaggattagtattttcaataaagttactcttgtcccc

SEQ ID NO: 11032 - DNA, 3178 bp, Homo sapiens
  source 1..3178: mol_type = unassigned DNA
ctccaggcggcatcgcagggctgggccggcgcggcctggggaccccgggctccggaggccatgccggcgttggcgcgcgacggcggccagctgccgctgctcgttgttttttctgcaatgatatttgggactattacaaatcaagatctgcctgtgatcaagtgtgttttaatcaatcataagaacaatgattcatcagtggggaagtcatcatcatatcccatggtatcagaatccccggaagacctcgggtgtgcgttgagaccccagagctcagggacagtgtacgaagctgccgctgtggaagtggatgtatctgcttccatcacactgcaagtgctggtcgacgccccagggaacatttcctgtctctgggtctttaagcacagctccctgaattgccagccacattttgatttacaaaacagaggagttgtttccatggtcattttgaaaatgacagaaacccaagctggagaatacctactttttattcagagtgaagctaccaattacacaatattgtttacagtgagtataagaaataccctgctttacacattaagaagaccttactttagaaaaatggaaaaccaggacgccctggtctgcatatctgagagcgttccagagccgatcgtggaatgggtgctttgcgattcacagggggaaagctgtaaagaagaaagtccagctgttgttaaaaaggaggaaaaagtgcttcatgaattatttgggacggacataaggtgctgtgccagaaatgaactgggcagggaatgcaccaggctgttcacaatagatctaaatcaaactcctcagaccacattgccacaattatttcttaaagtaggggaacccttatggataaggtgcaaagctgttcatgtgaaccatggattcgggctcacctgggaattagaaaacaaagcactcgaggagggcaactactttgagatgagtacctattcaacaaacagaactatgatacggattctgtttgcttttgtatcatcagtggcaagaaacgacaccggatactacacttgttcctcttcaaagcatcccagtcaatcagctttggttaccatcgtagaaaagggatttataaatgctaccaattcaagtgaagattatgaaattgaccaatatgaagagttttgtttttctgtcaggtttaaagcctacccacaaatcagatgtacgtggaccttctctcgaaaatcatttccttgtgagcaaaagggtcttgataacggatacagcatatccaagttttgcaatcataagcaccagccaggagaatatatattccatgcagaaaatgatgatgcccaatttaccaaaatgttcacgctgaatataagaaggaaacctcaagtgctcgcagaagcatcggcaagtcaggcgtcctgtttctcggatggatacccattaccatcttggacctggaagaagtgttcagacaagtctcccaactgcacagaagagatcacagaaggagtctggaatagaaaggctaacagaaaagtgtttggacagtgggtgtcgagcagtactctaaacatgagtgaagccataaaagggttcctggtcaagtgctgtgcatacaattcccttggcacatcttgtgagacgatccttttaaactctccaggccccttccctttcatccaagacaacatctcattctatgcaacaattggtgtttgtctcctcttcattgtcgttttaaccctgctaatttgtcacaagtacaaaaagcaatttaggtatgaaagccagctacagatggtacaggtgaccggctcctcagataatgagtacttctacgttgatttcagagaatatgaatatgatctcaaatgggagtttccaagagaaaatttagagtttgggaaggtactaggatcaggtgcttttggaaaagtgatgaacgcaacagcttatggaattagcaaaacaggagtctcaatccaggttgccgtcaaaatgctgaaagaaaaagcagacagctctgaaagagaggcactcatgtcagaactcaagatgatgacccagctgggaagccacgagaatattgtgaacctgctgggggcgtgcacactgtcaggaccaatttacttgatttttgaatactgttgctatggtgatcttctcaactatctaagaagtaaaagagaaaaatttcacaggacttggacagagattttcaaggaacacaatttcagtttttaccccactttccaatcacatccaaattccagcatgcctggttcaagagaagttcagatacacccggactcggatcaaatctcagggcttcatgggaattcatttcactctgaagatgaaattgaatatgaaaaccaaaaaaggctggaagaagaggaggacttgaatgtgcttacatttgaagatcttctttgctttgcatatcaagttgccaaaggaatggaatttctggaatttaagtcggcccgtctgcctgtaaaatggatggcccccgaaagcctgtttgaaggcatctacaccattaagagtgatgtctggtcatatggaatattactgtgggaaatcttctcacttggtgtgaatccttaccctggcattccggttgatgctaacttctacaaactgattcaaaatggatttaaaatggatcagccattttatgctacagaagaaatatacattataatgcaatcctgctgggcttttgactcaaggaaacggccatccttccctaatttgacttcgtttttaggatgtcagctggcagatgcagaagaagcgatgtatcagaatgtggatggccgtgtttcggaatgtcctcacacctaccaaaacaggcgacctttcagcagagagatggatttggggctactctctccgcaggctcaggtcgaagattcgtagaggaacaatttagttttaaggacttcatccctccacctatccctaacaggctgtagattaccaaaacaagattaatttcatcactaaaagaaaatctattatcaactgctgcttcaccagacttttctctagaagctgtctgcgtttactcttgttttcaaagggacttttgtaaaatcaaatcatcctgtcacaaggcaggaggagctgataatgaactttattggagcattgatctgcatccaaggccttctcaggc

SEQ ID NO: 11033 - DNA, 2635 bp, Homo sapiens
  source 1..2635: mol_type = unassigned DNA
ctcaaaaggggccggatttccttctcctggaggcagatgttgcctctctctctcgctcggattggttcagtgcactctagaaacactgctgtggtggagaaactggaccccaggtctggagcgaattccagcctgcagggctgataagcgaggcattagtgagattgagagagactttaccccgccgtggtggttggagggcgcgcagtagagcagcagcacaggcgcgggtcccgggaggccggctctgctcgcgccgagatgtggaatctccttcacgaaaccgactcggctgtggccaccgcgcgccgcccgcgctggctgtgcgctggggcgctggtgctggcgggtggcttctttctcctcggcttcctcttcgggtggtttataaaatcctccaatgaagctactaacattactccaaagcataatatgaaagcatttttggatgaattgaaagctgagaacatcaagaagttcttatataattttacacagataccacatttagcaggaacagaacaaaactttcagcttgcaaagcaaattcaatcccagtggaaagaatttggcctggattctgttgagctagcacattatgatgtcctgttgtcctacccaaataagactcatcccaactacatctcaataattaatgaagatggaaatgagattttcaacacatcattatttgaaccacctcctccaggatatgaaaatgtttcggatattgtaccacctttcagtgctttctctcctcaaggaatgccagagggcgatctagtgtatgttaactatgcacgaactgaagacttctttaaattggaacgggacatgaaaatcaattgctctgggaaaattgtaattgccagatatgggaaagttttcagaggaaataaggttaaaaatgcccagctggcaggggccaaaggagtcattctctactccgaccctgctgactactttgctcctggggtgaagtcctatccagatggttggaatcttcctggaggtggtgtccagcgtggaaatatcctaaatctgaatggtgcaggagaccctctcacaccaggttacccagcaaatgaatatgcttataggcgtggaattgcagaggctgttggtcttccaagtattcctgttcatccaattggatactatgatgcacagaagctcctagaaaaaatgggtggctcagcaccaccagatagcagctggagaggaagtctcaaagtgccctacaatgttggacctggctttactggaaacttttctacacaaaaagtcaagatgcacatccactctaccaatgaagtgacaagaatttacaatgtgataggtactctcagaggagcagtggaaccagacagatatgtcattctgggaggtcaccgggactcatgggtgtttggtggtattgaccctcagagtggagcagctgttgttcatgaaattgtgaggagctttggaacactgaaaaaggaagggtggagacctagaagaacaattttgtttgcaagctgggatgcagaagaatttggtcttcttggttctactgagtgggcagaggagaattcaagactccttcaagagcgtggcgtggcttatattaatgctgactcatctatagaaggaaactacactctgagagttgattgtacaccgctgatgtacagcttggtacacaacctaacaaaagagctgaaaagccctgatgaaggctttgaaggcaaatctctttatgaaagttggactaaaaaaagtccttccccagagttcagtggcatgcccaggataagcaaattgggatctggaaatgattttgaggtgttcttccaacgacttggaattgcttcaggcagagcacggtatactaaaaattgggaaacaaacaaattcagcggctatccactgtatcacagtgtctatgaaacatatgagttggtggaaaagttttatgatccaatgtttaaatatcacctcactgtggcccaggttcgaggagggatggtgtttgagctagccaattccatagtgctcccttttgattgtcgagattatgctgtagttttaagaaagtatgctgacaaaatctacagtatttctatgaaacatccacaggaaatgaagacatacagtgtatcatttgattcacttttttctgcagtaaagaattttacagaaattgcttccaagttcagtgagagactccaggactttgacaaaagcaacccaatagtattaagaatgatgaatgatcaactcatgtttctggaaagagcatttattgatccattagggttaccagacaggcctttttataggcatgtcatctatgctccaagcagccacaacaagtatgcaggggagtcattcccaggaatttatgatgctctgtttgatattgaaagcaaagtggacccttccaaggcctggggagaagtgaagagacagatttatgttgcagccttcacagtgcaggcagctgcagagactttgagtgaagtagcctaagaggattctttagagaatccgtattgaatttgtgtggtatgtcactcagaaagaatcgtaatgggtatattgataaattttaaaattggtatatttgaaataaagttgaatattatatata

SEQ ID NO: 11034 - DNA, 2697 bp, Homo sapiens
  source 1..2697: mol_type = unassigned DNA
agatgttgcctctctctctcgctcggattggttcagtgcactctagaaacactgctgtggtggagaaactggaccccaggtctggagcgaattccagcctgcagggctgataagcgaggcattagtgagattgagagagactttaccccgccgtggtggttggagggcgcgcagtagagcagcagcacaggcgcgggtcccgggaggccggctctgctcgcgccgagatgtggaatctccttcacgaaaccgactcggctgtggccaccgcgcgccgcccgcgctggctgtgcgctggggcgctggtgctggcgggtggcttctttctcctcggcttcctcttcggttaaaagccaactgcaaggtctaatgactgcaggatctagctatccattgtttctggccgcctatgcgtgcactgggtgtctggcagagaggctggggtggtttataaaatcctccaatgaagctactaacattactccaaagcataatatgaaagcatttttggatgaattgaaagctgagaacatcaagaagttcttatataattttacacagataccacatttagcaggaacagaacaaaactttcagcttgcaaagcaaattcaatcccagtggaaagaatttggcctggattctgttgagctagcacattatgatgtcctgttgtcctacccaaataagactcatcccaactacatctcaataattaatgaagatggaaatgagattttcaacacatcattatttgaaccacctcctccaggatatgaaaatgtttcggatattgtaccacctttcagtgctttctctcctcaaggaatgccagagggcgatctagtgtatgttaactatgcacgaactgaagacttctttaaattggaacgggacatgaaaatcaattgctctgggaaaattgtaattgccagatatgggaaagttttcagaggaaataaggttaaaaatgcccagctggcaggggccaaaggagtcattctctactccgaccctgctgactactttgctcctggggtgaagtcctatccagatggttggaatcttcctggaggtggtgtccagcgtggaaatatcctaaatctgaatggtgcaggagaccctctcacaccaggttacccagcaaatgaatatgcttataggcgtggaattgcagaggctgttggtcttccaagtattcctgttcatccaattggatactatgatgcacagaagctcctagaaaaaatgggtggctcagcaccaccagatagcagctggagaggaagtctcaaagtgccctacaatgttggacctggctttactggaaacttttctacacaaaaagtcaagatgcacatccactctaccaatgaagtgacaagaatttacaatgtgataggtactctcagaggagcagtggaaccagacagatatgtcattctgggaggtcaccgggactcatgggtgtttggtggtattgaccctcagagtggagcagctgttgttcatgaaattgtgaggagctttggaacactgaaaaaggaagggtggagacctagaagaacaattttgtttgcaagctgggatgcagaagaatttggtcttcttggttctactgagtgggcagaggagaattcaagactccttcaagagcgtggcgtggcttatattaatgctgactcatctatagaaggaaactacactctgagagttgattgtacaccgctgatgtacagcttggtacacaacctaacaaaagagctgaaaagccctgatgaaggctttgaaggcaaatctctttatgaaagttggactaaaaaaagtccttccccagagttcagtggcatgcccaggataagcaaattgggatctggaaatgattttgaggtgttcttccaacgacttggaattgcttcaggcagagcacggtatactaaaaattgggaaacaaacaaattcagcggctatccactgtatcacagtgtctatgaaacatatgagttggtggaaaagttttatgatccaatgtttaaatatcacctcactgtggcccaggttcgaggagggatggtgtttgagctagccaattccatagtgctcccttttgattgtcgagattatgctgtagttttaagaaagtatgctgacaaaatctacagtatttctatgaaacatccacaggaaatgaagacatacagtgtatcatttgattcacttttttctgcagtaaagaattttacagaaattgcttccaagttcagtgagagactccaggactttgacaaaagcaacccaatagtattaagaatgatgaatgatcaactcatgtttctggaaagagcatttattgatccattagggttaccagacaggcctttttataggcatgtcatctatgctccaagcagccacaacaagtatgcaggggagtcattcccaggaatttatgatgctctgtttgatattgaaagcaaagtggacccttccaaggcctggggagaagtgaagagacagatttatgttgcagccttcacagtgcaggcagctgcagagactttgagtgaagtagcctaagaggattctttagagaatccgtattgaatttgtgtggtatgtcactcagaaagaatcgtaatgggtatattgataaattttaaaattggtatatttgaaataaagttgaatattatatat

SEQ ID NO: 11035 - DNA, 2192 bp, Homo sapiens
  source 1..2192: mol_type = unassigned DNA
agtgcactctagaaacactgctgtggtggagaaactggaccccaggtctggagcgaattccagcctgcagggctgataagcgaggcattagtgagattgagagagactttaccccgccgtggtggttggagggcgcgcagtagagcagcagcacaggcgcgggtcccgggaggccggctctgctcgcgccgagatgtggaatctccttcacgaaaccgactcggctgtggccaccgcgcgccgcccgcgctggctgtgcgctggggcgctggtgctggcgggtggcttctttctcctcggcttcctcttcgggtggtttataaaatcctccaatgaagctactaacattactccaaagcataatatgaaagcatttttggatgaattgaaagctgagaacatcaagaagttcttataattttcaacacatcattatttgaaccacctcctccaggatatgaaaatgtttcggatattgtaccacctttcagtgctttctctcctcaaggaatgccagagggcgatctagtgtatgttaactatgcacgaactgaagacttctttaaattggaacgggacatgaaaatcaattgctctgggaaaattgtaattgccagatatgggaaagttttcagaggaaataagaatatgcttataggcgtggaattgcagaggctgttggtcttccaagtattcctgttcatccaattggatactatgatgcacagaagctcctagaaaaaatgggtggctcagcaccaccagatagcagctggagaggaagtctcaaagtgccctacaatgttggacctggctttactggaaacttttctacacaaaaagtcaagatgcacatccactctaccaatgaagtgacaagaatttacaatgtgataggtactctcagaggagcagtggaaccagacagatatgtcattctgggaggtcaccgggactcatgggtgtttggtggtattgaccctcagagtggagcagctgttgttcatgaaattgtgaggagctttggaacactgaaaaaggaagggtggagacctagaagaacaattttgtttgcaagctgggatgcagaagaatttggtcttcttggttctactgagtgggcagaggagaattcaagactccttcaagagcgtggcgtggcttatattaatgctgactcatctatagaaggaaactacactctgagagttgattgtacaccgctgatgtacagcttggtacacaacctaacaaaagagctgaaaagccctgatgaaggctttgaaggcaaatctctttatgaaagttggactaaaaaaagtccttccccagagttcagtggcatgcccaggataagcaaattgggatctggaaatgattttgaggtgttcttccaacgacttggaattgcttcaggcagagcacggtatactaaaaattgggaaacaaacaaattcagcggctatccactgtatcacagtgtctatgaaacatatgagttggtggaaaagttttatgatccaatgtttaaatatcacctcactgtggcccaggttcgaggagggatggtgtttgagctagccaattccatagtgctcccttttgattgtcgagattatgctgtagttttaagaaagtatgctgacaaaatctacagtatttctatgaaacatccacaggaaatgaagacatacagtgtatcatttgattcacttttttctgcagtaaagaattttacagaaattgcttccaagttcagtgagagactccaggactttgacaaaagcaacccaatagtattaagaatgatgaatgatcaactcatgtttctggaaagagcatttattgatccattagggttaccagacaggcctttttataggcatgtcatctatgctccaagcagccacaacaagtatgcaggggagtcattcccaggaatttatgatgctctgtttgatattgaaagcaaagtggacccttccaaggcctggggagaagtgaagagacagatttatgttgcagccttcacagtgcaggcagctgcagagactttgagtgaagtagcctaagaggattctttagagaatccgtattgaatttgtgtggtatgtcactcagaaagaatcgtaatgggtatattgataaattttaaaattggtatatttgaaataaagttgaatattatatat

SEQ ID NO: 11036 - DNA, 2403 bp, Homo sapiens
  source 1..2403: mol_type = unassigned DNA
ggctgataagcgaggcattagtgagattgagagagactttaccccgccgtggtggttggagggcgcgcagtagagcagcagcacaggcgcgggtcccgggaggccggctctgctcgcgccgagatgtggaatctccttcacgaaaccgactcggctgtggccaccgcgcgccgcccgcgctggctgtgcgctggggcgctggtgctggcgggtggcttctttctcctcggcttcctcttcgggtggtttataaaatcctccaatgaagctactaacattactccaaagcataatatgaaagcatttttggatgaattgaaagctgagaacatcaagaagttcttatataattttacacagataccacatttagcaggaacagaacaaaactttcagcttgcaaagcaaattcaatcccagtggaaagaatttggcctggattctgttgagctagcacattatgatgtcctgttgtcctacccaaataagactcatcccaactacatctcaataattaatgaagatggaaatgagattttcaacacatcattatttgaaccacctcctccaggatatgaaaatgtttcggatattgtaccacctttcagtgctttctctcctcaaggaatgccagagggcgatctagtgtatgttaactatgcacgaactgaagacttctttaaattggaacgggacatgaaaatcaattgctctgggaaaattgtaattgccagatatgggaaagttttcagaggaaataaggttaaaaatgcccagctggcaggggccaaaggagtcattctctactccgaccctgctgactactttgctcctggggtgaagtcctatccagatggttggaatcttcctggaggtggtgtccagcgtggaaatatcctaaatctgaatggtgcaggagaccctctcacaccaggttacccagcaaatgaatatgcttataggcgtggaattgcagaggctgttggtcttccaagtattcctgttcatccaattggatactatgatgcacagaagctcctagaaaaaatgggtggctcagcaccaccagatagcagctggagaggaagtctcaaagtgccctacaatgttggacctggctttactggaaacttttctacacaaaaagtcaagatgcacatccactctaccaatgaagtgacaagaatttacaatgtgataggtactctcagaggagcagtggaaccagacagatatgtcattctgggaggtcaccgggactcatgggtgtttggtggtattgaccctcagagtggagcagctgttgttcatgaaattgtgaggagctttggaacactgaaaaaggaagggtggagacctagaagaacaattttgtttgcaagctgggatgcagaagaatttggtcttcttggttctactgagtgggcagaggagaattcaagactccttcaagagcgtggcgtggcttatattaatgctgactcatctatagaaggaaactacactctgagagttgattgtacaccgctgatgtacagcttggtacacaacctaacaaaagagctgaaaagccctgatgaaggctttgaaggcaaatctctttatgaaagttggactaaaaaaagtccttccccagagttcagtggcatgcccaggataagcaaattgggatctggaaatgattttgaggtgttcttccaacgacttggaattgcttcaggcagagcacggtatactaaaaattgggaaacaaacaaattcagcggctatccactgtatcacagtgtctatgaaacatatgagttggtggaaaagttttatgatccaatgtttaaatatcacctcactgtggcccaggttcgaggagggatggtgtttgagctagccaattccatagtgctcccttttgattgtcgagattatgctgtagttttaagaaagtatgctgacaaaatctacagtatttctatgaaacatccacaggaaatgaagacatacagtgtatcatttgattcacttttttctgcagtaaagaattttacagaaattgcttccaagttcagtgagagactccaggactttgacaaaagcaagcatgtcatctatgctccaagcagccacaacaagtatgcaggggagtcattcccaggaatttatgatgctctgtttgatattgaaagcaaagtggacccttccaaggcctggggagaagtgaagagacagatttatgttgcagccttcacagtgcaggcagctgcagagactttgagtgaagtagcctaagaggattctttagagaatccgtattgaatttgtgtggtatgtcactcagaaagaatcgtaatgggtatattgataaattttaaaattggtatatttgaaataaagttgaatattatatat

SEQ ID NO: 11037 - DNA, 1896 bp, Homo sapiens
  source 1..1896: mol_type = unassigned DNA
ctcaaaaggggccggatttccttctcctggaggcagatgttgcctctctctctcgctcggattggttcagtgcactctagaaacactgctgtggtggagaaactggaccccaggtctggagcgaattccagcctgcagggctgataagcgaggcattagtgagattgagagagactttaccccgccgtggtggttggagggcgcgcagtagagcagcagcacaggcgcgggtcccgggaggccggctctgctcgcgccgagatgtggaatctccttcacgaaaccgactcggctgtggccaccgcgcgccgcccgcgctggctgtgcgctggggcgctggtgctggcgggtggcttctttctcctcggcttcctcttcgggtggtttataaaatcctccaatgaagctactaacattactccaaagcataatatgaaagcatttttggatgaattgaaagctgagaacatcaagaagttcttatataattttacacagataccacatttagcaggaacagaacaaaactttcagcttgcaaagcaaattcaatcccagtggaaagaatttggcctggattctgttgagctagcacattatgatgtcctgttgtcctacccaaataagactcatcccaactacatctcaataattaatgaagatggaaatgagattttcaacacatcattatttgaaccacctcctccaggatatgaaaatgtttcggatattgtaccacctttcagtgctttctctcctcaaggaatgccagagggcgatctagtgtatgttaactatgcacgaactgaagacttctttaaattggaacgggacatgaaaatcaattgctctgggaaaattgtaattgccagatatgggaaagttttcagaggaaataaggttaaaaatgcccagctggcaggggccaaaggagtcattctctactccgaccctgctgactactttgctcctggggtgaagtcctatccagatggttggaatcttcctggaggtggtgtccagcgtggaaatatcctaaatctgaatggtgcaggagaccctctcacaccaggttacccagcaaatgaatatgcttataggcgtggaattgcagaggctgttggtcttccaagtattcctgttcatccaattggatactatgatgcacagaagctcctagaaaaaatgggtggctcagcaccaccagatagcagctggagaggaagtctcaaagtgccctacaatgttggacctggctttactggaaacttttctacacagaaagtcaagatgcacatccactctaccaatgaagtgacaagaatttacaatgtgataggtactctcagaggagcagtggaaccagacagatatgtcattctgggaggtcaccgggactcatgggtgtttggtggtattgaccctcagagtggagcagctgttgttcatgaaattgtgaggagctttggaacactgaaaaaggaagacattttagggtggagacctagaagaacaattttgtttgcaagctgggatgcagaagaatttggtcttcttggttctactgagtgggcagaggagaattcaagactccttcaagagcgtggcgtggcttatattaatgctgactcatctatagaaggaaactacactctgagagttgattgtacaccgctgatgtacagcttggtacacaacctaacaaaagagctgaaaagccctgatgaaggctttgaaggcaaatctctttatgaaagttggactaaaaaaagtccttccccagagttcagtggcatgcccaggataagcaaattgggatctggaaatgattttgaggtgttcttccaacgacttggaattgcttcaggcagagcacggtatactaaaaaaaagaaa

SEQ ID NO: 11038 - DNA, 2225 bp, Homo sapiens
  source 1..2225: mol_type = unassigned DNA
ccaccgcgcgccgcccgcgctggctgtgcgctggggcgctggtgctggcgggtggcttctttctcctcggcttcctcttcggttaaaagccaactgcaaggtctaatgactgcaggatctagctatccattgtttctggccgcctatgcgtgcactgggtgtctggcagagaggctggggtggtttataaaatcctccaatgaagctactaacattactccaaagcataatatgaaagcatttttggatgaattgaaagctgagaacatcaagaagttcttatataattttacacagataccacatttagcaggaacagaacaaaactttcagcttgcaaagcaaattcaatcccagtggaaagaatttggcctggattctgttgagctagcacattatgatgtcctgttgtcctacccaaataagactcatcccaactacatctcaataattaatgaagatggaaatgagattttcaacacatcattatttgaaccacctcctccaggatatgaaaatgtttcggatattgtaccacctttcagtgctttctctcctcaaggaatgccagagggcgatctagtgtatgttaactatgcacgaactgaagacttctttaaattggaacgggacatgaaaatcaattgctctgggaaaattgtaattgccagatatgggaaagttttcagaggaaataaggttaaaaatgcccagctggcaggggccaaaggagtcattctctactccgaccctgctgactactttgctcctggggtgaagtcctatccagatggttggaatcttcctggaggtggtgtccagcgtggaaatatcctaaatctgaatggtgcaggagaccctctcacaccaggttacccagcaaatgaatatgcttataggcgtggaattgcagaggctgttggtcttccaagtattcctgttcatccaattggatactatgatgcacagaagctcctagaaaaaatgggtggctcagcaccaccagatagcagctggagaggaagtctcaaagtgccctacaatgttggacctggctttactggaaacttttctacacaaaaagtcaagatgcacatccactctaccaatgaagtgacaagaatttacaatgtgataggtactctcagaggagcagtggaaccagacagatatgtcattctgggaggtcaccgggactcatgggtgtttggtggtattgaccctcagagtggagcagctgttgttcatgaaattgtgaggagctttggaacactgaaaaaggaagggtggagacctagaagaacaattttgtttgcaagctgggatgcagaagaatttggtcttcttggttctactgagtgggcagaggagaattcaagactccttcaagagcgtggcgtggcttatattaatgctgactcatctatagaaggaaactacactctgagagttgattgtacaccgctgatgtacagcttggtacacaacctaacaaaagagctgaaaagccctgatgaaggctttgaaggcaaatctctttatgaaagttggactaaaaaaagtccttccccagagttcagtggcatgcccaggataagcaaattgggatctggaaatgattttgaggtgttcttccaacgacttggaattgcttcaggcagagcacggtatactaaaaattgggaaacaaacaaattcagcggctatccactgtatcacagtgtctatgaaacatatgagttggtggaaaagttttatgatccaatgtttaaatatcacctcactgtggcccaggttcgaggagggatggtgtttgagctagccaattccatagtgctcccttttgattgtcgagattatgctgtagttttaagaaagtatgctgacaaaatctacagtatttctatgaaacatccacaggaaatgaagacatacagtgtatcatttgattcacttttttctgcagtaaagaattttacagaaattgcttccaagttcagtgagagactccaggactttgacaaaagcaagcatgtcatctatgctccaagcagccacaacaagtatgcaggggagtcattcccaggaatttatgatgctctgtttgatattgaaagcaaagtggacccttccaaggcctggggagaagtgaagagacagatttatgttgcagccttcacagtgcaggcagctgcagagactttgagtgaagtagcctaagagga

SEQ ID NO: 11039 - DNA, 1107 bp, Homo sapiens
  source 1..1107: mol_type = unassigned DNA
tggaggcctggctggtgctcacatacaataattaactgctgagtggccttcgcccaatcccaggctccactcctgggctccattcccactccctgcctgtctcctaggccactaaaccacagctgtcccctggaataaggcaagggggagtgtagagcagagcagaagcctgagccagacggagagccacctcctctcccagggacagacatggctcagcggatgacaacacagctgctgctccttctagtgtgggtggctgtagtaggggaggctcagacaaggattgcatgggccaggactgagcttctcaatgtctgcatgaacgccaagcaccacaaggaaaagccaggccccgaggacaagttgcatgagcagtgtcgaccctggaggaagaatgcctgctgttctaccaacaccagccaggaagcccataaggatgtttcctacctatatagattcaactggaaccactgtggagagatggcacctgcctgcaaacggcatttcatccaggacacctgcctctacgagtgctcccccaacttggggccctggatccagcaggtggatcagagctggcgcaaagagcgggtactgaacgtgcccctgtgcaaagaggactgtgagcaatggtgggaagattgtcgcacctcctacacctgcaagagcaactggcacaagggctggaactggacttcagggtttaacaagtgcgcagtgggagctgcctgccaacctttccatttctacttccccacacccactgttctgtgcaatgaaatctggactcactcctacaaggtcagcaactacagccgagggagtggccgctgcatccagatgtggttcgacccagcccagggcaaccccaatgaggaggtggcgaggttctatgctgcagccatgagtggggctgggccctgggcagcctggcctttcctgcttagcctggccctaatgctgctgtggctgctcagctgacctccttttaccttctgatacctggaaatccctgccctgttcagccccacagctcccaactatttggttcctgctccatggtcgggcctctgacagccactttgaataaaccagacaccgcac

SEQ ID NO: 11040 - DNA, 947 bp, Homo sapiens
  source 1..947: mol_type = unassigned DNA
tccgcattccttggtgccactgaccacagctctttcttcagggacagacatggctcagcggatgacaacacagctgctgctccttctagtgtgggtggctgtagtaggggaggctcagacaaggattgcatgggccaggactgagcttctcaatgtctgcatgaacgccaagcaccacaaggaaaagccaggccccgaggacaagttgcatgagcagtgtcgaccctggaggaagaatgcctgctgttctaccaacaccagccaggaagcccataaggatgtttcctacctatatagattcaactggaaccactgtggagagatggcacctgcctgcaaacggcatttcatccaggacacctgcctctacgagtgctcccccaacttggggccctggatccagcaggtggatcagagctggcgcaaagagcgggtactgaacgtgcccctgtgcaaagaggactgtgagcaatggtgggaagattgtcgcacctcctacacctgcaagagcaactggcacaagggctggaactggacttcagggtttaacaagtgcgcagtgggagctgcctgccaacctttccatttctacttccccacacccactgttctgtgcaatgaaatctggactcactcctacaaggtcagcaactacagccgagggagtggccgctgcatccagatgtggttcgacccagcccagggcaaccccaatgaggaggtggcgaggttctatgctgcagccatgagtggggctgggccctgggcagcctggcctttcctgcttagcctggccctaatgctgctgtggctgctcagctgacctccttttaccttctgatacctggaaatccctgccctgttcagccccacagctcccaactatttggttcctgctccatggtcgggcctctgacagccactttgaataaaccagacaccgcaca

SEQ ID NO: 11041 - DNA, 1331 bp, Homo sapiens
  source 1..1331: mol_type = unassigned DNA
ggaaaggattttctcagcccccatccccagcactgtgtgttggccgcacccatgagagcctcagcactctgaaggtgcagggggcaaaggccaaaagagctctggcctgaacttgggtggtccctactgtgtgacttggggcatggccctcatctgtgctgaaatgattccacaaagattaaactggctatcatttgttgatttcccccttcttacatttaatccttgcaggagaaagctaagcctcaagatagtttgcttctctttcccccaaggccaaggagaaggtggagtgagggctggggtcgggacaggttgaacgggaaccctgtgctctaaacagttagggtttgttcccgcaggaactgaacccaaaggatcacctggtattccctgagagtacagatttctccggcgtggccctcaagggacagacatggctcagcggatgacaacacagctgctgctccttctagtgtgggtggctgtagtaggggaggctcagacaaggattgcatgggccaggactgagcttctcaatgtctgcatgaacgccaagcaccacaaggaaaagccaggccccgaggacaagttgcatgagcagtgtcgaccctggaggaagaatgcctgctgttctaccaacaccagccaggaagcccataaggatgtttcctacctatatagattcaactggaaccactgtggagagatggcacctgcctgcaaacggcatttcatccaggacacctgcctctacgagtgctcccccaacttggggccctggatccagcaggtggatcagagctggcgcaaagagcgggtactgaacgtgcccctgtgcaaagaggactgtgagcaatggtgggaagattgtcgcacctcctacacctgcaagagcaactggcacaagggctggaactggacttcagggtttaacaagtgcgcagtgggagctgcctgccaacctttccatttctacttccccacacccactgttctgtgcaatgaaatctggactcactcctacaaggtcagcaactacagccgagggagtggccgctgcatccagatgtggttcgacccagcccagggcaaccccaatgaggaggtggcgaggttctatgctgcagccatgagtggggctgggccctgggcagcctggcctttcctgcttagcctggccctaatgctgctgtggctgctcagctgacctccttttaccttctgatacctggaaatccctgccctgttcagccccacagctcccaactatttggttcctgctccatggtcgggcctctgacagccactttgaataaaccagacaccgc

SEQ ID NO: 11042 - DNA, 1061 bp, Homo sapiens
  source 1..1061: mol_type = unassigned DNA
actaaaccacagctgtcccctggaataaggcaagggggagtgtagagcagagcagaagcctgagccagacggagagccacctcctctcccaggaactgaacccaaaggatcacctggtattccctgagagtacagatttctccggcgtggccctcaagggacagacatggctcagcggatgacaacacagctgctgctccttctagtgtgggtggctgtagtaggggaggctcagacaaggattgcatgggccaggactgagcttctcaatgtctgcatgaacgccaagcaccacaaggaaaagccaggccccgaggacaagttgcatgagcagtgtcgaccctggaggaagaatgcctgctgttctaccaacaccagccaggaagcccataaggatgtttcctacctatatagattcaactggaaccactgtggagagatggcacctgcctgcaaacggcatttcatccaggacacctgcctctacgagtgctcccccaacttggggccctggatccagcaggtggatcagagctggcgcaaagagcgggtactgaacgtgcccctgtgcaaagaggactgtgagcaatggtgggaagattgtcgcacctcctacacctgcaagagcaactggcacaagggctggaactggacttcagggtttaacaagtgcgcagtgggagctgcctgccaacctttccatttctacttccccacacccactgttctgtgcaatgaaatctggactcactcctacaaggtcagcaactacagccgagggagtggccgctgcatccagatgtggttcgacccagcccagggcaaccccaatgaggaggtggcgaggttctatgctgcagccatgagtggggctgggccctgggcagcctggcctttcctgcttagcctggccctaatgctgctgtggctgctcagctgacctccttttaccttctgatacctggaaatccctgccctgttcagccccacagctcccaactatttggttcctgctccatggtcgggcctctgacagccactttgaataaaccagacaccgc

SEQ ID NO: 11043 - DNA, 1138 bp, Homo sapiens
  source 1..1138: mol_type = unassigned DNA
ctaagtagggagatttcactcagtgcttaccagagcgcgttgtctaccctgtaccgaagacagaggctgtggggacagcctaggggcctggatctattgcctacttagagagaggccaactcagacacagccgtgtatgctcccagcagcaacggaggttcagctccgcctgcagggacagaaagacatggtctggaaatggatgccacttctgctgcttctggtctgtgtagccaccatgtgcagtgcccaggacaggactgatctcctcaatgtctgtatggatgccaagcaccacaagacaaagccaggtcctgaggacaagctgcatgaccaatgcagtccctggaagaagaatgcctgctgcacagccagcaccagccaggagctgcacaaggacacctcccgcctgtacaactttaactgggaccactgcggcaagatggagcccgcctgcaagcgccacttcatccaggacacctgtctctatgagtgctcacccaacctggggccctggatccagcaggtgaatcagagctggcgcaaagaacgcttcctggatgtgcccttatgcaaagaggactgtcagcgctggtgggaggattgtcacacctcccacacgtgcaagagcaactggcacagaggatgggactggacctcaggagttaacaagtgcccagctggggctctctgccgcacctttgagtcctacttccccactccagctgccctttgtgaaggcctctggagtcactcatacaaggtcagcaactacagccgagggagcggccgctgcatccagatgtggtttgattcagcccagggcaaccccaacgaggaagtggcgaggttctatgctgcagccatgcatgtgaatgctggtgagatgcttcatgggactgggggtctcctgctcagtctggccctgatgctgcaactctggctccttggctgagttcagtcctcccagactacctgccctcagcttggataaccaggctgggctcagctcagctcccacaaatgacagccccttaagcatgcttctattagtcacctaaccctctgtcacccagtctgttgctgctccatggtggggccaagagtcacttctaataaacagactgttttctaataa

SEQ ID NO: 11044 - DNA, 1120 bp, Homo sapiens
  source 1..1120: mol_type = unassigned DNA
atttcactcagtgcttaccagagcgcgttgtctaccctgtaccgaagacagaggctgtggggacagcctaggggcctggatctattgcctacttagagagaggccaactcagacacagccgtgtatgctcccagcagcaacggaggttcagctccgcctgcagggacagaaagacatggtctggaaatggatgccacttctgctgcttctggtctgtgtagccaccatgtgcagtgcccaggacaggactgatctcctcaatgtctgtatggatgccaagcaccacaagacaaagccaggtcctgaggacaagctgcatgaccaatgcagtccctggaagaagaatgcctgctgcacagccagcaccagccaggagctgcacaaggacacctcccgcctgtacaactttaactgggaccactgcggcaagatggagcccgcctgcgccacttcatccaggacacctgtctctatgagtgctcaccctggggccctggatccagcaggtgaatcagagctggcgaagaacgcttcctggatgtgcccttatgcaaagaggactgtcagcgctggtgggaggattgtcacacctcccacacgtgcaagagcaactggcacagaggatgggactggacctcaggagttaacaagtgcccagctggggctctctgccgcacctttgagtcctacttccccactccagctgccctttgtgaaggcctctggagtcactcatacaaggtcagcaactacagccgagggagcggccgctgcatccagatgtggtttgattcagcccagggcaaccccaacgaggaagtggcgaggttctatgctgcagccatgcatgtgaatgctggtgagatgcttcatgggactgggggtctcctgctcagtctggccctgatgctgcaactctggctccttggctgagttcagtcctcccagactacctgccctcagcttggataaccaggctgggctcagctcagctcccacaaatgacagccccttaagcatgcttctattagtcacctaaccctctgtcacccagtctgttgctgctccatggtggggccaagagtcacttctaataaacagactgttttctaataattcc

SEQ ID NO: 11045 - DNA, 610 bp, Homo sapiens
  source 1..610: mol_type = unassigned DNA
aggctgtggggacagcctaggggcctggatctattgcctacttagagagaggccaactcagacacagccgtctccgcctgcagggacagaaagacatggtctggaaatggatgccacttctgctgcttctggtctgtgtagccaccatgtgcagtgcccaggacaggactgatctcctcaatgtctgtatggatgccaagcaccacaagacaaagccaggtcctgaggacaagctgcatgaccaatgcagtccctggaagaagaatgcctgctgcacagccagcaccagccaggagctgcacaaggacacctcccgcctgtacaactttaactgggaccactgcggcaagatggagcccgcctgcaagcgccacttcatccaggacacctgtctctatgagtgctcacccaacctggggccctggatccagcaggtgaatcagagctggcgcaaagaacgcttcctggatgtgcccttatgcaaagaggactgtcagcgctggtgggaggattgtcacacctcccacacgtgcaagagcaactggcacagaggatgggactggacctcaggagttaacaagtgcccagctggggctctctgccgcacctt

SEQ ID NO: 11046 - DNA, 2176 bp, Homo sapiens
  source 1..2176: mol_type = unassigned DNA
ctgagatctgtggaggtttttctctgcaaatgcaggaagaaatcaggtggatggatgcataattatggccctgctcctggtctctttgctggcattcctgagcttgggctcaggatgtcatcatcggatctgtcactgctctaacagggtttttctctgccaagagagcaaggtgacagagattccttctgacctcccgaggaatgccattgaactgaggtttgtcctcaccaagcttcgagtcatccaaaaaggtgcattttcaggatttggggacctggagaaaatagagatctctcagaatgatgtcttggaggtgatagaggcagatgtgttctccaaccttcccaaattacatgaaattagaattgaaaaggccaacaacctgctctacatcaaccctgaggccttccagaaccttcccaaccttcaatatctgttaatatccaacacaggtattaagcaccttccagatgttcacaagattcattctctccaaaaagttttactatggctgaataagaatgggattcaagaaatacacaactgtgcattcaatggaacccaactagatgagctgaatctaagcgataataataatttagaagaattgcctaatgatgttttccacggagcctctggaccagtcattctagatatttcaagaacaaggatccattccctgcctagctatggcttagaaaatcttaagaagctgagggccaggtcgacttacaacttaaaaaagctgcctactctggaaaagcttgtcgccctcatggaagccagcctcacctatcccagccattgctgtgcctttgcaaactggagacggcaaatctctgagcttcatccaatttgcaacaaatctattttaaggcaagaagttgattatatgactcaggctaggggtcagagatcctctctggcagaagacaatgagtccagctacagcagaggatttgacatgacgtacactgagtttgactatgacttatgcaatgaagtggttgacgtgacctgctcccctaagccagatgcattcaacccatgtgaagatatcatggggtacaacatcctcagagtcctgatatggtttatcagcatcctggccatcactgggaacatcatagtgctagtgatcctaactaccagccaatataaactcacagtccccaggttccttatgtgcaacctggcctttgctgatctctgcattggaatctacctgctgctcattgcatcagttgatatccataccaagagccaatatcacaactatgccattgactggcaaactggggcaggctgtgatgctgctggctttttcactgtctttgccagtgagctgtcagtctacactctgacagctatcaccttggaaagatggcataccatcacgcatgccatgcagctggactgcaaggtgcagctccgccatgctgccagtgtcatggtgatgggctggatttttgcttttgcagctgccctctttcccatctttggcatcagcagctacatgaaggtgagcatctgcctgcccatggatattgacagccctttgtcacagctgtatgtcatgtccctccttgtgctcaatgtcctggcctttgtggtcatctgtggctgctatatccacatctacctcacagtgcggaaccccaacatcgtgtcctcctctagtgacaccaggatcgccaagcgcatggccatgctcatcttcactgacttcctctgcatggcacccatttctttctttgccatttctgcctccctcaaggtgcccctcatcactgtgtccaaagcaaagattctgctggttctgtttcaccccatcaactcctgtgccaaccccttcctctatgccatctttaccaaaaactttcgcagagatttcttcattctgctgagcaagtgtggctgctatgaaatgcaagcccaaatttataggacagaaacttcatccactgtccacaacacccatccaaggaatggccactgctcttcagctcccagagtcaccagtggttccacttacatacttgtccctctaagtcatttagcccaaaactaaaacacaatgtgaaaatgtatctgagtattgaatgataattcagtcttgcctttgaagggtatgtcacaaagagctgacagtgcttctacacatttcatctaa

SEQ ID NO: 11047 - DNA, 2588 bp, Homo sapiens
  source 1..2588: mol_type = unassigned DNA
agttctcaagtcagatctcttctcataagggcactgtgtggagcttctgagatctgtggaggtttttctctgcaaatgcaggaagaaatcaggtggatggatgcataattatggccctgctcctggtctctttgctggcattcctgagcttgggctcaggatgtcatcatcggatctgtcactgctctaacagggtttttctctgccaagagagcaaggtgacagagattccttctgacctcccgaggaatgccattgaactgaggtttgtcctcaccaagcttcgagtcatccaaaaaggtgcattttcaggatttggggacctggagaaaatagagatctctcagaatgatgtcttggaggtgatagaggcagatgtgttctccaaccttcccaaattacatgaaattagaattgaaaaggccaacaacctgctctacatcaaccctgaggccttccagaaccttcccaaccttcaatatctgttaatatccaacacaggtattaagcaccttccagatgttcacaagattcattctctccaaaaagttttacttgacattcaagataacataaacatccacacaattgaaagaaattctttcgtggggctgagctttgaaagtgtgattctatggctgaataagaatgggattcaagaaatacacaactgtgcattcaatggaacccaactagatgagctgaatctaagcgataataataatttagaagaattgcctaatgatgttttccacggagcctctggaccagtcattctctctgagcttcatccaatttgcaacaaatctattttaaggcaagaagttgattatatgactcaggctaggggtcagagatcctctctggcagaagacaatgagtccagctacagcagaggatttgacatgacgtacactgagtttgactatgacttatgcaatgaagtggttgacgtgacctgctcccctaagccagatgcattcaacccatgtgaagatatcatggggtacaacatcctcagagtcctgatatggtttatcagcatcctggccatcactgggaacatcatagtgctagtgatcctaactaccagccaatataaactcacagtccccaggttccttatgtgcaacctggcctttgctgatctctgcattggaatctacctgctgctcattgcatcagttgatatccataccaagagccaatatcacaactatgccattgactggcaaactggggcaggctgtgatgctgctggctttttcactgtctttgccagtgagctgtcagtctacactctgacagctatcaccttggaaagatggcataccatcacgcatgccatgcagctggactgcaaggtgcagctccgccatgctgccagtgtcatggtgatgggctggatttttgcttttgcagctgccctctttcccatctttggcatcagcagctacatgaaggtgagcatctgcctgcccatggatattgacagccctttgtcacagctgtatgtcatgtccctccttgtgctcaatgtcctggcctttgtggtcatctgtggctgctatatccacatctacctcacagtgcggaaccccaacatcgtgtcctcctctagtgacaccaggatcgccaagcgcatggccatgctcatcttcactgacttcctctgcatggcacccatttctttctttgccatttctgcctccctcaaggtgcccctcatcactgtgtccaaagcaaagattctgctggttctgtttcaccccatcaactcctgtgccaaccccttcctctatgccatctttaccaaaaactttcgcagagatttcttcattctgctgagcaagtgtggctgctatgaaatgcaagcccaaatttataggacagaaacttcatccactgtccacaacacccatccaaggaatggccactgctcttcagctcccagagtcaccagtggttccacttacatacttgtccctctaagtcatttagcccaaaactaaaacacaatgtgaaaatgtatctgagtattgaatgataattcagtcttgcctttgaagggtatgtcacaaagagctgacagtgcttctacacatttcatctaatttaatattcctggcatacctttaaggtaaattggtcaggaactattaattccatgtgatacattaggaagctgaattattagtaacaacaataataattaaagaatgcaatactgtattacatattttatccttatatatgttatttttgcacgttatgttcaaagtgcttttgttcagatatctcaagtgatccctgttaaataagcaggacagggattattcttggagttttacaaatgaggaaaccacgactcaaagagttaagtgacttgttcaaaattgtttagtttgtaagaggcagagccaggattaggtattccgactcccagagaatttcccagagaagcaccatggtattcattcattcattcattcaacaaatattaattgaacacccatctgaagcctttgtaatgcgtcagtgtggataggctgaaatacatttcccagatttcccttcctcatgtgttt

SEQ ID NO: 11048 - DNA, 2784 bp, Homo sapiens
  source 1..2784: mol_type = unassigned DNA
tgaccctaccagttctcaagtcagatctcttctcataagggcactgtgtggagcttctgagatctgtggaggtttttctctgcaaatgcaggaagaaatcaggtggatggatgcataattatggccctgctcctggtctctttgctggcattcctgagcttgggctcaggatgtcatcatcggatctgtcactgctctaacagggtttttctctgccaagagagcaaggtgacagagattccttctgacctcccgaggaatgccattgaactgaggtttgtcctcaccaagcttcgagtcatccaaaaaggtgcattttcaggatttggggacctggagaaaatagagatctctcagaatgatgtcttggaggtgatagaggcagatgtgttctccaaccttcccaaattacatgaaattagaattgaaaaggccaacaacctgctctacatcaaccctgaggccttccagaaccttcccaaccttcaatatctgttaatatccaacacaggtattaagcaccttccagatgttcacaagattcattctctccaaaaagttttacttgacattcaagataacataaacatccacacaattgaaagaaattctttcgtggggctgagctttgaaagtgtgattctatggctgaataagaatgggattcaagaaatacacaactgtgcattcaatggaacccaactagatgagctgaatctaagcgataataataatttagaagaattgcctaatgatgttttccacggagcctctggaccagtcattctagatatttcaagaacaaggatccattccctgcctagctatggcttagaaaatcttaagaagctgagggccaggtcgacttacaacttaaaaaagctgcctactctggaaaagcttgtcgccctcatggaagccagcctcacctatcccagccattgctgtgcctttgcaaactggagacggcaaatctctgagcttcatccaatttgcaacaaatctattttaaggcaagaagttgattatatgactcaggctaggggtcagagatcctctctggcagaagacaatgagtccagctacagcagaggatttgacatgacgtacactgagtttgactatgacttatgcaatgaagtggttgacgtgacctgctcccctaagccagatgcattcaacccatgtgaagatatcatggggtacaacatcctcagagtcctgatatggtttatcagcatcctggccatcactgggaacatcatagtgctagtgatcctaactaccagccaatataaactcacagtccccaggttccttatgtgcaacctggcctttgctgatctctgcattggaatctacctgctgctcattgcatcagttgatatccataccaagagccaatatcacaactatgccattgactggcaaactggggcaggctgtgatgctgctggctttttcactgtctttgccagtgagctgtcagtctacactctgacagctatcaccttggaaagatggcataccatcacgcatgccatgcagctggactgcaaggtgcagctccgccatgctgccagtgtcatggtgatgggctggatttttgcttttgcagctgccctctttcccatctttggcatcagcagctacatgaaggtgagcatctgcctgcccatggatattgacagccctttgtcacagctgtatgtcatgtccctccttgtgctcaatgtcctggcctttgtggtcatctgtggctgctatatccacatctacctcacagtgcggaaccccaacatcgtgtcctcctctagtgacaccaggatcgccaagcgcatggccatgctcatcttcactgacttcctctgcatggcacccatttctttctttgccatttctgcctccctcaaggtgcccctcatcactgtgtccaaagcaaagattctgctggttctgtttcaccccatcaactcctgtgccaaccccttcctctatgccatctttaccaaaaactttcgcagagatttcttcattctgctgagcaagtgtggctgctatgaaatgcaagcccaaatttataggacagaaacttcatccactgtccacaacacccatccaaggaatggccactgctcttcagctcccagagtcaccagtggttccacttacatacttgtccctctaagtcatttagcccaaaactaaaacacaatgtgaaaatgtatctgagtattgaatgataattcagtcttgcctttgaagggtatgtcacaaagagctgacagtgcttctacacatttcatctaatttaatattcctggcatacctttaaggtaaattggtcaggaactattaattccatgtgatacattaggaagctgaattattagtaacaacaataataattaaagaatgcaatactgtattacatattttatccttatatatgttatttttgcacgttatgttcaaagtgcttttgttcagatatctcaagtgatccctgttaaataagcaggacagggattattcttggagttttacaaatgaggaaaccacgactcaaagagttaagtgacttgttcaaaattgtttagtttgtaagaggcagagccaggattaggtattccgactcccagagaatttcccagagaagcaccatggtattcattcattcattcattcaacaaatattaattgaacacccatctgaagcctttgtaatgcgtcagtgtggataggctgaaatacatttcccagatttcccttcctcatgtgttt

SEQ ID NO: 11049 - DNA, 1867 bp, Homo sapiens
  source 1..1867: mol_type = unassigned DNA
agttaaatatgagagttaaatacttctagttttgaaaatgtgagatcgaaaaggcaagaaaccaggctttcctactgtctcacataatttcttacacaaaatcattttacagagagaaactgagactctgaaaaggttaatatccaacacaggtattaagcaccttccagatgttcacaagattcattctctccaaaaagttttacttgacattcaagataacataaacatccacacaattgaaagaaattctttcgtggggctgagctttgaaagtgtgattctatggctgaataagaatgggattcaagaaatacacaactgtgcattcaatggaacccaactagatgagctgaatctaagcgataataataatttagaagaattgcctaatgatgttttccacggagcctctggaccagtcattctagatatttcaagaacaaggatccattccctgcctagctatggcttagaaaatcttaagaagctgagggccaggtcgacttacaacttaaaaaagctgcctactctggaaaagcttgtcgccctcatggaagccagcctcacctatcccagccattgctgtgcctttgcaaactggagacggcaaatctctgagcttcatccaatttgcaacaaatctattttaaggcaagaagttgattatatgactcaggctaggggtcagagatcctctctggcagaagacaatgagtccagctacagcagaggatttgacatgacgtacactgagtttgactatgacttatgcaatgaagtggttgacgtgacctgctcccctaagccagatgcattcaacccatgtgaagatatcatggggtacaacatcctcagagtcctgatatggtttatcagcatcctggccatcactgggaacatcatagtgctagtgatcctaactaccagccaatataaactcacagtccccaggttccttatgtgcaacctggcctttgctgatctctgcattggaatctacctgctgctcattgcatcagttgatatccataccaagagccaatatcacaactatgccattgactggcaaactggggcaggctgtgatgctgctggctttttcactgtctttgccagtgagctgtcagtctacactctgacagctatcaccttggaaagatggcataccatcacgcatgccatgcagctggactgcaaggtgcagctccgccatgctgccagtgtcatggtgatgggctggatttttgcttttgcagctgccctctttcccatctttggcatcagcagctacatgaaggtgagcatctgcctgcccatggatattgacagccctttgtcacagctgtatgtcatgtccctccttgtgctcaatgtcctggcctttgtggtcatctgtggctgctatatccacatctacctcacagtgcggaaccccaacatcgtgtcctcctctagtgacaccaggatcgccaagcgcatggccatgctcatcttcactgacttcctctgcatggcacccatttctttctttgccatttctgcctccctcaaggtgcccctcatcactgtgtccaaagcaaagattctgctggttctgtttcaccccatcaactcctgtgccaaccccttcctctatgccatctttaccaaaaactttcgcagagatttcttcattctgctgagcaagtgtggctgctatgaaatgcaagcccaaatttataggacagaaacttcatccactgtccacaacacccatccaaggaatggccactgctcttcagctcccagagtcaccagtggttccacttacatacttgtccctctaagtcatttagcccaaaactaaaacacaatgtgaaaatgt

SEQ ID NO: 11050 - DNA, 6388 bp, Homo sapiens
  source 1..6388: mol_type = unassigned DNA
atggcccctacgctgttccagaagctcttcagcaagaggaccgggctgggcgcgcccggccgcgacgcccgggacccagattgcgggttcagttggcctttaccagagtttgatccaagccagattcgactgattgtatatcaagactgtgaaagacgagggagaaatgttttgtttgactccagtgttaagagaagaaatgaggacatatcagtatcgaaactcggcagtgatgctcaagttaaagtctttgggaaatgctgccaactgaaacctggaggagacagttcttcctctttagatagttctgtgacttcatcttctgatataaaagaccagtgtcttaagtaccagggttctcggtgctcttctgatgccaatatgcttggagagatgatgtttggctcagtagcaatgagctacaaaggatccaccttaaaaattcatcagattcgttcccctccacagctcatgctcagcaaagtgtttactgctcggactggcagcagtatttgtgggagtctcaatacgctacaagatagtcttgaattcatcaatcaggacaacaatacattaaaggctgataataacacagttattaatggactgcttggaaatatagttcacagcaacccaatggacatgcctggaagagagctcaatgaggacagagacagtggcatagcacggtctgcatctctcagcagcttgctgatcactccatttccttccccaaactcctcacttacccgaagttgtgccagcagctaccagcgacgttggcgacgcagccaaacaacaagtttggaaaatggggtatttcctagatggtctatagaagaaagctttaatctctcagatgaaagctgtggccctaacccaggaattgtgcggaaaaagaagattgcaattggggtaatcttttcattgtccaaagatgaagatgaaaataacaaatttaatgaattctttttttcacattttcctctctttgaaagccacatgaacaaattaaagagtgcaatagaacaggctatgaaaatgagccggagatcagctgatgccagtcagagaagtttggcatataatcgaatagttgatgccctaaatgaattcagaacaacaatttgtaatctttacacgatgccacgaattggagaacctgtctggcttacaatgatgtcggggactccagaaaagaaccacctttgctatcgtttcatgaaggagttcacctttctaatggaaaatgcttccaaaaatcaattcttgccagctctcattactgcagttctgaccaatcatcttgcctgggttccaacagtcatgccaaatggacaaccacctataaaaatatttttagaaaagcattcctctcagagtgtggacatgttggcaaagactcatccatataacccactttgggcacaactgggagacttgtatggcgctattggctctcccgtacggttagcaaggactgtggtagttggcaaacgacaagacatggtccagaggctactttattttcttacttattttataagatgctctgaacttcaagaaacgcatcttttagaaaatggagaagatgaagccatcgttatgccaggcacagtaattactaccactttagagaaaggtgaaatagaagaatcagagtatgtccttgtcacaatgcatagaaacaaaagcagtttgctctttaaagagtcagaagaaattagaactcccaattgtaactgtaaatattgcagtcatccactccttgggcaaaatgtagagaacatttcacaacaagagagagaagatattcaaaacagctctaaggagctgctaggaatttcagatgagtgccagatgatttctccttctgactgccaagaagaaaatgctgttgatgttaaacagtacagagataaattaagaacttgctttgacgccaagttagagacagttgtttgcacaggatctgttccagtagacaaatgtgcattgtcagagtcaggcttagagtcaacagaggaaacatggcagagtgagaagttgctggattcagacagtcacacaggcaaagcaatgagatccacaggaatggttgtggaaaaaaaacctccagataagattgtgcctgcttcattttcttgtgaggctgcccagacaaaggttactttcctgattggggattctatgtcacctgattcagatactgagcttcgaagtcaggcagtggtggatcagattaccagacatcacaccaaaccattgaaggaagaaagaggggctattgatcagcatcaagaaactaaacaaacaaccaaggaccaatctggagagtctgatacacagaacatggtttctgaagagccctgtgaacttccctgttggaatcattcagacccagaaagcatgagcttattcgacgaatattttaatgatgattcaatcgaaaccaggactattgatgatgttccatttaaaacaagtacagatagtaaagaccattgctgtatgttagagttttcaaaaatattgtgtacaaaaaataacaagcagaacaatgaattttgtaaatgtatagaaacagttccccaagattcatgtaaaacctgctttcctcagcaggaccaaagagatacactctccattcttgtcccccatggggataaagagagttcagataaaaaaattgctgtaggaactgaatgggacattccaagaaatgaaagttcagacagtgcccttggggatagtgaaagtgaagatacaggtcatgatatgactagacaagttagcagttattatggaggagagcaagaagattgggcagaagaggatgagataccttttcctgggtcaaagttaatcgaagtgagtgctgttcagcccaacattgccaacttcgggaggtccttgctgggtggctactgctcatcttatgtgcctgactttgttcttcaaggaattgggagtgatgagaggttccgtcagtgtctgatgtcagatttatctcatgctgtgcagcatccagttttggatgaaccaatagcagaagctgtctgtattatagctgacatggataaatggactgttcaagtggccagtagccagagacgagtgacagataataaattgggaaaggaagtattggtttccagtcttgtttccaatctgcttcattccacacttcagctttataagcataacttgtctccaaatttttgtgtaatgcatcttgaagaccggttgcaggagctatacttcaaaagtaaaatgctgtctgaatacctgagggggcagatgcgtgttcatgtcaaggagctgggagtggttctggggattgaatccagtgatcttccacttctggctgctgtagcaagcactcactctccatatgttgcacaaatactcctttaatatacctaaaaattgttagaaattggtgggaaaataggtagaaaccaaggaagcagacacaacatgcatttatggagattctttttcccttttagacttccatctgaatgagtcagtcaccagggtattctgcatagcattgtatattctgtgtatgtcagatggctttttctttttgactggacttttgggtggtggtagatttttaaacaaatgaaattaaagcaacaataattttgaagcatttgaaaaagccaaagtgtacggtagaaatttctacaaaatgaatattatcaagagtttcatgtgatcactgcagtgttgtcacagctcataaatagcaacagtgtctcatgatttaatggctcagaaatagttattcattagtttttaatttttaatttctaaggtacagagatctataaaaccttgattatttgttagttttgcaattcaaaacagctaatgtctggttatttctcaaagtaagtattttaaacagcctgttaattataagaaactcagaataatgagtgtaaatgtgttatgttatccacccaagtgtacatatgtacctatttttttttaaaaagcagaaatagaaatacaagactggtaaacatgcctttaaaaatatatatattttcaactagtattgtctataatgctgaaatattacttattggtgatttttctgtttcacacactctaaaatataagtaaagccaaccttttttttaaggctgagattcccaaaatgagaatactactttataccatttgtttataagtatgaactgttcttataaatattaatatttacatattcactaatttaacataaatgaaaattaggattaaaaattgcaccaaagcatcggcaaaaacaatactatattctttaaaagtgctcaggtagccaaggcccttgcttttggtatcaaccctcatgaacccataggagctgaatatttgtttcactgcttaataatcctcaatttacactattcataactcttaaaattattctctttttttctaagagtccctcccttccaaaagtgtatttttttcaaagattttcacttctcaattgttgcctttgtacatactatagagtgttgcttgtaagaaaggctaatatggaaccaaactcttgtaagtaatgtaaatagaaaggtgggtggataaagttttcaatactttctactacctcagtttacttgagtactacattatagtttattctttgcttatctggtctaagagacttttaatgctagtagtaaagttggtttctgctttcattgactattttcatcataatttcatcattgattaaaaaaagaaaaccacttgtttattcagttattaaatatatttactatataacacatccattcttgctgtttaaattttcaatagttaatggaaagttgtctttgaccttgaatttacagcattgggtcacattttgccttgctgtgtatgtattcaagagacttccaactagacaaagaaaaaattgttgttttaatggaatgtaaacctgaaattggtgtgtctgcaatctgtttggcccatgaccttttacctagtcccagttattacctgagtctcccatggatgacttgctgccaaggagtgtttgtggatatattttctttggcttaattttcttattctgtgcattaacaaaattatccagttgtctgattttggaattctatgagtcaatctttttggcagaattcagaatattaaaaagttcatacatttgcgggccattgtacctttttttttttttttttttttttgacggagtttcactcttgttacccaggctggagtgcaatggtgcgatctcagctcactgcaacctccgcctcccagttcaagtgattctcctgcctcagcccccaagtagctgggattacaagtgtgcgccaccacacccagctaattttttatttttagtagagatgagatttcaccatgtgttggtcaggctggtcttgaactcctgaactcaagtgatccacctgcctcgacctcccaaagtactgggattacaggcgtgagccactgtgcccagccttgtacttttttttttttttattgtagctctgtatagcacttggataatgtctgggtgtctccttaaccatcaaactgttctttatttaaaatgtttaattaccgtttagaaattctagtcctcaataagtgggtggctcatgctattgttgttcctaaagctaagctttgctgggaaggaaatgacctatagtttcttaaagaatcattaatccttataggattcctgagttactgttttgttcctccccactgcttcccattcctgagttttgtaattcctaatccttctataatttctattaccttcaccatagtcattctttccttacgcaaagcccaaggaatgagctgctgctactttaaagtgtggtcattatgatgaatgtgaaaagagttttggcttgttctaaataatttttacaagttatggtacagacagttgttacatatcaaaaaaaacctgtttattgaaacaggaaataaaaaagggatcttttacattatagaattaaaactaattttttcttgtatataaactaattggtttgattttaaatatttctggcttttattaatatgtcttaattttgagtttgaaaatgttaagtgcaataaaaacatactagtacagattttgttttgttccaattggcatactctggggatgatcacttaaaaaaacagattttacataatgcctacttctggtagatgtcttatgagattgttctgctttttctaagttacttagatgttggatatgtacatagctgtttcttgttctgtatacatttctcaaatgtacacttgtattataataacctcccagttctaggggatatttgtgcaataaatacacatgtcaacttga

SEQ ID NO: 11051 - DNA, 3845 bp, Homo sapiens
  source 1..3845: mol_type = unassigned DNA
atatgactgaggcgcccatgggggtggcggggcggctgtaggagcaggggcctagcaagcgcccagcggagcgacccctgcctggccgtggctagcatggcccctacgctgttccagaagctcttcagcaagaggaccgggctgggcgcgcccggccgcgacgcccgggacccagattgcgggttcagttggcctttaccagagtttgatccaagccagattcgactgattgtatatcaagactgtgaaagacgagggagaaatgttttgtttgactccagtgttaagagaagaaatgaggacatatcagtatcgaaactcggcagtgatgctcaagttaaagtctttgggaaatgctgccaactgaaacctggaggagacagttcttcctctttagatagttctgtgacttcatcttctgatataaaagaccagtgtcttaagtaccagggttctcggtgctcttctgatgccaatatgcttggagagatgatgtttggctcagtagcaatgagctacaaaggatccaccttaaaaattcatcagattcgttcccctccacagctcatgctcagcaaagtgtttactgctcggactggcagcagtatttgtgggagtctcaatacgctacaagatagtcttgaattcatcaatcaggacaacaatacattaaaggctgataataacacagttattaatggactgcttggaaatataggtctttcacagttctgcagccccaggcgggcattctctgagcagggtccgctccgcctgatcaggagcgcctctttctttgcagttcacagcaacccaatggacatgcctggaagagagctcaatgaggacagagacagtggcatagcacggtctgcatctctcagcagcttgctgatcactccatttccttccccaaactcctcacttacccgaagttgtgccagcagctaccagcgacgttggcgacgcagccaaacaacaagtttggaaaatggggtatttcctagatggtctatagaagaaagctttaatctctcagatgaaagctgtggccctaacccaggaattgtgcggaaaaagaagattgcaattggggtaatcttttcattgtccaaagatgaagatgaaaataacaaatttaatgaattctttttttcacattttcctctctttgaaagccacatgaacaaattaaagagtgcaatagaacaggctatgaaaatgagccggagatcagctgatgccagtcagagaagtttggcatataatcgaatagttgatgccctaaatgaattcagaacaacaatttgtaatctttacacgatgccacgaattggagaacctgtctggcttacaatgatgtcggggactccagaaaagaaccacctttgctatcgtttcatgaaggagttcacctttctaatggaaaatgcttccaaaaatcaattcttgccagctctcattactgcagttctgaccaatcatcttgcctgggttccaacagtcatgccaaatggacaaccacctataaaaatatttttagaaaagcattcctctcagagtgtggacatgttggcaaagactcatccatataacccactttgggcacaactgggagacttgtatggcgctattggctctcccgtacggttagcaaggactgtggtagttggcaaacgacaagacatggtccagaggctactttattttcttacttattttataagatgctctgaacttcaagaaacgcatcttttagaaaatggagaagatgaagccatcgttatgccaggcacagtaattactaccactttagagaaaggtgaaatagaagaatcagagtatgtccttgtcacaatgcatagaaacaaaagcagtttgctctttaaagagtcagaagaaattagaactcccaattgtaactgtaaatattgcagtcatccactccttgggcaaaatgtagagaacatttcacaacaagagagagaagatattcaaaacagctctaaggagctgctaggaatttcagatgagtgccagatgatttctccttctgactgccaagaagaaaatgctgttgatgttaaacagtacagagataaattaagaacttgctttgacgccaagttagagacagttgtttgcacaggatctgttccagtagacaaatgtgcattgtcagagtcaggcttagagtcaacagaggaaacatggcagagtgagaagttgctggattcagacagtcacacaggcaaagcaatgagatccacaggaatggttgtggaaaaaaaacctccagataagattgtgcctgcttcattttcttgtgaggctgcccagacaaaggttactttcctgattggggattctatgtcacctgattcagatactgagcttcgaagtcaggcagtggtggatcagattaccagacatcacaccaaaccattgaaggaagaaagaggggctattgatcagcatcaagaaactaaacaaacaaccaaggaccaatctggagagtctgatacacagaacatggtttctgaagagccctgtgaacttccctgttggaatcattcagacccagaaagcatgagcttattcgacgaatattttaatgatgattcaatcgaaaccaggactattgatgatgttccatttaaaacaagtacagatagtaaagaccattgctgtatgttagagttttcaaaaatattgtgtacaaaaaataacaagcagaacaatgaattttgtaaatgtatagaaacagttccccaagattcatgtaaaacctgctttcctcagcaggaccaaagagatacactctccattcttgtcccccatggggataaagagagttcagataaaaaaattgctgtaggaactgaatgggacattccaagaaatgaaagttcagacagtgcccttggggatagtgaaagtgaagatacaggtcatgatatgactagacaagttagcagttattatggaggagagcaagaagattgggcagaagaggatgagataccttttcctgggtcaaagttaatcgaagtgagtgctgttcagcccaacattgccaacttcgggaggtccttgctgggtggctactgctcatcttatgtgcctgactttgttcttcaaggaattgggagtgatgagaggttccgtcagtgtctgatgtcagatttatctcatgctgtgcagcatccagttttggatgaaccaatagcagaagctgtctgtattatagctgacatggataaatggactgttcaagtggccagtagccagagacgagtgacagataataaattgggaaaggaagtattggtttccagtcttgtttccaatctgcttcattccacacttcagctttataagcataacttgtctccaaatttttgtgtaatgcatcttgaagaccggttgcaggagctatacttcaaaagtaaaatgctgtctgaatacctgagggggcagatgcgtgttcatgtcaaggagctgggagtggttctggggattgaatccagtgatcttccacttctggctgctgtagcaagcactcactctccatatgttgcacaaatactcctttaatatacctaaaaattgttagaaattggtgggaaaataggtagaaaccaaggaagcagacacaacatgcatttatggagattctttttcccttttagacttccatctgaatgagtcagtcaccagggtattctgcatagcattgtatattctgtgtatgtcagatggctttttctttttgactggacttttgggtggtggtagatttttaaacaaatgaaattaaagcaacaataattttgaagcatttg

SEQ ID NO: 11052 - DNA, 1720 bp, Homo sapiens
  source 1..1720: mol_type = unassigned DNA
tatgactgaggcgcccatgggggtggcggggcggctgtaggagcaggggcctagcaagcgcccagcggagcgacccctgcctggccgtggctagcatggcccctacgctgttccagaagctcttcagcaagaggaccgggctgggcgcgcccggccgcgacgcccgggacccagattgcgggttcagttggcctttaccagagtttgatccaagccagattcgactgattgtatatcaagactgtgaaagacgagggagaaatgttttgtttgactccagtgttaagagaagaaatgaggacatatcagtatcgaaactcggcagtgatgctcaagttaaagtctttgggaaatgctgccaactgaaacctggaggagacagttcttcctctttagatagttctgtgacttcatcttctgatataaaagaccagtgtcttaagtaccagggttctcggtgctcttctgatgccaatatgcttggagagatgatgtttggctcagtagcaatgagctacaaaggatccaccttaaaaattcatcagattcgttcccctccacagctcatgctcagcaaagtgtttactgctcggactggcagcagtatttgtgggagtctcaatacgctacaagatagtcttgaattcatcaatcaggacaacaatacattaaaggctgataataacacagttattaatggactgcttggaaatataggtctttcacagttctgcagccccaggcgggcattctctgagcagggtccgctccgcctgatcaggagcgcctctttctttgcagttcacagcaacccaatggacatgcctggaagagagctcaatgaggacagagacagtggcatagcacggtctgcatctctcagcagcttgctgatcactccatttccttccccaaactcctcacttacccgaagttgtgccagcagctaccagcgacgttggcgacgcagccaaacaacaagtttggaaaatggggtatttcctagatggtctatagaagaaagctttaatctctcagatgaaagctgtggccctaacccaggaattgtgcggaaaaagaagattgcaattggggtaatcttttcattgtccaaagatgaagatgaaaataacaaatttaatgaattctttttttcacattttcctctctttgaaagccacatgaacaaattaaagagtgcaatagaacaggctatgaaaatgagccggagatcagctgatgccagtcagagaagtttggcatataatcgaatagttgatgccctaaatgaattcagaacaacaatttgtaatctttacacgatgccacgaattggagaacctgtctggcttacaatgatgtcggggactccagaaaagaaccacctttgctatcgtttcatgaaggagttcacctttctaatggaaaatgcttccaaaaatcaattcttgccagctctcattactgcagttctgaccaatcatcttgcctgggttccaacagtcatgccaaatggacaaccacctataaaaatatttttagaaaagcattcctctcagagtgtggacatgttggcaaagactcatccatataacccactttgggcacaactgggtatgtaatctgacaactgttacactatgtattagacttttttgtagctatctgtaattattttatagcaaaaccaaaaataaataaaatgcttttacctcctgca

SEQ ID NO: 11053 - DNA, 6589 bp, Homo sapiens
  source 1..6589: mol_type = unassigned DNA
gccccgccccgcgcgccgtggccgtttgaagtgactaatttctgtcatatgactgaggcgcccatgggggtggcggggcggctgtaggagcaggggcctagcaagcgcccagcggagcgacccctgcctggccgtggctagcatggcccctacgctgttccagaagctcttcagcaagaggaccgggctgggcgcgcccggccgcgacgcccgggacccagattgcgggttcagttggcctttaccagagtttgatccaagccagattcgactgattgtatatcaagactgtgaaagacgagggagaaatgttttgtttgactccagtgttaagagaagaaatgaggacatatcagtatcgaaactcggcagtgatgctcaagttaaagtctttgggaaatgctgccaactgaaacctggaggagacagttcttcctctttagatagttctgtgacttcatcttctgatataaaagaccagtgtcttaagtaccagggttctcggtgctcttctgatgccaatatgcttggagagatgatgtttggctcagtagcaatgagctacaaaggatccaccttaaaaattcatcagattcgttcccctccacagctcatgctcagcaaagtgtttactgctcggactggcagcagtatttgtgggagtctcaatacgctacaagatagtcttgaattcatcaatcaggacaacaatacattaaaggctgataataacacagttattaatggactgcttggaaatataggtctttcacagttctgcagccccaggcgggcattctctgagcagggtccgctccgcctgatcaggagcgcctctttctttgcagttcacagcaacccaatggacatgcctggaagagagctcaatgaggacagagacagtggcatagcacggtctgcatctctcagcagcttgctgatcactccatttccttccccaaactcctcacttacccgaagttgtgccagcagctaccagcgacgttggcgacgcagccaaacaacaagtttggaaaatggggtatttcctagatggtctatagaagaaagctttaatctctcagatgaaagctgtggccctaacccaggaattgtgcggaaaaagaagattgcaattggggtaatcttttcattgtccaaagatgaagatgaaaataacaaatttaatgaattctttttttcacattttcctctctttgaaagccacatgaacaaattaaagagtgcaatagaacaggctatgaaaatgagccggagatcagctgatgccagtcagagaagtttggcatataatcgaatagttgatgccctaaatgaattcagaacaacaatttgtaatctttacacgatgccacgaattggagaacctgtctggcttacaatgatgtcggggactccagaaaagaaccacctttgctatcgtttcatgaaggagttcacctttctaatggaaaatgcttccaaaaatcaattcttgccagctctcattactgcagttctgaccaatcatcttgcctgggttccaacagtcatgccaaatggacaaccacctataaaaatatttttagaaaagcattcctctcagagtgtggacatgttggcaaagactcatccatataacccactttgggcacaactgggagacttgtatggcgctattggctctcccgtacggttagcaaggactgtggtagttggcaaacgacaagacatggtccagaggctactttattttcttacttattttataagatgctctgaacttcaagaaacgcatcttttagaaaatggagaagatgaagccatcgttatgccaggcacagtaattactaccactttagagaaaggtgaaatagaagaatcagagtatgtccttgtcttgctctttaaagagtcagaagaaattagaactcccaattgtaactgtaaatattgcagtcatccactccttgggcaaaatgtagagaacatttcacaacaagagagagaagatattcaaaacagctctaaggagctgctaggaatttcagatgagtgccagatgatttctccttctgactgccaagaagaaaatgctgttgatgttaaacagtacagagataaattaagaacttgctttgacgccaagttagagacagttgtttgcacaggatctgttccagtagacaaatgtgcattgtcagagtcaggcttagagtcaacagaggaaacatggcagagtgagaagttgctggattcagacagtcacacaggcaaagcaatgagatccacaggaatggttgtggaaaaaaaacctccagataagattgtgcctgcttcattttcttgtgaggctgcccagacaaaggttactttcctgattggggattctatgtcacctgattcagatactgagcttcgaagtcaggcagtggtggatcagattaccagacatcacaccaaaccattgaaggaagaaagaggggctattgatcagcatcaagaaactaaacaaacaaccaaggaccaatctggagagtctgatacacagaacatggtttctgaagagccctgtgaacttccctgttggaatcattcagacccagaaagcatgagcttattcgacgaatattttaatgatgattcaatcgaaaccaggactattgatgatgttccatttaaaacaagtacagatagtaaagaccattgctgtatgttagagttttcaaaaatattgtgtacaaaaaataacaagcagaacaatgaattttgtaaatgtatagaaacagttccccaagattcatgtaaaacctgctttcctcagcaggaccaaagagatacactctccattcttgtcccccatggggataaagagagttcagataaaaaaattgctgtaggaactgaatgggacattccaagaaatgaaagttcagacagtgcccttggggatagtgaaagtgaagatacaggtcatgatatgactagacaagttagcagttattatggaggagagcaagaagattgggcagaagaggatgagataccttttcctgggtcaaagttaatcgaagtgagtgctgttcagcccaacattgccaacttcgggaggtccttgctgggtggctactgctcatcttatgtgcctgactttgttcttcaaggaattgggagtgatgagaggttccgtcagtgtctgatgtcagatttatctcatgctgtgcagcatccagttttggatgaaccaatagcagaagctgtctgtattatagctgacatggataaatggactgttcaagtggccagtagccagagacgagtgacagataataaattgggaaaggaagtattggtttccagtcttgtttccaatctgcttcattccacacttcagctttataagcataacttgtctccaaatttttgtgtaatgcatcttgaagaccggttgcaggagctatacttcaaaagtaaaatgctgtctgaatacctgagggggcagatgcgtgttcatgtcaaggagctgggagtggttctggggattgaatccagtgatcttccacttctggctgctgtagcaagcactcactctccatatgttgcacaaatactcctttaatatacctaaaaattgttagaaattggtgggaaaataggtagaaaccaaggaagcagacacaacatgcatttatggagattctttttcccttttagacttccatctgaatgagtcagtcaccagggtattctgcatagcattgtatattctgtgtatgtcagatggctttttctttttgactggacttttgggtggtggtagatttttaaacaaatgaaattaaagcaacaataattttgaagcatttgaaaaagccaaagtgtacggtagaaatttctacaaaatgaatattatcaagagtttcatgtgatcactgcagtgttgtcacagctcataaatagcaacagtgtctcatgatttaatggctcagaaatagttattcattagtttttaatttttaatttctaaggtacagagatctataaaaccttgattatttgttagttttgcaattcaaaacagctaatgtctggttatttctcaaagtaagtattttaaacagcctgttaattataagaaactcagaataatgagtgtaaatgtgttatgttatccacccaagtgtacatatgtacctatttttttttaaaaagcagaaatagaaatacaagactggtaaacatgcctttaaaaatatatatattttcaactagtattgtctataatgctgaaatattacttattggtgatttttctgtttcacacactctaaaatataagtaaagccaaccttttttttaaggctgagattcccaaaatgagaatactactttataccatttgtttataagtatgaactgttcttataaatattaatatttacatattcactaatttaacataaatgaaaattaggattaaaaattgcaccaaagcatcggcaaaaacaatactatattctttaaaagtgctcaggtagccaaggcccttgcttttggtatcaaccctcatgaacccataggagctgaatatttgtttcactgcttaataatcctcaatttacactattcataactcttaaaattattctctttttttctaagagtccctcccttccaaaagtgtatttttttcaaagattttcacttctcaattgttgcctttgtacatactatagagtgttgcttgtaagaaaggctaatatggaaccaaactcttgtaagtaatgtaaatagaaaggtgggtggataaagttttcaatactttctactacctcagtttacttgagtactacattatagtttattctttgcttatctggtctaagagacttttaatgctagtagtaaagttggtttctgctttcattgactattttcatcataatttcatcattgattaaaaaaagaaaaccacttgtttattcagttattaaatatatttactatataacacatccattcttgctgtttaaattttcaatagttaatggaaagttgtctttgaccttgaatttacagcattgggtcacattttgccttgctgtgtatgtattcaagagacttccaactagacaaagaaaaaattgttgttttaatggaatgtaaacctgaaattggtgtgtctgcaatctgtttggcccatgaccttttacctagtcccagttattacctgagtctcccatggatgacttgctgccaaggagtgtttgtggatatattttctttggcttaattttcttattctgtgcattaacaaaattatccagttgtctgattttggaattctatgagtcaatctttttggcagaattcagaatattaaaaagttcatacatttgcgggccattgtacctttttttttttttttttttttttgacggagtttcactcttgttacccaggctggagtgcaatggtgcgatctcagctcactgcaacctccgcctcccagttcaagtgattctcctgcctcagcccccaagtagctgggattacaagtgtgcgccaccacacccagctaattttttatttttagtagagatgagatttcaccatgtgttggtcaggctggtcttgaactcctgaactcaagtgatccacctgcctcgacctcccaaagtactgggattacaggcgtgagccactgtgcccagccttgtacttttttttttttttattgtagctctgtatagcacttggataatgtctgggtgtctccttaaccatcaaactgttctttatttaaaatgtttaattaccgtttagaaattctagtcctcaataagtgggtggctcatgctattgttgttcctaaagctaagctttgctgggaaggaaatgacctatagtttcttaaagaatcattaatccttataggattcctgagttactgttttgttcctccccactgcttcccattcctgagttttgtaattcctaatccttctataatttctattaccttcaccatagtcattctttccttacgcaaagcccaaggaatgagctgctgctactttaaagtgtggtcattatgatgaatgtgaaaagagttttggcttgttctaaataatttttacaagttatggtacagacagttgttacatatcaaaaaaaacctgtttattgaaacaggaaataaaaaagggatcttttacattatagaattaaaactaattttttcttgtatataaactaattggtttgattttaaatatttctggcttttattaatatgtcttaattttgagtttgaaaatgttaagtgcaataaaaacatactagtacagattttgttttgttccaattggcatactctggggatgatcacttaaaaaaacagattttacataatgcctacttctggtagatgtcttatgagattgttctgctttttctaagttacttagatgttggatatgtacatagctgtttcttgttctgtatacatttctcaaatgtacacttgtattataataacctcccagttctaggggatatttgtgcaataaatacacatgtcaacttg

SEQ ID NO: 11054 - DNA, 6925 bp, Homo sapiens
  source 1..6925: mol_type = unassigned DNA
gcggccgccgcccccggctgcgcgctgagccgccggccccccgagcgccacggccggagctgcggcggcggcatcatggccccgaccctgctccagaagctcttcaacaaaaggggcagcagcggcagctccgcggcggcgtctgcccagggcagggctcctaaggaaggacccgcctttagttggtcatgttcggagtttgacctgaatgagattcgcctgatagtttaccaggactgtgacaggagaggcagacaagtcttgtttgactctaaagctgttcaaaagattgaggaggtgacagctcagaaaacagaggatgttcctattaaaatatcagccaagtgctgccagggaagcagcagtgtcagcagcagtagcagcagcagcatctcttcccacagttcttctgggggatcttcacatcatgctaaggaacagcttccaaagtaccagtacacaagaccagcttccgatgtcaacatgttaggggaaatgatgtttggctcagttgccatgagttacaaaggctccaccttaaagatacactacatacgttctcctccacaactgatgattagtaaagtcttctctgctagaatgggcagcttctgtggaagtacaaataacttgcaagacagctttgagtacatcaaccaagatcctaatttgggaaaactgaacacaaatcaaaatagtttgggtccttgtcgtactggaagtaacctagcacacagcacaccagttgatatgccaagcagaggacagaatgaagacagggacagtggcattgctcgatcagcctcactaagcagtcttttgatcacacctttcccatctccaagctcctctacatcttcttccagcagttaccagcgccgctggcttcgaagtcagacaacaagtttggaaaatggcatcatcccaagaaggtcaactgatgagacattcagcttggctgaagaaacctgtagctctaatccagctatggttaggaggaagaaaattgccataagcatcatcttttccctatgtgagaaagaagaagcacaaaggaatttccaggacttcttcttttctcattttcccctgtttgaatctcacatgaacaggctgaagagtgcaattgaaaaggctatgatctcctgtaggaaaatagcagaatcaagtctccgagtccagttttatgtcagccgtttgatggaagctctgggagaattcagaggaactatctggaacttatattctgttccaaggatagctgaacctgtatggcttactatgatgtccggcactttggaaaaaaaccagctctgccagcgctttctcaaggagtttacacttctgatagaacagataaataaaaaccagttttttgctgccttactgactgcggtgttaacctaccacctggcctgggtcccaactgtcatgcctgtggatcaccctcccatcaaagccttctcagagaaacgtacctcccagtcagtgaacatgctggccaaaacacatccgtataatcctctttgggcacagctgggtgatctttacggagccataggctctccagtgagactgactcgcaccgtagtggtagggaagcagaaggacttagtccagcgaatactttatgtcctgacctactttctccgttgctctgagctacaagagaaccagctgacctggagtggcaatcatggtgaaggtgaccaagttttaaatgggagcaagatcataacagccttggagaaaggagaggtggaggagtctgagtatgtggtcattacggtgaggaacgagcccgctcttgtaccccccatcctaccaccaacagcagcagagagacacaacccctggccgacagggtttcctgagtgcccagagggcactgacagtagagacctgggtcttaaacctgacaaagaagctaacaggaggccagagcagggttctgaggcttgcagcgcagggtgcctggggccagcatcagacgcttcctggaaacctcagaatgcattttgtggggatgagaaaaataaagaggcaccgcaagatggctcttcaagacttcccagctgtgaagttttgggggcaggaatgaagatggaccagcaagctgtctgtgagctgttgaaagtggagatgcctacaagactgccagaccggtcagtggcctggccttgccctgacagacatctccgggagaaaccttccttagaaaaggtcactttccagattggaagctttgcatctccagagtctgactttgaaagccgcatgaaaaaaatggaggaacgggtgaaggcctgtggcccctccttggaggccagtgaggctgctgatgtggctcaggacccgcaggtttctaggagcccttttaaacctggctttcaggagaatgtttgctgtcctcagaatcggctttcagagggggatgaaggcgagtctgacaagggttttgcagaggacagaggcagcagaaacgacatggcagcagatattgctgggcagctcagccacgctgctgacttgggcacagcctcccacggtgcaggaggaacgggagggaggaggctggaggccactagaggtttgtatgtgaaggctgcggaaggacctgtgctggagcctgttgcccccaggtgtgtccagcggggccctggcctcgtggctggtgcgaatatcccctgtggggatgacaacaagaaggccaacttcaggactgaaggagacattccccgaaatgaaagctcagatagcgccctgggagacagtgacgacgaagcctgcgcttcagccatgctagatctgggtcacggtggtgacaggactggagggtccttggaagtggagctgcctctgccaaggtctcagagcatcagcacccagaatgtaaggaactttggccgctcacttctggcgggctactgccccacatacatgcctgatcttgtgcttcatgggaccggcagtgatgagaagctgaagcagtgcctggtggccgaccttgtccacacagtccatcatccagtcctggatgagccaatagctgaagctgtctgtattatcgcagacacggataaatggagtgtgcaggtagctacaagtcagaggaaagtgacggacaacatgaaactaggccaggatgtcctggtctctagtcaggtgtccagtttgcttcagtccattttacagctctataagcttcacctccctgctgatttttgcatcatgcatcttgaagatagactacaggagatgtaccttaaaagtaaaatgctatctgaatatctccggggacacacacgagtccatgtgaaagaattaggtgtcgtactggggattgaatccaacgacctgcctctgttgactgctattgccagtactcattctccttatgtggctcaaatactcttataagctaaagctcaggacagttcttccttggaagaaaaaaatcaaattctcaactgaaggagaaaggaataagctctctgtgatgtcaaaagcatgagaagagcaaacagaaacagtcattccacctttttgttttgtgtttttgctgtcaagctgatgcttcattgaagacttaggtttacttgacataatagcatttgtgattgtcgtgaacactttaggccatttgttacccatgaatcaacaaagaaactgacctttttggtaggaggaaacataagcactaaacactaagctgttgcaacagattgccttgtgctgtttgggcagaataaagacaagtgacttgagcggggtggtcagcagtgtacataatattccagtaggaaactgcttccaagtttaagcatgagctccccaaactggagaaaacatattttgctattctgagacaacaatcagaatacagactttggattccaggtcacagtttgctttttagacaaggtaaagcaaagaaagccacattgtgccatcttcagctccagtggctttagcagtgactgtttgacataaaacatgtaagaattgcttgttgggaagagtgctttagggacccactgttttcatttcttcttggagtttaccttgtttcagatgcagccatgggtaggtcagagatggattgttggtgcaataaacccaagaatcaatgtagcctcttaatcccatcaagatgtagtttgtagcagcaaagtgtacagtctgaaaccgtatgttttatccttatattttagagctttcagcagcctttttaagagaggccacttaccaaagttatttctataagctcaagagtgtttcggttggtaagttcttccagctgaagccactttttccttatagttaatacaaatgactatttttactttaaaaggcacagctgtcctggtgggaaatgaaacctgcagcagttcaggatgactaatgaaagcaattagcttgaacatttagaaaaaattcatatatgatctaaatttttatattatcatttctgtgccttctaattcctgcatccttttcaaaacatctttccagacattaacttacacattgtataaaaccgaccaaaatgatttcctaaagttcatgcaaaaaaaaaaaaaaaacaacctaattttctgttaatataaaagaaacttcagtttactgaccgtgaaacagactatgtactgacatccagggtaaagtaaaagacttttaaatattggtcattaaaggacaggagctaagctagcaaagcaaaacatctttagcactttgcagatctcaagcagttaaccaggctctgattcccttccactgttttatgaattaattccagttcttttcatgtatctttgaacctaagattatgaagtaatttccctattagggactagaatgacttcagttttttcatttgataaaaatcagaactgctacctttcccttttttaatgatgcaaaatgtagatgagtgcattaagttttgtaagatctttatcattttatgtcattcattgaaaattgaaatgttcattctttttaatgttttcctatttccttttgcctagcatttgactttggtgttttaagttctgtagttccatgacatcattgtttgctgttgtgttacagagagagaaggaacctcacctgtggctcagctcaccccacatccgtttctcattacgtgtaaataaactgtcagagctgatgttacagcttttacagtttaaagcattcccctcgtctctagttccttttttcttgtttacatgttttgggcactttccctcattcaccaccttccagggtttcatagaaaataacttgttacaaaatcagttcaattctaatgtggacatagtggcatgttcataattagacccatataggggacactgagctttaaatcgttgattctaaactctatacattaaaaaaattcagcccaggcccctcaaagcctgagaaaatttaatttgctcttaatttaatgttccaaaactcactcttggaaaaatgcctgttggaaaactacaggtgggtcacatgtgggggctgtctccgtgacactcaggattccagtcagaacctaatcctcatatctattgcctacaaaaatagaccaagaatgttgctgctcttttataatcctttaaatatttaacattcaagttttctttgtcttaaattcagcctcttcctaaaagcaaaaaagaaaaaaaaaacctcacagaattgtgttgagatccaccgctcacacgccgtacaccacccagtggcttcattctggcttagccgcagaggcaagaaagggaccccacttgctcccatgcccacctcaagaaaaaacataaaacaattttttttaaaaaagaaaagaaatctacctcagttgacaggattccacctttagggtttcttcaacttttaagtcttacctgttgagtgtaacttttgtagcatcttgcttttccaagcaagctagtgaggcatgacagagcagaagtctgtaaatgtccctgtgatggacctctttctagcatgttgcagttttatttttaataaattggtaagtgaaatgaatgtaaaggtaattgtgtacgttttagacatgacaatgaaaatttaaaatgtagcttccatacttgtgcataattccaaagtattttattttttatcaatcagtgttaaatagctttttgtacaggcttcaatccatttttcgaagtgtgctgttttttaatgaaagtaactataatcttttcacatcccatggaactgccgtttacacattgcaactttttaaacttaaccatatttttcaaaattaacgtttttggagggagaaaaatccccgcttgctaaatgatactaaaccgttgtttgggctcttataattaggtcctgagattttataaaaatttagtctgtagctttttaggttcttcactagagttggttgtacataaaaataataaagaatataaagtatcccaaaattcttttaaagtctggatttttccgctaatatgtactttagagaatattttgttcatgcatacttccacgttaaattgaaaatgtcttcagcttctcttggtaaatgtgaaccatttgttttttattgtgcttgggggagagggtattttaatataatttttgcctaaatcaagaagtcccctctgaatgttaatttttaaatgtcaaaatatgatgaacgatatatcttgaaagtgagattgcaatatgcttaaacttaagtggtatttcaaaaacgagaaaattctggaatttgtcatttgaagctccataagagaaattgataggacttcgtttttgatcagtctgaatagataccaatgtcattgtgtgggaattttttttaacttgtttatgtattattttgatccatttttctgtggcatttggtgcaataaaacttttgaatttatcttga

SEQ ID NO: 11055 - DNA, 5670 bp, Homo sapiens
  source 1..5670: mol_type = unassigned DNA
atgtgcggcggcacagcgaacaccacaaaccagccagagagctggcaagactctgccagatgtgtgagtgatgctgttcctggtgctgggaggatttacagggcgcttttatgcacaaagattaaaaaacacaccggagtagacaggagcactgaccacacggaactcgacaacagttggtcatgttcggagtttgacctgaatgagattcgcctgatagtttaccaggactgtgacaggagaggcagacaagtcttgtttgactctaaagctgttcaaaagattgaggaggtgacagctcagaaaacagaggatgttcctattaaaatatcagccaagtgctgccagggaagcagcagtgtcagcagcagtagcagcagcagcatctcttcccacagttcttctgggggatcttcacatcatgctaaggaacagcttccaaagtaccagtacacaagaccagcttccgatgtcaacatgttaggggaaatgatgtttggctcagttgccatgagttacaaaggctccaccttaaagatacactacatacgttctcctccacaactgatgattagtaaagtcttctctgctagaatgggcagcttctgtggaagtacaaataacttgcaagacagctttgagtacatcaaccaagatcctaatttgggaaaactgaacacaaatcaaaatagtttgggtccttgtcgtactggaagtaacctagcacacagcacaccagttgatatgccaagcagaggacagaatgaagacagggacagtggcattgctcgatcagcctcactaagcagtcttttgatcacacctttcccatctccaagctcctctacatcttcttccagcagttaccagcgccgctggcttcgaagtcagacaacaagtttggaaaatggcatcatcccaagaaggtcaactgatgagacattcagcttggctgaagaaacctgtagctctaatccagctatggttaggaggaagaaaattgccataagcatcatcttttccctatgtgagaaagaagaagcacaaaggaatttccaggacttcttcttttctcattttcccctgtttgaatctcacatgaacaggctgaagagtgcaattgaaaaggctatgatctcctgtaggaaaatagcagaatcaagtctccgagtccagttttatgtcagccgtttgatggaagctctgggagaattcagaggaactatctggaacttatattctgttccaaggatagctgaacctgtatggcttactatgatgtccggcactttggaaaaaaaccagctctgccagcgctttctcaaggagtttacacttctgatagaacagataaataaaaaccagttttttgctgccttactgactgcggtgttaacctaccacctggcctgggtcccaactgtcatgcctgtggatcaccctcccatcaaagccttctcagagaaacgtacctcccagtcagtgaacatgctggccaaaacacatccgtataatcctctttgggcacagctgggtgatctttacggagccataggctctccagtgagactgactcgcaccgtagtggtagggaagcagaaggacttagtccagcgaatactttatgtcctgacctactttctccgttgctctgagctacaagagaaccagctgacctggagtggcaatcatggtgaaggtgaccaagttttaaatgggagcaagatcataacagccttggagaaaggagaggtggaggagtctgagtatgtggtcattacggtgaggaacgagcccgctcttgtaccccccatcctaccaccaacagcagcagagagacacaacccctggccgacagggtttcctgagtgcccagagggcactgacagtagagacctgggtcttaaacctgacaaagaagctaacaggaggccagagcagggttctgaggcttgcagcgcagggtgcctggggccagcatcagacgcttcctggaaacctcagaatgcattttgtggggatgagaaaaataaagaggcaccgcaagatggctcttcaagacttcccagctgtgaagttttgggggcaggaatgaagatggaccagcaagctgtctgtgagctgttgaaagtggagatgcctacaagactgccagaccggtcagtggcctggccttgccctgacagacatctccgggagaaaccttccttagaaaaggtcactttccagattggaagctttgcatctccagagtctgactttgaaagccgcatgaaaaaaatggaggaacgggtgaaggcctgtggcccctccttggaggccagtgaggctgctgatgtggctcaggacccgcaggtttctaggagcccttttaaacctggctttcaggagaatgtttgctgtcctcagaatcggctttcagagggggatgaaggcgagtctgacaagggttttgcagaggacagaggcagcagaaacgacatggcagcagatattgctgggcagctcagccacgctgctgacttgggcacagcctcccacggtgcaggaggaacgggagggaggaggctggaggccactagaggtttgtatgtgaaggctgcggaaggacctgtgctggagcctgttgcccccaggtgtgtccagcggggccctggcctcgtggctggtgcgaatatcccctgtggggatgacaacaagaaggccaacttcaggactgaaggagacattccccgaaatgaaagctcagatagcgccctgggagacagtgacgacgaagcctgcgcttcagccatgctagatctgggtcacggtggtgacaggactggagggtccttggaagtggagctgcctctgccaaggtctcagagcatcagcacccagaatgtaaggaactttggccgctcacttctggcgggctactgccccacatacatgcctgatcttgtgcttcatgggaccggcagtgatgagaagctgaagcagtgcctggtggccgaccttgtccacacagtccatcatccagtcctggatgagccaatagctgaagctgtctgtattatcgcagacacggataaatggagtgtgcaggtagctacaagtcagaggaaagtgacggacaacatgaaactaggccaggatgtcctggtctctagtcaggtgtccagtttgcttcagtccattttacagctctataagcttcacctccctgctgatttttgcatcatgcatcttgaagatagactacaggagatgtaccttaaaagtaaaatgctatctgaatatctccggggacacacacgagtccatgtgaaagaattaggtgtcgtactggggattgaatccaacgacctgcctctgttgactgctattgccagtactcattctccttatgtggctcaaatactcttataagctaaagctcaggacagttcttccttggaagaaaaaaatcaaattctcaactgaaggagaaaggaataagctctctgtgatgtcaaaagcatgagaagagcaaacagaaacagtcattccacctttttgttttgtgtttttgctgtcaagctgatgcttcattgaagacttaggtttacttgacataatagcatttgtgattgtcgtgaacactttaggccatttgttacccatgaatcaacaaagaaactgacctttttggtaggaggaaacataagcactaaacactaagctgttgcaacagattgccttgtgctgtttgggcagaataaagacaagtgacttgagcggggtggtcagcagtgtacataatattccagtaggaaactgcttccaagtttaagcatgagctccccaaactggagaaaacatattttgctattctgagacaacaatcagaatacagactttggattccaggtcacagtttgctttttagacaaggtaaagcaaagaaagccacattgtgccatcttcagctccagtggctttagcagtgactgtttgacataaaacatgtaagaattgcttgttgggaagagtgctttagggacccactgttttcatttcttcttggagtttaccttgtttcagatgcagccatgggtaggtcagagatggattgttggtgcaataaacccaagaatcaatgtagcctcttaatcccatcaagatgtagtttgtagcagcaaagtgtacagtctgaaaccgtatgttttatccttatattttagagctttcagcagcctttttaagagaggccacttaccaaagttatttctataagctcaagagtgtttcggttggtaagttcttccagctgaagccactttttccttatagttaatacaaatgactatttttactttaaaaggcacagctgtcctggtgggaaatgaaacctgcagcagttcaggatgactaatgaaagcaattagcttgaacatttagaaaaaattcatatatgatctaaatttttatattatcatttctgtgccttctaattcctgcatccttttcaaaacatctttccagacattaacttacacattgtataaaaccgaccaaaatgatttcctaaagttcatgcaaaaaaaaaaaaaaaacaacctaattttctgttaatataaaagaaacttcagtttactgaccgtgaaacagactatgtactgacatccagggtaaagtaaaagacttttaaatattggtcattaaaggacaggagctaagctagcaaagcaaaacatctttagcactttgcagatctcaagcagttaaccaggctctgattcccttccactgttttatgaattaattccagttcttttcatgtatctttgaacctaagattatgaagtaatttccctattagggactagaatgacttcagttttttcatttgataaaaatcagaactgctacctttcccttttttaatgatgcaaaatgtagatgagtgcattaagttttgtaagatctttatcattttatgtcattcattgaaaattgaaatgttcattctttttaatgttttcctatttccttttgcctagcatttgactttggtgttttaagttctgtagttccatgacatcattgtttgctgttgtgttacagagagagaaggaacctcacctgtggctcagctcaccccacatccgtttctcattacgtgtaaataaactgtcagagctgatgttacagcttttacagtttaaagcattcccctcgtctctagttccttttttcttgtttacatgttttgggcactttccctcattcaccaccttccagggtttcatagaaaataacttgttacaaaatcagttcaattctaatgtggacatagtggcatgttcataattagacccatataggggacactgagctttaaatcgttgattctaaactctatacattaaaaaaattcagcccaggcccctcaaagcctgagaaaatttaatttgctcttaatttaatgttccaaaactcactcttggaaaaatgcctgttggaaaactacaggtgggtcacatgtgggggctgtctccgtgacactcaggattccagtcagaacctaatcctcatatctattgcctacaaaaatagaccaagaatgttgctgctcttttataatcctttaaatatttaacattcaagttttctttgtcttaaattcagcctcttcctaaaagc

SEQ ID NO: 11056 - DNA, 2173 bp, Homo sapiens
  source 1..2173: mol_type = unassigned DNA
gcttttctcacatactgtatagggagtgaaatgattgtttagaactgctggtcattacagaatgttcctcacataacaaaggaacttcaggatttgtctccaagtccatgtttatggtcaggataaaccagaagaacattaaaccgttcaggagatgtgcggcggcacagcgaacaccacaaaccagccagagagctggcaagactctgccagatgtgtgagtgatgctgttcctggtgctgggaggatttacagggcgcttttatgcacaaagattaaaaaacacaccggagtagacaggagcactgaccacacggaactcgacaacagttggtcatgttcggagtttgacctgaatgagattcgcctgatagtttaccaggactgtgacaggagaggcagacaagtcttgtttgactctaaagctgttcaaaagattgaggaggtgacagctcagaaaacagaggatgttcctattaaaatatcagccaagtgctgccagggaagcagcagtgtcagcagcagtagcagcagcagcatctcttcccacagttcttctgggggatcttcacatcatgctaaggaacagcttccaaagtaccagtacacaagaccagcttccgatgtcaacatgttaggggaaatgatgtttggctcagttgccatgagttacaaaggctccaccttaaagatacactacatacgttctcctccacaactgatgattagtaaagtcttctctgctagaatgggcagcttctgtggaagtacaaataacttgcaagacagctttgagtacatcaaccaagatcctaatttgggaaaactgaacacaaatcaaaatagtttgggtccttgtcgtactggaagtaacctagcacacagcacaccagttgatatgccaagcagaggacagaatgaagacagggacagtggcattgctcgatcagcctcactaagcagtcttttgatcacacctttcccatctccaagctcctctacatcttcttccagcagttaccagcgccgctggcttcgaagtcagacaacaagtttggaaaatggcatcatcccaagaaggtcaactgatgagacattcagcttggctgaagaaacctgtagctctaatccagctatggttaggaggaagaaaattgccataagcatcatcttttccctatgtgagaaagaagaagcacaaaggaatttccaggacttcttcttttctcattttcccctgtttgaatctcacatgaacaggctgaagagtgcaattgaaaaggctatgatctcctgtaggaaaatagcagaatcaagtctccgagtccagttttatgtcagccgtttgatggaagctctgggagaattcagaggaactatctggaacttatattctgttccaaggatagctgaacctgtatggcttactatgatgtccggcactttggaaaaaaaccagctctgccagcgctttctcaaggagtttacacttctgatagaacagataaataaaaaccagttttttgctgccttactgactgcggtgttaacctaccacctggcctgggtcccaactgtcatgcctgtggatcaccctcccatcaaagccttctcagagaaacgtacctcccagtcagtgaacatgctggccaaaacacatccgtataatcctctttgggcacagctgggtgatctttacggagccataggctctccagtgagactgactcgcaccgtagtggtagggaagcagaaggacttagtccagcgaatactttatgtcctgacctactttctccgttgctctgagctacaagagaaccagctgacctggagtggcaatcatggtgaaggtgaccaagttttaaatgggagcaagatcataacagccttggagaaaggagaggtggaggagtctgagtatgtggtcattacggtgaggaacgagcccgctcttgtaccccccatcctaccaccaacagcagcagagagacacaacccctggccgacagggtttcctgagtgcccagagggcactgacagtagagacctgggtcttaaacctgacaaagaagctaacaggaggccagagcagggttctgaggcttgcagcgcagggtgcctggggccagcatcagacgcttcctggaaacctcagaatgcattttgtggg

SEQ ID NO: 11057 - DNA, 722 bp, Homo sapiens
  source 1..722: mol_type = unassigned DNA
ctgccatggaccccgcgcccggcgtcctagatccccgcgccgcgccgcccgcgctcctgggcaccccgcaagccgaggtgctggaggacgtgttgcgggagcagttcgggccgctgccccagctggccgctgtctgccggctcaagcggctgccctcgggcggctactcgtccactgaaaacctccagttggtgctggagcggcggcgtgtggccaacgccaaggagcgtgagcggataaaaaatctcaaccgtggttttgccagattgaaggcacttgtgccatttcttccccaaagcaggaagcccagcaaagttgatatccttaaaggtgcgactgaatatatacaggttctcagtgatcttttggaaggagccaaagactcaaagaaacaagacccagatgagcagagctatagtaacaacagttctgaatcacatacatcctcggcaagacagctgtcaagaaacatcacccaacatatcagctgtgctttcggcttgaagaatgaagaggaagggccttgggcagatggtggcagtggtgagccagcacacgcttgtcgccacagtgtgatgtctacgactgaaattatctccccaaccagaagtctggatagattcccagaagtagaactgctgagtcacagacttccacaagtatgaaaaatgaaaaggcccagggttaccttctagagacaaataaatgcagtcttgaaagtt

SEQ ID NO: 11058 - DNA, 2519 bp, Homo sapiens
  source 1..2519: mol_type = unassigned DNA
gatttcgggcacctccgaaagataattgggaagggtttccagaaggtgggaaatgtcacctgattcacactgaacttttgaaagctccccacccccaaggagccgcgcacaccctcgctcgcggccgccctcccacagccccacacactgggagaccgcccaccgcaaaccgcggagacccccgtctagatttaaagcgcggctgcgcccggcttctgacgtccattgaatcgcgcgggcggccggcggcgagcgcggggctgcgccgggatcgctgcgccctccgccgctggcctctgcgacgcgcgccgctcgcccgagccacccgccgccgcgccggctccccgcgccgctgcgctcctcgccccgcgcctgcccccaggatggtccgcgcgaggcaccagccgggtgggctttgcctcctgctgctgctgctctgccagttcatggaggaccgcagtgcccaggctgggaactgctggctccgtcaagcgaagaacggccgctgccaggtcctgtacaagaccgaactgagcaaggaggagtgctgcagcaccggccggctgagcacctcgtggaccgaggaggacgtgaatgacaacacactcttcaagtggatgattttcaacgggggcgcccccaactgcatcccctgtaaagaaacgtgtgagaacgtggactgtggacctgggaaaaaatgccgaatgaacaagaagaacaaaccccgctgcgtctgcgccccggattgttccaacatcacctggaagggtccagtctgcgggctggatgggaaaacctaccgcaatgaatgtgcactcctaaaggcaagatgtaaagagcagccagaactggaagtccagtaccaaggcagatgtaaaaagacttgtcgggatgttttctgtccaggcagctccacatgtgtggtggaccagaccaataatgcctactgtgtgacctgtaatcggatttgcccagagcctgcttcctctgagcaatatctctgtgggaatgatggagtcacctactccagtgcctgccacctgagaaaggctacctgcctgctgggcagatctattggattagcctatgagggaaagtgtatcaaagcaaagtcctgtgaagatatccagtgcactggtgggaaaaaatgtttatgggatttcaaggttgggagaggccggtgttccctctgtgatgagctgtgccctgacagtaagtcggatgagcctgtctgtgccagtgacaatgccacttatgccagcgagtgtgccatgaaggaagctgcctgctcctcaggtgtgctactggaagtaaagcactccggatcttgcaactccatttcggaagacaccgaggaagaggaggaagatgaagaccaggactacagctttcctatatcttctattctagagtggtaaactctctataagtgttcagtgttgacatagcctttgtgcaaaaaaaaaaaaaaaaaaaaagaaaaagaaaaaaagaaaaatatattgtccatactgtaaataagtgtatgcttatttatttggggggaaaactatacattaaaggacctttgtcctaaagctctctcccaggccaccttgttactcattggacacggagaggcattcattgtgaggtctactggatgaggcccatagttgagacttgtagacatttatttatactgtgtcatgttttataatttatacataaaatgtctggttgactgtataccttgtttttgaagaaatttattcgtgaaaggaagagcagttgttatttattgtgaggtctcttgcttgtaaagtaaaagctttttttccttgtaaaccatttaagtccattccttactattcactcactcatctgtctcccttcatttcactgttagactcttttccactttcaacaaacttgcatgtcagtttctgtcatgtttatttattggattctctgctgcctgatctgtacatacatgatccctcgggttttgtttacaaggaaccttgactgaccaaaaggcattataactctgactcaaatacaaggtacagaagataagcatctttgaggaaactcctacttcagttcttttgttatgatgaagacatttgtgagagaggagatgattagaattctagtaatgtacttttaagatgttacagatacaaagaaatgatgtgggtgtcaggagactaaaggatgttgaaggctacacattcaaccttttgttaggtgtttcctttaagctactcagctgtaccttttaaattagttctttttcaaccagtatatcactaaaagttatatcaaagctttatcagttcaagtttcttgcttttcataatacttttttctgatgcaattttatattttcaaacatggcaagttaaaatataaattcatttaaatatatagttttgtacttttctaccatgtaaatgtgcaatgtatataaaagttataatgtgtatttgtaaataaatgatgagtgaaaaaataaaaaaattttaaaaagccaa

SEQ ID NO: 11059 - DNA, 1357 bp, Homo sapiens
  source 1..1357: mol_type = unassigned DNA
atggtccgcgcgaggcaccagccgggtgggctttgcctcctgctgctgctgctctgccagttcatggaggaccgcagtgcccaggctgggaactgctggctccgtcaagcgaagaacggccgctgccaggtcctgtacaagaccgaactgagcaaggaggagtgctgcagcaccggccggctgagcacctcgtggaccgaggaggacgtgaatgacaacacactcttcaagtggatgattttcaacgggggcgcccccaactgcatcccctgtaaagaaacgtgtgagaacgtggactgtggacctgggaaaaaatgccgaatgaacaagaagaacaaaccccgctgcgtctgcgccccggattgttccaacatcacctggaagggtccagtctgcgggctggatgggaaaacctaccgcaatgaatgtgcactcctaaaggcaagatgtaaagagcagccagaactggaagtccagtaccaaggcagatgtaaaaagacttgtcgggatgttttctgtccaggcagctccacatgtgtggtggaccagaccaataatgcctactgtgtgacctgtaatcggatttgcccagagcctgcttcctctgagcaatatctctgtgggaatgatggagtcacctactccagtgcctgccacctgagaaaggctacctgcctgctgggcagatctattggattagcctatgagggaaagtgtatcaaagcaaagtcctgtgaagatatccagtgcactggtgggaaaaaatgtttatgggatttcaaggttgggagaggccggtgttccctctgtgatgagctgtgccctgacagtaagtcggatgagcctgtctgtgccagtgacaatgccacttatgccagcgagtgtgccatgaaggaagctgcctgctcctcaggtgtgctactggaagtaaagcactccggatcttgcaactgaatctgcccgtaaaacctgagccattgattcttcagaactttctgcagtttttgacttcatagattatgctttaaaaaaatttttttaacttattgcataacagcagatgccaaaaacaaaaaaagcatctcactgcaagtcacataaaaatgcaacgctgtaatatggctgtatcagagggctttgaaaacatacactgagctgcttctgcgctgttgttgtccgtatttaaacaacagctcccctgtattcccccatctagccatttcggaagacaccgaggaagaggaggaagatgaagaccaggactacagctttcctatatcttctattctagagtggtaaactctctataagtgttcagtgttgacatagcctttgtgcaaaaaaaaaaaaaaaaaaa

SEQ ID NO: 11060 - DNA, 1023 bp, Homo sapiens
  source 1..1023: mol_type = unassigned DNA
atggtccgcgcgaggcaccagccgggtgggctttgcctcctgctgctgctgctctgccagttcatggaggaccgcagtgcccaggctgggaactgctggctccgtcaagcgaagaacggccgctgccaggtcctgtacaagaccgaactgagcaaggaggagtgctgcagcaccggccggctgagcacctcgtggaccgaggaggacgtgaatgacaacacactcttcaagtggatgattttcaacgggggcgcccccaactgcatcccctgtaaagaaacgtgtgagaacgtggactgtggacctgggaaaaaatgccgaatgaacaagaagaacaaaccccgctgcgtctgcgccccggattgttccaacatcacctggaagggtccagtctgcgggctggatgggaaaacctaccgcaatgaatgtgcactcctaaaggcaagatgtaaagagcagccagaactggaagtccagtaccaaggcagatgtaaaaagacttgtcgggatgttttctgtccaggcagctccacatgtgtggtggaccagaccaataatgcctactgtgtgacctgtaatcggatttgcccagagcctgcttcctctgagcaatatctctgtgggaatgatggagtcacctactccagtgcctgccacctgagaaaggctacctgcctgctgggcagatctattggattagcctatgagggaaagtgtatcaaagcaaagtcctgtgaagatatccagtgcactggtgggaaaaaatgtttatgggatttcaaggttgggagaggccggtgttccctctgtgatgagctgtgccctgacagtaagtcggatgagcctgtctgtgccagtgacaatgccacttatgccagcgagtgtgccatgaaggaagctgcctgctcctcaggtgtgctactggaagtaaagcactccggatcttgcaactacaccgaggaagaggaggaagatgaagaccaggactacagctttcctatatcttctattctagagtggtaa

SEQ ID NO: 11061 - DNA, 5943 bp, Homo sapiens
  source 1..5943: mol_type = unassigned DNA
ggcagggacccacgggacaccccctctgcctccgctccacgtccagggggccgaaggggcgccggacgagggaccgtgcggagagaggggttcggcggcgccaggactcccgcgggctccccggagcaggggtcggaaggagggggagcgggagccgcgggggccgctgcagcagaagggggaggagaatggggaggagctgggggggcaggcaggcggggaaggagaggtcttaaggggcggcgaggggaggtcgcatttcctccgaggctggcgatcggcggagctcccacctccgcttacagctcgctgccgccgtcctgccccgcgcccccaggagacctggaccagaccacgatgtggaaacgctggctcgcgctcgcgctcgcgctggtggcggtcgcctgggtccgcgccgaggaagagctaaggagcaaatccaagatctgtgccaatgtgttttgtggagccggccgggaatgtgcagtcacagagaaaggggaacccacctgtctctgcattgagcaatgcaaacctcacaagaggcctgtgtgtggcagtaatggcaagacctacctcaaccactgtgaactgcatcgagatgcctgcctcactggatccaaaatccaggttgattacgatggacactgcaaagagaagaaatccgtaagtccatctgccagcccagttgtttgctatcagtccaaccgtgatgagctccgacgtcgcatcatccagtggctggaagctgagatcattccagatggctggttctctaaaggcagcaactacagtgaaatcctagacaagtattttaagaactttgataatggtgattctcgcctggactccagtgaattcctgaagtttgtggaacagaatgaaactgccatcaatattacaacgtatccagaccaggagaacaacaagttgcttaggggactctgtgttgatgctctcattgaactgtctgatgaaaatgctgattggaaactcagcttccaagagtttctcaagtgcctcaacccatctttcaaccctcctgagaagaagtgtgccctggaggatgaaacgtatgcagatggagctgagaccgaggtggactgtaaccgctgtgtctgtgcctgtggaaattgggtctgtacagccatgacctgtgacggaaagaatcagaagggggcccagacccagacagaggaggagatgaccagatatgtccaggagctccaaaagcatcaggaaacagctgaaaagaccaagagagtgagcaccaaagagatctaatgaggaggcacagaccagtgtctggatcccagcatcttctccacttcagcgctgagttcagtatacacaagtgtctgctacagtcgccaaatcaccagtatttgcttatatagcaatgagttttattttgtttatttgttttgcaataaaggatatgaaggtggctggctaggaagggaagggccacagccttcatttctaggagtgctttaagagaaactgtaaatggtgctctggggctggaggctagtaaggaaactgcatcacgattgaaagaggaacagacccaaatctgaacctcttttgagtttactgcatctgtcagcaggctgcagggagtgcacacgatgccagagagaacttagcagggtgtccccggaggagaggtttgggaagctccacggagaggaacgctctctgcttccagcctctttccattgccgtcagcatgacagacctccagcatccacgcatctcttggtcccaataactgcctctagatacatagccatactgctagttaacccagtgtccctcagacttggatggagtttctgggagggtacacccaaatgatgcagatacttgtatactttgagccccttagcgacctaaccaaattttaaaaatactttttaccaaaggtgctatttctctgtaaaacacttttttttggcaagttgactttattcttcaattattatcattatattattgttttttaatattttattttcttgactaggtattaagcttttgtaattatttttcagtagtcccaccacttcataggtggaaggagtttggggttcttcctggtgcaggggctgaaataacccagatgcccccaccctgccacatactagatgcagcccatagttggcccccctagcttccagcagtccactatctgccagaggagcaagggtgccttagaccgaagccaggggaagaagcatcttcataaaaaactttcaagatccaaacattaatttgtttttatttattctgagaagttgaggcaaatcagtattcccaaggatggcgacaagggcagccaagcagggcttaggatatcccagcctaccaatatgctcattcgactaactaggagggtgagttggccctgtctcttcttttttctggacctcagtttcctcagtgagctggtaagaatgcactaaccttttgatttgataagttataaattctgtggttctgatcattggtccagaggggagataggttcctgtgatttttccttcttctctatagaataaatgaaatcttgttactagaacaagaaatgtcagatggccaaaaacaagatgaccagatttgatctcagcctgatgaccctacaggtcgtgctatgatatggagtcctcatgggtaaagcaggaagagagtgggaaagagaaccaccccactctgtcttcatatttgcatttcatgtttaacctccggctggaaatagaaagcattcccttagagatgaggataaaagaaagtttcagattcaacagggggaagaaaatggagatttaatcctaaaactgtgacttggggaggtcagtcatttacagttagtcctgtgtctttcgacttctgtgattattaaccccactcactaccctgtttcagatgcatttggaataccaaagattaaatccttgacataagatctcatttgcagaaagcagattaaagaccatcagaaggaaattatttaggttgtaatgcacaggcaactgtgagaaactgttgtgccaaaaatagaattccttctagtttttcttgttctcatttgaaaggagaaaattccactttgtttagcatttcaagcttttatgtatccatcccatctaaaaactcttcaaactccacttgttcagtctgaaatgcagctccctgtccaagtgccttggagaactcacagcagcacgccttaatcaaaggttttaccagcccttggacactatgggaggagggcaagagtacaccaatttgttaaaagcaagaaaccacagtgtctcttcactagtcatttagaacatggttatcatccaagactactctaccctgcaacattgaactcccaagagcaaatccacattcctcttgagttctgcagcttctgtgtaaatagggcagctgtcgtctatgccgtagaatcacatgatctgaggaccattcatggaagctgctaaatagcctagtctggggagtcttccataaagttttgcatggagcaaacaaacaggattaaactaggtttggttccttcagccctctaaaagcatagggcttagcctgcaggcttccttgggctttctctgtgtgtgtagttttgtaaacactatagcatctgttaagatccagtgtccatggaaacattcccacatgccgtgactctggactatatcagtttttggaaagcagggttcctctgcctgctaacaagcccacgtggaccagtctgaatgtctttcctttacacctatgtttttaagtagtcaaacttcaagaaacaatctaaacaagtttctgttgcatatgtgtttgtgaacttgtatttgtatttagtaggcttctatattgcatttaacttgtttttgtaactcctgattcttccttttcggatactattgatgaataaagaaattaaagtgatggttttattggtttcctttcccccaattaaggccaaataaagtcgtgagaacattacccatttacttcctaagagtggatttgagtttcaggagccttaaaaaggactgaagagtttctcctgggactacagcttggatggaaagtttactcggggactggtagaacaagtttctttgaaaggatcatggatagtgggtctggagtagaaggtgatgacaagtcagaaagtgtcttagtcccttcaagttgctataacaaaatgcctcagactgggtaattataggcaacagaaatgtattgctcacagttctgaaggctgggaagcctaagatcaaggtaccagcagattcagtgtctgatgacggcttgttgaagcttgcctgcttcaaagaatgcacctttttgatgcatccccacatggtgaaaagggtgaacaaactcccttaggcctcttttataagggcacttacccattcatgagggttaaactttgatgacctaatcatctcccaagagcctcacctctcaataccattgctttggggattcaattttaacatatgaattttgggggacataaacattcaaaccatagcaggtgcattcctgtattgggaagacattaaattaaatgactcgtaaatcccccatatgatttaggagactaaatggcatccagtgaggctgactgcagtagcctgtgagaaggcaaataaacatgggaaggtagtacagggaacatggaatcattgccagggacaggctaaataaccttaatggcacttccttgatacacacattccatgggggtaaacagttccaagtgggctgaacgttagctggttaaaacctcttttgcttggggacacatgactaacgctttccaacctgccattttcatatgtatcatgcactctccacccacaataattctgcctcccaaaagagcatattatagtcaatgaggtttaaggtttcttcggttcagtcatgtggaagttttgctttcctaaaattatagctggatcactttgattggatttgggatattacccaaatgctaatcaaatattaaaaggcaatcttttttgttatgtgattgctacagattactgctcttacagtttgattcttcaaattttcattctcagaagggaatcttaaacccagtttgaagggtaccttgtccacaaccacttttaaattttggctaacttcccaaccttccaccatgttctgggaaaactttttctgctgttatagtatgtatgtattcaggaagtgcaacattattaaactaagcataattcagaagctaagtttcctttcatcaaaatttaatattacgaattgtgcaaagaagtatgttactttgatcagctttattttagagcttctttatcaagttatcatcagtcctcttgaattatttctgaaataaggggaaggaaggaagggaaaaaatatgaatgcatagatagatctaagcagatgccttcagagccctggaataatcctagctgggatatgggacatgaaaacaactctggcctactgctgctgggggctgttgcatggtgtgacataggaagtaaaatgttgctgtatgaataggaaggagggtcttcctgtcaatgagaattaatgttttcctaatgatttaacttttttactgaaaaaataatatgtgtacatggtaaaaatccaaattgtatcacagaaaatacagtgaataaaaccatcctcttaagagggtgtgtacatttataaatttgcctatgattgcctataaagtcaaagaagttgcaccagtatgcatgactgccaaaagtacataaactgagcatatccatttccctacattcttgcaaacattgtgccttcgaactttttggcctctgatagaggaaaaatggtaactccttgttttattttttatattcattattccttttgtaagattaaatatcatctcatgaataa

SEQ ID NO: 11062 - DNA, 565 bp, Homo sapiens
  source 1..565: mol_type = unassigned DNA
ctccgaggctggcgatcggcggagctcccacctccgcttacagctcgctgccgccgtcctgccccgcgcccccaggagacctggaccagaccacggtcagcgcggggcccggcgccttcagactcgctctcttctctcttccgcagatgtggaaacgctggctcgcgctcgcgctcgcgctggtggcggtcgcctgggtccgcgccgaggaagagctaaggagcaaatccaagatctgtgccaatgtgttttgtggagccggccgggaatgtgcagtcacagagaaaggggaacccacctgtctctgcattgagcaatgcaaacctcacaagaggcctgtgtgtggcagtaatggcaagacctacctcaaccactgtgaactgcatcgagatgcctgcctcactggatccaaaatccaggttgattacgatggacactgcaaagagaagaaatccgtaagtccatctgccagcccagttgtttgctatcagtccaaccgtgatgagctccgacgtcgcatcatccagtggctggaagctgagatcattccagatggctggttctc

SEQ ID NO: 11063 - DNA, 1506 bp, Homo sapiens
  source 1..1506: mol_type = unassigned DNA
atttcctccgaggctggcgatcggcggagctcccacctccgcttacagctcgctgccgccgtcctgccccgcgcccccaggagacctggaccagaccacgatgtggaaacgctggctcgcgctcgcgctcgcgctggtggcggtcgcctgggtccgcgccgaggaagagctaaggagcaaatccaagatctgtgccaatgtgttttgtggagccggccgggaatgtgcagtcacagagaaaggggaacccacctgtctctgcattgagcaatgcaaacctcactggatccaaaatccaggttgattacgatggacactgcaaagagaagaaatccgtaagtccatctgccagcccagttgtttgctatcagtccaaccgtgatgagctccgacgtcgcatcatccagtggctggaagctgagatcattccagatggctggttctctaaaggcagcaactacagtgaaatcctagacaagtattttaagaactttgataatggtgattctcgcctggactccagtgaattcctgaagtttgtggaacagaatgaaactgccatcaatattacaacgtatccagaccaggagaacaacaagttgcttaggggactctgtgttgatgctctcattgaactgtctgatgaaaatgctgattggaaactcagcttccaagagtttctcaagtgcctcaacccatctttcaaccctcctgagaagaagtgtgccctggaggatgaaacgtatgcagatggagctgagaccgaggtggactgtaaccgctgtgtctgtgcctgtggaaattgggtctgtacagccatgacctgtgacggaaagaatcagaagggggcccagacccagacagaggaggagatgaccagatatgtccaggagctccaaaagcatcaggaaacagctgaaaagaccaagagagtgagcaccaaagagatctaatgaggaggcacagaccagtgtctggatcccagcatcttctccacttcagcgctgagttcagtatacacaagtgtctgctacagtcgccaaatcaccagtatttgcttatatagcaatgagttttattttgtttatttgttttgcaataaaggatatgaaggtggctggctaggaagggaagggccacagccttcatttctaggagtgctttaagagaaactgtaaatggtgctctggggctggaggctagtaaggaaactgcatcacgattgaaagaggaacagacccaaatctgaacctcttttgagtttactgcatctgtcagcaggctgcagggagtgcacacgatgccagagagaacttagcagggtgtccccggaggagaggtttgggaagctccacggagaggaacgctctctgcttccagcctctttccattgccgtcagcatgacagacctccagcatccacgcatctcttggtcccaataactgcctctagatacatagccatactgctagttaacccagtgtccctcagacttggatggagtt

SEQ ID NO: 11064 - DNA, 2511 bp, Homo sapiens
  source 1..2511: mol_type = unassigned DNA
gggaagtcggtgccgctgccgtctctgcgttcgccatgcgtcccggggcgccagggccactctggcctctgccctggggggccctggcttgggccgtgggcttcgtgagctccatgggctcggggaaccccgcgcccggtggtgtttgctggctccagcagggccaggaggccacctgcagcctggtgctccagactgatgtcacccgggccgagtgctgtgcctccggcaacattgacaccgcctggtccaacctcacccacccggggaacaagatcaacctcctcggcttcttgggccttgtccactgccttccctgcaaagattcgtgcgacggcgtggagtgcggcccgggcaaggcgtgccgcatgctggggggccgcccgcgctgcgagtgcgcgcccgactgctcggggctcccggcgcggctgcaggtctgcggctcagacggcgccacctaccgcgacgagtgcgagctgcgcgccgcgcgctgccgcggccacccggacctgagcgtcatgtaccggggccgctgccgcaagtcctgtgagcacgtggtgtgcccgcggccacagtcgtgcgtcgtggaccagacgggcagcgcccactgcgtggtgtgtcgagcggcgccctgccctgtgccctccagccccggccaggagctttgcggcaacaacaacgtcacctacatctcctcgtgccacatgcgccaggccacctgcttcctgggccgctccatcggcgtgcgccacgcgggcagctgcgcaggcacccctgaggagccgccaggtggtgagtctgcagaagaggaagagaacttcgtgtgagcctgcaggacaggcctgggcctggtgcccgaggccccccatcatcccctgttatttattgccacagcagagtctaatttatatgccacggacactccttagagcccggattcggaccacttggggatcccagaacctccctgacgatatcctggaaggactgaggaagggaggcctgggggccggctggtgggtgggatagacctgcgttccggacactgagcgcctgatttagggcccttctctaggatgccccagcccctaccctaagacctattgccggggaggattccacacttccgctcctttggggataaacctattaattattgctactatcaagagggctgggcattctctgctggtaattcctgaagaggcatgactgcttttctcagccccaagcctctagtctgggtgtgtacggagggtctagcctgggtgtgtacggagggtctagcctgggtgagtacggagggtctagcctgggtgagtacggagggtctagcctgggtgagtacggagggtctagcctgggtgtgtatggaggatctagcctgggtgagtatggagggtctagcctgggtgagtatggagggtctagcctgggtgtgtatggagggtctagcctgggtgagtatggagggtctagcctgggtgtgtatggagggtctagcctgggtgagtatggagggtctagcctgggtgtgtacggagggtctagtctgagtgcgtgtggggacctcagaacactgtgaccttagcccagcaagccaggcccttcatgaaggccaagaaggctgccaccattccctgccagcccaagaactccagcttccccactgcctctgtgtgcccctttgcgtcctgtgaaggccattgagaaatgcccagtgtgccccctgggaaagggcacggcctgtgctcctgacacgggctgtgcttggccacagaaccacccagcgtctcccctgctgctgtccacgtcagttcatgaggcaacgtcgcgtggtctcagacgtggagcagccagcggcagctcagagcagggcactgtgtccggcggagccaagtccactctgggggagctctggcggggaccacgggccactgctcacccactggccccgaggggggtgtagacgccaagactcacgcatgtgtgacatccggagtcctggagccgggtgtcccagtggcaccactaggtgcctgctgcctccacagtggggttcacacccagggctccttggtcccccacaacctgccccggccaggcctgcagacccagactccagccagacctgcctcacccaccaatgcagccggggctggcgacaccagccaggtgctggtcttgggccagttctcccacgacggctcaccctcccctccatctgcgttgatgctcagaatcgcctacctgtgcctgcgtgtaaaccacagcctcagaccagctatggggagaggacaacacggaggatatccagcttccccggtctggggtgaggaatgtggggagcttgggcatcctcctccagcctcctccagcccccaggcagtgccttacctgtggtgcccagaaaagtgcccctaggttggtgggtctacaggagcctcagccaggcagcccaccccaccctggggccctgcctcaccaaggaaataaagactcaagccattt

SEQ ID NO: 11065 - DNA, 2278 bp, Homo sapiens
  source 1..2278: mol_type = unassigned DNA
tgggggtggggacagggaccaggaagttgggcccgggccgccggggctgggaattcggagactatagcgtccccgccccgggttgggaagtgggaagtggcacaggagctaggatccagaagcccagaggctcagcggtgcttctggagttccagtgatcccggagtctgaaccggcagtgagagtggggaaagagggatgccgtgcgcatgctcaataccctgcagaccaatgccggctacctggagcaggtgaagcgccagcggggtgaccctcagacacagttggaagccatggaactgtacctggcacggagtgggctgcaggtggaggacttggaccggctgaacatcatccacgtcactgggacgaaggggaagggctccacctgtgccttcacggaatgtatcctccgaagctatggcctgaagacgggattctttagctctccccacctggtgcaggttcgggagcggatccgcatcaatgggcagcccatcagtcctgagctcttcaccaagtacttctggcgcctctaccaccggctggaggagaccaaggatggcagctgtgtctccatgcccccctacttccgcttcctgacactcatggccttccacgtcttcctccaagagaaggtggacctggcagtggtggaggtgggcattggcggggcttatgactgcaccaacatcatcaggaagcctgtggtgtgcggagtctcctctcttggcatcgaccacaccagcctcctgggggatacggtggagaagatcgcatggcagaaagggggcatctttaagcaaggtgtccctgccttcactgtgctccaacctgaaggtcccctggcagtgctgagggaccgagcccagcagatctcatgtcctctatacctgtgtccgatgctggaggccctcgaggaaggggggccgccgctgaccctgggcctggagggggagcaccagcggtccaacgccgccttggccttgcagctggcccactgctggctgcagcggcaggaccgccatggtgctggggagccaaaggcatccaggccagggctcctgtggcagctgcccctggcacctgtgttccagcccacatcccacatgcggctcgggcttcggaacacggagtggccgggccggacgcaggtgctgcggcgcgggcccctcacctggtacctggacggtgcgcacaccgccagcagcgcgcaggcctgcgtgcgctggttccgccaggcgctgcagggccgcgagaggccgagcggtggccccgaggttcgagtcttgctcttcaatgctaccggggaccgggacccggcggccctgctgaagctgctgcagccctgccagtttgactatgccgtcttctgccctaacctgacagaggtgtcatccacaggcaacgcagaccaacagaacttcacagtgacactggaccaggtcctgctccgctgcctggaacaccagcagcactggaaccacctggacgaagagcaggccagcccggacctctggagtgcccccagcccagagcccggtgggtccgcatccctgcttctggcgccccacccaccccacacctgcagtgccagctccctcgtcttcagctgcatttcacatgccttgcaatggatcagccaaggccgagaccccatcttccagccacctagtcccccaaagggcctcctcacccaccctgtggctcacagtggggccagcatactccgtgaggctgctgccatccatgtgctagtcactggcagcctgcacctggtgggtggtgtcctgaagctgctggagcccgcactgtcccagtagccaaggcccggggttggaggtgggagcttcccacacctgcctgcgttctccccatgaacttacatactaggtgccttttgtttttggctttcctggttctgtctagactggcctaggggccagggctttgggatgggaggccgggagaggatgtcttttttaaggctctgtgccttggtctctccttcctcttggctgagatagcagaggggctccccgggtctctcactgttgcagtggcctggccgttcagcctgtctcccccaacaccccgcctgcctcctggctcaggcccagcttattgtgtgcgctgcctggccaggccctgggtcttgccatgtgctgggtggtagatttcctcctcccagtgccttctgggaagggagagggcctctgcctgggacactgcgggacagagggtggctggagtgaattaaagcctttgttttttaaag

SEQ ID NO: 11066 - DNA, 1383 bp, Homo sapiens
  source 1..1383: mol_type = unassigned DNA
ggggcgccgggactatgtcgcgggcgcggagccacctgcgcgccgctctattcctggcagcggcgtctgcgcgcggcataacgacccaggtcgcggcgcggcggggcttgagcgcgtggccggtgccgcaggagccgagcatggagtaccaggatgccgtgcgcatgctcaataccctgcagaccaatgccggctacctggagcaggtgaagcgccagcggggtgaccctcagacacagttggaagccatggaactgtacctggcacggagtgggctgcaggtggaggacttggaccggctgaacatcatccacgtcactgggacgaaggggaagggctccacctgtgccttcacggaatgtatcctccgaagctatggcctgaagacgggattctttagctctccccacctggtgcaggttcgggagcggatccgcatcaatgggcagcccatcagtcctgagctcttcaccaagtacttctggcgcctctaccaccggctggaggagaccaaggatggcagctgtgtctccatgcccccctacttccgcttcctgacactcatggccttccacgtcttcctccaagagaaggtggacctggcagtggtggaggtgggcattggcggggcttatgactgcaccaacatcatcaggaagcctgtggtgtgcggagtctcctctcttggcatcgaccacaccagcctcctgggggatacggtggagaagatcgcatggcagaaagggggcatctttaagcaaggtgtccctgccttcactgtgctccaacctgaaggtcccctggcagtgctgagggaccgagcccagcagatctcagtgctggggagccaaaggcatccaggccagggctcctgtggcagctgcccctggcacctgtgttccagcccacatcccacatgcggctcgggcttcggaacacggagtggccgggccggacgcaggtgctgcggcgcgggcccctcacctggtacctggacggtgcgcacaccgccagcagcgcgcaggcctgcgtgcgctggttccgccaggcgctgcagggccgcgagaggccgagcggtggccccgaggttcgagtcttgctcttcaatgctaccggggaccgggacccggcggccctgctgaagctgctgcagaccaacagaacttcacagtgacactggaccaggtcctgctccgctgcctggaacaccagcagcactggaaccacctggacgaagagcaggccagcccggacctctggagtgcccccagcccagagcccggtgggtccgcatccctgcttctggcgccccacccaccccacacctgcagtgccagctccctcgtcttcagctgcatttcacatgccttgcaatggatcagc

SEQ ID NO: 11067 - DNA, 2339 bp, Homo sapiens
  source 1..2339: mol_type = unassigned DNA
gcggggcgtctcccgcccgggcctagagcgctgccgggggcgccgggactatgtcgcgggcgcggagccacctgcgcgccgctctattcctggcagcggcgtctgcgcgcggcataacgacccaggtcgcggcgcggcggggcttgagcgcgtggccggtgccgcaggagccgagcatggagtaccaggatgccgtgcgcatgctcaataccctgcagaccaatgccggctacctggagcaggtgaagcgccagcggggtgaccctcagacacagttggaagccatggaactgtacctggcacggagtgggctgcaggtggaggacttggaccggctgaacatcatccacgtcactgggacgaaggggaagggctccacctgtgccttcacggaatgtatcctccgaagctatggcctgaagacgggattctttagctctccccacctggtgcaggttcgggagcggatccgcatcaatgggcagcccatcagtcctgagctcttcaccaagtacttctggcgcctctaccaccggctggaggagaccaaggatggcagctgtgtctccatgcccccctacttccgcttcctgacactcatggccttccacgtcttcctccaagagaaggtggacctggcagtggtggaggtgggcattggcggggcttatgactgcaccaacatcatcaggaagcctgtggtgtgcggagtctcctctcttggcatcgaccacaccagcctcctgggggatacggtggagaagatcgcatggcagaaagggggcatctttaagcaaggtgtccctgccttcactgtgctccaacctgaaggtcccctggcagtgctgagggaccgagcccagcagatctcagtgctggggagccaaaggcatccaggccagggctcctgtggcagctgcccctggcacctgtgttccagcccacatcccacatgcggctcgggcttcggaacacggagtggccgggccggacgcaggtgctgcggcgcgggcccctcacctggtacctggacggtgcgcacaccgccagcagcgcgcaggcctgcgtgcgctggttccgccaggcgctgcagggccgcgagaggccgagcggtggccccgaggttcgagtcttgctcttcaatgctaccggggaccgggacccggcggccctgctgaagctgctgcagccctgccagtttgactatgccgtcttctgccctaacctgacagaggtgtcatccacaggcaacgcagaccaacagaacttcacagtgacactggaccaggtcctgctccgctgcctggaacaccagcagcactggaaccacctggacgaagagcaggccagcccggacctctggagtgcccccagcccagagcccggtgggtccgcatccctgcttctggcgccccacccaccccacacctgcagtgccagctccctcgtcttcagctgcatttcacatgccttgcaatggatcagccaaggccgagaccccatcttccagccacctagtcccccaaagggcctcctcacccaccctgtggctcacagtggggccagcatactccgtgaggctgctgccatccatgtgctagtcactggcagcctgcacctggtgggtggtgtcctgaagctgctggagcccgcactgtcccagtagccaaggcccggggttggaggtgggagcttcccacacctgcctgcgttctccccatgaacttacatactaggtgccttttgtttttggctttcctggttctgtctagactggcctaggggccagggctttgggatgggaggccgggagaggatgtcttttttaaggctctgtgccttggtctctccttcctcttggctgagatagcagaggggctccccgggtctctcactgttgcagtggcctggccgttcagcctgtctcccccaacaccccgcctgcctcctggctcaggcccagcttattgtgtgcgctgcctggccaggccctgggtcttgccatgtgctgggtggtagatttcctcctcccagtgccttctgggaagggagagggcctctgcctgggacactgcgggacagagggtggctggagtgaattaaagcctttgttttttaaagaaatggcaaagccttcgactgacccttgaccccctgctccctcagcagagacggagggaggggctgctggtggtcagggacctgcactgtgtagagggagcctggctgtgtggcctggaacaagtccctccctccctgtgcgcctcaggtggcctgtctgtgagatgagaagaagaccagactgaagcctgttcaccatatgccaggcagtgctttct

SEQ ID NO: 11068 - DNA, 2274 bp, Homo sapiens
  source 1..2274: mol_type = unassigned DNA
gcggggcgtctcccgcccgggcctagagcgctgccgggggcgccgggactatgtcgcgggcgcggagccacctgcgcgccgctctattcctggcagcggcgtctgcgcgcggcataacgacccaggtcgcggcgcggcggggcttgagcgcgtggccggtgccgcaggagccgagcatggagtaccaggatgccgtgcgcatgctcaataccctgcagaccaatgccggctacctggagcaggtgaagcgccagcggggtgaccctcagacacagttggaagccatggaactgtacctggcacggagtgggctgcaggtggaggacttggaccggctgaacatcatccacgtcactgggacgaaggggaagggctccacctgtgccttcacggaatgtatcctccgaagctatggcctgaagacgggattctttagctctccccacctggtgcaggttcgggagcggatccgcatcaatgggcagcccatcagtcctgagctcttcaccaagtacttctggcgcctctaccaccggctggaggagaccaaggatggcagctgtgtctccatgcccccctacttccgcttcctgacactcatggccttccacgtcttcctccaagagaaggtggacctggcagtggtggaggtgggcattggcggggcttatgactgcaccaacatcatcaggaagcctgtggtgtgcggagtctcctctcttggcatcgaccacaccagcctcctgggggatacggtggagaagatcgcatggcagaaagggggcatctttaagcaaggtgtccctgccttcactgtgctccaacctgaaggtcccctggcagtgctgagggaccgagcccagcagatctcatgtcctctatacctgtgtccgatgctggaggccctcgaggaaggggggccgccgctgaccctgggcctggagggggagcaccagcggtccaacgccgccttggccttgcagctggcccactgctggctgcagcggcaggaccgccatggtgctggggagccaaaggcatccaggccagggctcctgtggcagctgcccctggcacctgtgttccagcccacatcccacatgcggctcgggcttcggaacacggagtggccgggccggacgcaggtgctgcggcgcgggcccctcacctggtacctggacggtgcgcacaccgccagcagcgcgcaggcctgcgtgcgctggttccgccaggcgctgcagggccgcgagaggccgagcggtggccccgaggttcgagtcttgctcttcaatgctaccggggaccgggacccggcggccctgctgaagctgctgcagccctgccagtttgactatgccgtcttctgccctaacctgacagaggtgtcatccacaggcaacgcagaccaacagaacttcacagtgacactggaccaggtcctgctccgctgcctggaacaccagcagcactggaaccacctggacgaagagcaggccagcccggacctctggagtgcccccagcccagagcccggtgggtccgcatccctgcttctggcgccccacccaccccacacctgcagtgccagctccctcgtcttcagctgcatttcacatgccttgcaatggatcagccaaggccgagaccccatcttccagccacctagtcccccaaagggcctcctcacccaccctgtggctcacagtggggccagcatactccgtgaggctgctgccatccatgtgctagtcactggcagcctgcacctggtgggtggtgtcctgaagctgctggagcccgcactgtcccagtagccaaggcccggggttggaggtgggagcttcccacacctgcctgcgttctccccatgaacttacatactaggtgccttttgtttttggctttcctggttctgtctagactggcctaggggccagggctttgggatgggaggccgggagaggatgtcttttttaaggctctgtgccttggtctctccttcctcttggctgagatagcagaggggctccccgggtctctcactgttgcagtggcctggccgttcagcctgtctcccccaacaccccgcctgcctcctggctcaggcccagcttattgtgtgcgctgcctggccaggccctgggtcttgccatgtgctgggtggtagatttcctcctcccagtgccttctgggaagggagagggcctctgcctgggacactgcgggacagagggtggctggagtgaattaaagcctttgttttttaaagaaatg

SEQ ID NO: 11069 - DNA, 2109 bp, Homo sapiens
  source 1..2109: mol_type = unassigned DNA
gtctcccgcccgggcctagagcgctgccgggggcgccgggactatgtcgcgggcgcggagccacctgcgcgccgctctattcctggcagcggcgtctgcgcgcggcataacgacccaggtcgcggcgcggcggggcttgagcgcgtggccggtgccgcaggagccgagcatggagtaccaggatgccgtgcgcatgctcaataccctgcagaccaatgccggctacctggagcaggtgaagcgccagcggggtgaccctcagacacagttggaagccatggaactgtacctggcacggagtgggctgcaggtggaggacttggaccggctgaacatcatccacgtcactgggacgaaggggaagggctccacctgtgccttcacggaatgtatcctccgaagctatggcctgaagacgggattctttagctctccccacctggtgcaggttcgggagcggatccgcatcaatgggcagcccatcagtcctgagctcttcaccaagtacttctggcgcctctaccaccggctggaggagaccaaggtggacctggcagtggtggaggtgggcattggcggggcttatgactgcaccaacatcatcaggaagcctgtggtgtgcggagtctcctctcttggcatcgaccacaccagcctcctgggggatacggtggagaagatcgcatggcagaaagggggcatctttaagcaaggtgtccctgccttcactgtgctccaacctgaaggtcccctggcagtgctgagggaccgagcccagcagatctcatgtcctctatacctgtgtccgatgctggaggccctcgaggaaggggggccgccgctgaccctgggcctggagggggagcaccagcggtccaacgccgccttggccttgcagctggcccactgctggctgcagcggcaggaccgccatggtgctggggagccaaaggcatccaggccagggctcctgtggcagctgcccctggcacctgtgttccagcccacatcccacatgcggctcgggcttcggaacacggagtggccgggccggacgcaggtgctgcggcgcgggcccctcacctggtacctggacggtgcgcacaccgccagcagcgcgcaggcctgcgtgcgctggttccgccaggcgctgcagggccgcgagaggccgagcggtggccccgaggttcgagtcttgctcttcaatgctaccggggaccgggacccggcggccctgctgaagctgctgcagccctgccagtttgactatgccgtcttctgccctaacctgacagaggtgtcatccacaggcaacgcagaccaacagaacttcacagtgacactggaccaggtcctgctccgctgcctggaacaccagcagcactggaaccacctggacgaagagcaggccagcccggacctctggagtgcccccagcccagagcccggtgggtccgcatccctgcttctggcgccccacccaccccacacctgcagtgccagctccctcgtcttcagctgcatttcacatgccttgcaatggatcagccaaggccgagaccccatcttccagccacctagtcccccaaagggcctcctcacccaccctgtggctcacagtggggccagcatactccgtgaggctgctgccatccatgtgctagtcactggcagcctgcacctggtgggtggtgtcctgaagctgctggagcccgcactgtcccagtagccaaggcccggggttggaggtgggagcttcccacacctgcctgcgttctccccatgaacttacatactaggtgccttttgtttttggctttcctggttctgtctagactggcctaggggccagggctttgggatgggaggccgggagaggatgtcttttttaaggctctgtgccttggtctctccttcctcttggctgagatagcagaggggctccccgggtctctcactgttgcagtggcctggccgttcagcctgtctcccccaacaccccgcctgcctcctggctcaggcccagcttattgtgtgcgctgcctggccaggccctgggtcttgccatgtgctgggtggtagatttcctcctcccagtgccttctggga

SEQ ID NO: 11070 - DNA, 677 bp, Homo sapiens
  source 1..677: mol_type = unassigned DNA
cagaagcccagaggctcagcggtgcttctggagttccagtgatcccggagtctgaaccggcagtgagagtggggaaagagggatgccgtgcgcatgctcaataccctgcagaccaatgccggctacctggagcaggtgaagcgccagcggggtgaccctcagacacagttggaagccatggaactgtacctggcacggagtgggctgcaggtggaggacttggaccggctgaacatcatccacgtcactgggacgaaggggaagggctccacctgtgccttcacggaatgtatcctccgaagctatggcctgaagacgggattctttagctctccccacctggtgcaggttcgggagcggatccgcatcaatgggcagcccatcagtcctgagctcttcaccaagtacttctggcgcctctaccaccggctggaggagaccaaggtggacctggcagtggtggaggtgggcattggcggggcttatgactgcaccaacatcatcaggaagcctgtggtgtgcggagtctcctctcttggcatcgaccacaccagcctcctgggggatacggtggagaagatcgcatggcagaaagggggcatctttaagcaaggtgtccctgccttcactgtgctccaacctgaaggtcccctggcagtgctgagggaccgagccca

SEQ ID NO: 11071 - DNA, 959 bp, Homo sapiens
  source 1..959: mol_type = unassigned DNA
ggctgggaattcggagactatagcgtccccgccccgggttgggaagtgggaagtggcacaggagctaggatccagaagcccagaggctcagcggtgcttctggagttccagtgatcccggagtctgaaccggcagtgagagtggggaaagagggatgccgtgcgcatgctcaataccctgcagaccaatgccggctacctggagcaggtgaagcgccagcggggtgaccctcagacacagttggaagccatggaactgtacctggcacggagtgggctgcaggtggaggacttggaccggctgaacatcatccacgtcactgggacgaaggggaagggctccacctgtgccttcacggaatgtatcctccgaagctatggcctgaagacgggattctttagctctccccacctggtgcaggttcgggagcggatccgcatcaatgggcagcccatcagtcctgagctcttcaccaagtacttctggcgcctctaccaccggctggaggagaccaaggatggcagctgtgtctccatgcccccctacttccgcttcctgacactcatggccttccacgtcttcctccaagagaaggtggacctggcagtggtggaggtgggcattggcggggcttatgactgcaccaacatcatcaggaagcctgtggtgtgcggagtctcctctcttggcatcgaccacaccagcctcctgggggatacggtggagaagatcgcatggcagaaagggggcatctttaagcaaggtgtccctgccttcactgtgctccaacctgaaggtcccctggcagtgctgagggaccgagcccagcagatctcagtgctggggagccaaaggcatccaggccagggctcctgtggcagctgcccctggcacctgtgttccagcccacatcccacatgcggctcgggcttcggaacacggagtggccgggccggacg

SEQ ID NO: 11072 - DNA, 2420 bp, Homo sapiens
  source 1..2420: mol_type = unassigned DNA
cccgcccacttccaactaccgcctccggcctgcccagggagagagagggagtggagcccagggagagggagcgcgagagagggagggaggaggggacggtgctttggctgacttttttttaaaagagggtgggggtggggggtgattgctggtcgtttgttgtggctgttaaattttaaactgccatgcactcggcttccagtatgctgggagcggtgaagatggaagggcacgagccgtccgactggagcagctactatgcagagcccgagggctactcctccgtgagcaacatgaacgccggcctggggatgaacggcatgaacacgtacatgagcatgtcggcggccgccatgggcagcggctcgggcaacatgagcgcgggctccatgaacatgtcgtcgtacgtgggcgctggcatgagcccgtccctggcggggatgtcccccggcgcgggcgccatggcgggcatgggcggctcggccggggcggccggcgtggcgggcatggggccgcacttgagtcccagcctgagcccgctcggggggcaggcggccggggccatgggcggcctggccccctacgccaacatgaactccatgagccccatgtacgggcaggcgggcctgagccgcgcccgcgaccccaagacctacaggcgcagctacacgcacgcaaagccgccctactcgtacatctcgctcatcaccatggccatccagcagagccccaacaagatgctgacgctgagcgagatctaccagtggatcatggacctcttccccttctaccggcagaaccagcagcgctggcagaactccatccgccactcgctctccttcaacgactgtttcctgaaggtgccccgctcgcccgacaagcccggcaagggctccttctggaccctgcaccctgactcgggcaacatgttcgagaacggctgctacctgcgccgccagaagcgcttcaagtgcgagaagcagctggcgctgaaggaggccgcaggcgccgccggcagcggcaagaaggcggccgccggagcccaggcctcacaggctcaactcggggaggccgccgggccggcctccgagactccggcgggcaccgagtcgcctcactcgagcgcctccccgtgccaggagcacaagcgagggggcctgggagagctgaaggggacgccggctgcggcgctgagccccccagagccggcgccctctcccgggcagcagcagcaggccgcggcccacctgctgggcccgccccaccacccgggcctgccgcctgaggcccacctgaagccggaacaccactacgccttcaaccacccgttctccatcaacaacctcatgtcctcggagcagcagcaccaccacagccaccaccaccaccaaccccacaaaatggacctcaaggcctacgaacaggtgatgcactaccccggctacggttcccccatgcctggcagcttggccatgggcccggtcacgaacaaaacgggcctggacgcctcgcccctggccgcagatacctcctactaccagggggtgtactcccggcccattatgaactcctcttaagaagacgacggcttcaggcccggctaactctggcaccccggatcgaggacaagtgagagagcaagtgggggtcgagactttggggagacggtgttgcagagacgcaagggagaagaaatccataacacccccaccccaacacccccaagacagcagtcttcttcacccgctgcagccgttccgtcccaaacagagggccacacagataccccacgttctatataaggaggaaaacgggaaagaatataaagttaaaaaaaagcctccggtttccactactgtgtagactcctgcttcttcaagcacctgcagattctgatttttttgttgttgttgttctcctccattgctgttgttgcagggaagtcttacttaaaaaaaaaaaaaaattttgtgagtgactcggtgtaaaaccatgtagttttaacagaaccagagggttgtactattgtttaaaaacaggaaaaaaaataatgtaagggtctgttgtaaatgaccaagaaaaagaaaaaaaaagcattcccaatcttgacacggtgaaatccaggtctcgggtccgattaatttatggtttctgcgtgctttatttatggcttataaatgtgtattctggctgcaagggccagagttccacaaatctatattaaagtgttatacccggttttatcccttgaatcttttcttccagatttttcttttctttacttggcttacaaaatatacaggcttggaaattatttcaagaaggagggagggataccctgtctggttgcaggttgtattttattttggcccagggagtgttgctgttttcccaacattttattaataaaattttcagac

SEQ ID NO: 11073 - DNA, 2401 bp, Homo sapiens
  source 1..2401: mol_type = unassigned DNA
gctagaggggctgcttgcgccaggcgccggccgccccactgcgggtccctggcggccggtgtctgaggagtcggagagccgaggcggccagaccgtgcgccccgcgcttctcccgaggccgttccgggtctgaactgtaacagggaggggcctcgcaggagcagcagcgggcgagttaaagtatgctgggagcggtgaagatggaagggcacgagccgtccgactggagcagctactatgcagagcccgagggctactcctccgtgagcaacatgaacgccggcctggggatgaacggcatgaacacgtacatgagcatgtcggcggccgccatgggcagcggctcgggcaacatgagcgcgggctccatgaacatgtcgtcgtacgtgggcgctggcatgagcccgtccctggcggggatgtcccccggcgcgggcgccatggcgggcatgggcggctcggccggggcggccggcgtggcgggcatggggccgcacttgagtcccagcctgagcccgctcggggggcaggcggccggggccatgggcggcctggccccctacgccaacatgaactccatgagccccatgtacgggcaggcgggcctgagccgcgcccgcgaccccaagacctacaggcgcagctacacgcacgcaaagccgccctactcgtacatctcgctcatcaccatggccatccagcagagccccaacaagatgctgacgctgagcgagatctaccagtggatcatggacctcttccccttctaccggcagaaccagcagcgctggcagaactccatccgccactcgctctccttcaacgactgtttcctgaaggtgccccgctcgcccgacaagcccggcaagggctccttctggaccctgcaccctgactcgggcaacatgttcgagaacggctgctacctgcgccgccagaagcgcttcaagtgcgagaagcagctggcgctgaaggaggccgcaggcgccgccggcagcggcaagaaggcggccgccggagcccaggcctcacaggctcaactcggggaggccgccgggccggcctccgagactccggcgggcaccgagtcgcctcactcgagcgcctccccgtgccaggagcacaagcgagggggcctgggagagctgaaggggacgccggctgcggcgctgagccccccagagccggcgccctctcccgggcagcagcagcaggccgcggcccacctgctgggcccgccccaccacccgggcctgccgcctgaggcccacctgaagccggaacaccactacgccttcaaccacccgttctccatcaacaacctcatgtcctcggagcagcagcaccaccacagccaccaccaccaccaaccccacaaaatggacctcaaggcctacgaacaggtgatgcactaccccggctacggttcccccatgcctggcagcttggccatgggcccggtcacgaacaaaacgggcctggacgcctcgcccctggccgcagatacctcctactaccagggggtgtactcccggcccattatgaactcctcttaagaagacgacggcttcaggcccggctaactctggcaccccggatcgaggacaagtgagagagcaagtgggggtcgagactttggggagacggtgttgcagagacgcaagggagaagaaatccataacacccccaccccaacacccccaagacagcagtcttcttcacccgctgcagccgttccgtcccaaacagagggccacacagataccccacgttctatataaggaggaaaacgggaaagaatataaagttaaaaaaaagcctccggtttccactactgtgtagactcctgcttcttcaagcacctgcagattctgatttttttgttgttgttgttctcctccattgctgttgttgcagggaagtcttacttaaaaaaaaaaaaaaattttgtgagtgactcggtgtaaaaccatgtagttttaacagaaccagagggttgtactattgtttaaaaacaggaaaaaaaataatgtaagggtctgttgtaaatgaccaagaaaaagaaaaaaaaagcattcccaatcttgacacggtgaaatccaggtctcgggtccgattaatttatggtttctgcgtgctttatttatggcttataaatgtgtattctggctgcaagggccagagttccacaaatctatattaaagtgttatacccggttttatcccttgaatcttttcttccagatttttcttttctttacttggcttacaaaatatacaggcttggaaattatttcaagaaggagggagggataccctgtctggttgcaggttgtattttattttggcccagggagtgttgctgttttcccaacattttattaataaaattttcagacat

SEQ ID NO: 11074 - DNA, 2422 bp, Homo sapiens
  source 1..2422: mol_type = unassigned DNA
cccgcccacttccaactaccgcctccggcctgcccagggagagagagggagtggagcccagggagagggagcgcgagagagggagggaggaggggacggtgctttggctgacttttttttaaaagagggtgggggtggggggtgattgctggtcgtttgttgtggctgttaaattttaaactgccatgcactcggcttccagtatgctgggagcggtgaagatggaagggcacgagccgtccgactggagcagctactatgcagagcccgagggctactcctccgtgagcaacatgaacgccggcctggggatgaacggcatgaacacgtacatgagcatgtcggcggccgccatgggcagcggctcgggcaacatgagcgcgggctccatgaacatgtcgtcgtacgtgggcgctggcatgagcccgtccctggcggggatgtcccccggcgcgggcgccatggcgggcatgggcggctcggccggggcggccggcgtggcgggcatggggccgcacttgagtcccagcctgagcccgctcggggggcaggcggccggggccatgggcggcctggccccctacgccaacatgaactccatgagccccatgtacgggcaggcgggcctgagccgcgcccgcgaccccaagacctacaggcgcagctacacgcacgcaaagccgccctactcgtacatctcgctcatcaccatggccatccagcagagccccaacaagatgctgacgctgagcgagatctaccagtggatcatggacctcttccccttctaccggcagaaccagcagcgctggcagaactccatccgccactcgctctccttcaacgactgtttcctgaaggtgccccgctcgcccgacaagcccggcaagggctccttctggaccctgcaccctgactcgggcaacatgttcgagaacggctgctacctgcgccgccagaagcgcttcaagtgcgagaagcagctggcgctgaaggaggccgcaggcgccgccggcagcggcaagaaggcggccgccggagcccaggcctcacaggctcaactcggggaggccgccgggccggcctccgagactccggcgggcaccgagtcgcctcactcgagcgcctccccgtgccaggagcacaagcgagggggcctgggagagctgaaggggacgccggctgcggcgctgagccccccagagccggcgccctctcccgggcagcagcagcaggccgcggcccacctgctgggcccgccccaccacccgggcctgccgcctgaggcccacctgaagccggaacaccactacgccttcaaccacccgttctccatcaacaacctcatgtcctcggagcagcagcaccaccacagccaccaccaccaccaaccccacaaaatggacctcaaggcctacgaacaggtgatgcactaccccggctacggttcccccatgcctggcagcttggccatgggcccggtcacgaacaaaacgggcctggacgcctcgcccctggccgcagatacctcctactaccagggggtgtactcccggcccattatgaactcctcttaagaagacgacggcttcaggcccggctaactctggcaccccggatcgaggacaagtgagagagcaagtgggggtcgagactttggggagacggtgttgcagagacgcaagggagaagaaatccataacacccccaccccaacacccccaagacagcagtcttcttcacccgctgcagccgttccgtcccaaacagagggccacacagataccccacgttctatataaggaggaaaacgggaaagaatataaagttaaaaaaaagcctccggtttccactactgtgtagactcctgcttcttcaagcacctgcagattctgatttttttgttgttgttgttctcctccattgctgttgttgcagggaagtcttacttaaaaaaaaaaaaaaattttgtgagtgactcggtgtaaaaccatgtagttttaacagaaccagagggttgtactattgtttaaaaacaggaaaaaaaataatgtaagggtctgttgtaaatgaccaagaaaaagaaaaaaaaagcattcccaatcttgacacggtgaaatccaggtctcgggtccgattaatttatggtttctgcgtgctttatttatggcttataaatgtgtattctggctgcaagggccagagttccacaaatctatattaaagtgttatacccggttttatcccttgaatcttttcttccagatttttcttttctttacttggcttacaaaatatacaggcttggaaattatttcaagaaggagggagggataccctgtctggttgcaggttgtattttattttggcccagggagtgttgctgttttcccaacattttattaataaaattttcagacat

SEQ ID NO: 11075 - DNA, 1128 bp, Homo sapiens
  source 1..1128: mol_type = unassigned DNA
agtatgctgggagcggtgaagatggaagggcacgagccgtccgactggagcagctactatgcagagcccgagggctactcctccgtgagccgcgcccgcgaccccaagacctacaggcgcagctacacgcacgcaaagccgccctactcgtacatctcgctcatcaccatggccatccagcagagccccaacaagatgctgacgctgagcgagatctaccagtggatcatggacctcttccccttctaccggcagaaccagcagcgctggcagaactccatccgccactcgctctccttcaacgactgtttcctgaaggtgccccgctcgcccgacaagcccggcaagggctccttctggaccctgcaccctgactcgggcaacatgttcgagaacggctgctacctgcgccgccagaagcgcttcaagtgcgagaagcagctggcgctgaaggaggccgcaggcgccgccggcagcggcaagaaggcggccgccggagcccaggcctcacaggctcaactcggggaggccgccgggccggcctccgagactccggcgggcaccgagtcgcctcactcgagcgcctccccgtgccaggagcacaagcgagggggcctgggagagctgaaggggacgccggctgcggcgctgagccccccagagccggcgccctctcccgggcagcagcagcaggccgcggcccacctgctgggcccgccccaccacccgggcctgccgcctgaggcccacctgaagccggaacaccactacgccttcaaccacccgttctccatcaacaacctcatgtcctcggagcagcagcaccaccacagccaccaccaccaccaaccccacaaaatggacctcaaggcctacgaacaggtgatgcactaccccggctacggttcccccatgcctggcagcttggccatgggcccggtcacgaacaaaacgggcctggacgcctcgcccctggccgcagatacctcctactaccagggggtgtactcccggcccattatgaactcctcttaagaagacgacggcttcaggcccggctaactctggcaccccggatcgaggacaagtgagagagcaagtgggggtcgagactttggggagacggtg

SEQ ID NO: 11076 - DNA, 1988 bp, Homo sapiens
  source 1..1988: mol_type = unassigned DNA
ggagcccggggcgggcgagggcgggggtgtcccggctataaagcgtggccgcctcccgcggcgctcgggacagccgtaccccgggcggtcggacgggcgggcgccggtgggagctcgggccgtgcccgctgagagatccagagcgctccgttcccccggggccggagcgggggcgggtgggggcgtaagcccgggggatgctgggctcagtgaagatggaggcccatgacctggccgagtggagctactacccggaggcgggcgaggtctactcgccggtgaccccagtgcccaccatggcccccctcaactcctacatgaccctgaatcctctaagctctccctatccccctggggggctccctgcctccccactgccctcaggacccctggcacccccagcacctgcagcccccctggggcccactttcccaggcctgggtgtcagcggtggcagcagcagctccgggtacggggccccgggtcctgggctggtgcacgggaaggagatgccgaaggggtatcggcggcccctggcacacgccaagccaccgtattcctatatctcactcatcaccatggccatccagcaggcgccgggcaagatgctgaccttgagtgaaatctaccagtggatcatggacctcttcccttactaccgggagaatcagcagcgctggcagaactccattcgccactcgctgtctttcaacgactgcttcgtcaaggtggcgcgttccccagacaagcctggcaagggctcctactgggccctacaccccagctcagggaacatgtttgagaatggctgctacctgcgccgccagaaacgcttcaagctggaggagaaggtgaaaaaagggggcagcggggctgccaccaccaccaggaacgggacagggtctgctgcctcgaccaccacccccgcggccacagtcacctccccgccccagcccccgcctccagcccctgagcctgaggcccagggcggggaagatgtgggggctctggactgtggctcacccgcttcctccacaccctatttcactggcctggagctcccaggggagctgaagctggacgcgccctacaacttcaaccaccctttctccatcaacaacctaatgtcagaacagacaccagcacctcccaaactggacgtggggtttgggggctacggggctgaaggtggggagcctggagtctactaccagggcctctattcccgctctttgcttaatgcatcctagcaggggttgggaacatggtggtgggtatggctggagctcacaccacgaagctcttggggcctgatccttctggtgacacttcacttgtcccattggttaacatctgggtgggtctattacttactgtgatgactgctgtctcagtgggcatggtgttgatccacggggtactgtgataaccaccatggatacattttggtggcccactgggtactgtgaggactgctacattgatggatgttattggctaatccactgcatggtttgatggccaccatctcggttggccctttgggtgtgatggtgatagcatttcagtgacatcttctttggccccccccattaggtgctgtgcccacttcttttttggtgtacttggcacagtaggtgccaagttggccaccattctgtgtaacaccttttttggcccattgggtgctttgatggacatcatactgggtaggtgacaacgtcagtgggccaccatgtgccatgatggctgctgcagccccgtgttggccatgtcgtcaccattctctctggcatgggttgggtaggggatggaggtgagaatactccttggttttctctgaagcccaccctttcccccaactctggtccaggagaaaccagaaaaggctggttagggtgtggggaatttctactgaagtctgattctttcccgggaagcggggtactggctgtgtttaatcattaaaggtaccgtgtccgcctctt

SEQ ID NO: 11077 - DNA, 3447 bp, Homo sapiens
  source 1..3447: mol_type = unassigned DNA
atgcaggcgcgctactccgtgtccagccccaactccctgggagtggtgccctacctcggcggcgagcagagctactaccgcgcggcggccgcggcggccgggggcggctacaccgccatgccggcccccatgagcgtgtactcgcaccctgcgcacgccgagcagtacccgggcggcatggcccgcgcctacgggccctacacgccgcagccgcagcccaaggacatggtgaagccgccctatagctacatcgcgctcatcaccatggccatccagaacgccccggacaagaagatcaccctgaacggcatctaccagttcatcatggaccgcttccccttctaccgggacaacaagcagggctggcagaacagcatccgccacaacctctcgctcaacgagtgcttcgtcaaggtgccgcgcgacgacaagaagccgggcaagggcagctactggacgctggacccggactcctacaacatgttcgagaacggcagcttcctgcggcggcggcggcgcttcaagaagaaggacgcggtgaaggacaaggaggagaaggacaggctgcacctcaaggagccgcccccgcccggccgccagcccccgcccgcgccgccggagcaggccgacggcaacgcgcccggtccgcagccgccgcccgtgcgcatccaggacatcaagaccgagaacggtacgtgcccctcgccgccccagcccctgtccccggccgccgccctgggcagcggcagcgccgccgcggtgcccaagatcgagagccccgacagcagcagcagcagcctgtccagcgggagcagccccccgggcagcctgccgtcggcgcggccgctcagcctggacggtgcggattccgcgccgccgccgcccgcgccctccgccccgccgccgcaccatagccagggcttcagcgtggacaacatcatgacgtcgctgcgggggtcgccgcagagcgcggccgcggagctcagctccggccttctggcctcggcggccgcgtcctcgcgcgcggggatcgcacccccgctggcgctcggcgcctactcgcccggccagagctccctctacagctccccctgcagccagacctccagcgcgggcagctcgggcggcggcggcggcggcgcgggggccgcggggggcgcgggcggcgccgggacctaccactgcaacctgcaagccatgagcctgtacgcggccggcgagcgcgggggccacttgcagggcgcgcccgggggcgcgggcggctcggccgtggacgaccccctgcccgactactctctgcctccggtcaccagcagcagctcgtcgtccctgagtcacggcggcggcggcggcggcggcgggggaggccaggaggccggccaccaccctgcggcccaccaaggccgcctcacctcgtggtacctgaaccaggcgggcggagacctgggccacttggcgagcgcggcggcggcggcggcggccgcaggctacccgggccagcagcagaacttccactcggtgcgggagatgttcgagtcacagaggatcggcttgaacaactctccagtgaacgggaatagtagctgtcaaatggccttcccttccagccagtctctgtaccgcacgtccggagctttcgtctacgactgtagcaagttttgacacaccctcaaagccgaactaaatcgaaccccaaagcaggaaaagctaaaggaacccatcaaggcaaaatcgaaactaaaaaaaaaaaatccaattaaaaaaaacccctgagaatattcaccacaccagcgaacagaatatccctccaaaaattcagctcaccagcaccagcacgaagaaaactctattttcttaaccgattaattcagagccacctccactttgccttgtctaaataaacaaacccgtaaactgttttatacagagacagcaaaatcttggtttattaaaggacagtgttactccagataacacgtaagtttcttcttgcttttcagagacctgctttcccctcctcccgtctcccctctcttgccttcttccttgcctctcacctgtaagatattattttatcctatgttgaagggagggggaaagtccccgtttatgaaagtcgctttctttttattcatggacttgttttaaaatgtaaattgcaacatagtaatttatttttaatttgtagttggatgtcgtggaccaaacgccagaaagtgttcccaaaacctgacgttaaattgcctgaaactttaaattgtgctttttttctcattataaaaagggaaactgtattaatcttattctatcctcttttctttctttttgttgaacatattcattgtttgtttattaataaattaccattcagtttgaatgagacctatatgtctggatactttaatagagctttaattattacgaaaaaagatttcagagataaaacactagaagttacctattctccacctaaatctctgaaaaatggagaaaccctctgactagtccatgtcaaattttactaaaagtctttttgtttagatttattttcctgcagcatcttctgcaaaatgtactatatagtcagcttgctttgaggctagtaaaaagatatttttctaaacagattggagttggcatataaacaaatacgttttctcactaatgacagtccatgattcggaaattttaagcccatgaatcagccgcggtcttaccacggtgatgcctgtgtgccgagagatgggactgtgcggccagatatgcacagataaatatttggcttgtgtattccatataaaattgcagtgcatattatacatccctgtgagccagatgctgaatagatattttcctattatttcagtcctttataaaaggaaaaataaaccagtttttaaatgtatgtatataattctcccccatttacaatccttcatgtattacatagaaggattgcttttttaaaaatatactgcgggttggaaagggatatttaatctttgagaaactattttagaaaatatgtttgtagaacaattatttttgaaaaagatttaaagcaataacaagaaggaaggcgagaggagcagaacattttggtctagggtggtttctttttaaaccattttttcttgttaatttacagttaaacctaggggacaatccggattggccctcccccttttgtaaataacccaggaaatgtaataaattcattatcttagggtgatctgccctgccaatcagactttggggagatggcgatttgattacagacgttcgggggggtggggggcttgcagtttgttttggagataatacagtttcctgctatctgccgctcctatctagaggcaacacttaagcagtaattgctgttgcttgttgtcaaaatttgatcattgttaaaggattgctgcaaataaatacactttaatttcagtc

SEQ ID NO: 11078 - DNA, 748 bp, Homo sapiens
  source 1..748: mol_type = unassigned DNA
ccatgcaggcgcgctactccgtgtccagccccaactccctgggagtggtgccctacctcggcggcgagcagagctactaccgcgcggcggccgcggcggccgggggcggctacaccgccatgccggcccccatgagcgtgtactcgcaccctgcgcacgccgagcagtacccgggcggcatggcccgcgcctacgggccctacacgccgcagccgcagcccaaggacatggtgaagccgccctatagctacatcgcgctcatcaccatggccatccagaacgccccggacaagaagatcaccctgaacggcatctaccagttcatcatggaccgcttccccttctaccgggacaacaagcagggctggcagaacagcatccgccacaacctctcgctcaacgagtgcttcgtcaaggtgccgcgcgacgacaagaagccgggcaagggcagctactggacgctggacccggactcctacaacatgttcgagaacggcagcttcctgcggcggcggcggcgcttcaagaagaaggacgcggtgaaggacaaggaggagaaggacaggccgcaggctacccgggccagcagcagaacttccactcggtgcgggagatgttcgagtcacagaggatcggcttgaacaactctccagtgaacgggaatagtagctgtcaaatggccttcccttccagccagtctctgtaccgcacgtccggagctttcgtctacgactgtagcaagttttga

SEQ ID NO: 11079 - DNA, 4675 bp, Homo sapiens
  source 1..4675: mol_type = unassigned DNA
cccttggtcagaggtcccagagggggcccaggcgacttcctctcaaaggacatgagtagtcagacctgccttccatttttttctgcccttaccttggggggatgaagaactctattttgaggattctgtgaaaagggttgcaacccaactctgttctatttctttgcaggagcctgggtgagttctttctccctatcctgggcctctgtagctccatctgtggaatgggagagttggattaacaccaggctatcccgtagattggaggctgctgttagatgaaactgcaaagtgttctcagtaccctttcctaaatggcctagaatatggctacacttatacatcagttctgaggtaggtgttactagcctcatttttacaaaggcagaaacaaagcgcaaagaaccttgcccaaggtgacagatagggtaagtagtgaaggcaggattggaaccccaggagcctgacttaaggtcgctgctcttaactactatgcagaccaggaaactgaggctccgaagcggggaagtcacctaatgagggtcacacagccttgctacagcggaggcagctgggattccggcctcgcacgcccgagctttagccactgtgcggcgctgtcggggcagcagcccaggcatccgctcagttcctgctcacgtccagcgcccatctccccttccgtgccccagaggctgaaatgggcccaatctgtgttgaagctgcttgtttctgggtcctggagggaggccgggggagaaagaggtctaataggatgggcaggaacccggctagcgagaaacaaggcacagggccaaccttagttgcacaagacttttgagagatgaaggcaacacttggtggaggtcagggttcactgagggggtgtcgggcagggggcggaggaggtcctgccgcctgtcggtggggcccagaaccctgggagccaggaaggtggggggtgtccagtcctcagggcaactggggccagggagaggggagggagaaattaagcggattcccagacccatgaacagacatccagacaaatgccgtttccacagagactcacggagagtgagatagtcacagagactgagacaaacggatgccgagatccagagggtcggagaacaggcaaactcggagcagtagaccggcccgcgccccgggaacgcggccacagcggccggcgctctgcccggcctctccgcgcggagaggggtggcgggcccgacagcggagggaggagagggcgccgccgcaatctcacctctcccaggcccaaggctgcgggcgccaagttcgctcctggtgatcactcgaatgcgtctcccctcgggctggaagccgtgcgggctcgggtgggcgccggcgggccgcgctggggcggcgtgggtcccggcgtctcagcctcgcgctcccactgcgcttcggcccggtggcccgggcgccgccttggggagaggacgggtggggaccgccgccacttccctggctgcggctggcgcccgagtgagccttaacatccaggggctgagcgttctgaaggcggcggcttcagggagcacagggtgcaggagcggcggcgaagacaagggcccgcctccggccactcgagcccagctcccgccgcggcggcggtttgttcccgccgggtccctcagcggaggcgctacgcccgcccctgtcgcctcgccccaccccgcccagggagctccgccctagcccgcagctcttccgccttaggcagccgctaggcgggagggacaatcccccaccaccaaccactgccaccccgaggggactaggggctgaggcccgcccaggtaagggaaagcctcagctccttccgttgcgccccagcggcgggtcccagctcggattcccggggtagtggcgggggccgccggcgggtcgtgccctggaaggtgagcgcggccgagctgggccgccagggggcgctgcggagccgggggacacccctccctgcctgcctcagtcccccgccccctccccgcccgcgcgcaaaacgcactcgccccagaggcagcgcggccgagcccgagccgctgccggagcggagccggagagtggcggcggcggcggcagcggcaccatgaccctgggcagctgctgctgcgagatcatgtcctccgagagctccccggccgcgctgtccgaggccgacgcagacatagacgtggtgggcggcggcagcggcgggggggagctcccagctcgctccgggccccgcgccccccgggacgtgctcccccacggccacgagcctcccgcggaggaagccgaggcagacttagccgaggacgaggaggagtctggtggctgctcggacggcgagccccgcgctctggcgtcccggggggcggcggccgcagcggggagcccggggccaggcgccgcggcggcccgcggcgcagcggggcccgggccgggaccgccgtcggggggcgcggcgacgcggagcccgctggtgaagccgccctactcgtacatcgcgctcatcaccatggccatcctgcagagccccaagaagcggctgacgttgagcgagatctgcgagttcatcagcggccgcttcccctactaccgggagaagttccccgcctggcagaacagcatccgccacaacctctctctcaacgactgcttcgtcaagatcccccgcgagccgggcaacccgggcaagggcaactactggacgctggacccggagtcggccgacatgttcgacaacggcagcttcctgcggcgtcgcaagcgcttcaagcggcagcccctgccgccgccgcacccacacccgcaccctcacccggagctgctgctgcgtggcggggccgcggcggcgggggatcccggcgctttcctgcccggcttcgctgcctacggcgcctacggctacggctacgggctggctctcccggcctacggcgcacccccgccggggccggccccgcatccgcacccgcacccgcacgccttcgctttcgccgcggcagccgccgccgctccttgccagctgtcggtacccccaggccgcgccgccgcgcctccacccggacctccgacggcctcggtgttcgcaggcgcgggatcggccccagctcctgcgcctgcctcaggctcgggcccgggcccgggccccgcaggcctgcccgccttcctgggcgcggagctgggctgcgccaaagccttctacgcggcgtccctgagtcctcccgcagccggcaccgcggcgggtctgcccaccgcacttctgcgccagggcctcaagacggacgcgggcggtggtgcaggcggcgggggcgccggggcagggcagaggccttccttctctatagaccacatcatgggccacggtggcggcggggcagcacccccgggcgccggcgagggctctccgggaccgccattcgcggcagccgcgggtcctgggggccaagcccaggtcttggccatgctgactgctccggccctggctcccgttgctggccacattcgcctctcgcatcccggggacgcgctgctgtcctcagggtcccggtttgccagcaaagtcgccggccttagtggctgccacttctgaccgcagcaggcccagggccggttaggtccgcactcctcagcctctcccgggagttcctgcggtcccagcggaactcagggagtctatttatgaagtctccagaccttgggccggcacgcgtgacacggcacttcaggctccacgcacagaatctcgcagatagttgggactaagcgggctctatcgctcagggcgacaggcccggggctacgcgaagaagtcgcaggccaagattctttacagtttgagaaataaaagcaggggggtgggggcttcgtttttttccctgcctctgcgcctctcggggaacacattccgggagagatgcctggccaggctccacggatcccgccagaaacaccaacagagggtctccctttctgcctttcccctctcacttcttccccaacgttgagaccctgcttgtccaatattataatttaaagacatctattatctgctttgtgcttaaaagaaaaattcaacctttttttttttttttttttttttgctgttctccaaggaagttcgtttcctctgaagcctaaaccagtgtctacgcaggcggagctgaacggagaggtgaagcagggggtctttatattccctgcagaaaccctggatcccactccactgaggaaaatcctttctcttttgtgtttgggtgcttttaaaggaatttctttcctttcccttggctggctgggtccagccatctccggccagcaaccctgtcagtgttccaccctgtcccaggccctgtgatatttattgtggctaaaggcaatgagattgggtggaagagaagggtctgggccagggactggagaggtgggggtggagtgggcaagggcacaccctgtggcagggggtcctataattttgtgtaaatatctgtacagcgcgctgctctcggcgttctctgtccactgggtgtgcattgatttaaacttctccactgtggggaagctctgtgaaatcgtctgatggtctgtgtggaagaaaagaaaaatctgtctgccgcctatttcccattggtgtcgattgaataaatgtatgtgaacttca

SEQ ID NO: 11080 - DNA, 2068 bp, Homo sapiens
  source 1..2068: mol_type = unassigned DNA
atgaccctctccggcggcggcagcgccagcgacatgtccggccagacggtgctgacggccgaggacgtggacatcgatgtggtgggcgagggcgacgacgggctggaagagaaggacagcgacgcaggttgcgatagccccgcggggccgccggagctgcgcctggacgaggcggacgaggtgcccccggcggcaccccatcacggacagcctcagccgccccaccagcagcccctgacattgcccaaggaggcggccggagccggggccggaccggggggcgacgtgggcgcgccggaggcggacggctgcaagggcggtgttggcggcgaggagggcggcgcgagcggcggcgggcctggcgcgggcagcggttcggcgggaggcctggccccgagcaagcccaagaacagcctagtgaagccgccttactcgtacatcgcgctcatcaccatggccatcctgcagagcccgcagaagaagctgaccctgagcggcatctgcgagttcatcagcaaccgcttcccctactacagggagaagttccccgcctggcagaacagcatccgccacaacctctcactcaacgactgcttcgtcaagatcccccgcgagccgggcaacccgggcaagggcaactactggaccctggacccgcagtccgaggacatgttcgacaacggcagcttcctgcggcgccggaaacgcttcaagcgccaccagcaggagcacctgcgcgagcagacggcgctcatgatgcagagcttcggcgcttacagcctggcggcggcggccggcgccgcgggaccctacggccgcccctacggcctgcaccctgcggcggcggccggtgcctattcgcacccggcagcggcggcggccgcggctgctgcggcggcgctccagtacccgtacgcgctgccgccggtggcaccggtgctgcctcccgctgtgccgctgctgccctcgggcgagctgggccgcaaagcggccgccttcggctcacagctcggcccgggcctgcagctgcagctcaatagcctgggcgccgccgcggccgctgcgggcacagcgggcgccgcgggcaccaccgcgtcgctcatcaagtccgagccaagcgcgcggccgtcgttcagcatcgagaacatcataggtgggggccccgcggctcctgggggctcggcggtgggcgctggggtcgccggcggcactgggggttcagggggcggcagcacggcgcagtcgtttctgcggccacccgggaccgtgcagtcggcagcgctcatggccacccaccaaccgctgtcgctgagccggacgactgccaccatcgcgcccattcttagcgtgccactctccggacagtttctgcagcccgcagcctcggccgccgccgctgctgcggccgccgctcaagccaaatggccggcgcaatagggacgcgccaatggccgggacccagggtccggcggcggcctcgagcaacaaatgcacctccaggctgcgcgccctgtcccaagcccggtcccggtcccgctgcccaatcctggactctgcctctccccaatttcctttcccctgagcccccaacgcctaccttccgcggcctccatcccctcgcgcacacctaagctggtcgagcaaactcaccgcgcgcccgccggggatagctttccatacaggtaaaaccgaaaaccgaattttccaaaaatgcaccccgacggcgcctgctcttagtaccgtggggatgggagggaaattctttgtatatatttgtaaaaaaattattgactttccttttggggtttttatttttttaagaaaaaacaaattccgtagatttagagctctgaactttcattttttttgaaggttcactctccgaagttttatctgagaaaagaatgtatagagacgttgggagattttaaatataaaaaattttcaaaaaggcaaaaagtgtcattctattataaaagtctgtttatatatgaatgaatatatatggtattctaaatgttattccatcgtgttgtacacaactttgtaaataaatttttaaaatgcc

SEQ ID NO: 11081 - DNA, 2181 bp, Homo sapiens
  source 1..2181: mol_type = unassigned DNA
gaagaccatcatccctggactacgttaggaggaagtggcaccgctccgaggtaggggaagaagggttataaagggaggcgtccaccacacatggtcttgaagaagcttttataaaaggcgaaggcatctttgccggacgttgttgcaaaggcgtagaaacaagcagaggaaaacatcccaaagggtaaccactagcgttcctgcttcttgcaacattcatcccgggcttccagctcagcccgccggggccaggtgatccggccgccacatcccctgcgactgaagcacctgctccgccatgaacttgccaagagctgagcgccttcgctccacaccgcagcgcagcctccgggactccgatggggaagacggtaaaatcgatgtcctgggagaggaggaagatgaagacgaggaggaggcggcgagccagcagttcctagagcagtcgctccagccggggctgcaggtggcccggtggggcggggttgcgcttccccgagagcacatcgagggcggcggcggcccgagcgacccctcagagtttggcaccgagttcagggcaccgccaaggtctgcggcggcctctgaagatgcccggcagccggcaaagcccccctcctcgtacatcgcgctcatcaccatggccatcctgcaaagcccgcacaagcgcctcacgctcagcggcatctgcgccttcattagtgaccgcttcccctactaccgccgcaagttccccgcctggcagaacagcatccgccacaacctctcgctgaacgactgcttcgtcaagatcccccgcgagccgggccgcccaggcaagggcaactactggagcctggaccccgcctcccaggacatgttcgacaatggcagctttctccggcgtaggaagcgtttccagcgccaccaaccgaccccgggagcccacctgccccaccccttccctctacctgctgcacacgccgccctgcacaacccccgcccaggccctctgcttggggcccctgccccgccgcagccagtcccgggggcctaccccaacaccggccccgggagacgcccttacgctctgctgcacccgcatcctcctcgctacctactgctctcggcccccgcctatgccggggcaccgaagaaagcagaaggcgcggacctggcgaccccggcacccttcccgtgctgcagccctcacttggtcctcagccttgggaggagggcaagggtctggcgtcgccaccgggaggcggatgcatctctttcagcattgagagtatcatgcaaggggtcaggggagcgggtacaggggctgcgcagagtttgtccccgaccgcgtggagctactgccccctgctccagcgaccgtcaagcctgtcggacaattttgcagcaacagcagcggcatcaggaggaggactgcgccaacggctgcgctcccaccaagggcgcggtgctgggcgggcacctgtcggccgcgtcggcgctgctgcggtatcaggcggtggcagagggctctgggctgacatcgctggccgcccctttgggcggagaggggacctcaccagtttttttagtatcgcccacgcccagttccctggccgagtccgcagggccctcctagagccaggtgggagtggggagcgacccgcagctgctcactccaccttgcgcggcccatactgggcgtgtgcatctgaatcccgctggagagcaaacacgaacttctgttccctgcaaaatggttagaaagaaacagctggattacgttcctctaaaaaccacctgaacgtaaccttcgcagggcgtcaagtcatcttttcttgccttcggttgtggcttctgtggctttcccgatttgcacatgtcctggggtactatgaacgtgagtggggtattttgttctggcattaaaagaaaaacaagcaagcaaacaaaaacacagcctccgatgccaaacatgttcccccttcttcacttccttggaactggaagtattattcctaagtctagtgcaaaatgcttctactctctgtgtcttcctgatagggatgtttaatgtaagtaggatattaatttcagaacattgatttcttatctgtgtgtctgacgtgccatctttaatgttaaaattaaggtgttaaaattaagcctagttatatagacgaaataaaatgctaagtcact

SEQ ID NO: 11082 - DNA, 2068 bp, Homo sapiens
  source 1..2068: mol_type = unassigned DNA
atctttgccggacgttgttgcaaaggagtagaaacaagcagaggaaaacatcccaaagggtaaccactagcgttcctgcttcttgcaacattcatcccaggcttccagctcagcccgccccgggccaggtgatcggccgccacatcccctgcgactgaagcacctgctccgccatgaacctgccaagagctgagcgccctcgctccacaccgcagcgcagcctccgggactccgatggggaagacggtaaaatcgatgtcctgggagaggaggaagatgaagacgaggtggaagacgaggaggaggaggcgagccagaagttcctagagcagtcgctccagccggggctgcaggtggcccggtggggcggggttgcgcttccccgagagcacatcgagggcggcggcccgagcgacccctcagagtttggcaccgagttcagggcaccgccaaggtctgcggcggcctctgaagatgcccggcagccggcaaagcccccctactcgtacatcgcgctcatcaccatggccatcctgcaaagcccgcacaagcgcctcacgctcagcggcatctgcgccttcattagtggccgcttcccctactaccgccgcaagttccccgcctggcagaacagcatccgccacaacctctcgctgaacgactgcttcgtcaagatcccccgcgagccgggccacccaggcaagggcacctactggagcctggaccccgcctcccaggacatgttcgacaatggcagctttctccggcgtaggaagcgtttcaagcgccaccaactgaccccgggagcccacctgccccaccccttccctctacctgctgcacacgccgccctgcacaacccccgcccaggccctctgcttggggcccctgccctgccgcagccagtcccgggggcctaccccaacaccgcccccgggagacgcccttacgctctgctgcacccgcatcctcctcgctacctactgctctcggcccccgcctatgccggggcaccgaagaaagcagaaggcgcggacctggcgacccccggcacccttcccgtgctgcagccctcacttggtcctcagccttgggaggagggcaagggtctggcgtcgccaccgggaggcggatgcatctctttcagcattgagagtatcatgcaaggggtcaggggagcgggtacaggggctgcgcagagtttgtccccgaccgcgtggagctactgccccctgctccagcgaccgtcaagcctgtcggacaattttgcagcaacagcagcagcatcaggaggaggactgcgccaacggctgcgctcccaccaagggcgcggtgctgggcgggcacctgtcggccgcgtcggcgctgctgcggtatcaggcggtggcagagggctctaggctgacatcgctggctgcccctttgggcggagaggggacctcaccagtttttttagtatcgcccacgcccagttccctggccaagtccgcagggccctcctagagccaggtgggagtggggagcgatccgcagctgctcactccaccttgcgcggcccatactgggcgtgtgcatctgaatcctgctggagagcaaacacgaacttctgttccctgcaaaatggttagaaagaaacagctggattacgttcctctaaaaaccacctgaacgtaaccttcgcagggcgtcaagtcatcttttcttgccttcggctgtggcttctgtggctttccggatttgcacatttcctggggtactatgaacgtgagtggggtattttgttctggcattagaagaaaaacaagcaagcaaacaaaaacacagcctccgatgccaaacatgttcccccttcttcacttccttggaactggaagtgttattcctaagtctagtgcaaaatgcttctactctctgtgtcttcctgatagggatgtttaatgtaagtaggatattaatttcagaacattgatttcttatctgtgtgtctgacgtgccatctttaatgttaaaattaaggtgttaaaattaagcctagttatatagacgaaataaaatgctaagtcactac

SEQ ID NO: 11083 - DNA, 3109 bp, Homo sapiens
  source 1..3109: mol_type = unassigned DNA
ctctcctgccttccctgaataaacttacacaatttagtgctgggacatttggaccttttctgaaaatttgagtcagggagagcatcttggggaggtgggaaggaaggtagaaggagcaaagcaacacccccctgaagcctgggaatattgtcagaaccttaaatataattcagctcaccattctgggtaaggacagactctaccaatgaaaatgggtgattaccagctgtgaaacacaaaaacatacttttacggttacacattcctttacaaacaaccgtgtacatttcagcctcctgccccaccatttcttttctccaggagggaaggctgcatgtcgaggtggtcatagaatgttgagtatcatactttcctacctcgcttttatttgcgcgggtttaaatgcgccttaacagaacccgtgcaaaggcttgccaactgtctggctgcaccggatgagtagagcatcttccttggtggcaggtgggtgcgaggaggaggggcctgggcttttctccggacagtgtttgcccagaagaccatcatccctggactacgttaggaggaagtggcaccgctccgaggtaggggaagaagggttataaaggggggagtccaccacacatggtcttgaagaagcttttataaaaggcaaaggcatctttgccggacgttgttgcaaaggagtagaaacaagcagacgaaaacatcccaaagggtaaccactagcgttcctgcttcttgcaacattcatcccaggcttccagctcagcccgccccaggccaggtgatcggccgccacatcccctgcgactgaagcacctgctcctccatgaacctgccaagagctgagcgccctcgctccacaccgcagcgcagcctccgggactccgatggggaagacggtaaaatcgatgtcctgggagaggaggaagatgaagacgaggtggaagacgaggaggaggaggcgagacagcagttcctagagcagtcgctccagccggggctgcaggtggcccggtggggcggggttgcgcttccccgagagcacatcgagggcggcggcggcccgagtgacccttcagagtttggcaccaagttcagggcaccgccaaggtctgcggcggcctctgaagatgcccggcagccggcaaagcccccctactcgtacatcgcgctcatcaccatggccatcctgcaaaacccgcacaagcgcctcacgctcagcggcatctgcgccttcattagtggccgcttcccatactaccgccgcaagttccccgcctggcagaacagcatccgccacaacctctcgctgaacgactgcttcgttaagatcccccgcgagccgggccacccaggcaagggcaactactggagcctggaccccgcctcccaggacatgttcgacaatggcagctttctccggcgtaggaagcgtttcaagcgccaccaactgaccccgggagcccacctgccccaccccttccctctacctgctgcacacgccgccctgcacaacccccacccaggccctctgcttggggcccctgccccgccgcagccagtcccgggggcctaccccaacaccgcccccgggagacgcccttacgctctgctgcacccgcatcctcttcgctacctactgctctcggcccgcgtctatgccggggcaccgaagaaagcagaaggcgcggacctggcgaccccggcacccttcccgtgctgcagccctcacttggtcctcagccttgggaggagggcaagggtctggcgtcgccaccgggaggcggatgcttctctttcagcattgagagtattatgcaaggggtcaggggagcgggtacaggggctgcgcagagtttgtccccgaccgcgtggagctactgccacctgctccagcgaccatcaagcctgttgcatccccaaaccgctgcccctttgctgcaagtgtccgccgccgctgctgctcggacaattttgcagcaatagcagcagcatcaggaggactgcgccaacggctgcgctcccaccaagggcgcggtgctgggcgggcacctgtcggcctcgtcggcgctgctgaggtatcaggcagtggcggagggctctaggctgacatcgctggctgcccctttgggcggagaggggacctcaccagtttttttagtatcgcccacgcccagttccctggccaactccgcagggccctcctagagccaggtgggagtggggagcgacccgcagctgctcactccaccttgcgcggcccatactgggcgtgtgcatctgaatcccgctggagagcaaacacgaacttctgttcgttcgctgcaaaatggttagaaagattacattcctctaagctggattacgttcctctaaaaaccacctgaacgtaaccttcgcagggcgtcaagtcatcttttcttgccttcggttgtggcttctatggctgtcccgatttgcacattgtcatctttgaagattagtgacatagcattcatcttctgttgtcaccttttccgtcattccctgtatgcctgatggacaggtttcactgaagttcagagaacagcatgcaaaattagctaccaattaatctttatgaagtgagctgcatttctagccacactgagcttatgttttagcaggaagcatttttgggaaatgtttatgttagagtttgcccttcttgacaaggtgagacataaatgtctactttagagacatgaattaagatgggaagatatttgggggaatcatttactcaaacgctaagtaataaaggtacacaaagggcaaattatactagatttctttcccacttgttttctatgtctcttgcaattcaccttgattcccttcagtttctgtttaatgtagaaagtggcattttcattattttaagcttctagcacaatgaaagaatttctctttttcatgaacaggatcataaatgaaagggaggaagagtgtcctatatcatatttattgttcaacaaaacactgctccacggcttcaattcagtttaaaaaagagaatttattgaacatttaacacatacataaaaggcagtaaagacaaatgagaagagggggggatattgaa

SEQ ID NO: 11084 - DNA, 2725 bp, Homo sapiens
  source 1..2725: mol_type = unassigned DNA
acatacttttacggttacacattcctttacaaacaaccgtgtacatttcagcctcctgccccaccatttcttttctccaggcgggaaggctgcatgttgaggtggtcatagaatgttgagtatcatactttcctacctcgcttttatttgcgcgggtttaaatgcgccttaacagaacccgtgcaaaggcttgccaactgtctggctgcaccggatgagtagagcatcttccttggtggcaggtgggtgcgaggaggagggggctgggcttttctccggacgggtgtttgcccagaagaccatcatccctggactacgttaggaggaagtggcaccgctccgaggtaggggaagaagggttataaaggggggagtccaccacacatggtcttgaagaagcttttataaaaggcaaaggcatctttgccggacgttgttgcaaaggagtagaaacaagcagacgaaaacatcccaaagggtaaccactagcgttcctgcttcttgcaacattcatcccaggcttccagctcagcccgccccaggccaggtgatcggccgccacatcccctgcgactgaagcacctgctcctccatgaacctgccaagagctgagcgccttcgctccacaccgcagcgcagcctccgggactccgatggggaagacggtaaaatcgatgtcctgggagaggaggaagatgaagacgaggtggaagacgaggaggaggcggcgagccagcagttcctagagcagtcgctccagccggggctgcaggtggcccggtggggcggggttgcgcttccccgagagcacatcgagggcggcggcggcccgagcgacccctcagagtttggcaccaagttcagggcaccgccaaggtctgcggcggcctctgaagatgcccggcagccggcaaagcccccctactcgtacatcgcgctcatcaccatggccatcctgcaaaacccgcacaagcgcctcacgctcagcggcatctgcgccttcattagtggccgcttcccctactaccgccgcaagttccccgcctggcagaacagcatccgccacaacctctcgctgaacgactgcttcgttaagatcccccgcgagccgggccacccaggcaagggcaactactggagcctggaccccgcctcccaagacatgttcgacaatggcagctttctccggcgtaggaagcgtttcaagcgccaccaactgaccccgggagcccacctgccccaccccttccctctacctgctgcacacgccgccctgcacaacccccgcccaggccctctgcttggggcccctgccccgccgcagccagtcccgggggcctaccccaacaccgcccccgggagacgcccttacgctctgctgcacccgcatcctcttcgctacctactgctctcggcccccgtctatgccggggcaccgaagaaagcagaaggcgcggccctggcgaccccggcacccttcccgtgctgcagccctcacttggtcctcagccttgggaggagggcaagggtctggcgtcgccaccgggaggcggatgcatctctttcagcattgagagtattatgcaaggggtcaggggagcgggtacaggggctgcgcagaatttgtccccgaccgcgtggagctactgccacctgctccagcgaccatcaagcctgttgcatccccagaccgctgcccctttgctgcaagtgtccgccgccgccgctgctcggacaattttgcagcaatagcagcagcatcaggaggaggactgcgccaacggctgcgctcccaccaagggcgcggtgctgggcgggcacctgtcggcctcgtcggccctgctgaggtatcaggcagtggcagagggctctaggctgacatcgctggctgcccctttgggcggagaggggacctcaccagtttttttagtatcgcccacgcccagttccctggccaactccgcagggccctcctagagccaggtgggagtggggagcgacccgcagctgctcactccaccttgcgcggcccatactgggcgtgtgcatctgaatcccgctggagagcaaacacgaacttctgttcgctgcaaaatggttagaaagaaacagctggattacgttcctctaaaaaccacctgaacgtaaccttcgcagggcgtcaagtcatcttttcttgccttcggttgtggcttctatggctgtcccgatttgcgcatttcctggggtactatgaacgtgagtggggtattttgttctggcattaaaagaaaaacaagcaagcaaacaaaaacacagcctccgatgccaaacatgttcccccttcttcacttccttggagctggaagtattattcctaagtctagtgcaaaatgcttctactctctgtgtcttcctgatagggatgtttaatgtaagtaggatattaatttcagaacattgatttcttatctgtgtgtctgacgtgccatctttaatgttaaaattaaggtgttaaaattaagcctagttatatagacgaaataaaatgctaagtcactacactacatcgtttattttctattacatctcattcttccctttctaaatggaactttttaaaacctacgttattttccctcaaacaatttattttcacaattcatatttattatagatagcagaagtaatccattttaatatggcctttaaaaattccaaatatttgaggttgaaaatgtcctgg

SEQ ID NO: 11085 - DNA, 3451 bp, Homo sapiens
  source 1..3451: mol_type = unassigned DNA
cctcgccagcggtccgcagggctggagacccacgccgtggagaggaccagcctcaggtcgccccgcctgggcccgcgccccgacctcgctgcccccgcctcgcctctctgcccgtggcgcttacggccaccttggcctcgggggcagggcatgggcggcccccgccagatcgcccagcgccagtactaactgccctcgctctggccttcgagcccgaagcctcttctgcgcgcacaacctaggcagtaatcctaaactagcgggcaccacagaccagctgcagccaccccaacccagggatcacttccggacccctcgaccgcccggcaccagcgcgcaagggacccttcagccggagaccagagtccagtcccggtcacgaggccaccgccgctgcccgcctcgagaagcaccacgcgggctgagccgtcggctagcgggtcactcccgagcctctgtctgcaccgcgccagccccagaccacggacgctgagcctccagcgcgtgccagcctgggccgctgggctctcggggccagcccgcgacgatcccctgagctctccgcagaagggccgagcgtccgttccggggacgccaggcccgcccccgccccccgacagccgcggggatccagagcccgggggtgcgggacgcccgcgccatgactgccgagagcgggccgccgccgccgcagccggaggtgctggctaccgtgaaggaagagcgcggcgagacggcagcaggggccggggtcccaggggaggccacgggccgcggggcgggcgggcggcgccgcaagcgccccctgcagcgcgggaagccgccctacagctacatcgcgctcatcgccatggccatcgcgcacgcgcccgagcgccgcctcacgctgggcggcatctacaagttcatcaccgagcgcttccccttctaccgcgacaaccccaaaaagtggcagaacagcatccgccacaacctcacactcaacgactgcttcctcaagatcccgcgcgaggccggccgcccgggtaagggcaactactgggcgcttgaccccaacgcggaggacatgttcgagagcggcagcttcctgcgccgccgcaagcgcttcaagcgctcggacctctccacctacccggcttacatgcacgacgcggcggctgccgcagccgccgccgccgccgccgccgccgccgccgccatcttcccaggcgcggtgcccgccgcgcgccccccctacccgggcgccgtctatgcaggctacgcgccgccgtcgctggccgcgccgcctccagtctactaccccgcggcgtcgcccggcccttgccgcgtcttcggcctggttcctgagcggccgctcagcccagagctggggcccgcaccgtcggggcccggcggctcttgcgcctttgcctccgccggcgcccccgctaccaccaccggctaccagcccgcaggctgcaccggggcccggccggccaacccctccgcctatgcggctgcctacgcgggccccgacggcgcgtacccgcagggcgccggcagtgcgatctttgccgctgctggccgcctggcgggacccgcttcgcccccagcgggcggcagcagtggcggcgtggagaccacggtggacttctacgggcgcacgtcgcccggccagttcggagcgctgggagcctgctacaaccctggcgggcagctcggaggggccagtgcaggcgcctaccatgctcgccatgctgccgcttatcccggtgggatagatcggttcgtgtccgccatgtgagccagcgtagggacgaaaactcatagacacatcggctgttcacacgttccccgcaatctgagaacgaacaggaatggagagaggactcaactgggacccacgtggaaaagaccgagcaggccacagaggctcggtctccccgcgcacagcgtaggcacccggtgtactctgtaaacgggaggaggtggggcgaggcagccagagcccttggactggcacagggaccctcgatggagcgaagccctcaaacgggatgctttctggtattctatcggggagggtccttggcggtaaccagagggcagcgtagtgtcaacaccagagaccaggatccaaattgtggggaatcagtttcagccttccatgtgctgccggaactcgggcctttttacgcggttcgtcctctagtgcctttaactgcgttactacaataaaaggctgcggcagcgcctttcttcttaaagtgaggaggacaaatttgcaaaagaaataggcttttcttcttttttaaattggagaaatctctgctctggttgacctgggctggttttccctgtctctgagaacttgagacctagctccgagttgaactgtgcgtcagcactccagtcccatcacctgaaccttcagtctcccccatctgttacactagagggctgcaggactctatccaccgcccccgggttatcattcagggccccatcatcttggatgctgccctgcgtatttggcagcaatggtgggccacccagggcctctgagtagccacccaaagcctagccgctgttctagggaacggaaaagagttcatggccaagcgtctaacctaaagtcccaggattggctccaggcagcaattatatcataacttattgaacttttgagcaggacgtgctggtaatttcatggctgttactgcccagtcataaatctgcttttccattataaggcagagagaagtacattcgttcatttgtccactgtttcttgtcatcacgcagccctggacccaaagggtgaactaaagtttaaggagatgagaggattcaaggagcccgttggtgacgcctttcagtagctggggagggctcttccatccccagcaccccctgctacacctcagcagcctcccccatgcaaaaaggaaagagaaaaattaagttagggcagtcagtaaagtgagctttagaaagaaactggaattttaacttcattttgtatcttgcttaagtagcaggctcactaaaattagagaaagtccaataactctccccctttcccttgagaaatctttaagtttcgattctggagcaaaaactttcagcattaaatatttcagaggctccattcacagctttcagataaactggagtgttcagatggactgttttaataaaaatctttgagcaagtgagttatggcaagagaaactcagcctctttctgtataaacttaacagggaagggctggggtgtgaaaaagaagattgtatgaaaaccattggtaatttttattttttatttttgggactgcactatcctgttcacgaagacatgtgaacttggttcagtccaaatggggatttgtataaaccagtgctctccattagaaatatggtgcaagccacatatgtaattttaaatattctagtagccacattaataaagt

SEQ ID NO: 11086 - DNA, 1980 bp, Homo sapiens
  source 1..1980: mol_type = unassigned DNA
gggaaggggtgagtctgggtctgggaaaaactgatccaaaggcagaaagggaggggcgaaatggaggagggtaccgtgaacagagtaagggggctgggagaggaaattagaggggaggcgctggccagcaggcaaggcctgagccctctcccccggcggtggttgggggggggccgtgtccatataaagcgggtcggcggcccctgcggtcccggagccgcgcgggcaggggctgccgcagccgatggcggggcgcagcgacatggatccgcccgccgcgttctctggcttccctgccctgccagcggtcgcgccgtcggggccgccgccgtcgccgctcgcaggagccgagccagggcgggagccagaggaggcggcggctggccgcggagaggcggcccccacgcccgcgcccggcccggggcggcggcggcggcggcccctgcagcgcgggaagccgccctactcgtacatcgcgctcatcgccatggctctggcgcacgccccgggccgccgcctcacgctggccgccatctaccgcttcatcaccgaacgctttgccttctaccgcgacagcccgcgcaagtggcagaacagcatccgccacaatctcacgctcaacgactgcttcgtcaaggtgccccgcgagccgggcaacccgggcaagggcaactactggacgctggaccccgcggccgcagacatgttcgacaacggcagcttcctgcggcgccgcaagcgcttcaagcgcgccgagctgcccgcgcacgcggccgcggcgccagggccgccgctccccttcccctacgcgccctacgcgcccgcgcccggccccgcgctgctggtgccgccgccttctgccggaccgggcccctcgccgcccgcgcgtctgttcagcgtcgacagcctggtgaacctgcagccggagctagcggggctgggcgcccccgagccgccctgctgcgccgcgcccgacgccgcagccgcagccttcccgccctgcgctgccgccgcctccccgccactctactcgcaggtccccgaccgcctggtactgcccgcgacgcgccccggccccggcccgctgcccgctgagcccctcctggccttggccgggccggcagccgctctcggcccgctcagccctggggaggcctacctgaggcagccgggcttcgcgtcggggctggagcgctacctgtgagcctgcgccgcgcgggcaggcacctgtgcgacctgtgccccggacctgcggcgccgccctcgagcgccccatctctaccccccaccctggcttggagcacaccctgcgcctctcgtcgtggcctcctggactcaaactcctgctacatccttctccgtcccccatccctggggaggctcccaccatctcgccactggacagaagcgtcccctttgacctgccagcctctcatttcttctccctccacttgtgagcgcccccagctttgcggcgccccccaccccagcgctgtctgtgggtcccttgccccggagctgactcgcctccagtgagtccataccccaggtttcctggtgagttccaagcctttggaagccagatctgtgatcccaagccgcctcctccaccgactgtacttcatcaaccttctctcatgtttttccgacactcctgggtcagactcctgggttcatgacttacttgctagcgtcccttcattttcccacaagtttgccccccacctccacttacctgtctgccctcagcttcttcctgggagagagcccccctttcacgtagacacacctggctgccttcttcacgccctgaggacacttcttggagatttcagacaggcagcaccagggctcctgactgaaaggggagttggtgggcctttaggtctgccccatcccctggaaaacttaggacttattgggttattattatttttaattaaagctggtttaattaaaaagaaagaaacttttttctgg

SEQ ID NO: 11087 - DNA, 2187 bp, Homo sapiens
  source 1..2187: mol_type = unassigned DNA
agcccgggcggcgggctagggcgctcgcagggcttctgggccgaccccgctccggcgcctccgcttcccgcccggggcccgccctcgcggcccggcctcgctcccgggtcccagatgaccaccgagggcgggccgccgccggccccgctccgccgcgcgtgcagcccggtccccggcgcgctccaggccgccctgatgagcccgccgcccgccgccgccgccgccgccgccgccgccccggagaccacctcctcctcctcgtcgtcgtcctccgcctcctgcgcctcgtcctcgtcctcctccaattcggccagcgccccctcggctgcctgcaagagcgcgggcggcggcggcgcgggcgccgggagcgggggcgccaagaaggcgagctcggggctgcggcggcccgagaagccgccctactcgtacatcgcgctcatcgtcatggccatccagagctcgcccagcaagcgcctgacgctcagcgagatctaccagttcctgcaggcgcgcttccccttcttccgcggcgcctaccagggctggaagaactcggtgcgccacaatctctcgctcaacgagtgcttcatcaagctgcctaagggcctcgggcggcccggcaagggccactactggaccatcgacccggccagcgagttcatgttcgaggagggctcgttccgccgccggccgcgcggcttcaggcggaagtgccaggcgctcaagcccatgtaccaccgcgtggtgagcggcttgggcttcggggcgtcgctgctgccccagggcttcgacttccaggcgcccccgtcggcgccgctcggctgccacagccagggcggctacggcggcctcgacatgatgcccgcgggctacgacgccggcgcgggcgcccccagccacgcgcaccctcaccaccaccaccaccaccacgtcccgcacatgtcgcccaacccgggttccacctacatggccagctgcccggtgcccgcgggacccgggggcgtcggtgcggccgggggcggcggcggcggcgactacgggccggacagcagcagcagcccggtaccctcgtccccggccatggcgagcgccatcgaatgccactcgccctacacgagccctgcggcgcactggagctcgcctggcgcctcgccttacctcaagcagccgcctgccctgacgcccagcagcaaccccgccgcctcggcaggcctgcactccagcatgtcctcctactcgctggagcagagctacttgcaccagaacgctcgcgaggacctctcagtgggactgccccgttaccagcatcactctactccagtgtgtgacagaaaagatttcgtcctcaacttcaatgggatttcttctttccatccctcagctagcgggtcgtattatcaccatcaccaccagagcgtctgtcaggatattaagccctgcgtcatgtgaacggaaagaggccaagcgatggccgctctctcctctcccctcctcagagggggcagatagaaactgggacggattcaagtcacatgcacgcggatagcagtaagccacacacctgccacttagccagaatgcccaggatcgcgttggtcactgttatttgcctactgctggaagaaggacaaccgctggcaaggtagcgttccccaatctgaatacctgcaggctcccacatgagggagagggcagactcaggtgggaagatgtgccatgcgtaaggcatcaacgtgtatctgtgggatcttcgttgccttcagtaatcagggtgtgaaaaaagcagacaagttgtgtgtgtgtgtgtgtgtctaagaaaacttgtgtgcttttcaaaaaggcagtgctaagcacaagatttcaagaaagcctcttcttgttgcctagctgagtgggagagtcattttccccagacactacatttggatacaggtgccaaagaacattattaaggaattatttagaaacaatgtgtctagtttaagaaagtggttttcagtattgtgacaatacaacgtttttacaaggttgttttctaccaccatattttaaagatatttttatgaccgtgtatactcacactttgcttgtattttaaaaggaggatatatttgcacttatgtatacttttacagtttgccaaaatattttgttgtaaaattttttttcaataaaatgtatataaca

SEQ ID NO: 11088 - DNA, 2584 bp, Homo sapiens
  source 1..2584: mol_type = unassigned DNA
aggggtggttgctgcttttgctacatgacttgccagcgcccgagcctgcggtccaactgcgctgctgccggagcgctcagtgccgccgctgccgcccgcgccccccgcgccccgttcggcacccaccggtcgccgccgcccgccgcgccgctgtcccgctcccgcgccgccgccgccgtttccccccgacgactgggtgatgctggacatgggagataggaaagaggtgaaaatgatccccaagtcctcgttcagcatcaacagcctggtgcccgaggcggtccagaacgacaaccaccacgcgagccacggccaccacaacagccaccacccccagcaccaccaccaccaccaccaccatcaccaccacccgccgccgcccgccccgcaaccgccgccgccgccgcagcagcagcagccgccgccgccgccgcccccggcaccgcagcccccccagacgcggggcgccccggccgccgacgacgacaagggcccccagcagctgctgctcccgccgccgccaccgccaccaccggccgccgccctggacggggctaaagcggacgggctgggcggcaagggcgagccgggcggcgggccgggggagctggcgcccgtcgggccggacgagaaggagaagggcgccggcgccgggggggaggagaagaagggggcgggcgagggcggcaaggacggggaggggggcaaggagggcgagaagaagaacggcaagtacgagaagccgccgttcagctacaacgcgctcatcatgatggccatccggcagagccccgagaagcggctcacgctcaacggcatctacgagttcatcatgaagaacttcccttactaccgcgagaacaagcagggctggcagaactccatccgccacaatctgtccctcaacaagtgcttcgtgaaggtgccgcgccactacgacgacccgggcaagggcaactactggatgctggacccgtcgagcgacgacgtgttcatcggcggcaccacgggcaagctgcggcgccgctccaccacctcgcgggccaagctggccttcaagcgcggtgcgcgcctcacctccaccggcctcaccttcatggaccgcgccggctccctctactggcccatgtcgcccttcctgtccctgcaccacccccgcgccagcagcactttgagttacaacggcaccacgtcggcctaccccagccaccccatgccctacagctccgtgttgactcagaactcgctgggcaacaaccactccttctccaccgccaacggcctgagcgtggaccggctggtcaacggggagatcccgtacgccacgcaccacctcacggccgccgcgctagccgcctcggtgccctgcggcctgtcggtgccctgctctgggacctactccctcaacccctgctccgtcaacctgctcgcgggccagaccagttactttttcccccacgtcccgcacccgtcaatgacttcgcagagcagcacgtccatgagcgccagggccgcgtcctcctccacgtcgccgcaggccccctcgaccctgccctgtgagtctttaagaccctctttgccaagttttacgacgggactgtctgggggactgtctgattatttcacacatcaaaatcaggggtcttcttccaaccctttaatacattaacatccctgggaccagactgtaagtgaacgttttacacacatttgcattgtaaatgataattaaaaaaataagtccaggtattttttattaagcccccccctcccatttctgtacgtttgttcagtctctagggttgtttattattctaacaaggtgtggagtgtcagcgaggtgcaatgtggggagaatacattgtagaatataaggtttggaagtcaaattatagtagaatgtgtatctaaatagtgactgctttgccatttcattcaaacctgacaagtctatctctaagagccgccagatttccatgtgtgcagtattataagttatcatggaactatatggtggacgcagaccttgagaacaacctaaattatggggagaattttaaaatgttaaactgtaatttgtatttaaaaagcattcgtagtaaaggtgcccaagaaattattttggccatttattgttttgtccttttctttaaagaactgtttttttttcttttgtttacttttagaccaaagattgggttctagaaaatgcacttggtatactaagtattaaaacaaacaaaaaggaaagttgtttcagttggcaacactgcccattcaattgaatcagaaggggacaaaattaacgattgccttcagtttgtgttgtgtatattttgatgtatgtggtcactaacaggtcacttttattttttctaaatgtagtgaaatgttaatacctattgtacttataggtaaaccttgcaaatatgtaacctgtgttgcgcaaatgccgcataaatttgagtgattgttaatgttgtcttaaaatttcttgattgtgatactgtggtcatatgcccgtgtttgtcacttacaaaaatgtttactatgaacacacagaaataaaaaataggctaaattc

SEQ ID NO: 11089 - DNA, 2754 bp, Homo sapiens
  source 1..2754: mol_type = unassigned DNA
gagattgtttggtactgttttctctctgggcacctctcatttcggaaggccatcagaggcgcccactactgagcggccccggccgccgcagcagcacccggagccccagtcccggtttccccgcggtgccggagcccggagctcgccgccgcccaggcctcaggaatcgaaggggtggttgctgcttttgctacatgacttgccagcgcccgagcctgcggtccaactgcgctgctgccggagcgctcagtgccgccgctgccgcccgcgccccccgcgccccgttcggcacccaccggtcgccgccgcccgccgcgccgctgtcccgctcccgcgccgccgccgccgtttccccccgacgactgggtgatgctggacatgggagataggaaagaggtgaaaatgatccccaagtcctcgttcagcatcaacagcctggtgcccgaggcggtccagaacgacaaccaccacgcgagccacggccaccacaacagccaccacccccagcaccaccaccaccaccaccaccatcaccaccacccgccgccgcccgccccgcaaccgccgccgccgccgcagcagcagcagccgccgccgccgccgcccccggcaccgcagcccccccagacgcggggcgccccggccgccgacgacgacaagggcccccagcagctgctgctcccgccgccgccaccgccaccaccggccgccgccctggacggggctaaagcggacgggctgggcggcaagggcgagccgggcggcgggccgggggagctggcgcccgtcgggccggacgagaaggagaagggcgccggcgccgggggggaggagaagaagggggcgggcgagggcggcaaggacggggaggggggcaaggagggcgagaagaagaacggcaagtacgagaagccgccgttcagctacaacgcgctcatcatgatggccatccggcagagccccgagaagcggctcacgctcaacggcatctacgagttcatcatgaagaacttcccttactaccgcgagaacaagcagggctggcagaactccatccgccacaatctgtccctcaacaagtgcttcgtgaaggtgccgcgccactacgacgacccgggcaagggcaactactggatgctggacccgtcgagcgacgacgtgttcatcggcggcaccacgggcaagctgcggcgccgctccaccacctcgcgggccaagctggccttcaagcgcggtgcgcgcctcacctccaccggcctcaccttcatggaccgcgccggctccctctactggcccatgtcgcccttcctgtccctgcaccacccccgcgccagcagcactttgagttacaacggcaccacgtcggcctaccccagccaccccatgccctacagctccgtgttgactcagaactcgctgggcaacaaccactccttctccaccgccaacggcctgagcgtggaccggctggtcaacggggagatcccgtacgccacgcaccacctcacggccgccgcgctagccgcctcggtgccctgcggcctgtcggtgccctgctctgggacctactccctcaacccctgctccgtcaacctgctcgcgggccagaccagttactttttcccccacgtcccgcacccgtcaatgacttcgcagagcagcacgtccatgagcgccagggccgcgtcctcctccacgtcgccgcaggccccctcgaccctgccctgtgagtctttaagaccctctttgccaagttttacgacgggactgtctgggggactgtctgattatttcacacatcaaaatcaggggtcttcttccaaccctttaatacattaacatccctgggaccagactgtaagtgaacgttttacacacatttgcattgtaaatgataattaaaaaaataagtccaggtattttttattaagcccccccctcccatttctgtacgtttgttcagtctctagggttgtttattattctaacaaggtgtggagtgtcagcgaggtgcaatgtggggagaatacattgtagaatataaggtttggaagtcaaattatagtagaatgtgtatctaaatagtgactgctttgccatttcattcaaacctgacaagtctatctctaagagccgccagatttccatgtgtgcagtattataagttatcatggaactatatggtggacgcagaccttgagaacaacctaaattatggggagaattttaaaatgttaaactgtaatttgtatttaaaaagcattcgtagtaaaggtgcccaagaaattattttggccatttattgttttgtccttttctttaaagaactgtttttttttcttttgtttacttttagaccaaagattgggttctagaaaatgcacttggtatactaagtattaaaacaaacaaaaaggaaagttgtttcagttggcaacactgcccattcaattgaatcagaaggggacaaaattaacgattgccttcagtttgtgttgtgtatattttgatgtatgtggtcactaacaggtcacttttattttttctaaatgtagtgaaatgttaatacctattgtacttataggtaaaccttgcaaatatgtaacctgtgttgcgcaaatgccgcataaatttgagtgattgttaatgttgtcttaaaatttcttgattgtgatactgtggtcatatgcccgtgtttgtcacttacaaaaatgtttactatgaacacacagaaataaaaaataggctaaattc

SEQ ID NO: 11090 - DNA, 1990 bp, Homo sapiens
  source 1..1990: mol_type = unassigned DNA
gtcaggggcagctccggggtgcaggtgccaggcaggtggctccggccagcccagccccagcatgagctccttcgacctgccggcgccctccccacctcgctgcagcccccagttccccagcatcggccaggagccccccgagatgaacctctactatgagaacttcttccacccacagggcgtgcccagccctcagcggccctccttcgaggggggcggcgagtatggggccacccccaacccctacctctggttcaacgggcccaccatgaccccgccaccctacctgcccggccccaacgccagccccttcctgccccaggcctatggagtgcagaggccgctgctgcccagcgtgtcggggcttggggggagcgacctgggctggctgcccatcccctcgcaggaggagctgatgaagctggtgcggccaccctattcctactcggctctcatcgccatggccatccacggggcacccgacaagcgcctcactctcagccagatctaccagtacgtggccgacaacttccccttctacaacaagagcaaggccggctggcagaactccatccgccacaacctgtcgctcaacgactgcttcaagaaggtgccccgcgacgaggacgacccgggcaaagggaattactggaccctggaccccaactgtgagaaaatgttcgacaatggaaatttccgcaggaaaaggaagagaaaatcagatgtttcctctagcacagcctccttggccttagagaagacagagagcagtctcccggtggacagccccaagaccacggagcctcaggacatcttggatggagcctcaccagggggcaccaccagctccccagagaagcggccctcccctcccccatcaggcgccccttgccttaacagcttcctttcctctatgacagcctatgtgagcggggggagccccacgagccaccccttggtcacaccaggactgagccctgagcccagtgacaagacggggcagaactcactgaccttcaactccttctccccgctcaccaacctcagcaaccacagcggtgggggtgactgggcgaaccccatgcccaccaacatgctcagctatggaggatctgtgctcagccaattcagccctcacttctacaacagtgtcaacaccagtggtgtcctctaccccagggagggcaccgaggtctaggtacagaacagctcctgagccaggtggacatgccagagagaaaagcagtagaggtcctccatgccagccccacggtggtccatgactgcggaactgcccagacataagcaggagcctccgaggaatccaccctctttctagaacactggttaaggcttctgtttatcacacataggcccacacacagactcaccaactttgcaatagaaatactggtgcctgcagagcagcactaacagtggcaggtgctgtactaggctctgtactggccacacttactattgacagtcaccccgtaaggttcacaaaccaccccattgaacagatgaggaactgaggctcaaggaggttaagtaacatttccagggttatataaactagtaaatggcagagctaagagtcaaatccaggtctatgtgatcctcagagattggaggccgggatggagaattggttgagtagccaaggaaggtcagtgtgaaaagcttgctatggcaaatatagcgaaatctctccactgccttctgtccaccaacatttagtgccagcctaggcacaacttgtcctggtccaagtccttattctgcttgccccaacttacctgcagacactccttttgctaccactcaaggaaggaagtcaccagtggccttagtgcaggaaactcagccctggtggccctgcagaacaatgcatctgacatgtgcgatgcatccccatggagagacagcattgctccccagccctccagaaaccttgagcagatccagggatcagtgagaggagtggtgt

SEQ ID NO: 11091 - DNA, 2009 bp, Homo sapiens
  source 1..2009: mol_type = unassigned DNA
gggtgcaggtgccaggcaggtggctccggccagcccagccccagcatgagctccttcgacctgccggcgccctccccacctcgctgcagcccccagttccccagcatcggccaggagccccccgagatgaacctctactatgagaacttcttccacccacagggcgtgcccagccctcagcggccctccttcgaggggggcggcgagtatggggccacccccaacccctacctctggttcaacgggcccaccatgaccccgccaccctacctgcccggccccaacgccagccccttcctgccccaggcctatggagtgcagaggccgctgctgcccagcgtgtcggggcttggggggagcgacctgggctggctgcccatcccctcgcaggaggagctgatgaagctggtgcggccaccctattcctactcggctctcatcgccatggccatccacggggcacccgacaagcgcctcactctcagccagatctaccagtacgtggccgacaacttccccttctacaacaagagcaaggccggctggcagaactccatccgccacaacctgtcgctcaacgactgcttcaagaaggtgccccgcgacgaggacgacccggcctatgtgagcggggggagccccacgagccaccccttggtcacaccaggactgagccctgagcccagtgacaagacggggcagaactcactgaccttcaactccttctccccgctcaccaacctcagcaaccacagcggtgggggtgactgggcgaaccccatgcccaccaacatgctcagctatggaggatctgtgctcagccaattcagccctcacttctacaacagtgtcaacaccagtggtgtcctctaccccagggagggcaccgaggtctaggtacagaacagctcctgagccaggtggacatgccagagagaaaagcagtagaggtcctccatgccagccccacggtggtccatgactgcggaactgcccagacataagcaggagcctccgaggaatccaccctctttctagaacactggttaaggcttctgtttatcacacataggcccacacacagactcaccaactttgcaatagaaatactggtgcctgcagagcagcactaacagtggcaggtgctgtactaggctctgtactggccacacttactattgacagtcaccccgtaaggttcacaaaccaccccattgaacagatgaggaactgaggctcaaggaggttaagtaacatttccagggttatataaactagtaaatggcagagctaagagtcaaatccaggtctatgtgatcctcagagattggaggccgggatggagaattggttgagtagccaaggaaggtcagtgtgaaaagcttgctatggcaaatatagcgaaatctctccactgccttctgtccaccaacatttagtgccagcctaggcacaacttgtcctggtccaagtccttattctgcttgccccaacttacctgcagacactccttttgctaccactcaaggaaggaagtcaccagtggccttagtgcaggaaactcagccctggtggccctgcagaacaatgcatctgacatgtgcgatgcatccccatggagagacagcattgctccccagccctccagaaaccttgagcagatccagggatcagtgagaggagtggtgtgtacccctaaatcctcccaccccagcactgcccatctgtaaaatcttgtaaagcccagtttcctgtgtgcatgtcatggaccagtgagctggagatggctgaatcttccaagagaaacaaggttggataagcgcttccttttttttagcccaggagaggtggatgtttgtctgagaaaacaatggcctcaagggaggggccttgggcccaccctcacagggggtctctgtgtgatctcttgggatttctccttgtttttgtgagtacctgggaagtgttgtttgttttcttattttctttttaattaaaaaacaaacaaa

SEQ ID NO: 11092 - DNA, 2630 bp, Homo sapiens
  source 1..2630: mol_type = unassigned DNA
aggagaagcctttggagcggctacttaatgccggtcccggggccgcggtagctcagagaagcgccgtcgggcgggggggcggcaagaggcgctggcagggcccccgagctgggggcagagagccgcagggggtgggagcaacttcttccagaaccttcctctggcccgggctgcgctctgagccaggcaccacatacttattcggaggaggcgcccccggggtcgcgagatggaagcgcgcgtccgggaggccgtgtaacgggagctgcgggactcagcgggccagagagcgcggcgggccacccccggctcagcccgtggatgctgaccgccccctcggagagtccccgcagacatggcggagagctggctgcgcctctcgggagccgggccggcggaggaggccgggccggagggcggcctggaggagcccgacgccctggatgacagcctgaccagcctgcagtggctgcaggaattctccattctcaacgccaaggcccccgccctgcccccggggggcaccgacccccacggctaccaccaggtgccaggttcagcggcgcccgggtcccccctggcggccgaccccgcctgcctggggcagccacacacgccgggcaagcccacgtcgtcgtgcacgtcgcggagcgcgcccccggggctgcaggccccaccccccgacgacgtggactacgccaccaatccgcacgtgaagcctccctactcgtatgccacgctcatctgcatggccatgcaggccagcaaggccaccaagatcaccctgtcggccatctacaagtggatcacggacaacttctgctacttccgccacgcagatcccacctggcagaattcaatccgccacaacctgtctctgaacaagtgcttcatcaaagtgcctcgggagaaggacgaaccaggcaaggggggcttctggcgcattgacccccagtacgcggagcggctactgagcggcgctttcaagaagcggcgactgccccctgtccacatccacccagcctttgcccgccaggccgcgcaggagcccagcgctgtcccccgggccgggccgctgacggtgaataccgaggcccagcagctgctgcgggagttcgaggaggccaccggggaggcgggctggggtgcaggcgagggcaggctggggcataagcgcaaacagccgctgcccaagcgggtggccaaggtcccgcggccccccagcaccctgctgcccaccccggaggagcagggtgagctggaacccctcaaaggcaactttgactgggaggccatcttcgacgccggcactctgggcggggagctgggtgcactggaggccctggagctgagcccgcctctgagccccgcctcacacgtggacgtggacctcaccatccacggccgccacatcgactgccctgccacctgggggccttcggtggagcaggctgccgacagcctggacttcgatgagaccttcctggccacatccttcctgcagcacccctgggacgagagcggcagtggctgcctgcccccggagcccctctttgaggctggggatgccaccctggcctccgacctgcaggactgggccagcgtgggggccttcttgtaagaggccaggccctgccccacctctggacagtgcccaagtcagggtccagaactgccccccaacacaggtccacagacaccccaccacctaggcaggggctgggccagggctccaaggcttgccccagaggccacatggccaccagccccagctgccatcagattcaagcccaggaggctgaaaacgagggcccaggaccagaatcgctgcctcctctccccagccccaccttgtacacacagtgtttcattgctccgcgtcttcccagccccagaaaccggctaaaggaccctgcaccatgagagccgaggcctggaggagcccgggtcaggctggggaggaacagaactgggccctcccagagcacctccgcttcccccctgcttccccaggtctctatccagagagagtccccaggtacaacaaatgctaattagatgacagcaaattaaccccctggaggcttctcctggcagagcctccctggggccggggcaggctgtggatggggcggagcagggcagaagatggactgggggagggggcagagagaggagaccaaaatgaggtggtggcacagggtggggcaaggagatcctctctaaggcctctggggtctttgcctggccccatccctagggggcggggaggggacgtaaatccctaatctttaagcccgacttgaggctgagagcagctggaagtttgggtttggtggtttgggggccggggcagccaagctgtatggggcaggacagacagactaatgtagtgagtgtagctgtagctgaggcttaactgggagggatgccgagcttgctggaactactgggaccaagaagcggggtaccccacgcccctgcctgcactcctcgggggcgtggggcgtgccttgctccacccggactccctgggctgcgtcccacatccaccctcctgccccgtggggcaatttaacctttttcatgaaagttatttacaatgaaaagtttttaaaaataaaattttt

SEQ ID NO: 11093 - DNA, 1158 bp, Homo sapiens
  source 1..1158: mol_type = unassigned DNA
ccgcgcgtgctcccgcccctcgccgccgctcgctcgctcgccggccggcggcctccgctcggccccctccctcagctccggtgcgcggcggccgacgacccgcgcggcctgggcctcggcccgcgccaccggcgcccgcgcggagcggcccgggggccctcacgcaggcccatggcggcggccgcggcggcgctctcgggcgcgggcacgccacccgcgggcggcggggccgggggcggcggggccgggggcggcgggtccccgccgggcggctgggccgtggcgcgcctggagggccgcgagttcgagtatctgatgaagaagcgctcggtgaccatcggccgcaactcgtcgcagggctcggtggacgtgagcatgggccactcgagcttcatctcccggcgccacctcgagatcttcacgcccccgggcggcggcggccatggcggggccgctccggagctgccgcccgcgcagcccaggcccgacgccggcggcgacttctacctgcgctgcttgggcaagaacggggtattcgtggacggcgtgttccagaggcgcggggcgccgccgctgcagctgccgcgcgtgtgcacattcaggttcccgagcacaaacatcaagataacgttcactgccctgtccagcgagaagagagagaagcaggaggcgtctgagtctccagtgaaggccgtacagccacacatctcgcccctgaccatcaacattccagacaccatggcccacctcatcagccctctgccctcccccacgggaaccatcagcgctgcaaactcctgcccctccagcccccggggagcggggtcttcagggtacaaggtgggccgagtgatgccatctgacctcaatttaatggctgacaactcacagcctgaaaatgaaaaggaagcttcaggtggagacagcccgaaggatgattcaaagccgccttactcctacgcgcagctgatagttcaggcgattacgatggctcccgacaaacagctcaccctgaacgggatttatacacacatcactaaaaattatccctactacaggactgcggacaagggctggcagcgcggcgagtcctttgcacatgttggcaacacacgcatccgcatcggcctccctgcccacaaagcgccacaacggtga

SEQ ID NO: 11094 - DNA, 5265 bp, Homo sapiens
  source 1..5265: mol_type = unassigned DNA
cggccgcgcgtgctcccgcccctcgccgccgctcgctcgctcgccggccggcggcctccgctcggccccctccctcagctccggtgcgcggcggccgacgacccgcgcggcctgggcctcggcccgcgccaccggcgcccgcgcggagcggcccgggggccctcacgcaggcccatggcggcggccgcggcggcgctctcgggcgcgggcacgccacccgcgggcggcggggccgggggcggcggggccgggggcggcgggtccccgccgggcggctgggccgtggcgcgcctggagggccgcgagttcgagtatctgatgaagaagcgctcggtgaccatcggccgcaactcgtcgcagggctcggtggacgtgagcatgggccactcgagcttcatctcccggcgccacctcgagatcttcacgcccccgggcggcggcggccatggcggggccgctccggagctgccgcccgcgcagcccaggcccgacgccggcggcgacttctacctgcgctgcttgggcaagaacggggtattcgtggacggcgtgttccagaggcgcggggcgccgccgctgcagctgccgcgcgtgtgcacattcaggttcccgagcacaaacatcaagataacgttcactgccctgtccagcgagaagagagagaagcaggaggcgtctgagtctccagtgaaggccgtacagccacacatctcgcccctgaccatcaacattccagacaccatggcccacctcatcagccctctgccctcccccacgggaaccatcagcgctgcaaactcctgcccctccagcccccggggagcggggtcttcagggtacaaggtgggccgagtgatgccatctgacctcaatttaatggctgacaactcacagcctgaaaatgaaaaggaagcttcaggtggagacagcccgaaggatgattcaaagccgccttactcctacgcgcagctgatagttcaggcgattacgatggctcccgacaaacagctcaccctgaacgggatttatacacacatcactaaaaattatccctactacaggactgcggacaagggctggcagaattcaattcgccacaatctctctctgaatcgttatttcatcaaagtgccgcgttcccaggaagaaccaggcaaaggctcgttctggaggatagacccagcctctgaaagcaaattaatagaacaggcttttaggaaacgacggcctaggggcgtgccctgctttagaacccctctgggaccgctctcttctaggagtgccccagcctctcccaatcacgcgggagtgctgtctgctcactctagtggcgcccagacccctgagagcctgtcgagggaaggttcgccggcccccctggagcctgagcctggcgctgcacagcccaaactcgctgtcatccaggaagcccggtttgcccagagcgccccagggtcacctctgtccagtcagccagtcttaatcaccgtccagcggcagctaccacaggccatcaagcctgtcacctacactgtggccaccccagtgaccacctcgacctcccagccacccgtcgtgcagacggttcacgtcgtccaccagatcccagcggtgtcggtcaccagtgtggccggactggccccagcgaacacgtacactgtctctggacaagctgtggtcaccccggcagccgtgctggcccctcctaaggcagaggcccaggagaatggagaccacagggaagtcaaagtgaaagtagagcctattcccgccattggccacgccacgctcggcactgccagccggatcattcagacggcacagaccaccccggtccagacggtgaccatagtacaacaggcacctctaggtcaacaccagctaccaataaaaactgtaacacaaaacggcactcacgtggcatcagtccccactgcggtccacggccaggtgaacaatgccgcggcgagtcctttgcacatgttggcaacacacgcatccgcatcggcctccctgcccacaaagcgccacaacggtgaccagccggagcagccggagctgaagcggatcaagacagaagacggcgagggcatcgtcattgccctgagcgtggacacgccaccggcagccgtaagggaaaagggtgtccagaactagcgaccgggagagcttttctttaacgatatcaactctgtggtgccaaaaggagacgcggcctcccgccagcactcgggggtgcagggccctgtggttggacttcacctctcagcactgaaaacccaaaacccagctggccttaacactccttaaagacagaagtcacacttgaacaaaacccacacacaacaaaacctgatttgggagacggtgtctccactgagcacctgctgggctgagcttctacctacgagtgaaactctgtcctcccgcgaggaccaggcatcgctgtgtgaggacggcacggccagcgcctgctgtgagtgggtctcccaagactaggcctcaggacgcggggggagccatccccgccgccctcacaggacccaccaggcagcggagacatgtggaattagagtattttgaggtgtcctttctttacaaaataatggggtcttgggcatttcacatcactccatttctactgagactttcagaatcacacaggccctttccgtggatttcatttggggcaaagaaacaacgtagttttgtttttgttttcagcctatggaatgatttccttttgtctgtcttgttcaagttcagacgaagctactctggcatctgcacatttccgtgttacagcagctgcctgatgaattttatccacctccatttcagcatgtggctcgcgtggacaggtggacggacgctgtggccgcatggaaccttgagaacccagggacgagccagtgccgggaaggaactgccgggactcaccgagctgcacttaactgttctctttctggctattttttgttgtttgtttctttgtgttgactttgtccctggcaaaattttccactctgagtaaaacaagtctcctaagtattgtgtatgtttaaaacgacagaaccatttctacttcatttggaaaaagattcagtcttttatcacaggcccttttgaaactcagatcccaggtctctccgtggtatgtttgtatttggggtgtccctccggctctaggcggcctctgacctgctgtctactccccaccttcggtgagcggccgccatggtggagcagggtccgagccacgtcctgcagggcacgtctggggcatttcctgttttgtggtaggaaatgtccctgacctttcagaaccgaacccaatcctgaggctgactcctctacggaaaatgaggacaggacgggggtgagggaatgagagtgggaggtccctgcacctcctcgcccggctcctcaggaagaaaaccgctggcccttcccgagtgtgccggccgagggccgagggccgtgcacatggggagagggcgtcagcctgatggctgagcttttaaatgtcatcatcataacattatttatttaaatgtagttattttggtatttaatttttttttagagaggaaaaaacctgtattttcctggtgggatgaaatagggatgaaatggctcagaatggtatatttaggcaattttaaaacatttattatttacataaagaccaaatatgatgaatctgttccgtgaattgtgtcggccctcagcatggggctggggcagcgtcactgcggtgacgcccattgaaaggtatgaaatgactgcacactagctggattatcactcagccgtttaagaaataaaagcaaaaccatcacgtgactgagaccgtgtgtgtgaccgcagcaaagcgcagcgtgtggatggatcagagcccctcggtgcagctgtctgcatcttccaagcactttacagataccttggaatgtatatttttgtcttcttactcagaaggtttgcagtttgtaaaataatcaggattctgctctgtcctgtgtgtggggtcagctccctccacagagggctccagctctgttggtcacagctgatggggttctctgattgataggagacgagctcttgagctctaaggaacagtgaggtcgccggtggggagcttggctgggacaccaagcaaatgcatcgtatgtccccttggagacgtttttatgcagctgtgtatgttactatccagaaggagtcgggggtagactttcccgtgtaagctcagtccataaactggttacttctgatcctggaacgtggacttcacatgataggtctggatctgtttctgttgggatcacaggtaaggaaaatgtccattcaaatggtaaagaagggaggagggtgttttttttttttttttttgccgtaggcaccattctgcatcttgaacccagactgaagtgtgcctctcacagatggaaggtgcacacgctcctgtctcctcctcactctgccacgttcacttggctttttcattggtacctaggaatttaagaatatcgaagcgagagcagtaacaaaccatagatgagcagactcccacaccgggttttcttgcccgtctttaaggcactgtttctaaattttgaacttagctctgaatccccaagaacttgagcacagcaagggttgctgagctgctgtcgccgcagccctggcccctggtgctggagctgcagcacctttgggagaggtcctgcgtcgtcctcagctgcgtcgctgtgaactcccgctctccactgtgttcctcagtgtctgcttttcaggaagtctgctgtgacctttgcccaacttctgagctcctcagggactaggaacaatttcagtagctttgccctgaaccaaacgagaaaacaaaagggaactcccgtatgacccacgtcacgtggtgcactcagagtgtgtgcggcatgatcctcggttgctcctcctctcactttagtagagtacgcggtggacagctgatctccttcagtcgtctacccacttccgtcattgtcctccgctagaataacagagtagttggtagtcatggccagaaggggggtgggggcagtgtgaggacttggggtttctgtgctgtgtgacacaaggagataagtgacaatcttgaagtcctaacttccactattctagaaagtatagtggtgatttgtgtgcaaagatttgaagttttaaaaaagtaccaagttcctgaaattcaataaaatatttttattaattttaatggaa

SEQ ID NO: 11095 - DNA, 3450 bp, Homo sapiens
  source 1..3450: mol_type = unassigned DNA
cgcggccgcgcgtgctcccgcccctcgccgccgctcgctcgctcgccggccggcggcctccgctcggccccctccctcagctccggtgcgcggcggccgacgacccgcgcggcctgggcctcggcccgcgccaccggcgcccgcgcggagcggcccgggggccctcacgcaggcccatggcggcggcccggcgggctctcggggcgggcacgccgcgggcgcggggccgggggcggggggccgggggcggcgggtcccgccgggcgctgggccgtggcgcgcctggagggccgcgagttcgagtatctgatgaagaagcgctcggtgaccatcggccgcaactcgtcgcagggctcggtggacgtgagcatgggccactcgagcttcatctcccggcgccacctcgagatcttcacgcccccgggcggcggggccatggcggggccgctccggagctgccgcccgcgcagcccaggcccgacgccggcggcgacttctacctgcgctgcttgggcaagaacggggtattcgtggacggcgtgttccagaggcgcggggcgccgccgctgcagctgccgcgcgtgtgcacattcaggttcccgagcacaaacatcaagataacgttcactgccctgtccagcgagaagagagagaagcaggaggcgtctgagtctccagtgaaggccgtacagccacacatctcgcccctgaccatcaacattccagacaccatggcccacctcatcagccctctgccctcccccacgggaaccatcagcgctgcaaactcctgcccctccagcccccggggagcggggtcttcagggtacaaggtgggccgagtgatgccatctgacctcaatttaatggctgacaactcacagcctgaaaatgaaaaggaagcttcaggtggagacagcccgaaggatgattcaaagccgccttactcctacgcgcagctgatagttcaggcgattacgatggctcccgacaaacagctcaccctgaacgggatttatacacacatcactaaaaattatccctactacaggactgcggacaagggctggcagaattcaattcgccacaatctctctctgaatcgttatttcatcaaagtgccgcgttcccaggaagaaccaggcaaaggctcgttctggaggatagacccagcctctgaaagcaaattaatagaacaggcttttaggaaacgacggcctaggggcgtgccctgctttagaacccctctgggaccgctctcttctaggagtgccccagcctctcccaatcacgcgggagtgctgtctgctcactctagtggcgcccagacccctgagagcctgtcgagggaaggttcgccggcccccctggagcctgagcctggcgctgcacagcccaaactcgctgtcatccaggaagcccggtttgcccagagcgccccagggtcacctctgtccagtcagccagtcttaatcaccgtccagcggcagctaccacaggccatcaagcctgtcacctacactgtggccaccccagtgaccacctcgacctcccagccacccgtcgtgcagacggttcacgtcgtccaccagatcccagcggtgtcggtcaccagtgtggccggactggccccagcgaacacgtacactgtctctggacaagctgtggtcaccccggcagccgtgctggcccctcctaaggcagaggcccaggagaatggagaccacagggaagtcaaagtgaaagtagagcctattcccgccattggccacgccacgctcggcactgccagccggatcattcagacggcacagaccaccccggtccagacggtgaccatagtacaacaggcacctctaggtcaacaccagctaccaataaaaactgtaacacaaaacggcactcacgtggcatcagtccccactgcggtccacggccaggtgaacaatgggccccttggcctcagaaggcccccatgtgccagctcagactggagttgcctcagttgacacagcaggccccatccagacagaccagcaggtgcttctggagacaagagcaaagccttttccggcagcccggaacctgggatgagaaacgacaggtggaaggttgtccagagacacctacagcgtggatgctgttccgagtcagcgtaggagaaaggccactggaaaccagagtcacactgcgcgtctgtgcatctctggcctaccgcagtggccccggctgtctgcacattttttgtagacacattagagtcggttgaggccacacctgcggccacagactgcgaccgcgattgcagggaggagcatctgaggtggtcacggggtttgcccagctcacaccaactgcagccgcggcgagtcctttgcacatgttggcaacacacgcatccgcatcggcctccctgcccacaaagcgccacaacggtgaccagccggagcagccggagctgaagcggatcaagacagaagacggcgagggcatcgtcattgccctgagcgtggacacgccaccggcagccgtaagggaaaagggtgtccagaactagcgaccgggagagcttttctttaacgatatcaactctgtggtgccaaaaggagacgcggcctcccgccagcactcgggggtgcagggccctgtggttggacttcacctctcagcactgaaaacccaaaacccagctggccttaacactccttaaagacagaagtcacacttgaacaaaacccacacacaacaaaacctgatttgggagacggtgtctccactgagcacctgctgggctgagcttctacctacgagtgaaactctgtcctcccgcgaggaccaggcatcgctgtgtgaggacggcacggccagcgcctgctgtgagtgggtctcccaagactaggcctcaggacgcggggggagccatccccgccgccctcacaggacccaccaggcagcggagacatgtggaattagagtattttgaggtgtcctttctttacaaaataatggggtcttgggcatttcacatcactccatttctactgagactttcagaatcacacaggccctttccgtggatttcatttggggcaaagaaacaacgtagttttgtttttgttttcagcctatggaatgatttccttttgtctgtcttgttcaagttcagacgaagctactctggcatctgcacatttccgtgttacagcagctgcctgatgaattttatccacctccatttcagcatgtggctcgcgtggacaggtggacggacgctgtggccgcatggaaccttgagaacccagggacgagccagtgccgggaaggaactgccgggactcaccgagctgcacttaactgttctctttctggctattttttgttgtttgtttctttgtgttgactttgtccctggcaaaattttccactctgagtaaaacaagtctcctaagt

SEQ ID NO: 11096 - DNA, 3189 bp, Homo sapiens
  source 1..3189: mol_type = unassigned DNA
gctaagtcaacatataacagcaaacttacaacaattatttaacatttttaaagccatgaagaagggacagagcacggagcggccggggagagcggcagagccagaggcagaggcacggctggctccccgggagggcccttgcggcgcggggcgcagtgcctaggccgcccgggtctcctgcgttgcggggagcgcagcgcaggctctcgcttgccatgagtcacctcttcgatccccggctgcctgccctggccgcctcgcccatgctgtatctgtacggtcccgagagacccggcctccctctggccttcgcccccgcggctgctctagctgcctcgggccgggccgagaccccgcagaagcctccctacagctacatcgcgctcatcgccatggcgatccaggacgcgcccgagcagagggtcacgctcaacggcatctaccagttcatcatggaccgcttccccttctaccacgacaaccggcagggctggcagaacagcatccgccacaacctctcgctcaacgactgcttcgtcaaggtgccccgcgagaaagggcggccgggcaagggcagctactggacgctggacccccgctgcctggacatgtttgagaacggcaactaccggcgccggaagaggaagcccaagccgggccccggggccccggaggccaagaggccccgcgccgagacgcaccagcgcagcgcggaggcgcagccggaggcggggagcggggcagggggctcgggccccgcaatctcccgcctgcaggcagcgcccgcgggcccctcgcccctcctggacggcccctctccgccggcgcccctccactggccggggaccgcgtccccgaacgaggacgctggtgacgctgcccagggcgcagcggccgtggcggtcggccaggcagcgcgcacaggggacggcccggggtcccctctgcgccccgcctcccgcagctctccgaagagctccgacaagtccaagagcttcagcatagacagcatcctggcgggaaagcagggccagaagccgccttcaggggacgaactcctagggggtgccaagcctgggcccggcggccgtctgggtgcctcgctcctggccgcctcctccagcctccgtccgcctttcaacgcttccctgatgctcgacccgcatgtccagggcggcttttaccagctcgggatccccttcctctcttatttccccctgcaggttcccgacacggtactccacttccagtaaagcaaacaatggcacggttcttctcccggcccagcctgagcctccgctgagcgaaaggccacagctcccaccggcggaggattttaaaatgatctttgcctgggtcggcctgtgggttcagggaagtgttaccaaccattgcgcgcaggtgggcgcgctcgcctgccttctccgaagcaaacttttcccagcaactgggagcagctacggagacttaaaagatccccgcggggtcgtgggcaccgcacgtgggccctgcagggacctccaccgcgggagattccttgacgtttgacctgtctaatggagtgtggtcttcagccgcccaccgcaggtcctgcgagtcccgggcatgcaagggcccgcagaccacccaaggcaggccttacaggtgcagttgaggtcctttcgaccggggacccccgtatgaccgtcgcctgcttcgctgttgccgtgtggctcaggccttggttttgagcccatctgggtggtgggtggtcacagctgggtttgttcctgacttgaagttgtggaggtgccgggggtgaccccgggttttcaggttttctgagagatgtagggcccgatgaggatttatgaccaatgttcagctatagaagctgataaccacccagagcaataacacttttattttaaacagagactttttctcttaatttctttctgggtagtaaaaagaacatgtttcattctttgcataaatacttgactctaagcattgacctttgaaaacgcttgtattaacaatttttattaagaaagtgcactctatataacatcttcttgcattacgatagctcattagccaatacacatgcagctatgtaagccacaacagcagacgtcctatccttttgcttttgtttttaagggatcaaaatatttcaagggataccatgaggaagggtgtgaggggaaggggatatgccttggacaatgtcagagttttgatttccatgttttttcaagatccaggcttggtggtcgctatatttttcagaaacagataatgaaagactacatttaatttaaaaagttgggtgaaacaaccaaaagcagatgcagagagagagagggatgaatgcgggggaagaataaggggacgtgctggtgtccgctggaaggggcctctctgggccccagaggacctgaggtttgatggcaggaatctcccagacactcctggcccccgcaccccctgcagccgcccgctcttccctcccagccctgccaggcaggcctggaggctgatactaaatcaaaaccttaaagaggtgactggcagtctggggaggggagaagaggtctgcaacgaaaatctaattaagaacattgagatgttcacaaccaagttcagcttgcagcttccggggaaatgcaaccgacctctatgccatctctagctgggtaatcttcgaggccctgaaatgcaattttctgaacctctaagtcacttttattttatgtcatgtgataaagacacaagtagtcacgcactattggaaataggttgggagggaggtctttaagatcgcttttaaaatagtttccaggacttgtctaaaaatgatgacaaactttgaatccagagggcctgttggtcaatgtgttggaaaggacatttcaggccggcagagtaattggataattcacaggcatagaggtgacttttggaaaattcattctcctatccatgctgaaccaggcttccacgactgggttctacccaggccagtgggaagactctgggaaacttcaggccagccttgattggaagaacttccaggaggagccattgctgagatccaggctcactgtgattcactgaaaatgtagcgaaagggctgtcactggatattttgctatcccaaactctcagcctctgtgaataaagttgttttttcattaacctctc

SEQ ID NO: 11097 - DNA, 2917 bp, Homo sapiens
  source 1..2917: mol_type = unassigned DNA
atcagaacagagcgaggctcctggcgcactagggactccaggaggcagctccgccagagacgcgggtcgtgcttcgggaaaccggggggcggggggaggggaagagcgcagaaaagaaaacccaccaaggcggggactggcctgagcggggaggggcggcgaggccggagcccctctctgttgggcggactccccatggccagaggctgagctccactcccgccggccgctccctaggggaaggggaaggagaggggagagcagcgacaggcctccagcaagcaagcgcgggcggcatccgcagtctccagaagtttgagacttggccgtaagcggactcgtgcgccccaactctttgccgcgccagcgcctggagcggagagcagaggcggcccggccgcggcgcgccggctttgtcatgatggccagctaccccgagcccgaggacgcggcgggggccctgctggccccagagaccggtcgcacagtcaaggagccagaagggccgccgccgagcccaggcaagggcggtgggggtggcggcgggacagccccggagaagccggacccggcgcagaagcccccgtactcgtacgtggcgctcatcgccatggcgatccgcgagagcgcggagaagaggctcacgctgtccggcatctaccagtacatcatcgcgaagttcccgttctacgagaagaataagaagggctggcaaaatagcatccgccacaacctcagcctcaacgagtgcttcatcaaggtgccgcgcgagggcggcggcgagcgcaagggcaactactggacgctggacccggcctgcgaagacatgttcgagaagggcaactaccggcgccgccgccgcatgaagaggcccttccggccgccgcccgcgcacttccagcccggcaaggggctcttcggggccggaggcgccgcaggcgggtgcggcgtggcgggcgccggggccgacggctacggctacctggcgccccccaagtacctgcagtctggcttcctcaacaactcgtggccgctaccgcagcctccctcacccatgccctatgcctcctgccagatggcggcagccgcagcggctgcagcagctgcggctgcagccgcgggccccggtagccctggcgcggccgctgtggtcaaggggctggcgggcccggccgcctcgtacgggccgtacacacgcgtgcagagcatggcgctgccccccggcgtagtgaactcgtacaatggcctgggaggcccgccggccgcacccccgcctccgccgcacccccacccgcatccgcacgcacaccatctgcacgcggccgccgcaccgccgcctgccccaccgcaccacggggccgccgcgccgccgccgggccagctcagccctgccagcccagccaccgccgcgcccccggcgcccgcgcccaccagtgcgccgggcctgcagttcgcttgtgcccggcagcccgagctcgccatgatgcattgctcttactgggaccacgacagcaagaccggcgcgctgcattcgcgcctcgatctctgagagcccaccgcatgccggtgcagacggatgcgaggatgcagggacgcgcgacgccggccccggtcgcagccgacgacgccgccgccagcctgacctcacaccctctgggcccgcctctggagccagcgcccagggtccctctgtgctttttcgctttcctaagctcctgtcgctcctctttgtcccctcagtttatgtcctcctgtgctcacctccctgacctctgtgaccttgcactcccctggcctgaagctgcctctctgcgcgctttctactgggctcgtctctttccggagccccagcgtctcctgcccaaattcaccgcggaaagggcccggggcggaggtgcgaccgggcgtcggcagcgcagacctcttggccttctctcacaggtcggtgcgctcgctctccgcgttccccgcccgactgccgtgcagtccatggctagacgcgccggacaggactgatggcgggaccgcgctgcccgagaaagggacggaccaatacgtgtgtttgctccgcgaaccctcttgaagctgttcagaagccgcttgccgcggggcccactaggcggggcgggggttgggacccagcgggagccggggcagcctggctccacggcctgtactcggtttacaccgcgggcgggcgcggagggaggctgcgtttcctccgctatcagtcccgtcgcttcgggcacctccgggccccggcggctggctaatgttttgtttgaaagatcggtggaactttttaagagagtatttaaaaaaaaaaaaaggaaaaaaaattcaccgggcaaccggggaagtattgtggccttggagtttgctaaatccaaatatgaaaatcaaaagctttagtattcctcatcttctcttctggaagatttgcgttagagtttttgttgggccttcaaaaagctgtgttcagagttaggagaatatatccaataaaagatggtttcgtctaccaattggggaagtttcaccctctccctatctgaagaaaaaaatcaaaaacaaatgtccccggatctttcgatgcaagtcctggaggcagggagatcactgcctgcctggcccacgctgctgggacggctcgtcctccctgctttttgtttttcaaacctcctgcttctcccaccttgggaaggagaaatgtgaaacccggcagcggccgacctaggcggtcttgtggcccggagccggcccggcccgaaaaccatagacctggttgtactgtagcttgttgtttgggggaccaaattttctagagagaactagagcacttttgttgtgtttttttgttttgtttttgttttttgccttgtcgattcccgaataaattttgtgttccttcttttaa

SEQ ID NO: 11098 - DNA, 2733 bp, Homo sapiens
  source 1..2733: mol_type = unassigned DNA
tgggcggactccccatggccagaggctgagctccactcccgccggccgctccctaggggaaggggaaggagaggggagagcagcgacaggcctccagcaagcaagcgcgggcggcatccgcagtctccagaagtttgagacttggccgtaagcggactcgtgcgccccaactctttgccgcgccagcgcctggagcggagagcagaggcggcccggccgcggcgcgccggctttgtcatgatggccagctaccccgagcccgaggacgcggcgggggccctgctggccccagagaccggtcgcacagtcaaggagccagaagggccgccgccgagcccaggcaagggcggtgggggtggcggcgggacagccccggagaagccggacccggcgcagaagcccccgtactcgtacgtggcgctcatcgccatggcgatccgcgagagcgcggagaagaggctcacgctgtccggcatctaccagtacatcatcgcgaagttcccgttctacgagaagaataagaagggctggcaaaatagcatccgccacaacctcagcctcaacgagtgcttcatcaaggtgccgcgcgagggcggcggcgagcgcaagggcaactactggacgctggacccggcctgcgaagacatgttcgagaagggcaactaccggcgccgccgccgcatgaagaggcccttccggccgccgcccgcgcacttccagcccggcaaggggctcttcggggccggaggcgccgcaggcgggtgcggcgtggcgggcgccggggccgacggctacggctacctggcgccccccaagtacctgcagtctggcttcctcaacaactcgtggccgctaccgcagcctccctcacccatgccctatgcctcctgccagatggcggcagccgcagcggctgcagcagctgcggctgcagccgcgggccccggtagcctggcgcggccgctgtggtcaaggggctggcgggcccggccgcctcgtacgggccgtacacacgcgtgcagagcatggcgctgccccccggcgtagtgaactcgtacaatggcctgggaggcccgccggccgcacccccgcctccgccgcacccccacccgcatccgcacgcacaccatctgcacgcggccgccgcaccgccgcctgccccaccgcaccacggggccgccgcgccgccgccgggccagctcagccctgccagcccagccaccgccgcgcccccggcgcccgcgcccaccagtgcgccgggcctgcagttcgcttgtgcccggcagcccgagctcgccatgatgcattgctcttactgggaccacgacagcaagaccggcgcgctgcattcgcgcctcgatctctgagagcccaccgcatgccggtgcagacggatgcgaggatgcagggacgcgcgacgccggccccggtcgcagccgacgacgccgccgccagcctgacctcacaccctctgggcccgcctctggagccagcgcccagggtccctctgtgctttttcgctttcctaagctcctgtcgctcctctttgtcccctcagtttatgtcctcctgtgctcacctccctgacctctgtgaccttgcactcccctggcctgaagctgcctctctgcgcgctttctactgggctcgtctctttccggagccccagcgtctcctgcccaaattcaccgcggaaagggcccggggcggaggtgcgaccgggcgtcggcagcgcagacctcttggccttctctcacaggtcggtgcgctcgctctccgcgttccccgcccgactgccgtgcagtccatggctagacgcgccggacaggactgatggcgggaccgcgctgcccgagaaagggacggaccaatacgtgtgtttgctccgcgaaccctcttgaagctgttcagaagccgcttgccgcggggcccactaggcggggcgggggttgggacccagcgggagccggggcagcctggctccacggcctgtactcggtttacaccgcgggcgggcgcggagggaggctgcgtttcctccgctatcagtcccgtcgcttcgggcacctccgggccccggcggctggctaatgttttgtttgaaagatcggtggaactttttaagagagtatttaaaaaaaaaaaaaggaaaaaaaattcaccgggcaaccggggaagtattgtggccttggagtttgctaaatccaaatatgaaaatcaaaagctttagtattcctcatcttctcttctggaagatttgcgttagagtttttgttgggccttcaaaaagctgtgttcagagttaggagaatatatccaataaaagatggtttcgtctaccaattggggaagtttcaccctctccctatctgaagaaaaaaatcaaaaacaaatgtccccggatctttcgatgcaagtcctggaggcagggagatcactgcctgcctggcccacgctgctgggacggctcgtcctccctgctttttgtttttcaaacctcctgcttctcccaccttgggaaggagaaatgtgaaacccggcagcggccgacctaggcggtcttgtggcccggagccggcccggcccgaaaaccatagacctggttgtactgtagcttgttgtttgggggaccaaattttctagagagaactagagcacttttgttgtgtttttttgttttgtttttgttttttgccttgtcgattcccgaataaattttgtgttccttctttt

SEQ ID NO: 11099 - DNA, 3475 bp, Homo sapiens
  source 1..3475: mol_type = unassigned DNA
ggttggaggagcccggagcccgccttcggagctacggcctaacggcggcggcgactgcagtctggagggtccacacttgtgattctcaatggagagtgaaaacgcagattcataatgaaaactagcccccgtcggccactgattctcaaaagacggaggctgccccttcctgttcaaaatgccccaagtgaaacatcagaggaggaacctaagagatcccctgcccaacaggagtctaatcaagcagaggcctccaaggaagtggcagagtccaactcttgcaagtttccagctgggatcaagattattaaccaccccaccatgcccaacacgcaagtagtggccatccccaacaatgctaatattcacagcatcatcacagcactgactgccaagggaaaagagagtggcagtagtgggcccaacaaattcatcctcatcagctgtgggggagccccaactcagcctccaggactccggcctcaaacccaaaccagctatgatgccaaaaggacagaagtgaccctggagaccttgggaccaaaacctgcagctagggatgtgaatcttcctagaccacctggagccctttgcgagcagaaacgggagacctgtgcagatggtgaggcagcaggctgcactatcaacaatagcctatccaacatccagtggcttcgaaagatgagttctgatggactgggctcccgcagcatcaagcaagagatggaggaaaaggagaattgtcacctggagcagcgacaggttaaggttgaggagccttcgagaccatcagcgtcctggcagaactctgtgtctgagcggccaccctactcttacatggccatgatacaattcgccatcaacagcactgagaggaagcgcatgactttgaaagacatctatacgtggattgaggaccactttccctactttaagcacattgccaagccaggctggaagaactccatccgccacaacctttccctgcacgacatgtttgtccgggagacgtctgccaatggcaaggtctccttctggaccattcaccccagtgccaaccgctacttgacattggaccaggtgtttaagccactggacccagggtctccacaattgcccgagcacttggaatcacagcagaaacgaccgaatccagagctccgccggaacatgaccatcaaaaccgaactccccctgggcgcacggcggaagatgaagccactgctaccacgggtcagctcatacctggtacctatccagttcccggtgaaccagtcactggtgttgcagccctcggtgaaggtgccattgcccctggcggcttccctcatgagctcagagcttgcccgccatagcaagcgagtccgcattgcccccaaggtttttggggaacaggtggtgtttggttacatgagtaagttctttagtggcgatctgcgagattttggtacacccatcaccagcttgtttaattttatctttctttgtttatcagtgctgctagctgaggaggggatagctcctctttcttctgcaggaccagggaaagaggagaaactcctgtttggagaagggttttctcctttgcttccagttcagactatcaaggaggaagaaatccagcctggggaggaaatgccacacttagcgagacccatcaaagtggagagccctcccttggaagagtggccctccccggccccatctttcaaagaggaatcatctcactcctgggaggattcgtcccaatctcccaccccaagacccaagaagtcctacagtgggcttaggtccccaacccggtgtgtctcggaaatgcttgtgattcaacacagggagaggagggagaggagccggtctcggagaaaacagcatctactgcctccctgtgtggatgagccggagctgctcttctcagaggggcccagtacttcccgctgggccgcagagctcccgttcccagcagactcctctgaccctgcctcccagctcagctactcccaggaagtgggaggaccttttaagacacccattaaggaaacgctgcccatctcctccaccccgagcaaatctgtcctccccagaacccctgaatcctggaggctcacgcccccagccaaagtagggggactggatttcagcccagtacaaacctcccagggtgcctctgaccccttgcctgaccccctggggctgatggatctcagcaccactcccttgcaaagtgctcccccccttgaatcaccgcaaaggctcctcagttcagaacccttagacctcatctccgtcccctttggcaactcttctccctcagatatagacgtccccaagccaggctccccggagccacaggtttctggccttgcagccaatcgttctctgacagaaggcctggtcctggacacaatgaatgacagcctcagcaagatcctgctggacatcagctttcctggcctggacgaggacccactgggccctgacaacatcaactggtcccagtttattcctgagctacagtagagccctgcccttgcccctgtgctcaagctgtccaccatcccgggcactccaaggctcagtgcaccccaagcctctgagtgaggacagcaggcagggactgttctgctcctcatagctccctgctgcctgattatgcaaaagtagcagtcacaccctagccactgctgggaccttgtgttccccaagagtatctgattcctctgctgtccctgccaggagctgaagggtgggaacaacaaaggcaatggtgaaaagagattaggaaccccccagcctgtttccattctctgcccagcagtctcttaccttccctgatctttgcagggtggtccgtgtaaatagtataaattctccaaattatcctctaattataaatgtaagcttatttccttagatcattatccagagactgccagaaggtgggtaggatgacctggggtttcaattgacttctgttccttgcttttagttttgatagaagggaagacctgcagtgcacggtttcttccaggctgaggtacctggatcttgggttcttcactgcagggacccagacaagtggatctgcttgccagagtcctttttgcccctccctgccacctccccgtgtttccaagtcagctttcctgcaagaagaaatcctggttaaaaaagtcttttgtattgggtcaggagttgaatttggggtgggaggatggatgcaactgaagcagagtgtgggtgcccagatgtgcgctattagatgtttctctgataatgtccccaatcataccagggagactggcattgacgagaactcaggtggaggcttgagaaggccgaaagggcccctgacctgcctggcttccttagcttgcccctcagctttgcaaagagccaccctaggccccagctgaccgcatgggtgtgagccagcttgagaacactaactactcaataaaagcgaaggtggaca

SEQ ID NO: 11100 - DNA, 3315 bp, Homo sapiens
  source 1..3315: mol_type = unassigned DNA
cggcggcgactgcagtctggagggtccacacttgtgattctcaatggagagtgaaaacgcagattcataatgaaaactagcccccgtcggccactgattctcaaaagacggaggctgccccttcctgttcaaaatgccccaagtgaaacatcagaggaggaacctaagagatcccctgcccaacaggagtctaatcaagcagaggcctccaaggaagtggcagagtccaactcttgcaagtttccagctgggatcaagattattaaccaccccaccatgcccaacacgcaagtagtggccatccccaacaatgctaatattcacagcatcatcacagcactgactgccaagggaaaagagagtggcagtagtgggcccaacaaattcatcctcatcagctgtgggggagccccaactcagcctccaggactccggcctcaaacccaaaccagctatgatgccaaaaggacagaagtgaccctggagaccttgggaccaaaacctgcagctagggatgtgaatcttcctagaccacctggagccctttgcgagcagaaacgggagacctgtgcagatggtgaggcagcaggctgcactatcaacaatagcctatccaacatccagtggcttcgaaagatgagttctgatggactgggctcccgcagcatcaagcaagagatggaggaaaaggagaattgtcacctggagcagcgacaggttaaggttgaggagccttcgagaccatcagcgtcctggcagaactctgtgtctgagcggccaccctactcttacatggccatgatacaattcgccatcaacagcactgagaggaagcgcatgactttgaaagacatctatacgtggattgaggaccactttccctactttaagcacattgccaagccaggctggaagaactccatccgccacaacctttccctgcacgacatgtttgtccgggagacgtctgccaatggcaaggtctccttctggaccattcaccccagtgccaaccgctacttgacattggaccaggtgtttaagccactggacccagggtctccacaattgcccgagcacttggaatcacagcagaaacgaccgaatccagagctccgccggaacatgaccatcaaaaccgaactccccctgggcgcacggcggaagatgaagccactgctaccacgggtcagctcatacctggtacctatccagttcccggtgaaccagtcactggtgttgcagccctcggtgaaggtgccattgcccctggcggcttccctcatgagctcagagcttgcccgccatagcaagcgagtccgcattgcccccaaggtgctgctagctgaggaggggatagctcctctttcttctgcaggaccagggaaagaggagaaactcctgtttggagaagggttttctcctttgcttccagttcagactatcaaggaggaagaaatccagcctggggaggaaatgccacacttagcgagacccatcaaagtggagagccctcccttggaagagtggccctccccggccccatctttcaaagaggaatcatctcactcctgggaggattcgtcccaatctcccaccccaagacccaagaagtcctacagtgggcttaggtccccaacccggtgtgtctcggaaatgcttgtgattcaacacagggagaggagggagaggagccggtctcggagaaaacagcatctactgcctccctgtgtggatgagccggagctgctcttctcagaggggcccagtacttcccgctgggccgcagagctcccgttcccagcagactcctctgaccctgcctcccagctcagctactcccaggaagtgggaggaccttttaagacacccattaaggaaacgctgcccatctcctccaccccgagcaaatctgtcctccccagaacccctgaatcctggaggctcacgcccccagccaaagtagggggactggatttcagcccagtacaaacctcccagggtgcctctgaccccttgcctgaccccctggggctgatggatctcagcaccactcccttgcaaagtgctcccccccttgaatcaccgcaaaggctcctcagttcagaacccttagacctcatctccgtcccctttggcaactcttctccctcagatatagacgtccccaagccaggctccccggagccacaggtttctggccttgcagccaatcgttctctgacagaaggcctggtcctggacacaatgaatgacagcctcagcaagatcctgctggacatcagctttcctggcctggacgaggacccactgggccctgacaacatcaactggtcccagtttattcctgagctacagtagagccctgcccttgcccctgtgctcaagctgtccaccatcccgggcactccaaggctcagtgcaccccaagcctctgagtgaggacagcaggcagggactgttctgctcctcatagctccctgctgcctgattatgcaaaagtagcagtcacaccctagccactgctgggaccttgtgttccccaagagtatctgattcctctgctgtccctgccaggagctgaagggtgggaacaacaaaggcaatggtgaaaagagattaggaaccccccagcctgtttccattctctgcccagcagtctcttaccttccctgatctttgcagggtggtccgtgtaaatagtataaattctccaaattatcctctaattataaatgtaagcttatttccttagatcattatccagagactgccagaaggtgggtaggatgacctggggtttcaattgacttctgttccttgcttttagttttgatagaagggaagacctgcagtgcacggtttcttccaggctgaggtacctggatcttgggttcttcactgcagggacccagacaagtggatctgcttgccagagtcctttttgcccctccctgccacctccccgtgtttccaagtcagctttcctgcaagaagaaatcctggttaaaaaagtcttttgtattgggtcaggagttgaatttggggtgggaggatggatgcaactgaagcagagtgtgggtgcccagatgtgcgctattagatgtttctctgataatgtccccaatcataccagggagactggcattgacgagaactcaggtggaggcttgagaaggccgaaagggcccctgacctgcctggcttccttagcttgcccctcagctttgcaaagagccaccctaggccccagctgaccgcatgggtgtgagccagcttgagaacactaactactcaataaaagcgaaggtggac

SEQ ID NO: 11101 - DNA, 3370 bp, Homo sapiens
  source 1..3370: mol_type = unassigned DNA
gggacccggccggtccggcgcgagcccccgtccggggccctggctcggcccccaggttggaggagcccggagcccgccttcggagctacggcctaacggcggcggcgactgcagtctggagggtccacacttgtgattctcaatggagagtgaaaacgcagattcataatgaaaactagcccccgtcggccactgattctcaaaagacggaggctgccccttcctgttcaaaatgccccaagtgaaacatcagaggaggaacctaagagatcccctgcccaacaggagtctaatcaagcagaggcctccaaggaagtggcagagtccaactcttgcaagtttccagctgggatcaagattattaaccaccccaccatgcccaacacgcaagtagtggccatccccaacaatgctaatattcacagcatcatcacagcactgactgccaagggaaaagagagtggcagtagtgggcccaacaaattcatcctcatcagctgtgggggagccccaactcagcctccaggactccggcctcaaacccaaaccagctatgatgccaaaaggacagaagtgaccctggagaccttgggaccaaaacctgcagctagggatgtgaatcttcctagaccacctggagccctttgcgagcagaaacgggagacctgtgcagatggtgaggcagcaggctgcactatcaacaatagcctatccaacatccagtggcttcgaaagatgagttctgatggactgggctcccgcagcatcaagcaagagatggaggaaaaggagaattgtcacctggagcagcgacaggttaaggttgaggagccttcgagaccatcagcgtcctggcagaactctgtgtctgagcggccaccctactcttacatggccatgatacaattcgccatcaacagcactgagaggaagcgcatgactttgaaagacatctatacgtggattgaggaccactttccctactttaagcacattgccaagccaggctggaagaactccatccgccacaacctttccctgcacgacatgtttgtccgggagacgtctgccaatggcaaggtctccttctggaccattcaccccagtgccaaccgctacttgacattggaccaggtgtttaagcagcagaaacgaccgaatccagagctccgccggaacatgaccatcaaaaccgaactccccctgggcgcacggcggaagatgaagccactgctaccacgggtcagctcatacctggtacctatccagttcccggtgaaccagtcactggtgttgcagccctcggtgaaggtgccattgcccctggcggcttccctcatgagctcagagcttgcccgccatagcaagcgagtccgcattgcccccaaggtgctgctagctgaggaggggatagctcctctttcttctgcaggaccagggaaagaggagaaactcctgtttggagaagggttttctcctttgcttccagttcagactatcaaggaggaagaaatccagcctggggaggaaatgccacacttagcgagacccatcaaagtggagagccctcccttggaagagtggccctccccggccccatctttcaaagaggaatcatctcactcctgggaggattcgtcccaatctcccaccccaagacccaagaagtcctacagtgggcttaggtccccaacccggtgtgtctcggaaatgcttgtgattcaacacagggagaggagggagaggagccggtctcggagaaaacagcatctactgcctccctgtgtggatgagccggagctgctcttctcagaggggcccagtacttcccgctgggccgcagagctcccgttcccagcagactcctctgaccctgcctcccagctcagctactcccaggaagtgggaggaccttttaagacacccattaaggaaacgctgcccatctcctccaccccgagcaaatctgtcctccccagaacccctgaatcctggaggctcacgcccccagccaaagtagggggactggatttcagcccagtacaaacctcccagggtgcctctgaccccttgcctgaccccctggggctgatggatctcagcaccactcccttgcaaagtgctcccccccttgaatcaccgcaaaggctcctcagttcagaacccttagacctcatctccgtcccctttggcaactcttctccctcagatatagacgtccccaagccaggctccccggagccacaggtttctggccttgcagccaatcgttctctgacagaaggcctggtcctggacacaatgaatgacagcctcagcaagatcctgctggacatcagctttcctggcctggacgaggacccactgggccctgacaacatcaactggtcccagtttattcctgagctacagtagagccctgcccttgcccctgtgctcaagctgtccaccatcccgggcactccaaggctcagtgcaccccaagcctctgagtgaggacagcaggcagggactgttctgctcctcatagctccctgctgcctgattatgcaaaagtagcagtcacaccctagccactgctgggaccttgtgttccccaagagtatctgattcctctgctgtccctgccaggagctgaagggtgggaacaacaaaggcaatggtgaaaagagattaggaaccccccagcctgtttccattctctgcccagcagtctcttaccttccctgatctttgcagggtggtccgtgtaaatagtataaattctccaaattatcctctaattataaatgtaagcttatttccttagatcattatccagagactgccagaaggtgggtaggatgacctggggtttcaattgacttctgttccttgcttttagttttgatagaagggaagacctgcagtgcacggtttcttccaggctgaggtacctggatcttgggttcttcactgcagggacccagacaagtggatctgcttgccagagtcctttttgcccctccctgccacctccccgtgtttccaagtcagctttcctgcaagaagaaatcctggttaaaaaagtcttttgtattgggtcaggagttgaatttggggtgggaggatggatgcaactgaagcagagtgtgggtgcccagatgtgcgctattagatgtttctctgataatgtccccaatcataccagggagactggcattgacgagaactcaggtggaggcttgagaaggccgaaagggcccctgacctgcctggcttccttagcttgcccctcagctttgcaaagagccaccctaggccccagctgaccgcatgggtgtgagccagcttgagaacactaactactcaataaaagcgaaggtggaca

SEQ ID NO: 11102 - DNA, 3436 bp, Homo sapiens
  source 1..3436: mol_type = unassigned DNA
acggctttctttgaggccaggactgggtgatggtgtcgctacccccgccgcagtctgacgtcacgctgccgggccccaccagactggagggcgagcgccaaggggacctcatgcaggcaccgggcctcccaggctcccctgccccacagagtaagcatgccggcttcagctgctcgtcatttgtgtccgacggccctccagagaggacaccctcactgcccccacacagcccccgcattgcgtcaccagggcccgagcaagtccagggccactgcccagccggccccggccctgggcccttcaggctctcaccctcagacaagtatcctggctttggctttgaggaggccgcagcaagcagccctgggcgattcctcaagggcagccacgcgcccttccacccgtacaagcggcctttccatgaggacgtcttcccagaggccgagaccaccctggccctcaaaggacactcctttaagaccccagggccgctggaggccttcgaggagatcccagtggacgtggcggaggccgaggccttcctgcctggcttctcagcagaggcctggtgtaacgggctcccctaccccagccaggagcatggcccccaagtcctgggttcagaggtcaaagtcaagcccccagttctggagagtggtgctgggatgttctgctaccagcctcccttgcagcatatgtactgctcctcccagccccccttccaccagtactcgccaggtggtggcagctaccccataccctacctgggctcctcacactatcagtaccagcgaatggcaccccaggccagcaccgatgggcaccagcctctcttcccaaaacccatctattcctacagcatcctcatcttcatggcccttaagaacagtaaaactgggagccttcccgtcagcgagatctacaattttatgacggagcactttccttacttcaagacagcacccgatggctggaagaattctgtccggcacaacctatccctcaacaagtgcttcgagaaggtggagaacaaatcaggaagttcctcccgcaagggctgcctgtgggccctcaatccggccaagatcgacaagatgcaagaggagctgcaaaaatggaagaggaaagatcccattgctgtgcgcaaaagcatggccaagccagaagagctggacagcctcattggagacaagagagaaaagctgggctccccactcctgggctgtccgccccctgggctgtccggctcaggccccatccggcccctggcacccccagctggcctctccccaccactgcactcactccacccagctccaggccccattcctggcaagaaccccctgcaggacctacttatggggcacacaccctcctgctatgggcagacatacttgcacctctcaccaggcctggcccctcctggacccccgcagccattgttcccacagccggacgggcaccttgagctgcgggcccagccaggcaccccccaggactcgcctctgcctgcccacaccccacccagccacagtgccaagctactggccgagccttccccagccaggactatgcacgacaccctgctgccagatggagaccttggcactgacctggatgccatcaatccctcactcactgacttcgacttccagggaaacctgtgggaacagttgaaggatgatagcttggccctcgaccccctggtactggtgacctcatccccgacatcatcttcgatgccaccaccccagccaccacctcactgcttcccccctgggccctgtctgacagagacaggcagtggggcaggtgacttggcagccccgggcagtggtggctccggggcactgggtgacctgcacctcaccaccctctactctgcctttatggagctggagcccacgccccccacggcccctgcaggcccctctgtgtacctcagccccagctccaagcccgtggccctggcatgagctgtgcccagcttcgtcagctccagcgtttgcctggtctggaagtcctggccggccgcccacatcgggctcaccttaaaggtcaaggaaggaaaatactacctgtcccctatgccactaagccaacgtgtgtgtcagctggtagctgggggcgcagaggacatcacctggggtgctgcctctcacacatttctgccacgtggtggcccagctcctcacccagggcccccaaagagcaagcgtctgggcaagaggaaaatgccctgtccctagctcacactcatccacacttaagccctcgtgcacacacacaaattattcagatgtacacccacccacatatcttacagccagaggaaccagcactccatcactgagagcccgacttcgtttctggggcaactgagagctgagcgctttgcttaccaaaagctcagggccctgtgccaggccaaagatccccccagacccccattctgacatccacatgctctgcagtcctggccccctcgtcattttctttcccagaagcgccctgtatttattcccccatcttcatcccaacagcccagcaagaaggaggagacagagagctcctccctgggttgtctgtggacccccccaggagctgctaattggcagcacccactcagccattctctacccatccttagtacatgctctgtccagctttccccagggtgacatacagaaggggcaacatctacccgggcaccaaactgagcccaattccgaagcagtgtttggaaaagcccttgccctcggaaacttgaacatgtcctttttccccagtcccgggtgcaggaagggccccctccaggtcaccacaatctcactcctcctccagaaagaaaagttcacatagtttaggtcctggcttaactctacttatgatggttcaacttacactttttcaactttaagatggtgcaaaagcaatacacattcagtatgttcctcgacttaggatgcggttatgtccgataaacccattgtaaattgaaaccaccgaaagtcaaaaaccactttcgacttacgatgtttcccactcacgatgggtttctccggatgtagccccatcataagttgaggagcacctgttagttacttccaactgtctcaggcaacctgggcattcaggagaaaagcctggcacagggtgacagggaagcacccatgcaaagcacccccgctttgactgcttggcagacctagggtgcccgggaagcacaagggatacccttggccctgcggggtgtggcccaggtgcctgccatgagcctgaccccatcgagggggaacctcagcccaccctgggcctgggggtgacaagaacttccacaggttggccccaggcttataggaggcataagcagatcccgcgatggcttgtcattgtcccctgtcctggaacaataaagcaagtgccttgtggtctc

SEQ ID NO: 11103 - DNA, 7718 bp, Homo sapiens
  source 1..7718: mol_type = unassigned DNA
aggagccttcacgtaaatgggtccagtcatgcctcccagtaagaagccagaaagctcaggaattagtgtctccagtggactgagtcagtgttacgggggcagcggtttctccaaggcccttcaggaagacgatgacctcgacttttctctgcctgacatccgattagaagagggggccatggaagatgaagagctgaccaacctgaactggctgcacgagagcaagaacttgctgaagagctttggggagtcggtcctcaggagtgtcagccccgtccaggacctggacgatgacacccccccatcccctgcccactctgacatgccctacgatgccaggcagaaccccaactgcaaacccccctactccttcagctgcctcatatttatggccatcgaggactctccaaccaagcgcctgccagtgaaggatatctacaactggatcttggaacattttccgtattttgcaaatgcacctactgggtggaaaaactcagtgagacacaatttatcattgaataagtgttttaagaaagtggacaaagagaggagtcagagtattgggaaagggtcgttgtggtgcatagacccagagtatagacaaaatctaattcaggctttgaaaaagacaccttatcacccacacccacacgtgttcaatacacctcccacctgtcctcaggcatatcaaagcacatcaggtccacccatctggccgggcagtaccttcttcaagagaaatggagcccttctccaagatcctgacattgatgctgccagtgccatgatgcttttgaatactccccctgagatacaagcaggttttcctccaggagtgatccaaaatggagcgcgggtcctgagccgagggctgtttcctggcgtgcggccgctgccaatcactcccattggggtgacagcggccatgaggaatggcatcaccagctgccggatgcggactgagagtgagccatcttgtggctccccagtggtcagcggagaccccaaggaggatcacaactacagcagtgccaagtcctccaacgcccggagcacctcgcccaccagcgactccatctcctcctcctcctcctcagccgacgaccactatgagtttgccaccaaggggagccaggagggcagcgagggcagcgaggggagcttccggagccacgagagccccagcgacacggaagaggacgacaggaagcacagccagaaggagcccaaggattctctgggggacagcgggtacgcatcccagcacaagaagcgccagcacttcgccaaggccaggaaggtccccagcgacacactgcccctcaaaaagagacgcaccgaaaagccccccgagagcgatgatgaggagatgaaagaagcggcagggtccctcctgcacttagcagggatccggtcctgtttgaataacatcaccaatcggacggcaaaggggcagaaagagcaaaaggaaaccacaaaaaattaaaaacaagtcactgatttgttttgaacttacgaccatttggtttcagcatgtcaggagatttctaatgatttgtggcaatatcagcaattttttttcttttttcttgtttttggtttggttttctttcttttcttttccttttattttgttttaatttgccccctcttctttgttttggacccttaagaattttatttttaaaggagattgaagccatagaactcatattgacactcagctgttttacaaaagcttttcattatctgaagacaaaaccgaaaaagccaaaattaccattgcttcctccagcttgtcagaaacctgtggctgaatccgcagggatgtcaacgtcaatatcacaggaacacacattcggcacctagaaggcacgtgggcaaagtaatcatcgttcaggcccaacccttaggtttaaaaagtcaggttgtccatcccattgggttcactgagtgaaggcacataaagcaattgaggaggaggaggaacccctcgtccccctaggagcagacccaagcttgtggcaccaggcatctgatggtgccaggaaagccactggaattgtcacacggcgagcacagagggccggccaccagtcctcgatgcttctgaaccctgaagcccgatgacatcttacgaggtggacgttggactgttcatgcgcatcgggtgtcagtgactcatggagaagaaatggggtaaatttttagtgatgttgctaatcattgaattctgttctctattaaattaagaaaatgttccaaaagccataagcctgaagattggccctgtgcacgcacgcacacacacacacacacacacacacacacacacacacacacgaaggagagagagagaaaactgatggggaaaacaagctgtgtcttcttaactgcccaagtgaaaagcaaccaagtccaggaaattacaatagctgttaaggaaaggaaataatggtacagatctttttctgtctatcaaaactatttgatccaagtgaaaaaaaaaaaaaaactagaaagctacggaacctgccattagtattgtggtgtatttttaagattaaaggtacactgatggacaaaaaaaaaaagtaaaacatggcaaaaaataaaataactcctatactgccctcaaaatggagtttgcaattaatatcaggatttatctttgcaaaaatcagtgatttccacattcagccagtatagccagcagaaatttctgatccacaatgcatggattcctttgaagaaaaaaaagaaaaagagaaaaaaatcacaaaaacaaactttttttattcaaaagtaacaaagttcttgtaaggtaaataatgtatttagcatgaagcatgaattattttcatataaatatagaaaatagagaaaaggctatgcctgtaatttttaagcccttaggcttagagtttcttttggttttcttcttttttctttccttttctttgctttctttttttcctttttgtttttgtttttgttttttgtttttgtttttttttcgggttattttgttttggttttttgaagcaggtgtttaaggtttaaccttcttcagggacaaattctgactgttggggaacttactctgcaatataaaaatatcttcatgctctggtagggcttggatggttgaactctgtactgccttgtgtgcacttcagccccgaccccctctgattctctgttgaaaagtgtgtcctttctctctgtctgtacatgtttaacatgacgcaataatttgagggcaaacttagtagtgagtgtgtatgatagaatcaagagaattatgggacgcttacttgagaaaatcattaccatgatttggttctaggaaaaaggcagtgaataattatgcaaattagccagaagaaggggaaccgtgctaatgggccttattgggtgaggggacgagatggggttcatgtgaaggaggaagcgatgccgaggtaggaaaggccagccccagacatcctatcgccacaatgccatgtcgcaataggaagcaggggccggccatcgctaccttcagcacactgaccaacctggaattaagaccacctagattgcgagagctgaatttagaaaccagacaacgtcatgcagcccagaaactcctgttgttacctttgcctaagaaattttctttaatggcgggggcggggggcgggggtacaaagagaaatctctaaaagaatatgatcttccatccaagtggagggaaactttaaaacaaaaacacccagtactgtggctcaggatatgatgcgtgaggagagggagggaacagagatgaccttaacttttaaaaaagggactgctgtgggccaaagccaagcccatctgccaggacgaggtaatgtcagagctccatcagcccggacagtgggaactaactggtgcattccccacacttaccttccggtgggttgctgatgagagaacctgaaaaaacctacacctctacagcaggtcgaattcatgacctgaagctgaatacttccagcatatttattcagggtgtaggtgggaataaagtatcttcgcagtgctctgttccctccgtctccccagacatctgacaccctaaaagccatccacagctatggaacctgagcgacaccttgatttgtgttgtcacctgaccaagcctaaagacctccagctcagtcccccaccttcatcccaccccacagatgataaaattcagacctctctcctgaaaggcagaggttcaacattcaggactgtttctggccgaggacttcttccaattaaaacccccaccgtgggctgtctcccctcatttcatttttctaaaggggcagaggcctcttttagaaaataataaaatgcaatgtgtgtgatttacttttctgatctctttgagaaatagagaaatataaaagtgtgttcttaactccagaaccactctttttgcataaatacctcatcgggcagctttctaagtgtgattttcctgagtctcccttcgttggatctgccggaagacttgtcggggaacctttagtgagggtacttcttcctatttttcttctgtttttggaggcatacacattatgcataaccaaaacaatggctcaattgtgtttaactttgtattttgattgttgagaacaaaaacaaaaagtatcaatgtgtatgtggctgtttgtagtgaatttattggagaatgaggttgtccgtgtccttaacaagccaaggggcaggaggcaccctctcttatcccctcctccaagagcagtagagaatttaagcacaagcctatttgtgaaagaatattttgcttaagtgtcattcactttagtcttggaattccttcccaaacgtcaggtgttcttttagcttccaaactagcatatgtatccattagtctgacagatcgcctgaacaccattaagaggtgtggcgtttttgctttcatttctcctgctgggagaagtggcggttcatgtgtcattccagtatctcacatactcacacggggcaggggggagggggaaacggggaactatagcaatatttaaagatgctttggaaaccaaccgtgaacacatcaacaccacgacgtctacgattacttgctattggccctcggatacatttaagagaaagagacagtcactcttttttttcttaaatgatatacatataaacagttatttttatcctattataattgtcttttgtctttatctagtactatgtggaaagggtttgcatcatagatttttcccagccttataatataccataagctcctacttccctgcccctccctaatcagtattctttcaagagttctttggtgaagccatctatctgaaactaaaatgaaccaaacccatatttcactggtggttggagaaaaccatggccaaaacgattgtggcaggtctcaatcttgggagtttttaagaaggaatgtgccagaggccgattcccaagaacagagttttcttttgttttgcagaggcattcaatgtgtctagtgcttgctggccacagcagttactaccacagagccttctgggaggggccgttgtgttgaaggaggctcctgcctgagggacagcatcaggcagtgggctctgtagagtgagaaccaggtggaggccttctgtgcccagctcagagttctgcaccacgccaggactgcccaggccaagggctactgacgcaagttccactcattccactctgtggggggcgccttgggcctctcctggaagggctcttggagaaggaattggagttacgtacaagtgacctaaatgggaagcttttctagatgagattggattaaattccatgtgatttctctttccctttaatccaggttgggactcgtttctttctggtggatcacagctgcccagatgttgcaattgatttttatgtttctgtagagaagtatttttctttcatcttcaggattttttttgccaccaaaagaaaacattggaactctgtgtttcctcttgattgtgacttcccagtgttgacagttaagtccttagtgtcgtaggtcccagcccaccaatactatatcaaacactgttatgcacataatgcagcactgtgatctaatttaaataatacttttttattatttatactactatatataatatacatcaacacttttgctatataacctaagtgataaccctcttttagttacctgccaaactctggacttggtttatattgcagttaacacagttacaaagctgtaatggtgtctttttttcctttgtaacggaatgtgtaaatcaaagtatatacattgtgtggtgttcctgtttctggagtttcatgaggatttacacatggcattcagtgttctgtatagatctgcctacctttgtgaattcatctgttaacccctcttcctttgagagagcaccggcgatggtggttaactccttgtgttttctctctctcctactggttattcttgaattaagcacagactcgtcagctcggttgctttatcatgaataatgtgtgtgaccttgcagttcttccacagttcagcaaacaagtgctagcttcactgaccaaaaattaaggaaggaaaacacagtttttaaaacgatccatcttttaacagccgaaaccgatgtgtctatggtgctgcaccttgctgttgtacttctgaaatcagacgtgtgtgaacgatcatttctgacttaaccgtgagatgctcacgagtacccttcctgttgttttgttagcattgaaatcgagactatttatttggaatatatacaacagtgtttttccactgtatttcatttgcaaaagttgagaactgctttctctaccttttgcaaaataattgatattccatattggattctcaaagacttcgatatggtgaacctattaaacctagaaattgtattcatcctttcatgactgtggcctgagttccccagcccctctcctccttttttttagatgagatttagcacactctcagttatttaaacatgcaacatttcttgagtatgtatgttgaggccatctgagctcatagctgattcagtaaccagtttcatgctgtgtcattcacactcactacttaatactgccatggtgaaaatgtggaggaaaaatgtatccatgtgtgtctgggaagcatatacacttgtacattttttaatactctgattctgtaacatttctgagttttgttttgttttacagaaaaaaaaaaaaagtgataaagcaatcagaagaccaagaggtttactattgatgcttagggtcgtctgaccttggctggccaatagacctacacggccaaattaatttacgagagtaataatttttcaaaagccaattttttttctgtattttctgtatgaaactgccaatatcatgaatagaaagggagaaccataaaggagaaagaacgtgatgttctgttatgttcatgtaaacctaaagaaacagtgtggaggcaggcgcgatcagccgaactctagggacttggtgttgcttggaaggcatccatacctgcattttgcattcttcgtatgtaatcatattgccaaagacaaactatttcatcatttattgtaaataacacttttccccagacctaccataaagtttctgtgatgtattgtcttccagttgcaataaaaattactgagttgcatcaattg

SEQ ID NO: 11104 - DNA, 7832 bp, Homo sapiens
  source 1..7832: mol_type = unassigned DNA
ccgggagacggcgcgacccggcggcggggccacccgcgagtccagcgtcgccgcagccccccaatgcggccgcgagaagcagcgggggggcaggcgatcgaaggagccttcacgtaaatgggtccagtcatgcctcccagtaagaagccagaaagctcaggaattagtgtctccagtggactgagtcagtgttacgggggcagcggtttctccaaggcccttcaggaagacgatgacctcgacttttctctgcctgacatccgattagaagagggggccatggaagatgaagagctgaccaacctgaactggctgcacgagagcaagaacttgctgaagagctttggggagtcggtcctcaggagtgtcagccccgtccaggacctggacgatgacacccccccatcccctgcccactctgacatgccctacgatgccaggcagaaccccaactgcaaacccccctactccttcagctgcctcatatttatggccatcgaggactctccaaccaagcgcctgccagtgaaggatatctacaactggatcttggaacattttccgtattttgcaaatgcacctactgggtggaaaaactcagtgagacacaatttatcattgaataagtgttttaagaaagtggacaaagagaggagtcagagtattgggaaagggtcgttgtggtgcatagacccagagtatagacaaaatctaattcaggctttgaaaaagacaccttatcacccacacccacacgtgttcaatacacctcccacctgtcctcaggcatatcaaagcacatcaggtccacccatctggccgggcagtaccttcttcaagagaaatggagcccttctccaagatcctgacattgatgctgccagtgccatgatgcttttgaatactccccctgagatacaagcaggttttcctccaggagtgatccaaaatggagcgcgggtcctgagccgagggctgtttcctggcgtgcggccgctgccaatcactcccattggggtgacagcggccatgaggaatggcatcaccagctgccggatgcggactgagagtgagccatcttgtggctccccagtggtcagcggagaccccaaggaggatcacaactacagcagtgccaagtcctccaacgcccggagcacctcgcccaccagcgactccatctcctcctcctcctcctcagccgacgaccactatgagtttgccaccaaggggagccaggagggcagcgagggcagcgaggggagcttccggagccacgagagccccagcgacacggaagaggacgacaggaagcacagccagaaggagcccaaggattctctgggggacagcgggtacgcatcccagcacaagaagcgccagcacttcgccaaggccaggaaggtccccagcgacacactgcccctcaaaaagagacgcaccgaaaagccccccgagagcgatgatgaggagatgaaagaagcggcagggtccctcctgcacttagcagggatccggtcctgtttgaataacatcaccaatcggacggcaaaggggcagaaagagcaaaaggaaaccacaaaaaattaaaaacaagtcactgatttgttttgaacttacgaccatttggtttcagcatgtcaggagatttctaatgatttgtggcaatatcagcaattttttttcttttttcttgtttttggtttggttttctttcttttcttttccttttattttgttttaatttgccccctcttctttgttttggacccttaagaattttatttttaaaggagattgaagccatagaactcatattgacactcagctgttttacaaaagcttttcattatctgaagacaaaaccgaaaaagccaaaattaccattgcttcctccagcttgtcagaaacctgtggctgaatccgcagggatgtcaacgtcaatatcacaggaacacacattcggcacctagaaggcacgtgggcaaagtaatcatcgttcaggcccaacccttaggtttaaaaagtcaggttgtccatcccattgggttcactgagtgaaggcacataaagcaattgaggaggaggaggaacccctcgtccccctaggagcagacccaagcttgtggcaccaggcatctgatggtgccaggaaagccactggaattgtcacacggcgagcacagagggccggccaccagtcctcgatgcttctgaaccctgaagcccgatgacatcttacgaggtggacgttggactgttcatgcgcatcgggtgtcagtgactcatggagaagaaatggggtaaatttttagtgatgttgctaatcattgaattctgttctctattaaattaagaaaatgttccaaaagccataagcctgaagattggccctgtgcacgcacgcacacacacacacacacacacacacacacacacacacacacgaaggagagagagagaaaactgatggggaaaacaagctgtgtcttcttaactgcccaagtgaaaagcaaccaagtccaggaaattacaatagctgttaaggaaaggaaataatggtacagatctttttctgtctatcaaaactatttgatccaagtgaaaaaaaaaaaaaaactagaaagctacggaacctgccattagtattgtggtgtatttttaagattaaaggtacactgatggacaaaaaaaaaaagtaaaacatggcaaaaaataaaataactcctatactgccctcaaaatggagtttgcaattaatatcaggatttatctttgcaaaaatcagtgatttccacattcagccagtatagccagcagaaatttctgatccacaatgcatggattcctttgaagaaaaaaaagaaaaagagaaaaaaatcacaaaaacaaactttttttattcaaaagtaacaaagttcttgtaaggtaaataatgtatttagcatgaagcatgaattattttcatataaatatagaaaatagagaaaaggctatgcctgtaatttttaagcccttaggcttagagtttcttttggttttcttcttttttctttccttttctttgctttctttttttcctttttgtttttgtttttgttttttgtttttgtttttttttcgggttattttgttttggttttttgaagcaggtgtttaaggtttaaccttcttcagggacaaattctgactgttggggaacttactctgcaatataaaaatatcttcatgctctggtagggcttggatggttgaactctgtactgccttgtgtgcacttcagccccgaccccctctgattctctgttgaaaagtgtgtcctttctctctgtctgtacatgtttaacatgacgcaataatttgagggcaaacttagtagtgagtgtgtatgatagaatcaagagaattatgggacgcttacttgagaaaatcattaccatgatttggttctaggaaaaaggcagtgaataattatgcaaattagccagaagaaggggaaccgtgctaatgggccttattgggtgaggggacgagatggggttcatgtgaaggaggaagcgatgccgaggtaggaaaggccagccccagacatcctatcgccacaatgccatgtcgcaataggaagcaggggccggccatcgctaccttcagcacactgaccaacctggaattaagaccacctagattgcgagagctgaatttagaaaccagacaacgtcatgcagcccagaaactcctgttgttacctttgcctaagaaattttctttaatggcgggggcggggggcgggggtacaaagagaaatctctaaaagaatatgatcttccatccaagtggagggaaactttaaaacaaaaacacccagtactgtggctcaggatatgatgcgtgaggagagggagggaacagagatgaccttaacttttaaaaaagggactgctgtgggccaaagccaagcccatctgccaggacgaggtaatgtcagagctccatcagcccggacagtgggaactaactggtgcattccccacacttaccttccggtgggttgctgatgagagaacctgaaaaaacctacacctctacagcaggtcgaattcatgacctgaagctgaatacttccagcatatttattcagggtgtaggtgggaataaagtatcttcgcagtgctctgttccctccgtctccccagacatctgacaccctaaaagccatccacagctatggaacctgagcgacaccttgatttgtgttgtcacctgaccaagcctaaagacctccagctcagtcccccaccttcatcccaccccacagatgataaaattcagacctctctcctgaaaggcagaggttcaacattcaggactgtttctggccgaggacttcttccaattaaaacccccaccgtgggctgtctcccctcatttcatttttctaaaggggcagaggcctcttttagaaaataataaaatgcaatgtgtgtgatttacttttctgatctctttgagaaatagagaaatataaaagtgtgttcttaactccagaaccactctttttgcataaatacctcatcgggcagctttctaagtgtgattttcctgagtctcccttcgttggatctgccggaagacttgtcggggaacctttagtgagggtacttcttcctatttttcttctgtttttggaggcatacacattatgcataaccaaaacaatggctcaattgtgtttaactttgtattttgattgttgagaacaaaaacaaaaagtatcaatgtgtatgtggctgtttgtagtgaatttattggagaatgaggttgtccgtgtccttaacaagccaaggggcaggaggcaccctctcttatcccctcctccaagagcagtagagaatttaagcacaagcctatttgtgaaagaatattttgcttaagtgtcattcactttagtcttggaattccttcccaaacgtcaggtgttcttttagcttccaaactagcatatgtatccattagtctgacagatcgcctgaacaccattaagaggtgtggcgtttttgctttcatttctcctgctgggagaagtggcggttcatgtgtcattccagtatctcacatactcacacggggcaggggggagggggaaacggggaactatagcaatatttaaagatgctttggaaaccaaccgtgaacacatcaacaccacgacgtctacgattacttgctattggccctcggatacatttaagagaaagagacagtcactcttttttttcttaaatgatatacatataaacagttatttttatcctattataattgtcttttgtctttatctagtactatgtggaaagggtttgcatcatagatttttcccagccttataatataccataagctcctacttccctgcccctccctaatcagtattctttcaagagttctttggtgaagccatctatctgaaactaaaatgaaccaaacccatatttcactggtggttggagaaaaccatggccaaaacgattgtggcaggtctcaatcttgggagtttttaagaaggaatgtgccagaggccgattcccaagaacagagttttcttttgttttgcagaggcattcaatgtgtctagtgcttgctggccacagcagttactaccacagagccttctgggaggggccgttgtgttgaaggaggctcctgcctgagggacagcatcaggcagtgggctctgtagagtgagaaccaggtggaggccttctgtgcccagctcagagttctgcaccacgccaggactgcccaggccaagggctactgacgcaagttccactcattccactctgtggggggcgccttgggcctctcctggaagggctcttggagaaggaattggagttacgtacaagtgacctaaatgggaagcttttctagatgagattggattaaattccatgtgatttctctttccctttaatccaggttgggactcgtttctttctggtggatcacagctgcccagatgttgcaattgatttttatgtttctgtagagaagtatttttctttcatcttcaggattttttttgccaccaaaagaaaacattggaactctgtgtttcctcttgattgtgacttcccagtgttgacagttaagtccttagtgtcgtaggtcccagcccaccaatactatatcaaacactgttatgcacataatgcagcactgtgatctaatttaaataatacttttttattatttatactactatatataatatacatcaacacttttgctatataacctaagtgataaccctcttttagttacctgccaaactctggacttggtttatattgcagttaacacagttacaaagctgtaatggtgtctttttttcctttgtaacggaatgtgtaaatcaaagtatatacattgtgtggtgttcctgtttctggagtttcatgaggatttacacatggcattcagtgttctgtatagatctgcctacctttgtgaattcatctgttaacccctcttcctttgagagagcaccggcgatggtggttaactccttgtgttttctctctctcctactggttattcttgaattaagcacagactcgtcagctcggttgctttatcatgaataatgtgtgtgaccttgcagttcttccacagttcagcaaacaagtgctagcttcactgaccaaaaattaaggaaggaaaacacagtttttaaaacgatccatcttttaacagccgaaaccgatgtgtctatggtgctgcaccttgctgttgtacttctgaaatcagacgtgtgtgaacgatcatttctgacttaaccgtgagatgctcacgagtacccttcctgttgttttgttagcattgaaatcgagactatttatttggaatatatacaacagtgtttttccactgtatttcatttgcaaaagttgagaactgctttctctaccttttgcaaaataattgatattccatattggattctcaaagacttcgatatggtgaacctattaaacctagaaattgtattcatcctttcatgactgtggcctgagttccccagcccctctcctccttttttttagatgagatttagcacactctcagttatttaaacatgcaacatttcttgagtatgtatgttgaggccatctgagctcatagctgattcagtaaccagtttcatgctgtgtcattcacactcactacttaatactgccatggtgaaaatgtggaggaaaaatgtatccatgtgtgtctgggaagcatatacacttgtacattttttaatactctgattctgtaacatttctgagttttgttttgttttacagaaaaaaaaaaaaagtgataaagcaatcagaagaccaagaggtttactattgatgcttagggtcgtctgaccttggctggccaatagacctacacggccaaattaatttacgagagtaataatttttcaaaagccaattttttttctgtattttctgtatgaaactgccaatatcatgaatagaaagggagaaccataaaggagaaagaacgtgatgttctgttatgttcatgtaaacctaaagaaacagtgtggaggcaggcgcgatcagccgaactctagggacttggtgttgcttggaaggcatccatacctgcattttgcattcttcgtatgtaatcatattgccaaagacaaactatttcatcatttattgtaaataacacttttccccagacctaccataaagtttctgtgatgtattgtcttccagttgcaataaaaattactgagttgcatcaattgaagaaaaacacca

SEQ ID NO: 11105 - DNA, 337 bp, Homo sapiens
  source 1..337: mol_type = unassigned DNA
gtagcttgcaggtttctgatatcgcatcagtggacaggcggcatgcactatattaacagcctctagaagaccagcattctcgtgattatggaggcccctctgtcttttctgtgacgggagcaatgctgacctcggtttcctggacccattccgactcaggagccttcacgtaaatgggtccagtcatgcctcccagtaagaagccagaaagctcaggaattagtgtctccagtggactgagtcagtgttacgggggcagcggtttctccaaggcccttcaggaagacgatgacctcgacttttctctgcctgacatccgattagaagagggggccat

SEQ ID NO: 11106 - DNA, 505 bp, Homo sapiens
  source 1..505: mol_type = unassigned DNA
ggcattccccttctgcacgatggcaaaatctgggcaaagttgaaagttgcaagattccagtcaaacaattgtccttgcttgggtaaatatcctcaaatgaaaaaaaatcagcctctagaagaccagcattctcgtgattatggaggcccctctgtcttttctgtgacgggagcaatgctgacctcggtttcctggacccattccgactcaggagccttcacgtaaatgggtccagtcatgcctcccagtaagaagccagaaagctcaggaattagtgtctccagtggactgagtcagtgttacgggggcagcggtttctccaaggcccttcaggaagacgatgacctcgacttttctctgcctgacatccgattagaagagggggccatggaagatgaagagctgaccaacctgaactggctgcacgagagcaagaacttgctgaagagctttggggagtcggtcctcaggagtgtcagccccgtccaggacctggacgatgaca

SEQ ID NO: 11107 - DNA, 1595 bp, Homo sapiens
  source 1..1595: mol_type = unassigned DNA
gcgatctgctgcagctcggccgggagacggcgcgacccggcggcggggccacccgcgagtccagcgtcgccgcagccccccaatgcggccgcgagaagcagcgggggggcaggcgatcgaaggagccttcacgtaaatgggtccagtcatgcctcccagtaagaagccagaaagctcaggaattagtgtctccagtggactgagtcagtgttacgggggcagcggtttctccaaggcccttcaggaagacgatgacctcgacttttctctgcctgacatccgattagaagagggggccatggaagatgaagagctgaccaacctgaactggctgcacgagagcaagaacttgctgaagagctttggggagtcggtcctcaggagtgtcagccccgtccaggacctggacgatgacacccccccatcccctgcccactctgacatgccctacgatgccaggcagaaccccaactgcaaacccccctactccttcagctgcctcatatttatggccatcgaggactctccaaccaagcgcctgccagtgaaggatatctacaactggatcttggaacattttccgtattttgcaaatgcacctactgggtggaaaaactcagtgagacacaatttatcattgaataagtgttttaagaaagtggacaaagagaggagtcagagtattgggaaagggtcgttgtggtgcatagacccagagtatagacaaaatctaattcaggctttgaaaaagacaccttatcacccacacccacacgtgttcaatacacctcccacctgtcctcaggcatatcaaagcacatcaggtccacccatctggccgggcagtaccttcttcaagagaaatggagcccttctccaagttcctccaggagtgatccaaaatggagcgcgggtcctgagccgagggctgtttcctggcgtgcggccgctgccaatcactcccattggggtgacagcggccatgaggaatggcatcaccagctgccggatgcggactgagagtgagccatcttgtggctccccagtggtcagcggagaccccaaggaggatcacaactacagcagtgccaagtcctccaacgcccggagcacctcgcccaccagcgactccatctcctcctcctcctcctcagccgacgaccactatgagtttgccaccaaggggagccaggagggcagcgagggcagcgaggggagcttccggagccacgagagccccagcgacacggaagaggacgacaggaagcacagccagaaggagcccaaggattctctgggggacagcgggtacgcatcccagcacaagaagcgccagcacttcgccaaggccaggaaggtccccagcgacacactgcccctcaaaaagagacgcaccgaaaagccccccgagagcgatgatgaggagatgaaagaagcggcagggtccctcctgcacttagcagggatccggtcctgtttgaataacatcaccaatcggacggcaaaggggcagaaagagcaaaaggaaaccacaaaaaattaaaaacaagtcactgatttgttttgaacttacgaccatttggtttcagcatgtc

SEQ ID NO: 11108 - DNA, 851 bp, Homo sapiens
  source 1..851: mol_type = unassigned DNA
agctcggccgggagacggcgcgacccggcggcggggccacccgcgagtccagcgtcgccgcagccccccaatgcggccgcgagaagcagcgggggggcaggcgatcgaagcagcctctagaagaccagcattctcgtgattatggaggcccctctgtcttttctgtgacgggagcaatgctgacctcggtttcctggacccattccgactcaggagccttcacgtaaatgggtccagtcatgcctcccagtaagaagccagaaagctcaggaattagtgtctccagtggactgagtcagtgttacgggggcagcggtttctccaaggcccttcaggaagacgatgacctcgacttttctctgcctgacatccgattagaagagggggccatggaagatgaagagctgaccaacctgaactggctgcacgagagcaagaacttgctgaagagctttggggagtcggtcctcaggagtgtcagccccgtccaggacctggacgatgacacccccccatcccctgcccactctgacatgccctacgatgccaggcagaaccccaactgcaaacccccctactccttcagctgcctcatatttatggccatcgaggactctccaaccaagcgcctgccagtgaaggatatctacaactggatcttggaacattttccgtattttgcaaatgcacctactgggtggaaaaactcagtgagacacaatttatcattgaataagtgttttaagaaagtggacaaagagaggagtcagagtattgggaaagggtcgttgtggtgcatagacccagagtatagacaaaatctaattcaggctttgaaaaagacaccttat

SEQ ID NO: 11109 - DNA, 2692 bp, Homo sapiens
  source 1..2692: mol_type = unassigned DNA
gcgggaggacgcgcggcgcgcccggcggacgccgcaggtcccatgccgcgccgcgacccccgcgcccctgccgcccgcgcccgcggccgccccccgccgcccgccgccccgggctcgccgcgccgcgcccgcgcgtccttagcggggccaccgagcgatgcccgccgggcgcccgcgaaagtttgtcggctcctgctgaagggcagcggcgcccccgcacccccgtgccccgctccggccaggagccttcacgtaaatgggtccagtcatgcctcccagtaagaagccagaaagctcaggaattagtgtctccagtggactgagtcagtgttacgggggcagcggtttctccaaggcccttcaggaagacgatgacctcgacttttctctgcctgacatccgattagaagagggggccatggaagatgaagagctgaccaacctgaactggctgcacgagagcaagaacttgctgaagagctttggggagtcggtcctcaggagtgtcagccccgtccaggacctggacgatgacacccccccatcccctgcccactctgacatgccctacgatgccaggcagaaccccaactgcaaacccccctactccttcagctgcctcatatttatggccatcgaggactctccaaccaagcgcctgccagtgaaggatatctacaactggatcttggaacattttccgtattttgcaaatgcacctactgggtggaaaaactcagtgagacacaatttatcattgaataagtgttttaagaaagtggacaaagagaggagtcagagtattgggaaagggtcgttgtggtgcatagacccagagtatagacaaaatctaattcaggctttgaaaaagacaccttatcacccacacccacacgtgttcaatacacctcccacctgtcctcaggcatatcaaagcacatcaggtccacccatctggccgggcagtaccttcttcaagagaaatggagcccttctccaagttcctccaggagtgatccaaaatggagcgcgggtcctgagccgagggctgtttcctggcgtgcggccgctgccaatcactcccattggggtgacagcggccatgaggaatggcatcaccagctgccggatgcggactgagagtgagccatcttgtggctccccagtggtcagcggagaccccaaggaggatcacaactacagcagtgccaagtcctccaacgcccggagcacctcgcccaccagcgactccatctcctcctcctcctcctcagccgacgaccactatgagtttgccaccaaggggagccaggagggcagcgagggcagcgaggggagcttccggagccacgagagccccagcgacacggaagaggacgacaggaagcacagccagaaggagcccaaggattctctgggggacagcgggtacgcatcccagcacaagaagcgccagcacttcgccaaggccaggaaggtccccagcgacacactgcccctcaaaaagagacgcaccgaaaagccccccgagagcgatgatgaggagatgaaagaagcggcagggtccctcctgcacttagcagggatccggtcctgtttgaataacatcaccaatcggacggcaaaggggcagaaagagcaaaaggaaaccacaaaaaattaaaaacaagtcactgatttgttttgaacttacgaccatttggtttcagcatgtcaggagatttctaatgatttgtggcaatatcagcaattttttttcttttttcttgtttttggtttggttttctttcttttcttttccttttattttgttttaatttgccccctcttctttgttttggacccttaagaattttatttttaaaggagattgaagccatagaactcatattgacactcagctgttttacaaaagcttttcattatctgaagacaaaaccgaaaaagccaaaattaccattgcttcctccagcttgtcagaaacctgtggctgaatccgcagggatgtcaacgtcaatatcacaggaacacacattcggcacctagaaggcacgtgggcaaagtaatcatcgttcaggcccaacccttaggtttaaaaagtcaggttgtccatcccattgggttcactgagtgaaggcacataaagcaattgaggaggaggaggaacccctcgtccccctaggagcagacccaagcttgtggcaccaggcatctgatggtgccaggaaagccactggaattgtcacacggcgagcacagagggccggccaccagtcctcgatgcttctgaaccctgaagcccgatgacatcttacgaggtggacgttggactgttcatgcgcatcgggtgtcagtgactcatggagaagaaatggggtaaatttttagtgatgttgctaatcattgaattctgttctctattaaattaagaaaatgttccaaaagccataagcctgaagattggccctgtgcacgcacgcacacacacacacacacacacacacacacacacacacacacgaaggagagagagagaaaactgatggggaaaacaagctgtgtcttcttaactgcccaagtgaaaagcaaccaagtccaggaaattacaatagctgttaaggaaaggaaataatggtacagatctttttctgtctatcaaaactatttgatccaagtgaaaaaaaaaaaaaaa

SEQ ID NO: 11110 - DNA, 3226 bp, Homo sapiens
  source 1..3226: mol_type = unassigned DNA
aaattgcggaacgcgaggggcgagcgcgagggagcccccctccggaacccctgcccacccccggagcgccggcagcggcggccccgcgaggatcggctccaggagatgatagaaagtgacacctcatccataatgtcaggaattattcgaaactcagggcaaaatcaccacccctctccacaggaatacaggcttctagccaccaccagcgatgatgaccttcccggggacctgcagtcgctgtcgtggctcacggcggtggatgtgcctcggctgcagcagatggcaagtggccgcgtggacctgggtggcccctgcgtgccacatccacacccaggtgccttggctggggtggccgacctgcatgtgggagccactccaagtccccttctccatggcccagcaggcatggccccccgaggcatgccaggtctgggccccataactggccacagagacagccagatgagccagttccccgtggggggccagccctcatctggcctgcaggacccgccgcatctgtactcacctgccacccaaccacagttcccgctccccccgggtgcccagcagctgtctgatcgccatggccctgaagaacagcaagacaggcagcctgcctgtgagcgagatctacagcttcatgaaggagcacttcccctacttcaagacggcccccgacgggtggaagaactcggtgcggcacaacctgtctctgaacaagtgcttcgagaaggtggagaacaagatgagcggctcctcccgcaagggctgcctgtgggctctgaacctggcccgcatcgacaagatggaggaggagatgcacaagtggaagaggaaggacctggctgccatccaccggagtatggccaaccctgaggagttggacaagctgatctccgaccggcctgaaagctgccggcgccccggcaaaccgggggaaccagaggcccccgtgctgactcacgccaccacagtggccgtggcgcatggctgcctggctgtctcccagctcccaccccagccactgatgaccctgtccctgcagtcagtccccctgcaccaccaggtccagccccaggcacatcttgctccagactctccagcaccagcccagaccccgccactgcacgccctgccggacctcagccccagcccgctcccccaccccgccatgggaagggctcctgtagacttcatcaacatcagcaccgacatgaacactgaggtggatgccctcgacccgagcatcatggacttcgctctgcaggggaacctgtgggaggagatgaaggatgagggattcagcttggacacactgggcgcctttgcagactccccgcttggctgtgacctgggggcctcaggcctaacccctgcctcgggtggcagcgaccagtccttcccagacttgcaggtgacgggtctctacacagcgtactccactccggacagtgtggctgcatcgggcaccagctcctcctcccagtacctgggtgcacaggggaacaagcctatagccctgctttgagctgtcagcctcacctgccctggaaccccggcacccggcttgggcagagaactgactagaacagggtgttcccagaaggcaggtccctcattgtccccgaagcctctcctggacctgtggcgaagttgccggctggacagggaagcggttcccctcagcagcccctctccttctcgtgcctccccctggagcttccggagcagtttctgggggctcttccaagtcagaagaatggaggaaggtggacaagcaacccagcatcccccgaccccttgacactcctccgaggcctgagccgcaatgcctgcccgtgttgagtgagacttctccatcctggatcctggctgcgtgacctcagtgacctgcaccccattttgggacaccttggtgcattaaggaaacaccctggggtgaaagcccttgaattcatcctcatgggaaatggctgagtggatcaaacctcagccgcagcctccgggggacaggcccagggcgggaaatggagccggagaagcttgagcctctctcttggacaggacaagctgaactctgaaatgggagccggtccaggtggccttcagccccacctttccgatagtctgttagaattttattagcgcagattcctgggccatgccgggtaccgtgaccttgtgtaaatttatttatatttattgtggcccatccaccccacttctgcaaacccatcccgaggcctctggaatgggactccttctccctccctacctcccagccatcctaactcctacaggccagagaatgacatctctaactggctcataatcccttggcagcctggggctactttttagaaccagcaagcactgttgatactgtgaaacatcccattttttccgtattagagaccagatatttttctacctgttcatgattcacatctcttcttgcatgtacctaagaggggcggtgccattgtttgggggcttggggggctttcaaaggggaaaatgcgatgggagagggaggaactggaggggggtgcttttgtactgggatttaagacacccctgatggaatgaaagccaactgaaccacgtaaagctcgaaccacgtggcaagtggtggacaaaacttcaacgcatgatatttattggcacttcctcacctccctttgccctgcagctgtttttatgcttctttttctctccttgctaattactgactccccaagtggcaagttccgcagatagctgggttagaagagagacaggggagtgagctagtcaaatgtgaaaaatgctctcccagcaaagctgagacaaaattggagaagctgcagcctcacgcaccatccccctctttccaccagatggatgttgacttggtgtctgggagttcccgaaccctagagccaggatgttctgtttaatcaacagctcagccagctgcctgggagttttggcattaagccccgccttgaagggcgagctttaagtttttcccagttctggaactttctaccgagtatccaccacccttagacacaatcccagtgctacccgtctgacctgcactgctcatctgctttgtgtaacatgacccctgataagatgttgaaactgttattcacaaagactccgtgtttgggcaacatcaagactgtaagtgtagaattgagcaactgtcttctatcaataaaggctgaatggc

SEQ ID NO: 11111 - DNA, 3350 bp, Homo sapiens
  source 1..3350: mol_type = unassigned DNA
aaattgcggaacgcgaggggcgagcgcgagggagcccccctccggaacccctgcccacccccggagcgccggcagcggcggccccgcgaggatcggctccaggagatgatagaaagtgacacctcatccataatgtcaggaattattcgaaactcagggcaaaatcaccacccctctccacaggaatacaggcttctagccaccaccagcgatgatgaccttcccggggacctgcagtcgctgtcgtggctcacggcggtggatgtgcctcggctgcagcagatggcaagtggccgcgtggacctgggtggcccctgcgtgccacatccacacccaggtgccttggctggggtggccgacctgcatgtgggagccactccaagtccccttctccatggcccagcaggcatggccccccgaggcatgccaggtctgggccccataactggccacagagacagcatgagccagttccccgtggggggccagccctcatctggcctgcaggacccgccgcatctgtactcacctgccacccaaccacagttcccgctccccccgggtgcccagcagtgccctcctgtgggcctctatggccccccatttggggtgcggcccccctacccccagccccacgtggctgtgcattcatctcaagaactgcaccccaaacactaccccaagcccatctactcgtacagctgtctgatcgccatggccctgaagaacagcaagacaggcagcctgcctgtgagcgagatctacagcttcatgaaggagcacttcccctacttcaagacggcccccgacgggtggaagaactcggtgcggcacaacctgtctctgaacaagtgcttcgagaaggtggagaacaagatgagcggctcctcccgcaagggctgcctgtgggctctgaacctggcccgcatcgacaagatggaggaggagatgcacaagtggaagaggaaggacctggctgccatccaccggagtatggccaaccctgaggagttggacaagctgatctccgaccggcctgaaagctgccggcgccccggcaaaccgggggaaccagaggcccccgtgctgactcacgccaccacagtggccgtggcgcatggctgcctggctgtctcccagctcccaccccagccactgatgaccctgtccctgcagtcagtccccctgcaccaccaggtccagccccaggcacatcttgctccagactctccagcaccagcccagaccccgccactgcacgccctgccggacctcagccccagcccgctcccccaccccgccatgggaagggctcctgtagacttcatcaacatcagcaccgacatgaacactgaggtggatgccctcgacccgagcatcatggacttcgctctgcaggggaacctgtgggaggagatgaaggatgagggattcagcttggacacactgggcgcctttgcagactccccgcttggctgtgacctgggggcctcaggcctaacccctgcctcgggtggcagcgaccagtccttcccagacttgcaggtgacgggtctctacacagcgtactccactccggacagtgtggctgcatcgggcaccagctcctcctcccagtacctgggtgcacaggggaacaagcctatagccctgctttgagctgtcagcctcacctgccctggaaccccggcacccggcttgggcagagaactgactagaacagggtgttcccagaaggcaggtccctcattgtccccgaagcctctcctggacctgtggcgaagttgccggctggacagggaagcggttcccctcagcagcccctctccttctcgtgcctccccctggagcttccggagcagtttctgggggctcttccaagtcagaagaatggaggaaggtggacaagcaacccagcatcccccgaccccttgacactcctccgaggcctgagccgcaatgcctgcccgtgttgagtgagacttctccatcctggatcctggctgcgtgacctcagtgacctgcaccccattttgggacaccttggtgcattaaggaaacaccctggggtgaaagcccttgaattcatcctcatgggaaatggctgagtggatcaaacctcagccgcagcctccgggggacaggcccagggcgggaaatggagccggagaagcttgagcctctctcttggacaggacaagctgaactctgaaatgggagccggtccaggtggccttcagccccacctttccgatagtctgttagaattttattagcgcagattcctgggccatgccgggtaccgtgaccttgtgtaaatttatttatatttattgtggcccatccaccccacttctgcaaacccatcccgaggcctctggaatgggactccttctccctccctacctcccagccatcctaactcctacaggccagagaatgacatctctaactggctcataatcccttggcagcctggggctactttttagaaccagcaagcactgttgatactgtgaaacatcccattttttccgtattagagaccagatatttttctacctgttcatgattcacatctcttcttgcatgtacctaagaggggcggtgccattgtttgggggcttggggggctttcaaaggggaaaatgcgatgggagagggaggaactggaggggggtgcttttgtactgggatttaagacacccctgatggaatgaaagccaactgaaccacgtaaagctcgaaccacgtggcaagtggtggacaaaacttcaacgcatgatatttattggcacttcctcacctccctttgccctgcagctgtttttatgcttctttttctctccttgctaattactgactccccaagtggcaagttccgcagatagctgggttagaagagagacaggggagtgagctagtcaaatgtgaaaaatgctctcccagcaaagctgagacaaaattggagaagctgcagcctcacgcaccatccccctctttccaccagatggatgttgacttggtgtctgggagttcccgaaccctagagccaggatgttctgtttaatcaacagctcagccagctgcctgggagttttggcattaagccccgccttgaagggcgagctttaagtttttcccagttctggaactttctaccgagtatccaccacccttagacacaatcccagtgctacccgtctgacctgcactgctcatctgctttgtgtaacatgacccctgataagatgttgaaactgttattcacaaagactccgtgtttgggcaacatcaagactgtaagtgtagaattgagcaactgtcttctatcaataaaggctgaatgg

SEQ ID NO: 11112 - DNA, 2958 bp, Homo sapiens
  source 1..2958: mol_type = unassigned DNA
aaattgcggaacgcgaggggcgagcgcgagggagcccccctccggaacccctgcccacccccggagcgccggcagcggcggccccgcgaggatcggctccaggagatgatagaaagtgacacctcatccataatgtcaggaattattcgaaactcagggcaaaatcaccacccctctccacaggaatacagggtcaagcagggcaggcttcctggcagaggcggcattgggctgtcagcctgagaccctttcatgcctggcctgccctgtcctgccctgccctgccctgccccacctcctgcccccagctgtctgatcgccatggccctgaagaacagcaagacaggcagcctgcctgtgagcgagatctacagcttcatgaaggagcacttcccctacttcaagacggcccccgacgggtggaagaactcggtgcggcacaacctgtctctgaacaagtgcttcgagaaggtggagaacaagatgagcggctcctcccgcaagggctgcctgtgggctctgaacctggcccgcatcgacaagatggaggaggagatgcacaagtggaagaggaaggacctggctgccatccaccggagtatggccaaccctgaggagttggacaagctgatctccgaccggcctgaaagctgccggcgccccggcaaaccgggggaaccagaggcccccgtgctgactcacgccaccacagtggccgtggcgcatggctgcctggctgtctcccagctcccaccccagccactgatgaccctgtccctgcagtcagtccccctgcaccaccaggtccagccccaggcacatcttgctccagactctccagcaccagcccagaccccgccactgcacgccctgccggacctcagccccagcccgctcccccaccccgccatgggaagggctcctgtagacttcatcaacatcagcaccgacatgaacactgaggtggatgccctcgacccgagcatcatggacttcgctctgcaggggaacctgtgggaggagatgaaggatgagggattcagcttggacacactgggcgcctttgcagactccccgcttggctgtgacctgggggcctcaggcctaacccctgcctcgggtggcagcgaccagtccttcccagacttgcaggtgacgggtctctacacagcgtactccactccggacagtgtggctgcatcgggcaccagctcctcctcccagtacctgggtgcacaggggaacaagcctatagccctgctttgagctgtcagcctcacctgccctggaaccccggcacccggcttgggcagagaactgactagaacagggtgttcccagaaggcaggtccctcattgtccccgaagcctctcctggacctgtggcgaagttgccggctggacagggaagcggttcccctcagcagcccctctccttctcgtgcctccccctggagcttccggagcagtttctgggggctcttccaagtcagaagaatggaggaaggtggacaagcaacccagcatcccccgaccccttgacactcctccgaggcctgagccgcaatgcctgcccgtgttgagtgagacttctccatcctggatcctggctgcgtgacctcagtgacctgcaccccattttgggacaccttggtgcattaaggaaacaccctggggtgaaagcccttgaattcatcctcatgggaaatggctgagtggatcaaacctcagccgcagcctccgggggacaggcccagggcgggaaatggagccggagaagcttgagcctctctcttggacaggacaagctgaactctgaaatgggagccggtccaggtggccttcagccccacctttccgatagtctgttagaattttattagcgcagattcctgggccatgccgggtaccgtgaccttgtgtaaatttatttatatttattgtggcccatccaccccacttctgcaaacccatcccgaggcctctggaatgggactccttctccctccctacctcccagccatcctaactcctacaggccagagaatgacatctctaactggctcataatcccttggcagcctggggctactttttagaaccagcaagcactgttgatactgtgaaacatcccattttttccgtattagagaccagatatttttctacctgttcatgattcacatctcttcttgcatgtacctaagaggggcggtgccattgtttgggggcttggggggctttcaaaggggaaaatgcgatgggagagggaggaactggaggggggtgcttttgtactgggatttaagacacccctgatggaatgaaagccaactgaaccacgtaaagctcgaaccacgtggcaagtggtggacaaaacttcaacgcatgatatttattggcacttcctcacctccctttgccctgcagctgtttttatgcttctttttctctccttgctaattactgactccccaagtggcaagttccgcagatagctgggttagaagagagacaggggagtgagctagtcaaatgtgaaaaatgctctcccagcaaagctgagacaaaattggagaagctgcagcctcacgcaccatccccctctttccaccagatggatgttgacttggtgtctgggagttcccgaaccctagagccaggatgttctgtttaatcaacagctcagccagctgcctgggagttttggcattaagccccgccttgaagggcgagctttaagtttttcccagttctggaactttctaccgagtatccaccacccttagacacaatcccagtgctacccgtctgacctgcactgctcatctgctttgtgtaacatgacccctgataagatgttgaaactgttattcacaaagactccgtgtttgggcaacatcaagactgtaagtgtagaattgagcaactgtcttctatcaataaaggctgaatggc

SEQ ID NO: 11113 - DNA, 2398 bp, Homo sapiens
  source 1..2398: mol_type = unassigned DNA
ggcgggaccatggctgcgaagctgcgagcgcatcaggtggacgtggacccggacttcgcgccgcagagccggccgcgctcgtgtacctggcccctgccgcagcctgacttggccggcgacgaggacggagcgctgggcgcaggggtggccgagggcgccgaggactgcgggccggagcgccgggctacggccccggcgatggccccagcgccgcccctgggcgcggaggtcggaccgctgcggaaagcgaagagctctcggcggaacgcgtgggggaacctgtcctacgccgacctcatcaccaaagccatcgagagcgccccggacaagcggctcacgctctcgcagatctacgactggatggtccgttacgtgccctacttcaaggataaaggcgacagcaacagctcggccggctggaagaactccatccggcacaacctgtcgctgcacacccgtttcatccgcgtgcagaacgagggcaccggcaagagttcgtggtggatgctgaaccccgagggcggaaagacagggaagaccccgcggcgcagggccgtgtccatggacaacggggccaagttcctgcgcatcaagggcaaggcgagcaagaagaagcagctgcaggcgcccgagcgaagcccggacgacagctccccgagtgcgcccgccccggggccggtgcctgccgcagccaagtgggccgccagccccgcctcgcacgccagcgacgactacgaggcttgggccgacttccgcggcggcgggagacccctgctcggggaggcggccgagctggaggacgacgaggccctggaggccctggcgccatcatcgccgctcatgtacccaagccccgccagcgcgctgtcgccggcgctgggctcgcgctgtccgggtgagctgccccgcctggccgagctgggaggcccgctgggcctgcacggcggcggcggcgcggggctgcccgagggcctgctggacggcgcgcaggacgcgtacgggccgcgggcccgcgcccaggcccggcccggtgctgggtgcgccgggggagctggcgctggcgggcgcagccgccgcctaccccggcaaaggggcggccccgtacgcgccgcccgcgccctcgcgcagtgccttagcccaccccatcagccttatgacgctgcccggcgaggcgggcgccgcgggcctggcaccgccgggccacgccgccgccttcgggggcccgcccggcggcctcctgctggacgctctgccggggccctacgctgccgccgccgccgggccgctgggcgccgcgcccgaccgcttcccggccgacctggacctcgacatgttcagcgggagcctcgagtgcgacgtggagtccatcatcctcaacgacttcatggacagcgacgaaatggacttcaacttcgattcggccctgcctccgccgccgccgggcctggccggggccccgccccccaaccagagctgggtgccgggctgagggccgcctcccgcctccgggcgccccgtcccgtccccagggggcctctgtcttcccatcctgattcccgggtccctgcccccgactctagctccccaggaggcggccccagcccagctagggacccctctcggaggccggccgccggggaaggggagggaggggccggggcaccccactgctcctgcccacactcctgagatccacccccttctcctgggcaggaagcctgggagaggaggctgaattccaggctggctgggagtagggaggagcggggtgggccgcctggtgtggacggtggtcggggaagccaactaggagatgggccagggagcgtttacaaatcttcagtttcatttgcggaggcctagccgtgaccccgcgcccaccccaaacacggatctgattcccacttgacacactttcccactggtcttagtctcacccacccgaagccagcaaccctctgcggaaaactcacacctacctatatccatccaccctgagcagccctccacccccaaatcgccctccgacgaccgccacccccacagttcagtctccccctcccatccctgccggccctcgcttctcccctcccccgtcggagtcagtccctctcttcaaccgcccccaccccctagtactggtctcagcttctgcagcgggcctcagccccgtccacccccaaccccgacgcccctttctccgcgccagttctggcccttctcccatatttataagtgtccggccgggacgggcggtgggcgcggcgtccccggcgcgtatcgtaggcagtgtaccgtggccgtgccgtcagagtgtgcgtgtgcgtgtgtgccgtgtcgaggctgtgtagagtgcattgtacagcatattttcatgaataaaattgttttaaatatt

SEQ ID NO: 11114 - DNA, 7114 bp, Homo sapiens
  source 1..7114: mol_type = unassigned DNA
ggggggtgggcgccagcgccccggcgaacggcaaagagggagccgctcccgctcggggggccgctggagtgcccagcgggaacccgaaagtttgtaagaggaagagagcgcgcggcgagcgagcgagcgggccgggggcagcggcagcggcgccggggaccatggtgctgccggcgcctcctccgcgggcgtgaaggcggcgctcctactccctccccggactccgcggtgtcccagaagcttttgttgacaattccagtttccgaacaaaacatttcggcaatggtgagggcttcgatcccttctctgatttgctgtcagccatgaacggatggatgtgatgcctgctagccaaaaggcttccctctgtgtgttgcagtcctgtggcattatgcatgccccctcccagtgaccccaggctttttatggctgtgagacacgttaaaatttcaggggtaagacgtgaccttttgaggtgactataactgaagattgctttacagaagccaaaaaaggtttttgagtcatgatgcaagaatctgggactgagacaaaaagtaacggttcagccatccagaatgggtcgggcggcagcaaccacttactagagtgcggcggtcttcgggaggggcggtccaacggagagacgccggccgtggacatcggggcagctgacctcgcccacgcccagcagcagcagcaacaggcacttcaggtggcaagacagctccttcttcagcagcaacagcagcagcaagttagtggattaaaatctcccaagaggaatgacaaacaaccagctcttcaggttcccgtgtcagtggctatgatgacacctcaagttatcactccccagcaaatgcagcagatcctccagcaacaagtgctgagccctcagcagctccaggttctcctccagcagcagcaggccctcatgcttcaacagcagcagcttcaagagttttataaaaaacaacaggaacagttgcagcttcaacttttacaacaacaacatgctggaaaacagcctaaagagcaacagcaggtggctacccagcagttggcttttcagcagcagcttttacagatgcagcagttacagcagcagcacctcctgtctttgcagcgccaaggccttctgacaattcagcccgggcagcctgcccttccccttcaacctcttgctcaaggcatgattccaacagaactgcagcagctctggaaagaagtgacaagtgctcatactgcagaagaaaccacaggcaacaatcacagcagtttggatctgaccacgacatgtgtctcctcctctgcaccttccaagacctccttaataatgaacccacatgcctctaccaatggacagctctcagtccacactcccaaaagggaaagtttgtcccatgaggagcacccccatagccatcctctctatggacatggtgtatgcaagtggccaggctgtgaagcagtgtgcgaagatttccaatcatttctaaaacatctcaacagtgagcatgcgctggacgatagaagtacagcccaatgtagagtacaaatgcaggttgtacagcagttagagctacagcttgcaaaagacaaagaacgcctgcaagccatgatgacccacctgcatgtgaagtctacagaacccaaagccgcccctcagcccttgaatctggtatcaagtgtcactctctccaagtccgcatcggaggcttctccacagagcttacctcatactccaacgaccccaaccgcccccctgactcccgtcacccaaggcccctctgtcatcacaaccaccagcatgcacacggtgggacccatccgcaggcggtactcagacaaatacaacgtgcccatttcgtcagcagatattgcgcagaaccaagaattttataagaacgcagaagttagaccaccatttacatatgcatctttaattaggcaggccattctcgaatctccagaaaagcagctaacactaaatgagatctataactggttcacacgaatgtttgcttacttccgacgcaacgcggccacgtggaagaatgcagtgcgtcataatcttagtcttcacaagtgttttgtgcgagtagaaaacgttaaaggggcagtatggacagtggatgaagtagaattccaaaaacgaaggccacaaaagatcagtggtaacccttcccttattaaaaacatgcagagcagccacgcctactgcacacctctcaatgcagctttacaggcttcaatggctgagaatagtatacctctatacactaccgcttccatgggaaatcccactctgggcaacttagccagcgcaatacgggaagagctgaacggggcaatggagcataccaacagcaacgagagtgacagcagtccaggcagatctcctatgcaagccgtgcatcctgtacacgtcaaagaagagcccctcgatccagaggaagctgaagggcccctgtccttagtgacaacagccaaccacagtccagattttgaccatgacagagattacgaagatgaaccagtaaacgaggacatggagtgactatcggggcgggccaaccccgagaatgaagattggaaaaaggaaaaaaaaaaaaacacgtcaaaagttagcagtgaaattgttctccatttgttgtacagtctggaggattttcactacgttttgacaactctgaaatgtgttaactcttagtgccatcaagaaccccatttgggagtatttttgatttttctactttttgttgaaaaaaggaatttgtactctgtgcattggatggacttgtttggtacttgggattttcctctcttaaccgtcaacatcagtgttgtaaatttgctaaactgattcacttttagcagcagactttgaactgcagtcctgccaacgttggacactgaggacgcccgacagagcttgtgcacctaagctgcagaccaagcctttgcccagaatttaaggattccaatggacgacctatttgcacagtactgcatgttgattatcactgcctttactccttttttttttttttttttttttttttttttgcttccagttgggatggggaaggcctttgtgtgtgtattggggggaggggttaaaaaataattatcccaaactttttaatgtattgctttttttttttttttttttccttctactataccattttaagttctgacctcaggcctccatttgggccgatggcctcttggaggcttaaagttttctgtaccttgtgatgaatgttaataggtgtttttattatacaaagctgaatgtcatttctcgtttgtagctttctgtcactcattccatcttccttcagacatcaccacgtttctctaaagtcagaaaacattccgttttggtctttttcaaaaaggtcccaaatgctgcactctacacatgaaggccctctcacacagacgtgacgtcctgccagaaagagaatgaatgacagaaaaaaaaaagagagacaaactctaggaacaatgccgattcattccacgcagcagtattgggggtggttcgggggaggggtgtttcggattttctttttttcttttcttttctttttttttttttgcagcaaccattaataaatgccaccacattctaccagcacaaggaaacataggcagcactgaaaaaaaaaaaaaagctcatattaattagactgacaatatggccttggaaggctctcccttgtggaaccaagttgccatgggccttgggtgctctgcgataacgggtgtgggttggttttgtttgcaaaatggccaaaaaaaaaaaccggcttccccgagcagctgccctgaaagtaggggtggcggcggcggcgctgagtttatacattagttcagacctacttggtggcattaaactgtttgaatgcaaattcgatttcagattgaacttgttaagggagttaacgagggctgagttcagcaaatgctaaagtgttaatttcaaatatgcaaatttggtactgcagtttgttatgcaatattatatcaccaacccagtatcacaaaaactcatagaagatatcatgtaggccctgggctttgggggggtcccaaacatggtatgcagaaatgtgatggttacaggtcagtacaacctcagtccttagaacccctccacacttcagctctgcacccactttcctgtcatttatttatataggactgtagttttttttagttcgagagcctttcgaagcttaatttatattctttctttgtaccttttttctaaaattaccaaagatattacacaaaggtaaattatgttctctgttttatgctttatctgatgaagccaaatatcctcttattgttgatcaaaggaggcaaaagaatttagaggcaaatgacaagcgataggctattgcaacctgagaaagagaactgctccttcatcgtaaatttagaagaccaagtagataatggaaccaaagttgttacttttttctagtagttatttttcctttttctttttgtgtacctctacagagaccaaaactcattctcttaaagagattttatggggctactgcagataaaaataggacacaatattaaaggagctacagaaggaagggagtcccatctcaaaaaaaaaatgaatgtatgccactgcaattagagtatccaataaaggagacagtttagagtcaggacagaaaagcttccataattgaactagattacataatagtatttctagaaaaagagatatttttagattgtatgccacttttgtttaagaactgtgctgtgatcactgtattaattttggtttatcttggcatatatccttcagtttgtttttatttttaatttttcctttttttccgattaggctttggtcagcatttttcatttaaagaaaagtaacactcccatccactcataagcttggtacaaaaacttctctggcagttacttttgaagcttcactctgctttctgtataaagggcagtctgtggtcacgcaagactttaaaaaaaaaaaaaaaaaaaaaaaaaaaaaaaaaaaaaaaaacttttccaggcagcttcatgatgtgcaggcagtagccagacagggtcatgggaagggggccctgtgcttctaaactgagtggttgctggttagtttggtattcaaaagaggataaaaatctggtagattagttcattctcagcatgtgtagctagacatgagtaaagataacagcatgagaaactgttagtacgcatacctcagttcaaacctttagggaatgattaaaatttaaaaaaaaaacatttcactcagttgcacttagtcgtatgtcttgcatgcttagtctaaagactgtagcaaaaaaaaaaaaaaaagaaaaattagattttacatatctttgcaggtatcacagccttgcagaagaaccaactgaaaaaaaaattctcaggctttacagcaagcaaacttcactatgatttttacaattctgattctgtatcccctgggggttatcccagttgcttctttaggatggggtttattacgttgtacatatatcccgatgtgtctgtgtgaatctttgtcttttttgggggagggcagagggcggttctttttttagatattgttcctaaaaaggaataaatgcatacacctgtttgtcaaaacacctttgctttttgtgcaactgctttatattaacgatactaaaaaaaaatagctttggaaaaaaaactactgtatgtaacggaattgcagaatatgctgcacatgtattttatttagttatccttgctttaagaatattggatgacatttcctgacatgtgggagggagaaactccctaactttttttttctgcttttaaactgtaacatagttgaagatttcttttttctgttctcattgattggagcattttgtacaggttttgtgtgtgtgtgtgtgtgtgtgtgcgcgcgtgcgtgtgtgttaatctgttttttgatacattcctatcccttgtgtttatcctaccactgccttcctggctatcttaaacaagttcatacatttgaaaagaaaaaaaaatgttgtttaaaaaatgttttctcctgctgcagtaaatattttgcatgatgaaattccagggtcacacttttccaagtttatcagtgaagtagtgattaacaatggggagtgtcaaaactattgaacttttgtataaaaaaaaaaaaactttacaaggtgccaagatgtaaagaaaatctgttactttttttttctcaaagaaaagcatacattagggaggtagtcccgtgtgtcagacaaatgcactgtcaggaatgaggatccaacctacctgtccctagagtccgtcttgtaagatgagttaggctgccccttggaccagccacaaaatggaatatcaaggcttatgtacatacgtgaagagttaccaccagtcctgccacctttggacagctctaacaccatccccagcatccagtcagacctagtaaagaaaaccttggattcttaacccaagataggctgtaaatcactagcttttttttcctcatgaaaaaaaatagagttaaaaaatatttcctctcttttccatattccagctgaactccgtttccaaaggcacaaagaagagtgtgcttattcagattttgaatctttttggtaccttttggttaatgacatagcctcctgaaattctggatgtcttcaaagtcagttttgcttctttatcctgaaaatcagatttacaatgctgaaggcatttcttgggcccagtgtagctcacgcaatctctgctacccataagccttgatgaagatgatacagtccggactgtgagcatggtgcttcatgtatatgtgctgccagtaacaagaatttttttgttttgttttgttttgttttgataaggcataaaagaaactcattccttgacatcaactgtaattccatcattccatgtctgcggatacagacaataaaaaaaatgttgtgtagtcagtactaattactgacattataagcattctcaaatgcaataaaaatgctggttgttcacgctggtagtaaaagttgccacagcctaa

SEQ ID NO: 11115 - DNA, 6220 bp, Homo sapiens
  source 1..6220: mol_type = unassigned DNA
ggggggtgggcgccagcgccccggcgaacggcaaagagggagccgctcccgctcggggggccgctggagtgcccagcgggaacccgaaagtttgtaagaggaagagagcgcgcggcgagcgagcgagcgggccgggggcagcggcagcggcgccggggaccatggtgctgccggcgcctcctccgcgggcgtgaaggcggcgctcctactccctccccggactccgcggtgtcccagaagcttttgttgacaattccagtttccgaacaaaacatttcggcaatggtgagggcttcgatcccttctctgatttgctgtcagccatgaacggatggatgtgatgcctgctagccaaaaggcttccctctgtgtgttgcagtcctgtggcattatgcatgccccctcccagtgaccccaggctttttatggctgtgagacacgttaaaatttcaggggtaagacgtgaccttttgaggtgactataactgaagattgctttacagaagccaaaaaaggtttttgagtcatgatgcaagaatctgggactgagacaaaaagtaacggttcagccatccagaatgggtcgggcggcagcaaccacttactagagtgcggcggtcttcgggaggggcggtccaacggagagacgccggccgtggacatcggggcagctgacctcgcccacgcccagcagcagcagcaacaggcacttcaggtggcaagacagctccttcttcagcagcaacagcagcagcaagttagtggattaaaatctcccaagaggaatgacaaacaaccagctcttcaggttcccgtgtcagtggctatgatgacacctcaagttatcactccccagcaaatgcagcagatcctccagcaacaagtgctgagccctcagcagctccaggttctcctccagcagcagcaggccctcatgcttcaacagcagcagcttcaagagttttataaaaaacaacaggaacagttgcagcttcaacttttacaacaacaacatgctggaaaacagcctaaagagcaacagcaggtggctacccagcagttggcttttcagcagcagcttttacagatgcagcagttacagcagcagcacctcctgtctttgcagcgccaaggccttctgacaattcagcccgggcagcctgcccttccccttcaacctcttgctcaaggcatgattccaacagaactgcagcagctctggaaagaagtgacaagtgctcatactgcagaagaaaccacaggcaacaatcacagcagtttggatctgaccacgacatgtgtctcctcctctgcaccttccaagacctccttaataatgaacccacatgcctctaccaatggacagctctcagtccacactcccaaaagggaaagtttgtcccatgaggagcacccccatagccatcctctctatggacatggtgtatgcaagtggccaggctgtgaagcagtgtgcgaagatttccaatcatttctaaaacatctcaacagtgagcatgcgctggacgatagaagtacagcccaatgtagagtacaaatgcaggttgtacagcagttagagctacagcttgcaaaagacaaagaacgcctgcaagccatgatgacccacctgcatgtgaagtctacagaacccaaagccgcccctcagcccttgaatctggtatcaagtgtcactctctccaagtccgcatcggaggcttctccacagagcttacctcatactccaacgaccccaaccccccctgactcccgtcacccaaggcccctctgtcatcacaaccaccagcatgcacacggtgggacccatccgcaggcggtactcagacaaatacaacgtgcccatttcgtcagcagatattgcgcagaaccaagaattttataagaacgcagaagttagaccaccatttacatatgcatctttaattaggcaggccattctcgaatctccagaaaagcagctaacactaaatgagatctataactggttcacacgaatgtttgcttacttccgacgcaacgcggccacgtggaagaatgcagtgcgtcataatcttagtcttcacaagtgttttgtgcgagtagaaaacgttaaaggggcagtatggacagtggatgaagtagaattccaaaaacgaaggccacaaaagatcagtggtaacccttcccttattaaaaacatgcagagcagccacgcctactgcacacctctcaatgcagctttacaggcttcaatggctgagaatagtatacctctatacactaccgcttccatgggaaatcccactctgggcaacttagccagcgcaatacgggaagagctgaacggggcaatggagcataccaacagcaacgagagtgacagcagtccaggcagatctcctatgcaagccgtgcatcctgtacacgtcaaagaagagcccctcgatccagaggaagctgaagggcccctgtccttagtgacaacagccaaccacagtccagattttgaccatgacagagattacgaagatgaaccagtaaacgaggacatggagtgactatcggggcgggccaaccccgagaatgaagattggaaaaaggaaaaaaaaaaaaacacgtcaaaagttagcagtgaaattgttctccatttgttgtacagtctggaggattttcactacgttttgacaactctgaaatgtgttaactcttagtgccatcaagaaccccatttgggagtatttttgatttttctactttttgttgaaaaaaggaatttgtactctgtgcattggatggacttgtttggtacttgggattttcctctcttaaccgtcaacatcagtgttgtaaatttgctaaactgattcacttttagcagcagactttgaactgcagtcctgccaacgttggacactgaggacgcccgacagagcttgtgcacctaagctgcagaccaagcctttgcccagaatttaaggattccaatggacgacctatttgcacagtactgcatgttgattatcactgcctttactccttttttttttttttttttttttttttttttgcttccagttgggatggggaaggcctttgtgtgtgtattggggggaggggttaaaaaataattatcccaaactttttaatgtattgctttttttttttttttttttccttctactataccattttaagttctgacctcaggcctccatttgggccgatggcctcttggaggcttaaagttttctgtaccttgtgatgaatgttaataggtgtttttattatacaaagctgaatgtcatttctcgtttgtagctttctgtcactcattccatcttccttcagacatcaccacgtttctctaaagtcagaaaacattccgttttggtctttttcaaaaaggtcccaaatgctgcactctacacatgaaggccctctcacacagacgtgacgtcctgccagaaagagaatgaatgacagaaaaaaaaaagagagacaaactctaggaacaatgccgattcattccacgcagcagtattgggggtggttcgggggaggggtgtttcggattttctttttttcttttcttttctttttttttttttgcagcaaccattaataaatgccaccacattctaccagcacaaggaaacataggcagcactgaaaaaaaaaaaaaagctcatattaattagactgacaatatggccttggaaggctctcccttgtggaaccaagttgccatgggccttgggtgctctgcgataacgggtgtgggttggttttgtttgcaaaatggccaaaaaaaaaaaccggcttccccgagcagctgccctgaaagtaggggtggcggcggcggcgctgagtttatacattagttcagacctacttggtggcattaaactgtttgaatgcaaattcgatttcagattgaacttgttaagggagttaacgagggctgagttcagcaaatgctaaagtgttaatttcaaatatgcaaatttggtactgcagtttgttatgcaatattatatcaccaacccagtatcacaaaaactcatagaagatatcatgtaggccctgggctttgggggggtcccaaacatggtatgcagaaatgtgatggttacaggtcagtacaacctcagtccttagaacccctccacacttcagctctgcacccactttcctgtcatttatttatataggactgtagttttttttagttcgagagcctttcgaagcttaatttatattctttctttgtaccttttttctaaaattaccaaagatattacacaaaggtaaattatgttctctgttttatgctttatctgatgaagccaaatatcctcttattgttgatcaaaggaggcaaaagaatttagaggcaaatgacaagcgataggctattgcaacctgagaaagagaactgctccttcatcgtaaatttagaagaccaagtagataatggaaccaaagttgttacttttttctagtagttatttttcctttttctttttgtgtacctctacagagaccaaaactcattctcttaaagagattttatggggctactgcagataaaaataggacacaatattaaaggagctacagaaggaagggagtcccatctcaaaaaaaaaatgaatgtatgccactgcaattagagtatccaataaaggagacagtttagagtcaggacagaaaagcttccataattgaactagattacataatagtatttctagaaaaagagatatttttagattgtatgccacttttgtttaagaactgtgctgtgatcactgtattaattttggtttatcttggcatatatccttcagtttgtttttatttttaatttttcctttttttccgattaggctttggtcagcatttttcatttaaagaaaagtaacactcccatccactcataagcttggtacaaaaacttctctggcagttacttttgaagcttcactctgctttctgtataaagggcagtctgtggtcacgcaagactttaaaaaaaaaaaaaaaaaaaaaaaaaaaaaaaaaaaaaaaaacttttccaggcagcttcatgatgtgcaggcagtagccagacagggtcatgggaagggggccctgtgcttctaaactgagtggttgctggttagtttggtattcaaaagaggataaaaatctggtagattagttcattctcagcatgtgtagctagacatgagtaaagataacagcatgagaaactgttagtacgcatacctcagttcaaacctttagggaatgattaaaatttaaaaaaaaaacatttcactcagttgcacttagtcgtatgtcttgcatgcttagtctaaagactgtagcaaaaaaaaaaaaaaaagaaaaattagattttacatatctttgcaggtatcacagccttgcagaagaaccaactgaaaaaaaaattctcaggctttacagcaagcaaacttcactatgatttttacaattctgattctgtatcccctgggggttatcccagttgcttctttaggatggggtttattacgttgtacatatatcccgatgtgtctgtgtgaatctttgtcttttttgggggagggcagagggcggttctttttttagatattgttcctaaaaaggaataaatgcatacacctgtttgtcaaaacacctttgctttttgtgcaactgctttatattaacgatactaaaaaaaaatagctttggaaaaaaaactactgtatgtaacggaattgcagaatatgctgcacatgtattttatttagttatccttgctttaagaatattggatgacatttcctgacatgtgggagggagaaactccctaactttttttttctgcttttaaactgtaacatagttgaagatttcttttttctgttctcattgattggagcattttgtacaggttttgtgtgtgtgtgtgtgtgtgtgtgcgcgcgtgcgtgtgtgttaatctgttttttgatacattcctatcccttgtgtttatcctaccactgccttcctggctatcttaaacaagttcatacatttgaaaagaaaaaaaaatgttgtttaaaaaatgttttctcctgctgcagtaaatattttgcatgatgaaattccagggtcacacttttccaagtttatcagtgaagtagtgattaacaatggggagtgtcaaaactattgaacttttgta

SEQ ID NO: 11116 - DNA, 2032 bp, Homo sapiens
  source 1..2032: mol_type = unassigned DNA
ggggggtgggcgccagcgccccggcgaacggcaaagagggagccgctcccgctcggggggccgctggagtgcccagcgggaacccgaaagtttgtaagaggaagagagcgcgcggcgagcgagcgagcgggccgggggcagcggcagcggcgccggggaccatggtgctgccggcgcctcctccgcgggcgtgaaggcggcgctcctactccctccccggactccgcggtgtcccagaagcttttgttgacaattccagtttccgaacaaaacatttcggcaatggtgagggcttcgatcccttctctgatttgctgtcagccatgaacggatggatgtgatgcctgctagccaaaaggcttccctctgtgtgttgcagtcctgtggcattatgcatgccccctcccagtgaccccaggctttttatggctgtgagacacgttaaaatttcaggggtaagacgtgaccttttgaggtgactataactgaagattgctttacagaagccaaaaaaggtttttgagtcatgatgcaagaatctgggactgagacaaaaagtaacggttcagccatccagaatgggtcgggcggcagcaaccacttactagagtgcggcggtcttcgggaggggcggtccaacggagagacgccggccgtggacatcggggcagctgacctcgcccacgcccagcagcagcagcaacaggcacttcaggtggcaagacagctccttcttcagcagcaacagcagcagcaagttagtggattaaaatctcccaagaggaatgacaaacaaccagctcttcaggttcccgtgtcagtggctatgatgacacctcaagttatcactccccagcaaatgcagcagatcctccagcaacaagtgctgagccctcagcagctccaggttctcctccagcagcagcaggccctcatgcttcaacagcagcagcttcaagagttttataaaaaacaacaggaacagttgcagcttcaacttttacaacaacaacatgctggaaaacagcctaaagagcaacagcaggtggctacccagcagttggcttttcagcagcagcttttacagatgcagcagttacagcagcagcacctcctgtctttgcagcgccaaggccttctgacaattcagcccgggcagcctgcccttccccttcaacctcttgctcaaggcatgattccaacagaactgcagcagctctggaaagaagtgacaagtgctcatactgcagaagaaaccacaggcaacaatcacagcagtttggatctgaccacgacatgtgtctcctcctctgcaccttccaagacctccttaataatgaacccacatgcctctaccaatggacagctctcagtccacactcccaaaagggaaagtttgtcccatgaggagcacccccatagccatcctctctatggacatggtgtatgcaagtggccaggctgtgaagcagtgtgcgaagatttccaatcatttctaaaacatctcaacagtgagcatgcgctggacgatagaagtacagcccaatgtagagtacaaatgcaggttgtacagcagttagagctacagcttgcaaaagacaaagaacgcctgcaagccatgatgacccacctgcatgtgaagtctacagaacccaaagccgcccctcagcccttgaatctggtatcaagtgtcactctctccaagtccgcatcggaggcttctccacagagcttacctcatactccaacgaccccaaccgcccccctgactcccgtcacccaaggcccctctgtcatcacaaccaccagcatgcacacggtgggacccatccgcaggcggtactcagacaaatacaacgtgcccatttcgtcagcagatattgcgcagaaccaagaattttataagaacgcagaagttagaccaccatttacatatgcatctttaattaggcaggccattctcgaatctccagaaaaaaaaaaaaaagagagacaaactctaggaacaatgccgattcattccacgcagcag

SEQ ID NO: 11117 - DNA, 5132 bp, Homo sapiens
  source 1..5132: mol_type = unassigned DNA
atgatgacacctcaagttatcactccccagcaaatgcagcagatcctccagcaacaagtgctgagccctcagcagctccaggttctcctccagcagcagcaggccctcatgcttcaactgcagcagctctggaaagaagtgacaagtgctcatactgcagaagaaaccacaggcaacaatcacagcagtttggatctgaccacgacatgtgtctcctcctctgcaccttccaagacctccttaataatgaacccacatgcctctaccaatggacagctctcagtccacactcccaaaagggaaagtttgtcccatgaggagcacccccatagccatcctctctatggacatggtgtatgcaagtggccaggctgtgaagcagtgtgcgaagatttccaatcatttctaaaacatctcaacagtgagcatgcgctggacgatagaagtacagcccaatgtagagtacaaatgcaggttgtacagcagttagagctacagcttgcaaaagacaaagaacgcctgcaagccatgatgacccacctgcatgtgaagtctacagaacccaaagccgcccctcagcccttgaatctggtatcaagtgtcactctctccaagtccgcatcggaggcttctccacagagcttacctcatactccaacgaccccaaccgcccccctgactcccgtcacccaaggcccctctgtcatcacaaccaccagcatgcacacggtgggacccatccgcaggcggtactcagacaaatacaacgtgcccatttcgtcagcagatattgcgcagaaccaagaattttataagaacgcagaagttagaccaccatttacatatgcatctttaattaggcaggccattctcgaatctccagaaaagcagctaacactaaatgagatctataactggttcacacgaatgtttgcttacttccgacgcaacgcggccacgtggaagaatgcagtgcgtcataatcttagtcttcacaagtgttttgtgcgagtagaaaacgttaaaggggcagtatggacagtggatgaagtagaattccaaaaacgaaggccacaaaagatcagtggtaacccttcccttattaaaaacatgcagagcagccacgcctactgcacacctctcaatgcagctttacaggcttcaatggctgagaatagtatacctctatacactaccgcttccatgggaaatcccactctgggcaacttagccagcgcaatacgggaagagctgaacggggcaatggagcataccaacagcaacgagagtgacagcagtccaggcagatctcctatgcaagccgtgcatcctgtacacgtcaaagaagagcccctcgatccagaggaagctgaagggcccctgtccttagtgacaacagccaaccacagtccagattttgaccatgacagagattacgaagatgaaccagtaaacgaggacatggagtgactatcggggcgggccaaccccgagaatgaagattggaaaaaggaaaaaaaaaaaaacacgtcaaaagttagcagtgaaattgttctccatttgttgtacagtctggaggattttcactacgttttgacaactctgaaatgtgttaactcttagtgccatcaagaaccccatttgggagtatttttgatttttctactttttgttgaaaaaaggaatttgtactctgtgcattggatggacttgtttggtacttgggattttcctctcttaaccgtcaacatcagtgttgtaaatttgctaaactgattcacttttagcagcagactttgaactgcagtcctgccaacgttggacactgaggacgcccgacagagcttgtgcacctaagctgcagaccaagcctttgcccagaatttaaggattccaatggacgacctatttgcacagtactgcatgttgattatcactgcctttactccttttttttttttttttttttttttttttttgcttccagttgggatggggaaggcctttgtgtgtgtattggggggaggggttaaaaaataattatcccaaactttttaatgtattgctttttttttttttttttttccttctactataccattttaagttctgacctcaggcctccatttgggccgatggcctcttggaggcttaaagttttctgtaccttgtgatgaatgttaataggtgtttttattatacaaagctgaatgtcatttctcgtttgtagctttctgtcactcattccatcttccttcagacatcaccacgtttctctaaagtcagaaaacattccgttttggtctttttcaaaaaggtcccaaatgctgcactctacacatgaaggccctctcacacagacgtgacgtcctgccagaaagagaatgaatgacagaaaaaaaaaagagagacaaactctaggaacaatgccgattcattccacgcagcagtattgggggtggttcgggggaggggtgtttcggattttctttttttcttttcttttctttttttttttttgcagcaaccattaataaatgccaccacattctaccagcacaaggaaacataggcagcactgaaaaaaaaaaaaaagctcatattaattagactgacaatatggccttggaaggctctcccttgtggaaccaagttgccatgggccttgggtgctctgcgataacgggtgtgggttggttttgtttgcaaaatggccaaaaaaaaaaaccggcttccccgagcagctgccctgaaagtaggggtggcggcggcggcgctgagtttatacattagttcagacctacttggtggcattaaactgtttgaatgcaaattcgatttcagattgaacttgttaagggagttaacgagggctgagttcagcaaatgctaaagtgttaatttcaaatatgcaaatttggtactgcagtttgttatgcaatattatatcaccaacccagtatcacaaaaactcatagaagatatcatgtaggccctgggctttgggggggtcccaaacatggtatgcagaaatgtgatggttacaggtcagtacaacctcagtccttagaacccctccacacttcagctctgcacccactttcctgtcatttatttatataggactgtagttttttttagttcgagagcctttcgaagcttaatttatattctttctttgtaccttttttctaaaattaccaaagatattacacaaaggtaaattatgttctctgttttatgctttatctgatgaagccaaatatcctcttattgttgatcaaaggaggcaaaagaatttagaggcaaatgacaagcgataggctattgcaacctgagaaagagaactgctccttcatcgtaaatttagaagaccaagtagataatggaaccaaagttgttacttttttctagtagttatttttcctttttctttttgtgtacctctacagagaccaaaactcattctcttaaagagattttatggggctactgcagataaaaataggacacaatattaaaggagctacagaaggaagggagtcccatctcaaaaaaaaaatgaatgtatgccactgcaattagagtatccaataaaggagacagtttagagtcaggacagaaaagcttccataattgaactagattacataatagtatttctagaaaaagagatatttttagattgtatgccacttttgtttaagaactgtgctgtgatcactgtattaattttggtttatcttggcatatatccttcagtttgtttttatttttaatttttcctttttttccgattaggctttggtcagcatttttcatttaaagaaaagtaacactcccatccactcataagcttggtacaaaaacttctctggcagttacttttgaagcttcactctgctttctgtataaagggcagtctgtggtcacgcaagactttaaaaaaaaaaaaaaaaaaaaaaaaaaaaaaaaaaaaaaaaacttttccaggcagcttcatgatgtgcaggcagtagccagacagggtcatgggaagggggccctgtgcttctaaactgagtggttgctggttagtttggtattcaaaagaggataaaaatctggtagattagttcattctcagcatgtgtagctagacatgagtaaagataacagcatgagaaactgttagtacgcatacctcagttcaaacctttagggaatgattaaaatttaaaaaaaaaacatttcactcagttgcacttagtcgtatgtcttgcatgcttagtctaaagactgtagcaaaaaaaaaaaaaaaagaaaaattagattttacatatctttgcaggtatcacagccttgcagaagaaccaactgaaaaaaaaattctcaggctttacagcaagcaaacttcactatgatttttacaattctgattctgtatcccctgggggttatcccagttgcttctttaggatggggtttattacgttgtacatatatcccgatgtgtctgtgtgaatctttgtcttttttgggggagggcagagggcggttctttttttagatattgttcctaaaaaggaataaatgcatacacctgtttgtcaaaacacctttgctttttgtgcaactgctttatattaacgatactaaaaaaaaatagctttggaaaaaaaactactgtatgtaacggaattgcagaatatgctgcacatgtattttatttagttatccttgctttaagaatattggatgacatttcctgacatgtgggagggagaaactccctaactttttttttctgcttttaaactgtaacatagttgaagatttcttttttctgttctcattgattggagcattttgtacaggttttgtgtgtgtgtgtgtgtgtgtgtgcgcgcgtgcgtgtgtgttaatctgttttttgatacattcctatcccttgtgtttatcctaccactgccttcctggctatcttaaacaagttcatacatttgaaaagaaaaaaaaatgttgtttaaaaaatgttttctcctgctgcagtaaatattttgcatgatgaaattccagggtcacacttttccaagtttatcagtgaagtagtgattaacaatggggagtgtcaaaactattgaacttttgta

SEQ ID NO: 11118 - DNA, 4967 bp, Homo sapiens
  source 1..4967: mol_type = unassigned DNA
atcacagcttggtgctggggctcagcatggccaggtggctaaccagggcttggtgtcaactacatttgggatgatgacacttggaggacacagagccactgtgcagcaggagtcgccactgctaacagccagagtgtcccagaagcttttgttgacaattccagtttccgaacaaaacatttcggcaatggtgagggcttcgatcccttctctgatttgctgtcagccatgaacggatggatgtgatgcctgctagccaaaaggcttccctctgtgtgttgcagtcctgtggcattatgcatgccccctcccagtgaccccaggctttttatggctgtgagacacgttaaaatttcaggggtaagacgtgaccttttgaggtgactataactgaagattgctttacagaagccaaaaaaggtttttgagtcatgatgcaagaatctgggactgagacaaaaagtaacggttcagccatccagaatgggtcgggcggcagcaaccacttactagagtgcggcggtcttcgggaggggcggtccaacggagagacgccggccgtggacatcggggcagctgacctcgcccacgcccagcagcagcagcaacaggcacttcaggtggcaagacagctccttcttcagcagcaacagcagcagcaagttagtggattaaaatctcccaagaggaatgacaaacaaccagctcttcaggttcccgtgtcagtggctatgatgacacctcaagttatcactccccagcaaatgcagcagatcctccagcaacaagtgctgagccctcagcagctccaggttctcctccagcagcagcaggccctcatgcttcaacagcagcagcttcaagagttttataaaaaacaacaggaacagttgcagcttcaacttttacaacaacaacatgctggaaaacagcctaaagagcaacagcaggtggctacccagcagttggcttttcagcagcagcttttacagatgcagcagttacagcagcagcacctcctgtctttgcagcgccaaggccttctgacaattcagcccgggcagcctgcccttccccttcaacctcttgctcaaggcatgattccaacagaactgcagcagctctggaaagaagtgacaagtgctcatactgcagaagaaaccacaggcaacaatcacagcagtttggatctgaccacgacatgtgtctcctcctctgcaccttccaagacctccttaataatgaacccacatgcctctaccaatggacagctctcagtccacactcccaaaagggaaagtttgtcccatgaggagcacccccatagccatcctctctatggacatggtgtatgcaagtggccaggctgtgaagcagtgtgcgaagatttccaatcatttctaaaacatctcaacagtgagcatgcgctggacgatagaagtacagcccaatgtagagtacaaatgcaggttgtacagcagttagagctacagcttgcaaaagacaaagaacgcctgcaagccatgatgacccacctgcatgtgaagtctacagaacccaaagccgcccctcagcccttgaatctggtatcaagtgtcactctctccaagtccgcatcggaggcttctccacagagcttacctcatactccaacgaccccaaccgcccccctgactcccgtcacccaaggcccctctgtcatcacaaccaccagcatgcacacggtgggacccatccgcaggcggtactcagacaaatacaacgtgcccatttcgtcagcagatattgcgcagaaccaagaattttataagaacgcagaagttagaccaccatttacatatgcatctttaattaggcaggccattctcgaatctccagaaaagcagctaacactaaatgagatctataactggttcacacgaatgtttgcttacttccgacgcaacgcggccacgtggaagaatgcagtgcgtcataatcttagtcttcacaagtgttttgtgcgagtagaaaacgttaaaggggcagtatggacagtggatgaagtagaattccaaaaacgaaggccacaaaagatcagtggtaacccttcccttattaaaaacatgcagagcagccacgcctactgcacacctctcaatgcagctttacaggcttcaatggctgagaatagtatacctctatacactaccgcttccatgggaaatcccactctgggcaacttagccagcgcaatacgggaagagctgaacggggcaatggagcataccaacagcaacgagagtgacagcagtccaggcagatctcctatgcaagccgtgcatcctgtacacgtcaaagaagagcccctcgatccagaggaagctgaagggcccctgtccttagtgacaacagccaaccacagtccagattttgaccatgacagagattacgaagatgaaccagtaaacgaggacatggagtgactatcggggcgggccaaccccgagaatgaagattggaaaaaggaaaaaaaaaaaaacacgtcaaaagttagcagtgaaattgttctccatttgttgtacagtctggaggattttcactacgttttgacaactctgaaatgtgttaactcttagtgccatcaagaaccccatttgggagtatttttgatttttctactttttgttgaaaaaaggaatttgtactctgtgcattggatggacttgtttggtacttgggattttcctctcttaaccgtcaacatcagtgttgtaaatttgctaaactgattcacttttagcagcagactttgaactgcagtcctgccaacgttggacactgaggacgcccgacagagcttgtgcacctaagctgcagaccaagcctttgcccagaatttaaggattccaatggacgacctatttgcacagtactgcatgttgattatcactgcctttactccttttttttttttttttttttttttttttttgcttccagttgggatggggaaggcctttgtgtgtgtattggggggaggggttaaaaaataattatcccaaactttttaatgtattgctttttttttttttttttttccttctactataccattttaagttctgacctcaggcctccatttgggccgatggcctcttggaggcttaaagttttctgtaccttgtgatgaatgttaataggtgtttttattatacaaagctgaatgtcatttctcgtttgtagctttctgtcactcattccatcttccttcagacatcaccacgtttctctaaagtcagaaaacattccgttttggtctttttcaaaaaggtcccaaatgctgcactctacacatgaaggccctctcacacagacgtgacgtcctgccagaaagagaatgaatgacagaaaaaaaaaagagagacaaactctaggaacaatgccgattcattccacgcagcagtattgggggtggttcgggggaggggtgtttcggattttctttttttcttttcttttctttttttttttttgcagcaaccattaataaatgccaccacattctaccagcacaaggaaacataggcagcactgaaaaaaaaaaaaaagctcatattaattagactgacaatatggccttggaaggctctcccttgtggaaccaagttgccatgggccttgggtgctctgcgataacgggtgtgggttggttttgtttgcaaaatggccaaaaaaaaaaaccggcttccccgagcagctgccctgaaagtaggggtggcggcggcggcgctgagtttatacattagttcagacctacttggtggcattaaactgtttgaatgcaaattcgatttcagattgaacttgttaagggagttaacgagggctgagttcagcaaatgctaaagtgttaatttcaaatatgcaaatttggtactgcagtttgttatgcaatattatatcaccaacccagtatcacaaaaactcatagaagatatcatgtaggccctgggctttgggggggtcccaaacatggtatgcagaaatgtgatggttacaggtcagtacaacctcagtccttagaacccctccacacttcagctctgcacccactttcctgtcatttatttatataggactgtagttttttttagttcgagagcctttcgaagcttaatttatattctttctttgtaccttttttctaaaattaccaaagatattacacaaaggtaaattatgttctctgttttatgctttatctgatgaagccaaatatcctcttattgttgatcaaaggaggcaaaagaatttagaggcaaatgacaagcgataggctattgcaacctgagaaagagaactgctccttcatcgtaaatttagaagaccaagtagataatggaaccaaagttgttacttttttctagtagttatttttcctttttctttttgtgtacctctacagagaccaaaactcattctcttaaagagattttatggggctactgcagataaaaataggacacaatattaaaggagctacagaaggaagggagtcccatctcaaaaaaaaaatgaatgtatgccactgcaattagagtatccaataaaggagacagtttagagtcaggacagaaaagcttccataattgaactagattacataatagtatttctagaaaaagagatatttttagattgtatgccacttttgtttaagaactgtgctgtgatcactgtattaattttggtttatcttggcatatatccttcagtttgtttttatttttaatttttcctttttttccgattaggctttggtcagcatttttcatttaaagaaaagtaacactcccatccactcataagcttggtacaaaaacttctctggcagttacttttgaagcttcactctgctttctgtataaagggcagtctgtggtcacgcaagactttaaaaaaaaaaaaaaaaaaaaaaaaaaaaa

SEQ ID NO: 11119 - DNA, 1996 bp, Homo sapiens
  source 1..1996: mol_type = unassigned DNA
agtctagagacttagaagcatttattaacagtgaggctgctgaaggtttttaataacaaaattacaaatactctatctaattggtaagacgtgaccttttgaggtgactataactgaagattgctttacagaagccaaaaaaggtttttgagtcatgatgcaagaatctgggactgagacaaaaagtaacggttcagccatccagaatgggtcgggcggcagcaaccacttactagagtgcggcggtcttcgggaggggcggtccaacggagagacgccggccgtggacatcggggcagctgacctcgcccacgcccagcagcagcagcaacaggcacttcaggtggcaagacagctccttcttcagcagcaacagcagcagcaagttagtggattaaaatctcccaagaggaatgacaaacaaccagctcttcagcaacagcaggtggctacccagcagttggcttttcagcagcagcttttacagatgcagcagttacagcagcagcacctcctgtctttgcagcgccaaggccttctgacaattcagcccgggcagcctgcccttccccttcaacctcttgctcaaggcatgattccaacagaactgcagcagctctggaaagaagtgacaagtgctcatactgcagaagaaaccacaggcaacaatcacagcagtttggatctgaccacgacatgtgtctcctcctctgcaccttccaagacctccttaataatgaacccacatgcctctaccaatggacagctctcagtccacactcccaaaagggaaagtttgtcccatgaggagcacccccatagccatcctctctatggacatggtgtatgcaagtggccaggctgtgaagcagtgtgcgaagatttccaatcatttctaaaacatctcaacagtgagcatgcgctggacgatagaagtacagcccaatgtagagtacaaatgcaggttgtacagcagttagagctacagcttgcaaaagacaaagaacgcctgcaagccatgatgacccacctgcatgtgaagtctacagaacccaaagccgcccctcagcccttgaatctggtatcaagtgtcactctctccaagtccgcatcggaggcttctccacagagcttacctcatactccaacgaccccaaccgcccccctgactcccgtcacccaaggcccctctgtcatcacaaccaccagcatgcacacggtgggacccatccgcaggcggtactcagacaaatacaacgtgcccatttcgtcagcagatattgcgcagaaccaagaattttataagaacgcagaagttagaccaccatttacatatgcatctttaattaggcaggccattctcgaatctccagaaaagcagctaacactaaatgagatctataactggttcacacgaatgtttgcttacttccgacgcaacgcggccacgtggaagaatgcagtgcgtcataatcttagtcttcacaagtgttttgtgcgagtagaaaacgttaaaggggcagtatggacagtggatgaagtagaattccaaaaacgaaggccacaaaagatcagtggtaacccttcccttattaaaaacatgcagagcagccacgcctactgcacacctctcaatgcagctttacaggcttcaatggctgagaatagtatacctctatacactaccgcttccatgggaaatcccactctgggcaacttagccagcgcaatacgggaagagctgaacggggcaatggagcataccaacagcaacgagagtgacagcagtccaggcagatctcctatgcaagccgtgcatcctgtacacgtcaaagaagagcccctcgatccagaggaagctgaagggcccctgtccttagtgacaacagccaaccacagtccagattttgaccatgacagagattacgaagatgaaccagtaaacgaggacatggagtgactatcggggcgggccaaccccgagaatgaagattgg

SEQ ID NO: 11120 - DNA, 795 bp, Homo sapiens
  source 1..795: mol_type = unassigned DNA
gtgcagtccgcctgcacgccgaggccgccggaccccacgcccggcccgcgcgggcgccccgagcccggctccgcgcgcctggcggctacatggagagtgtcaggttcccgtgtcagtggctatgatgacacctcaagttatcactccccagcaaatgcagcagatcctccagcaacaagtgctgagccctcagcagctccaggttctcctccagcagcagcaggccctcatgcttcaacagcagcagcttcaagagttttataaaaaacaacaggaacagttgcagcttcaacttttacaacaacaacatgctggaaaacagcctaaagagcaacagcaggtggctacccagcagttggcttttcagcagcagcttttacagatgcagcagttacagcagcagcacctcctgtctttgcagcgccaaggccttctgacaattcagcccgggcagcctgcccttccccttcaacctcttgctcaaggcatgattccaacagaactgcagcagctctggaaagaagtgacaagtgctcatactgcagaagaaaccacaggcaacaatcacagcagtttggatctgaccacgacatgtgtctcctcctctgcaccttccaagacctccttaataatgaacccacatgcctctaccaatggacagctctcagtccacactcccaaaagggaaagtttgtcccatgaggagcacccccatagccatcctctctatggacatggtgtatgcaagtggccaggctgtgaagcagtgtgcgaagatttccaatcatttctaaa

SEQ ID NO: 11121 - DNA, 2250 bp, Homo sapiens
  source 1..2250: mol_type = unassigned DNA
tgcaactttgaaaattacctgcaagctccaactgatctttcaactttgaaagtgaagaattacttgaggaattcttgtggtttctttgtcatttagtgagagcccagccagctactgtggaggcaaacctccctgaggttgcctacaaagggcaatgttccagtgtgttttctcttcgagtgtgcttcagccgcacagtacttcctgtttattcaaacatcttttttaccactcggcaacccccgcttcgcagaaacagccagaacccatctacagcaagaagacggaaatccaaaggcagacagtacgggctcccttcgccaaactcttcattttctctgcacttcaggtggcaagacagctccttcttcagcagcaacagcagcagcaagttagtggattaaaatctcccaagaggaatgacaaacaaccagctcttcaggttcccgtgtcagtggctatgatgacacctcaagttatcactccccagcaaatgcagcagatcctccagcaacaagtgctgagccctcagcagctccaggttctcctccagcagcagcaggccctcatgcttcaacagcagcagcttcaagagttttataaaaaacaacaggaacagttgcagcttcaacttttacaacaacaacatgctggaaaacagcctaaagagcaacagcaggtggctacccagcagttggcttttcagcagcagcttttacagatgcagcagttacagcagcagcacctcctgtctttgcagcgccaaggccttctgacaattcagcccgggcagcctgcccttccccttcaacctcttgctcaaggcatgattccaacagaactgcagcagctctggaaagaagtgacaagtgctcatactgcagaagaaaccacaggcaacaatcacagcagtttggatctgaccacgacatgtgtctcctcctctgcaccttccaagacctccttaataatgaacccacatgcctctaccaatggacagctctcagtccacactcccaaaagggaaagtttgtcccatgaggagcacccccatagccatcctctctatggacatggtgtatgcaagtggccaggctgtgaagcagtgtgcgaagatttccaatcatttctaaaacatctcaacagtgagcatgcgctggacgatagaagtacagcccaatgtagagtacaaatgcaggttgtacagcagttagagctacagcttgcaaaagacaaagaacgcctgcaagccatgatgacccacctgcatgtgaagtctacagaacccaaagccgcccctcagcccttgaatctggtatcaagtgtcactctctccaagtccgcatcggaggcttctccacagagcttacctcatactccaacgaccccaaccgcccccctgactcccgtcacccaaggcccctctgtcatcacaaccaccagcatgcacacggtgggacccatccgcaggcggtactcagacaaatacaacgtgcccatttcgtcagcagatattgcgcagaaccaagaattttataagaacgcagaagttagaccaccatttacatatgcatctttaattaggcaggccattctcgaatctccagaaaagcagctaacactaaatgagatctataactggttcacacgaatgtttgcttacttccgacgcaacgcggccacgtggaagaatgcagtgcgtcataatcttagtcttcacaagtgttttgtgcgagtagaaaacgttaaaggggcagtatggacagtggatgaagtagaattccaaaaacgaaggccacaaaagatcagtggtaacccttcccttattaaaaacatgcagagcagccacgcctactgcacacctctcaatgcagctttacaggcttcaatggctgagaatagtatacctctatacactaccgcttccatgggaaatcccactctgggcaacttagccagcgcaatacgggaagagctgaacggggcaatggagcataccaacagcaacgagagtgacagcagtccaggcagatctcctatgcaagccgtgcatcctgtacacgtcaaagaagagcccctcgatccagaggaagctgaagggcccctgtccttagtgacaacagccaaccacagtccagattttgaccatgacagagattacgaagatgaaccagtaaacgaggacatggagtgactatcggggcgggccaaccccgagaatgaagattggaaaaaggaaaaaaaaaaaaa

SEQ ID NO: 11122 - DNA, 530 bp, Homo sapiens
  source 1..530: mol_type = unassigned DNA
gcttattgagagtagcttttgttgttgctattgttgtataaataagaaaggaatttaaagaattatttcttagcaaacgtgtggcagatgctttcttcggcagctgtcgttctagaggggaagtcgcctggttcagcgacgaggttcccgtgtcagtggctatgatgacacctcaagttatcactccccagcaaatgcagcagatcctccagcaacaagtgctgagccctcagcagctccaggttctcctccagcagcagcaggccctcatgcttcaacagcagcagcttcaagagttttataaaaaacaacaggaacagttgcagcttcaacttttacaacaacaacatgctggaaaacagcctaaagagcaacagcaggtggctacccagcagttggcttttcagcagcagcttttacagatgcagcagttacagcagcagcacctcctgtctttgcagcgccaaggccttctgacaattcagcccgggcagcctgcccttccccttcaacctcttgctcaaggtatg

SEQ ID NO: 11123 - DNA, 2400 bp, Homo sapiens
  source 1..2400: mol_type = unassigned DNA
agacaataagaaacaaacggtacaactccacaaaaggcttcccggaaaataagtgtcaaataaatcctacggaactctcgcttctgccactgagctctgtatatgcaaacctgtttttatgccatcgcttccccaggctgagctgcgtttgtttggaaatgtaagccactgccttttctttttttcttttttccttttttttttttcccccctcacttcatctgagggctctggattaattccttgagacatatctttgcatacatatctcatgagttatgtttcctggagccttttactaggaacattaaggtttttgagtcatgatgcaagaatctgggactgagacaaaaagtaacggttcagccatccagaatgggtcgggcggcagcaaccacttactagagtgcggcggtcttcgggaggggcggtccaacggagagacgccggccgtggacatcggggcagctgacctcgcccacgcccagcagcagcagcaacaggcacttcaggtggcaagacagctccttcttcagcagcaacagcagcagcaagttagtggattaaaatctcccaagaggaatgacaaacaaccagctcttcaggttcccgtgtcagtggctatgatgacacctcaagttatcactccccagcaaatgcagcagatcctccagcaacaagtgctgagccctcagcagctccaggttctcctccagcagcagcaggccctcatgcttcaacagcagcagcttcaagagttttataaaaaacaacaggaacagttgcagcttcaacttttacaacaacaacatgctggaaaacagcctaaagagcaacagcaggtggctacccagcagttggcttttcagcagcagcttttacagatgcagcagttacagcagcagcacctcctgtctttgcagcgccaaggccttctgacaattcagcccgggcagcctgcccttccccttcaacctcttgctcaaggcatgattccaacagaactgcagcagctctggaaagaagtgacaagtgctcatactgcagaagaaaccacaggcaacaatcacagcagtttggatctgaccacgacatgtgtctcctcctctgcaccttccaagacctccttaataatgaacccacatgcctctaccaatggacagctctcagtccacactcccaaaagggaaagtttgtcccatgaggagcacccccatagccatcctctctatggacatggtgtatgcaagtggccaggctgtgaagcagtgtgcgaagatttccaatcatttctaaaacatctcaacagtgagcatgcgctggacgatagaagtacagcccaatgtagagtacaaatgcaggttgtacagcagttagagctacagcttgcaaaagacaaagaacgcctgcaagccatgatgacccacctgcatgtgaagtctacagaacccaaagccgcccctcagcccttgaatctggtatcaagtgtcactctctccaagtccgcatcggaggcttctccacagagcttacctcatactccaacgaccccaaccgcccccctgactcccgtcacccaaggcccctctgtcatcacaaccaccagcatgcacacggtgggacccatccgcaggcggtactcagacaaatacaacgtgcccatttcgtcagcagatattgcgcagaaccaagaattttataagaacgcagaagttagaccaccatttacatatgcatctttaattaggcaggccattctcgaatctccagaaaagcagctaacactaaatgagatctataactggttcacacgaatgtttgcttacttccgacgcaacgcggccacgtggaagaatgcagtgcgtcataatcttagtcttcacaagtgttttgtgcgagtagaaaacgttaaaggggcagtatggacagtggatgaagtagaattccaaaaacgaaggccacaaaagatcagtggtaacccttcccttattaaaaacatgcagagcagccacgcctactgcacacctctcaatgcagctttacaggcttcaatggctgagaatagtatacctctatacactaccgcttccatgggaaatcccactctgggcaacttagccagcgcaatacgggaagagctgaacggggcaatggagcataccaacagcaacgagagtgacagcagtccaggcagatctcctatgcaagccgtgcatcctgtacacgtcaaagaagagcccctcgatccagaggaagctgaagggcccctgtccttagtgacaacagccaaccacagtccagattttgaccatgacagagattacgaagatgaaccagtaaacgaggacatggagtgactatcggggcgggccaaccccgagaatgaagattggaaaaagg

SEQ ID NO: 11124 - DNA, 843 bp, Homo sapiens
  source 1..843: mol_type = unassigned DNA
gctcggggggccgctggagtgcccagcgggaacccgaaagtttgtaagaggaagagagcgcgcggcgagcgagcgagcgggccgggggcagcggcagcggcgccggggaccatggtgctgccggcgcctcctccgcgggcgtgaaggcggcgctcctactccctccccggactccgcggtgtcccagaagcttttgttgacaattccagtttccgaacaaaacatttcggcaatggtgagggcttcgatcccttctctgatttgctgtcagccatgaacggatggatgtgatgcctgctagccaaaaggcttccctctgtgtgttgcagtcctgtggcattatgcatgccccctcccagtgaccccaggctttttatggctgtgagacacgttaaaatttcaggggtaagacgtgaccttttgaggtgactataactgaagattgctttacagaagccaaaaaaggtttttgagtcatgatgcaagaatctgggactgagacaaaaagtaacggttcagccatccagaatgggtcgggcggcagcaaccacttactagagtgcggcggtcttcgggaggggcggtccaacggagagacgccggccgtggacatcggggcagctgacctcgcccacgcccagcagcagcagcaacagtggcatctcataaaccatcagccctctaggagtcccagcagttggcttaagagactaatttcaagcccttgggagttggaagtcctgcaggtccccttgtggggagcagttgctgagacgaagatgagtggacctgtgtgtcagcctaacccttccccattttgaataaaattattctttggagaaa

SEQ ID NO: 11125 - DNA, 1016 bp, Homo sapiens
  source 1..1016: mol_type = unassigned DNA
atattaaaatccagtaagtttcttgatcttgaggattattcctggagtactcttcgctccctggtgggcaggctttggccatgcaaggtgcgctaggtggcctggatcaaacaaataatagaagtctgttgaagctttgtcctgacctatcctggaagtagaagaatactctggagaaaggagcattgtaagcacaaagaataagattcctcaatcctgagagagagaattaaagtctaactctccaaatgtctactctaatgtgatgctgggattgaattttcctaggactccgtttcaaggttaattcgaaagtcttgtggaagatctggaagaaacaggtattaagtcatgatgcaggaatctgcgacagagacaataagcaacagttcaatgaatcaaaatggaatgagcactctaagcagccaattagatgctggcagcagagatggaagatcaagtggtgacaccagctctgaagtaagcacagtagaactgctgcatctgcaacaacagcaggctctccaggcagcaagacaacttcttttacagcagcaaacaagtggattgaaatctcctaagagcagtgataaacagagaccactgcaggtgcctgtgtcagtggccatgatgactccccaggtgatcacccctcagcaaatgcagcagatccttcagcaacaagtcctgtctcctcagcagctacaagcccttctccaacaacagcaggctgtcatgctgcagcagcaacaactacaagagttttacaagaaacagcaagagcagttacatcttcagcttttgcagcagcagcagcaacagcagcagcagcaacaacagcagcaacaacagcagcagcaacaacaacaacaacagcagcaacaacagcagcagcagcagcaacagcagcagcagcagcaacagcatcctggaaagcaagcgaaagagcagcagcagcagcagcagcagcaacagcaattggcagcccagcagcttgtcttccagcagcagcttct

SEQ ID NO: 11126 - DNA, 2638 bp, Homo sapiens
  source 1..2638: mol_type = unassigned DNA
ctgattttgtgtacgattgtccacggacgccaaaacaatcacagagctgcttgatttgttttaattaccagcacaaaatgccatcagtctgggacgtgatcgggcagaggtgtactcacagtagtgtaaatactgctgtaaatagttgtctgatggtggctttgacagtgagctagcttctgagttttcccttctttttatactgttttctgtgctggcttttttgaatcttcctaatttttcatctctttaacaaactcctatgaagttgaaaccgggaagtttgctctaacatttccagagaaggtattaagtcatgatgcaggaatctgcgacagagacaataagcaacagttcaatgaatcaaaatggaatgagcactctaagcagccaattagatgctggcagcagagatggaagatcaagtggtgacaccagctctgaagtaagcacagtagaactgctgcatctgcaacaacagcaggctctccaggcagcaagacaacttcttttacagcagcaaacaagtggattgaaatctcctaagagcagtgataaacagagaccactgcaggtgcctgtgtcagtggccatgatgactccccaggtgatcacccctcagcaaatgcagcagatccttcagcaacaagtcctgtctcctcagcagctacaagcccttctccaacaacagcaggctgtcatgctgcagcagcaacaactacaagagttttacaagaaacagcaagagcagttacatcttcagcttttgcagcagcagcagcaacagcagcagcagcaacaacagcagcaacaacagcagcagcaacaacaacaacaacagcagcaacaacagcagcagcagcagcaacagcagcagcagcagcaacagcatcctggaaagcaagcgaaagagcagcagcagcagcagcagcagcaacagcaattggcagcccagcagcttgtcttccagcagcagcttctccagatgcaacaactccagcagcagcagcatctgctcagccttcagcgtcagggactcatctccattccacctggccaggcagcacttcctgtccaatcgctgcctcaagctggcttaagtcctgctgagattcagcagttatggaaagaagtgactggagttcacagtatggaagacaatggcattaaacatggagggctagacctcactactaacaattcctcctcgactacctcctccaacacttccaaagcatcaccaccaataactcatcattccatagtgaatggacagtcttcagttctaagtgcaagacgagacagctcgtcacatgaggagactggggcctctcacactctctatggccatggagtttgcaaatggccaggctgtgaaagcatttgtgaagattttggacagtttttaaagcaccttaacaatgaacacgcattggatgaccgaagcactgctcagtgtcgagtgcaaatgcaggtggtgcaacagttagaaatacagctttctaaagaacgcgaacgtcttcaagcaatgatgacccacttgcacatgcgaccctcagagcccaaaccatctcccaaacctctaaatctggtgtctagtgtcaccatgtcgaagaatatgttggagacatccccacagagcttacctcaaacccctaccacaccaacggccccagtcaccccgattacccagggaccctcagtaatcaccccagccagtgtgcccaatgtgggagccatacgaaggcgacattcagacaaatacaacattcccatgtcatcagaaattgccccaaactatgaattttataaaaatgcagatgtcagacctccatttacttatgcaactctcataaggcaggctatcatggagtcatctgacaggcagttaacacttaatgaaatttacagctggtttacacggacatttgcttacttcaggcgtaatgcagcaacttggaagaatgcagtacgtcataatcttagcctgcacaagtgttttgttcgagtagaaaatgttaaaggagcagtatggactgtggatgaagtagaataccagaagcgaaggtcacaaaagataacaggaagtccaaccttagtaaaaaatatacctaccagtttaggctatggagcagctcttaatgccagtttgcaggctgccttggcagagagcagtttacctttgctaagtaatcctggactgataaataatgcatccagtggcctactgcaggccgtccacgaagacctcaatggttctctggatcacattgacagcaatggaaacagtagtccgggctgctcacctcagccgcacatacattcaatccacgtcaaggaagagccagtgattgcagaggatgaagactgcccaatgtccttagtgacaacagctaatcacagtccagaattagaagacgacagagagattgaagaagagcctttatctgaagatctggaatgagaactgacttgtgaaacctcagcgtgaagggacatatcactgaccttcataaccactccacaaccatgaatatttgacaaatttttactgtgactatttattaagcatggataaaggagacagccctaaaggaacttactaagccagccctttgggattcagtaccaacaggca

SEQ ID NO: 11127 - DNA, 1412 bp, Homo sapiens
  source 1..1412: mol_type = unassigned DNA
aggtattaagtcatgatgcaggaatctgcgacagagacaataagcaacagttcaatgaatcaaaatggaatgagcactctaagcagccaattagatgctggcagcagagatggaagatcaagtggtgacaccagctctgaagtaagcacagtagaactgctgcatctgcaacaacagcaggctctccaggcagcaagacaacttcttttacagcagcaaacaagtggattgaaatctcctaagagcagtgataaacagagaccactgcaggtgcctgtgtcagtggccatgatgactccccaggtgatcacccctcagcaaatgcagcagatccttcagcaacaagtcctgtctcctcagcagctacaagcccttctccaacaacagcaggctgtcatgctgcagcagcaacaactacaagagttttacaagaaacagcaagagcagttacatcttcagcttttgcagcagcagcagcaacagcagcagcagcaacaacagcagcaacaacagcagcagcaacaacaacaacaacagcagcaacaacagcagcagcagcagcaacagcagcagcagcagcaacagcatcctggaaagcaagcgaaagagcagcagcagcagcagcagcagcaacagcaattggcagcccagcagcttgtcttccagcagcagcttctccagatgcaacaactccagcagcagcagcatctgctcagccttcagcgtcagggactcatctccattccacctggccaggcagcacttcctgtccaatcgctgcctcaagctggcttaagtcctgctgagattcagcagttatggaaagaagtgactggagttcacagtatggaagacaatggcattaaacatggagggctagacctcactactaacaattcctcctcgactacctcctccaacacttccaaagcatcaccaccaataactcatcattccatagtgaatggacagtcttcagttctaagtgcaagacgagacagctcgtcacatgaggagactggggcctctcacactctctatggccatggagtttgcaaatggccaggctgtgaaagcatttgtgaagattttggacagtttttaaagcaccttaacaatgaacacgcattggatgaccgaagcactgctcagtgtcgagtgcaaatgcaggtggtgcaacagttagaaatacagctttctaaagaacgcgaacgtcttcaagcaatgatgacccacttgcacatgcgaccctcagagcccaaaccatctcccaaacctgtaagtgcatattgctttataaacagtaaatagctctaccaatgtaacagactaagaaaatgaacaatttagtgacagttagaaaacaatgagtgtgatgaaaaatacggcaataaaatgaaagtaaaatgtaa

SEQ ID NO: 11128 - DNA, 1472 bp, Homo sapiens
  source 1..1472: mol_type = unassigned DNA
atgcaggaatctgcgacagagacaataagcaacagttcaatgaatcaaaatggaatgagcactctaagcagccaattagatgctggcagcagagatggaagatcaagtggtgacaccagctctgaagtaagcacagtagaactgctgcatctgcaacaacagcaggctctccaggcagcaagacaacttcttttacagcagcaaacaagtggattgaaatctcctaagagcagtgataaacagagaccactgcaggaattgcttccagaaacaaaattatgtatctgtggccactcttctggtgatgggcatcctcacaacacatttgcagtgcctgtgtcagtggccatgatgactccccaggtgatcacccctcagcaaatgcagcagatccttcagcaacaagtcctgtctcctcagcagctacaagcccttctccaacaacagcaggctgtcatgctgcagcagcaacaactacaagagttttacaagaaacagcaagagcagttacatcttcagcttttgcagcagcagcagcaacagcagcagcagcaacaacagcagcaacaacagcagcagcaacaacaacaacaacagcagcaacaacagcagcagcagcagcaacagcagcagcagcagcaacagcatcctggaaagcaagcgaaagagcagcagcagcagcagcagcagcaacagcaattggcagcccagcagcttgtcttccagcagcagcttctccagatgcaacaactccagcagcagcagcatctgctcagccttcagcgtcagggactcatctccattccacctggccaggcagcacttcctgtccaatcgctgcctcaagctggcttaagtcctgctgagattcagcagttatggaaagaagtgactggagttcacagtatggaagacaatggcattaaacatggagggctagacctcactactaacaattcctcctcgactacctcctccaacacttccaaagcatcaccaccaataactcatcattccatagtgaatggacagtcttcagttctaagtgcaagacgagacagctcgtcacatgaggagactggggcctctcacactctctatggccatggagtttgcaaatggccaggctgtgaaagcatttgtgaagattttggacagtttttaaagcaccttaacaatgaacacgcattggatgaccgaagcactgctcagtgtcgagtgcaaatgcaggtggtgcaacagttagaaatacagctttctaaagaacgcgaacgtcttcaagcaatgatgacccacttgcacatgcgaccctcagagcccaaaccatctcccaaacctgtaagtgcatattgctttataaacagtaaatagctctaccaatgtaacagactaagaaaatgaacaatttagtgacagttagaaaacaatgagtgtgatgaaaaatacggcaataaaatgaaagtaaaatgtaa

SEQ ID NO: 11129 - DNA, 2285 bp, Homo sapiens
  source 1..2285: mol_type = unassigned DNA
ttgaaaccgggaagtttgctctaacatttccagagaaggtattaagtcatgatgcaggaatctgcgacagagacaataagcaacagttcaatgaatcaaaatggaatgagcactctaagcagccaattagatgctggcagcagagatggaagatcaagtggtgacaccagctctgaagtaagcacagtagaactgctgcatctgcaacaacagcaggctctccaggcagcaagacaacttcttttacagcagcaaacaagtggattgaaatctcctaagagcagtgataaacagagaccactgcagccatgagacagacttgtggttcttcaacagctgtgcagagcagagacgtaaatttaaggtgcctgtgtcagtggccatgatgactccccaggtgatcacccctcagcaaatgcagcagatccttcagcaacaagtcctgtctcctcagcagctacaagcccttctccaacaacagcaggctgtcatgctgcagcagcaacaactacaagagttttacaagaaacagcaagagcagttacatcttcagcttttgcagcagcagcagcaacagcagcagcagcaacaacagcagcaacaacagcagcagcaacaacaacaacaacagcagcaacaacagcagcagcagcagcaacagcagcagcagcagcaacagcatcctggaaagcaagcgaaagagcagcagcagcagcagcagcagcaacagcaattggcagcccagcagcttgtcttccagcagcagcttctccagatgcaacaactccagcagcagcagcatctgctcagccttcagcgtcagggactcatctccattccacctggccaggcagcacttcctgtccaatcgctgcctcaagctggcttaagtcctgctgagattcagcagttatggaaagaagtgactggagttcacagtatggaagacaatggcattaaacatggagggctagacctcactactaacaattcctcctcgactacctcctccaacacttccaaagcatcaccaccaataactcatcattccatagtgaatggacagtcttcagttctaagtgcaagacgagacagctcgtcacatgaggagactggggcctctcacactctctatggccatggagtttgcaaatggccaggctgtgaaagcatttgtgaagattttggacagtttttaaagcaccttaacaatgaacacgcattggatgaccgaagcactgctcagtgtcgagtgcaaatgcaggtggtgcaacagttagaaatacagctttctaaagaacgcgaacgtcttcaagcaatgatgacccacttgcacatgcgaccctcagagcccaaaccatctcccaaacctctaaatctggtgtctagtgtcaccatgtcgaagaatatgttggagacatccccacagagcttacctcaaacccctaccacaccaacggccccagtcaccccgattacccagggaccctcagtaatcaccccagccagtgtgcccaatgtgggagccatacgaaggcgacattcagacaaatacaacattcccatgtcatcagaaattgccccaaactatgaattttataaaaatgcagatgtcagacctccatttacttatgcaactctcataaggcaggctatcatggagtcatctgacaggcagttaacacttaatgaaatttacagctggtttacacggacatttgcttacttcaggcgtaatgcagcaacttggaagaatgcagtacgtcataatcttagcctgcacaagtgttttgttcgagtagaaaatgttaaaggagcagtatggactgtggatgaagtagaataccagaagcgaaggtcacaaaagataacaggaagtccaaccttagtaaaaaatatacctaccagtttaggctatggagcagctcttaatgccagtttgcaggctgccttggcagagagcagtttacctttgctaagtaatcctggactgataaataatgcatccagtggcctactgcaggccgtccacgaagacctcaatggttctctggatcacattgacagcaatggaaacagtagtccgggctgctcacctcagccgcacatacattcaatccacgtcaaggaagagccagtgattgcagaggatgaagactgcccaatgtccttagtgacaacagctaatcacagtccagaattagaagacgacagagagattgaagaagagcctttatctgaagatctggaatgagaactgacttgtgaaacctcagcgtgaaggg

SEQ ID NO: 11130 - DNA, 1593 bp, Homo sapiens
  source 1..1593: mol_type = unassigned DNA
atgatgactccccaggtgatcacccctcagcaaatgcagcagatccttcagcaacaagtcctgtctcctcagcagctacaagcccttctccaacaacagcaggctgtcatgctgcagcagcaacaactacaagagttttacaagaaacagcaagagcagttacatcttcagcttttgcagcagcagcagcaacagcagcagcagcaacaacagcagcaacaacagcagcagcaacaacaacaacaacagcagcaacaacagcagcagcagcagcaacagcagcagcagcagcaacagcatcctggaaagcaagcgaaagagcagcagcagcagcagcagcagcaacagcaattggcagcccagcagcttgtcttccagcagcagcttctccagatgcaacaactccagcagcagcagcatctgctcagccttcagcgtcagggactcatctccattccacctggccaggcagcacttcctgtccaatcgctgcctcaagctggcttaagtcctgctgagattcagcagttatggaaagaagtgactggagttcacagtatggaagacaatggcattaaacatggagggctagacctcactactaacaattcctcctcgactacctcctccaacacttccaaagcatcaccaccaataactcatcattccatagtgaatggacagtcttcagttctaagtgcaagacgagacagctcgtcacatgaggagactggggcctctcacactctctatggccatggagtttgcaaatggccaggctgtgaaagcatttgtgaagattttggacagtttttaaagcaccttaacaatgaacacgcattggatgaccgaagcactgctcagtgtcgagtgcaaatgcaggtggtgcaacagttagaaatacagctttctaaagaacgcgaacgtcttcaagcaatgatgacccacttgcacatgcgaccctcagagcccaaaccatctcccaaacctgctatcatggagtcatctgacaggcagttaacacttaatgaaatttacagctggtttacacggacatttgcttacttcaggcgtaatgcagcaacttggaagaatgcagtacgtcataatcttagcctgcacaagtgttttgttcgagtagaaaatgttaaaggagcagtatggactgtggatgaagtagaataccagaagcgaaggtcacaaaagataacaggaagtccaaccttagtaaaaaatatacctaccagtttaggctatggagcagctcttaatgccagtttgcaggctgccttggcagagagcagtttacctttgctaagtaatcctggactgataaataatgcatccagtggcctactgcaggccgtccacgaagacctcaatggttctctggatcacattgacagcaatggaaacagtagtccgggctgctcacctcagccgcacatacattcaatccacgtcaaggaagagccagtgattgcagaggatgaagactgcccaatgtccttagtgacaacagctaatcacagtccagaattagaagacgacagagagattgaagaagagcctttatctgaagatctggaatga

SEQ ID NO: 11131 - DNA, 2664 bp, Homo sapiens
  source 1..2664: mol_type = unassigned DNA
tgcatctgctgtgtacagacttggctttgtactcttttcctgggggagagaaagtctttcttctctgctagttgattcctgtttttgtgaaacagctaagaaaacatctgtggcaggcagaaaaattgacaaaggattgacaaacaccattagctgaaaattttccatttcattgcaactatgcattgtttactttactgtaaatatcttaatacatcatcctctgaatatgctggcagagaagctggagaactgtgatttcaattaaggtattaagtcatgatgcaggaatctgcgacagagacaataagcaacagttcaatgaatcaaaatggaatgagcactctaagcagccaattagatgctggcagcagagatggaagatcaagtggtgacaccagctctgaagtaagcacagtagaactgctgcatctgcaacaacagcaggctctccaggcagcaagacaacttcttttacagcagcaaacaagtggattgaaatctcctaagagcagtgataaacagagaccactgcaggtgcctgtgtcagtggccatgatgactccccaggtgatcacccctcagcaaatgcagcagatccttcagcaacaagtcctgtctcctcagcagctacaagcccttctccaacaacagcaggctgtcatgctgcagcagcaacaactacaagagttttacaagaaacagcaagagcagttacatcttcagcttttgcagcagcagcagcaacagcagcagcagcaacaacagcagcaacaacagcagcagcaacaacaacaacaacagcagcaacaacagcagcagcagcagcaacagcagcagcagcagcaacagcatcctggaaagcaagcgaaagagcagcagcagcagcagcagcagcaacagcaattggcagcccagcagcttgtcttccagcagcagcttctccagatgcaacaactccagcagcagcagcatctgctcagccttcagcgtcagggactcatctccattccacctggccaggcagcacttcctgtccaatcgctgcctcaagctggcttaagtcctgctgagattcagcagttatggaaagaagtgactggagttcacagtatggaagacaatggcattaaacatggagggctagacctcactactaacaattcctcctcgactacctcctccaacacttccaaagcatcaccaccaataactcatcattccatagtgaatggacagtcttcagttctaagtgcaagacgagacagctcgtcacatgaggagactggggcctctcacactctctatggccatggagtttgcaaatggccaggctgtgaaagcatttgtgaagattttggacagtttttaaagcaccttaacaatgaacacgcattggatgaccgaagcactgctcagtgtcgagtgcaaatgcaggtggtgcaacagttagaaatacagctttctaaagaacgcgaacgtcttcaagcaatgatgacccacttgcacatgcgaccctcagagcccaaaccatctcccaaacctctaaatctggtgtctagtgtcaccatgtcgaagaatatgttggagacatccccacagagcttacctcaaacccctaccacaccaacggccccagtcaccccgattacccagggaccctcagtaatcaccccagccagtgtgcccaatgtgggagccatacgaaggcgacattcagacaaatacaacattcccatgtcatcagaaattgccccaaactatgaattttataaaaatgcagatgtcagacctccatttacttatgcaactctcataaggcaggctatcatggagtcatctgacaggcagttaacacttaatgaaatttacagctggtttacacggacatttgcttacttcaggcgtaatgcagcaacttggaagaatgcagtacgtcataatcttagcctgcacaagtgttttgttcgagtagaaaatgttaaaggagcagtatggactgtggatgaagtagaataccagaagcgaaggtcacaaaagataacaggaagtccaaccttagtaaaaaatatacctaccagtttaggctatggagcagctcttaatgccagtttgcaggctgccttggcagagagcagtttacctttgctaagtaatcctggactgataaataatgcatccagtggcctactgcaggccgtccacgaagacctcaatggttctctggatcacattgacagcaatggaaacagtagtccgggctgctcacctcagccgcacatacattcaatccacgtcaaggaagagccagtgattgcagaggatgaagactgcccaatgtccttagtgacaacagctaatcacagtccagaattagaagacgacagagagattgaagaagagcctttatctgaagatctggaatgagaactgacttgtgaaacctcagcgtgaagggacatatcactgaccttcataaccactccacaaccatgaatatttgacaaatttttactgtgactatttattaagcatggataaaggagacagccctaaaggaacttactaagccagccctttgggattcagtaccaacaggcaaattgcttgttttcttcttcttcttcttctttttttttttttttttagaaaaaaagacaaaaa

SEQ ID NO: 11132 - DNA, 8300 bp, Homo sapiens
  source 1..8300: mol_type = unassigned DNA
gccgccgcgggtgccacctcccgggacgctgcccacggcgtccccggtcgcgatcaaacaaataatagaagtctgttgaagctttgtcctgacctatcctggaagtagaagaatactctggagaaaggagcattgtaagcacaaagaataagattcctcaatcctgagagagagaattaaagtctaactctccaaattttcaacaggagttttgagtaaagaaaatggagaagtttgtgggagagaaaggtctactctaatgtgatgctgggattgaattttcctaggactccgtttcaaggttaattcgaaagtcttgtggaagatctggaagaaacagccagtactcatatatatagaaagaggagttggatgtttgtcaataaactcatctggctttaaataaatcaaaacaaaaagaataatttgctactagtcttccaacatgtttgaagaacagcctgctgtttggggaggtattaagtcatgatgcaggaatctgcgacagagacaataagcaacagttcaatgaatcaaaatggaatgagcactctaagcagccaattagatgctggcagcagagatggaagatcaagtggtgacaccagctctgaagtaagcacagtagaactgctgcatctgcaacaacagcaggctctccaggcagcaagacaacttcttttacagcagcaaacaagtggattgaaatctcctaagagcagtgataaacagagaccactgcagccatgagacagacttgtggttcttcaacagctgtgcagagcagagacgtaaatttaaggtgcctgtgtcagtggccatgatgactccccaggtgatcacccctcagcaaatgcagcagatccttcagcaacaagtcctgtctcctcagcagctacaagcccttctccaacaacagcaggctgtcatgctgcagcaggattttttggattctggattggaaaatttcagagctgccttggaaaaaaatcaacaactacaagagttttacaagaaacagcaagagcagttacatcttcagcttttgcagcagcagcagcaacagcagcagcagcaacaacagcagcaacaacagcagcagcaacaacaacaacaacagcagcaacaacagcagcagcagcagcaacagcagcagcagcagcaacagcatcctggaaagcaagcgaaagagcagcagcagcagcagcagcagcaacagcaattggcagcccagcagcttgtcttccagcagcagcttctccagatgcaacaactccagcagcagcagcatctgctcagccttcagcgtcagggactcatctccattccacctggccaggcagcacttcctgtccaatcgctgcctcaagctggcttaagtcctgctgagattcagcagttatggaaagaagtgactggagttcacagtatggaagacaatggcattaaacatggagggctagacctcactactaacaattcctcctcgactacctcctccaacacttccaaagcatcaccaccaataactcatcattccatagtgaatggacagtcttcagttctaagtgcaagacgagacagctcgtcacatgaggagactggggcctctcacactctctatggccatggagtttgcaaatggccaggctgtgaaagcatttgtgaagattttggacagtttttaaagcaccttaacaatgaacacgcattggatgaccgaagcactgctcagtgtcgagtgcaaatgcaggtggtgcaacagttagaaatacagctttctaaagaacgcgaacgtcttcaagcaatgatgacccacttgcacatgcgaccctcagagcccaaaccatctcccaaacctaatatttgcaaagtcacatacagatgcatatggatgtttctgcgtttctcaaactatgcagaggtgctcttgtacatcccagagaagcttacaccagtggctttgtaaatgtattaaatgcagcatttaggagcattatctcagctttcatttatctaaatctggtgtctagtgtcaccatgtcgaagaatatgttggagacatccccacagagcttacctcaaacccctaccacaccaacggccccagtcaccccgattacccagggaccctcagtaatcaccccagccagtgtgcccaatgtgggagccatacgaaggcgacattcagacaaatacaacattcccatgtcatcagaaattgccccaaactatgaattttataaaaatgcagatgtcagacctccatttacttatgcaactctcataaggcaggctatcatggagtcatctgacaggcagttaacacttaatgaaatttacagctggtttacacggacatttgcttacttcaggcgtaatgcagcaacttggaagaatgcagtacgtcataatcttagcctgcacaagtgttttgttcgagtagaaaatgttaaaggagcagtatggactgtggatgaagtagaataccagaagcgaaggtcacaaaagataacaggaagtccaaccttagtaaaaaatatacctaccagtttaggctatggagcagctcttaatgccagtttgcaggctgccttggcagagagcagtttacctttgctaagtaatcctggactgataaataatgcatccagtggcctactgcaggccgtccacgaagacctcaatggttctctggatcacattgacagcaatggaaacagtagtccgggctgctcacctcagccgcacatgtaagtgtggttaacagactctctaaagggaagaatctatattaatatgcttcttaaatttagaatttttccgaagtttttactgttgtataagttgaaaatacaaatttaagtggagttaaattataccacgttcataatatgacaaagtttatcaaaatcggttttaatacattttttagatgatctcaaatgccatatcattattgttccagcagtcctctacagattcttagtactactaatgttctcttgggcataaagcagtgtctaagatgaatctacatcttatgggtcattatcacaggttggtttgtatggtgcaataagaatattcatgatggaataagttgttataatttttactactgttacaggtctctaaaccatttatgaactgtagtcaagatattgcccgtttttataaaccgtaaaatgcaaagtttaactgttacccacagtttacatagaagctagtaaagtgtaactttttgcctgtcttataaatcagtgtaattatatattcaactttaattactggtgcgtctgtattggcaaggtttataagttatattttatgcaagactacgattcctattaatatttagcagctaactatatcattaattactctaaaatctttcccctaccatctttttaatggagctgagagagtagaagtattaaaaattgatgtattgtggatttcagaaatgtgtatgacactttaaaaaatgcctggcttttttcaatagtgtcaagcatattagtgtcttgtttactaaaatgtattgaccgtggtagaactcagaattcagaggaaaaaaatttgaatctgaataatgaagtgtgtacaccatttagctgtcaggatgagttgtaactcatgtctatacttcctagaattaaacgtcacatacttctaattacaagttattgaggtaagattagtcctttctcttatttttatattgtcttcctttatttttccattcaatatctagtaaaaggtctgaaagagaaatatactctttatatgtacccattttcacttgacctttcacagggtattatttttgttgtctttttaaacattttattctgtttgacatattaatgtctttaagagcatatgtctaattgctttatagcacttttactctatcacctttgcaaaaaaacacactgtgaacattaatgtgttttatcaggttccgaaccattacttcttcaaaatggaaaaatttgtcttttggaagtgtctttagatgtattaaataatacaaaagaagtaataaaactcaaagtagaaagaacatgaatatatgctcttgagagtagcagtattctaaaacaaggaaagtgagcaatcagacaaaagtttttatatccccgctttatcctatcagccatgcagtgggtagcttgcggccttttactttcagcagttctcctgagtatgctaaatagtttattaaacattatatttcagaacctgaaataataattgggctaaattgtagcattgttagatgggtattggttttcgtttggcaattgctacttcagatttttcattttattattaaagtttatgaaatatttcagagaaatattagtatgtattagataacacctaaaaattatacatataatgtccagtatattgctgctatgggtttataaagttaaaatgttcatagttaatatataacacattttatgcttatatgaattagtgcatttgaaaaatacttatgtttattttccatagataaaaggaaagcttgttgaaaatagatttcagaaaaaataaaaattaaaaggggtgtaaattgtccctttttctaagttacatcaattataatcaaaattttaattatcttgcagaatattgagtcaatattcattcttaaatctgtttctgctgctgtcattaggtttttgcataatagatgtcaaatatttatgaaatatttcagtattctctatcttcacctttataaagttctaagatgcttgtacttaaaccatgttatgtattttattaggcaaaggaagaaatattgatataattctctcagtcaaaatttggttgtatataattgagtgcatttcaaaatactttggaaattaaacagaagtgaaataatttttataagacatttacacagcatacttatatctcctaaaatgaagtcatgttacttgttgttttagaggggggtagttgtgctgatgcaattgtaaacaagaggaaatagggcctagtggtatcagaacataggttgtaatgccagactgtcagggttccaattccagattcaatagttaatagccaagtgggattgagcacgttacttaatatttctttcctcagctttctcagctgaaaatgaggtaagtaataatataatgcttcttatttcataagattcttgcaaagaaatgagtgcctggaacataataattgctccttgtgtctctcatagtgctgtgtaaataggtactgatttatattacttcctgtaatacctcactgttactaaaaatgagtctataaacaatatgaaaatatttttgtattttgcattttaaggcactctgtaagtttgtggttagtcattgacaatccattttcttctccttctttcttctcttataattcataaagtaagcagatccataaaactgaaacaacatgaggccaggcatggtggcttatgccagtaatcccagcattttgggaggggagggcaggaggattgcttgaggccaggagttcaagaccagcctggacaacatagtgagaccctgtatctacaaaaataattttaaaaattagttgggtgtggtgtgtgcctgtatacagtcctagctactcaggaggctcaggcaggaggaaagcttgagcctagggatttcgaggttacagtaagctatgatcatggcatggaactccagcctgcaccacagagtgagactctatctgtctctaaaaataaaaagtgaaacaatatgacacaaggacttattataggtagcacattacctatatttaggtatctgaagttacctagttatctgaagttttaggcaatgaacaactcaaatagaacaacaccaacccagaatcagggacatatcatatatgtcttgaaaacattgagtattagttttgaaaggaatttagaatacataagggaatacagaatttagaatataggaagtgggaccagactgctgagtgacttaaatatcaagctatggtgtttgtttcagtcagtatacagcttgttactgttatcagcttgactttgacacgatcagagctatgcattagaaacagtaatctaaaagtgtactgaatgaaccatgacttaatgaaactcatgtataggagaatattctgaaattgggagagactggaagcagaaaattaattcttgcagtatgtaatatctaacataaatacaagactaggagtggagagcaaagaatccgtataagaagtgctgtgaaaagaaatactggaacaagacaaccaactgaatgctagggacaaagatgaaaattgggaaaattcatagccactttaaaagtctgcaaagagaaatagaggacacaagaagcaggttcaaaagggaagatgaagaattcagcattttacttggggaatctaagaacctaaatatcattagattcaggagaaaacactgatgatttttttgattagtcttttaattcaactccattatagtaaaattctacgtggtagaatatgaatatatacctgaggttgatagagaagatgttttttgaagcattagaagagtgaaatagatatggtctggtgcttcttataaattgtggagaacaagagatgccaaattatcatttatattccatactccatattttaacccttttcttccactccagttttcgctttattcagtgtcctgaataaaggcctcttccaaattaatgcatttatttcgctcacactatttgaatttctgccctttcccttttctggttcccctctactctcttacctaaattctacctttccttacaggactagtcctatttttttccaagagggtttcccaaggaattttactatcaggaccatgcactctgctccacacttctaaagagcttgcttcttataccactattttggactaatactttgtgtacatgtgtgagtgtgtgtgcacacacacatgcacgtgtgtttatgcatacatctgtgttcattttgcagatatccctaccttaatgacaagtcccttaaagacagattatgttttagacaaattatagtataagaaacccctagcacattctactatgtcaagtaagcattcagtaaaagtatgatactgattatgaagaatcaaattggagattacagttaattagaaatggtttgacttcacaaagtcatacttacaggagtataaaatccagggttctcctagaatcttgaagaaggagaacaaaagagattttaggaagaacagatgagtaaatataatgttcatttttatgtgggagctaggaaaattttctaaatattggtagactatactttttaagttttatttttagttttaattatttaattaatatgtattttataaccattccaatttacgtgagtaaaaagtggctttccactttgagtagaatgaggccccttcacctcattcatgattatcatctcaaccttgttaaattttatttacattgttgaaagattgaaaacaattatcaaaatttaggcaatataaatcagatgaatgtttaaggggatttcagcaaaaagtaggaaaggttaaagccaggcgacattgtatagattctacataataattttttgaaacttctttgactgttttgactcaactacttattgattcaaagcaagtacttcacttttaaaacatttttattttctattgctgttcaaagagtcctagaaacatccatggtatgaataaaggaaaacgatactttaagtgtccgagctgagtatcattacaatttataatattgttcccttatgcacctgaatgccaatattccctttttcagagttatatagaatatgaattaaaaatgactagcttcctattttatatagacatttacctctagaaatgtttaaaaggttaggattgatgctgtctttaagcagaaataatttgaacttactgtcttctctcatgtgttggacttaagtgaatgacaagagaagaaaacatgtagactagacttggaagatgaacgcatactgatacaatcaatccatttcctgtctacttcccaacctaaggcaagaagtggaatttaatgatgtacccaccatgtttagttctactcagttgtttctttttgtattaagtaattgtttctcctcattctcaataagttggttcagatttgctgttcttcctcgtataaaatgttaaatgagattcccatttttatattttcaaatgttgtgtctagagatcaaaataaatattcttccct

SEQ ID NO: 11133 - DNA, 6415 bp, Homo sapiens
  source 1..6415: mol_type = unassigned DNA
cttgaacctttgtcacccctcacgttgcacaccaaagacataccctagtgattaaatgctgattttgtgtacgattgtccacggacgccaaaacaatcacagagctgcttgatttgttttaattaccagcacaaaatgccatcagtctgggacgtgatcgggcagaggtgtactcacagtagtgtaaatactgctgtaaatagttgtctgatggtggctttgacagtgagctagcttctgagttttcccttctttttatactgttttctgtgctggcttttttgaatcttcctaatttttcatctctttaacaaactcctatgaagttgaaaccgggaagtttgctctaacatttccagagaaggtattaagtcatgatgcaggaatctgcgacagagacaataagcaacagttcaatgaatcaaaatggaatgagcactctaagcagccaattagatgctggcagcagagatggaagatcaagtggtgacaccagctctgaagtaagcacagtagaactgctgcatctgcaacaacagcaggctctccaggcagcaagacaacttcttttacagcagcaaacaagtggattgaaatctcctaagagcagtgataaacagagaccactgcaggtgcctgtgtcagtggccatgatgactccccaggtgatcacccctcagcaaatgcagcagatccttcagcaacaagtcctgtctcctcagcagctacaagcccttctccaacaacagcaggctgtcatgctgcagcaggattttttggattctggattggaaaatttcagagctgccttggaaaaaaatcaacaactacaagagttttacaagaaacagcaagagcagttacatcttcagcttttgcagcagcagcagcaacagcagcagcagcaacaacagcagcaacaacagcagcagcaacaacaacaacaacagcagcaacaacagcagcagcagcagcaacagcagcagcagcagcaacagcatcctggaaagcaagcgaaagagcagcagcagcagcagcagcagcaacagcaattggcagcccagcagcttgtcttccagcagcagcttctccagatgcaacaactccagcagcagcagcatctgctcagccttcagcgtcagggactcatctccattccacctggccaggcagcacttcctgtccaatcgctgcctcaagctggcttaagtcctgctgagattcagcagttatggaaagaagtgactggagttcacagtatggaagacaatggcattaaacatggagggctagacctcactactaacaattcctcctcgactacctcctccaacacttccaaagcatcaccaccaataactcatcattccatagtgaatggacagtcttcagttctaagtgcaagacgagacagctcgtcacatgaggagactggggcctctcacactctctatggccatggagtttgcaaatggccaggctgtgaaagcatttgtgaagattttggacagtttttaaagcaccttaacaatgaacacgcattggatgaccgaagcactgctcagtgtcgagtgcaaatgcaggtggtgcaacagttagaaatacagctttctaaagaacgcgaacgtcttcaagcaatgatgacccacttgcacatgcgaccctcagagcccaaaccatctcccaaacctctaaatctggtgtctagtgtcaccatgtcgaagaatatgttggagacatccccacagagcttacctcaaacccctaccacaccaacggccccagtcaccccgattacccagggaccctcagtaatcaccccagccagtgtgcccaatgtgggagccatacgaaggcgacattcagacaaatacaacattcccatgtcatcagaaattgccccaaactatgaattttataaaaatgcagatgtcagacctccatttacttatgcaactctcataaggcaggctatcatggagtcatctgacaggcagttaacacttaatgaaatttacagctggtttacacggacatttgcttacttcaggcgtaatgcagcaacttggaagaatgcagtacgtcataatcttagcctgcacaagtgttttgttcgagtagaaaatgttaaaggagcagtatggactgtggatgaagtagaataccagaagcgaaggtcacaaaagataacaggaagtccaaccttagtaaaaaatatacctaccagtttaggctatggagcagctcttaatgccagtttgcaggctgccttggcagagagcagtttacctttgctaagtaatcctggactgataaataatgcatccagtggcctactgcaggccgtccacgaagacctcaatggttctctggatcacattgacagcaatggaaacagtagtccgggctgctcacctcagccgcacatacattcaatccacgtcaaggaagagccagtgattgcagaggatgaagactgcccaatgtccttagtgacaacagctaatcacagtccagaattagaagacgacagagagattgaagaagagcctttatctgaagatctggaatgagaactgacttgtgaaacctcagcgtgaagggacatatcactgaccttcataaccactccacaaccatgaatatttgacaaatttttactgtgactatttattaagcatggataaaggagacagccctaaaggaacttactaagccagccctttgggattcagtaccaacaggcaaattgcttgttttcttcttcttcttcttctttttttttttttttttagaaaaaaagacaaaaactgattttcttgaaaaaaaaaaatgaactgttctttctataatggctttgcccatttaaaaaatgtggctcttaagggttcatgaaatgactgaatatgaggatacatgtcctgtagaaagcaaatgcgcctcatatactgccaaaaatagtgttagtttcattaatgtgaattttccagcattcagtagttgtaatgttagaaacaattgctggtcaagttcaacttgttgctattgtttttaatttgcacaggagtagtatcagaaattagtgtcactgcttgtatctagctgaattttaaacaacagaacattagttttttatgttggtgccaccaactgtaaatgacataagttagttattacaaaacacagtaattagactgttgcaaccatctaaaaccttaggcttccagtctgtgctgttagtgttaagatgtaaagtgcaatcctaagctaacattatctgtgcaagcaccatagaaacatttgcatatctgcatagatcttacaactgtactctttacctccttgtgataaagctttgtctacctgcaaacacagtcaaaggctacagctgcaaaccaaagccaactctaaccatggccaagagctcaaggacagaagcagccacatgctttggtcagccttctgtaacttcaattagtacaaaggaaccttttccatgaactacctgctgttttctgatgacctctgggatcttttcatttagccctaaacaaagaaacaaatatgacaaaaaccacaactaaaaaatgttaattcagtcacagagtaatcttctgaggccaaaagtccatctaaatgcaatgaagatttgctttcattaaagacagaggtgaggacaaaatccgcagtggaagttatgatatgctagaaagcaacaaatgtggatcactgaccaaaacgattatgtacttgatgcaaatgcagattgcatattgttatatatatagtactttgtgtttttgttttccctcattcagtcagttattttcagtggtgaatacatgttgttagaagatgtcttgtatggtcttaatctttgttgtgtactatttttttatagtcttaagttataatgaaaaaacaaaaagtaggaaccaaacataaaaggtctagtaaagccaaaaattaatttcatattgattttaaagtgatctagctgagtttttacactgaaagcaaagattatagcaattgtagtccatggtatttattttcagtcaaaccaaagttacatataattctgcctctgcttatacgggatattaacactaacaatacactcccttcaaagacttgcacaggccaaattgttggaatgctggttttcttgacaattccaaaccccaaaactatgataatgagttatgatgtagttgaaaatagcatagtcagatgtttgcttaaaacctagaaacttaacatgttgcttttcatgtgctgtgccaagtcttgataatactttttcccccaaccaagggacctcataacctgattatggttattgctttacaaacagttttgacagaaggtggctgctagagcttaacatacgttcccgttccatgtgatggaaccggttcttgcaaactaagctcatcattgattctttgctgaagtcagcaaatagagttagagagatacccagtcatctatcacaccaaataaaaggacataacggctttcaaaagggttttcccacttacccaaaaggctttctgaaagcttctacctctgcaaaaaaaaaaaaagaaaaaaaaaaaaagaaaaacattagaacaattatggcagattgcatgaaacgtgagaacgtcacagtaactgctacttttcattatgtttgtctttgggtcatgatcaacgaaccggaagtttacaatatggtattaaaagaaagatgggtatggtgaaagatggttttcagtcatctaggatcctactgtaaggattatctgaaaggaaaaatgggtctttcaggtgcatgttcaaaaggctttgagggactggaagtaactgcgagagttgtaccatcagaagggtggcctaagactacaatgctaaagtatgcatacctcagttagaaaacttttgaaaggaagtctcagccacagaatgcatatacctgtagagttttgcatgggttttatatgaatacaattttaaaaaatagctgcttgcacattataccagaaaaacctccaaaactgcaattgctttgaaaatagattttaggttttttggagtttcctgaaatgcttggtctgtattttgataattgtgcatattatgtaaaaatgttggtggacccataaatgaccagactttttctaagaaaaatgttgctttaatgcatttcatgaatttttactcttatatcattgcttgctagtaatagcaaatctgcttttctgcatctgctttgcgtagctattgtaaggctttgaactaatgtatgtatttattgcttgaacttctgtgcataccttataaagcataatgtctgacaatttaaatggctcatgtattcttgcttctatcataagctgattatggggactatgatcttttgtatacagcaaattttaaactgtagcacaaacatctgtttatgtattggtggaatatacctgttttatttatcttttttgaggtaaactaatttttgatacttttcattactgtgtactatgttcatactttgaattctctgacgttagaagtcatggttgagaattgtaacagctgttattcgttctgtattcatggctttcactgctgaataaaataaaggaccaaacctaggatttgaaagaaaactgtctacctctaacaccagggagttatcagattttattttacatagttttagtctacaaagacacaattgcttaaacctagtgggcttaaggcttatattctatgtggttggattcgtggcacagttgtactatttgaaaatcaattaaaattttatgtgaatgttacaagtatttggtagaattaccactaactgggttttctttagataactcagatatggagaaaatgtcatcagcattctgtgtctacagctgcttaacttcataagaatgcatttctttgtgattagggaatcgaagaatagtcagctaggaatagagctacagaagtacacttacataaaccatcctggactttaatgtccctgggcagattcagtcgcaaaatccaatatgatattttgtaaagttttcaagttggacatttacatttttgagaattttgagacttcatcttacacatgccagtattaacacacatttggacaatagctttattaagtctataaagctattgaaaggaacatggcttacccttgttatttcactagttcaggttgcaacgaaaggtttttttgtccatgaacacttggcatatcttacttagcaaaaaagaaggatgtacattttactatagaattaatgtatgaacagtgtgtcactgctgttggatgtaaaaatgtatatgaaaccatttcattcacttgattacatttctgaagtataaataaaaaaatctaattctttttgacccattt

SEQ ID NO: 11134 - DNA, 6443 bp, Homo sapiens
  source 1..6443: mol_type = unassigned DNA
cttgaacctttgtcacccctcacgttgcacaccaaagacataccctagtgattaaatgctgattttgtgtacgattgtccacggacgccaaaacaatcacagagctgcttgatttgttttaattaccagcacaaaatgccatcagtctgggacgtgatcgggcagaggtgtactcacagtagtgtaaatactgctgtaaatagttgtctgatggtggctttgacagtgagctagcttctgagttttcccttctttttatactgttttctgtgctggcttttttgaatcttcctaatttttcatctctttaacaaactcctatgaagttgaaaccgggaagtttgctctaacatttccagagaaggtattaagtcatgatgcaggaatctgcgacagagacaataagcaacagttcaatgaatcaaaatggaatgagcactctaagcagccaattagatgctggcagcagagatggaagatcaagtggtgacaccagctctgaagtaagcacagtagaactgctgcatctgcaacaacagcaggctctccaggcagcaagacaacttcttttacagcagcaaacaagtggattgaaatctcctaagagcagtgataaacagagaccactgcaggaattgcttccagaaacaaaattatgtatctgtggccactcttctggtgatgggcatcctcacaacacatttgcagtgcctgtgtcagtggccatgatgactccccaggtgatcacccctcagcaaatgcagcagatccttcagcaacaagtcctgtctcctcagcagctacaagcccttctccaacaacagcaggctgtcatgctgcagcagcaacaactacaagagttttacaagaaacagcaagagcagttacatcttcagcttttgcagcagcagcagcaacagcagcagcagcaacaacagcagcaacaacagcagcagcaacaacaacaacaacagcagcaacaacagcagcagcagcagcaacagcagcagcagcagcaacagcatcctggaaagcaagcgaaagagcagcagcagcagcagcagcagcaacagcaattggcagcccagcagcttgtcttccagcagcagcttctccagatgcaacaactccagcagcagcagcatctgctcagccttcagcgtcagggactcatctccattccacctggccaggcagcacttcctgtccaatcgctgcctcaagctggcttaagtcctgctgagattcagcagttatggaaagaagtgactggagttcacagtatggaagacaatggcattaaacatggagggctagacctcactactaacaattcctcctcgactacctcctccaacacttccaaagcatcaccaccaataactcatcattccatagtgaatggacagtcttcagttctaagtgcaagacgagacagctcgtcacatgaggagactggggcctctcacactctctatggccatggagtttgcaaatggccaggctgtgaaagcatttgtgaagattttggacagtttttaaagcaccttaacaatgaacacgcattggatgaccgaagcactgctcagtgtcgagtgcaaatgcaggtggtgcaacagttagaaatacagctttctaaagaacgcgaacgtcttcaagcaatgatgacccacttgcacatgcgaccctcagagcccaaaccatctcccaaacctctaaatctggtgtctagtgtcaccatgtcgaagaatatgttggagacatccccacagagcttacctcaaacccctaccacaccaacggccccagtcaccccgattacccagggaccctcagtaatcaccccagccagtgtgcccaatgtgggagccatacgaaggcgacattcagacaaatacaacattcccatgtcatcagaaattgccccaaactatgaattttataaaaatgcagatgtcagacctccatttacttatgcaactctcataaggcaggctatcatggagtcatctgacaggcagttaacacttaatgaaatttacagctggtttacacggacatttgcttacttcaggcgtaatgcagcaacttggaagaatgcagtacgtcataatcttagcctgcacaagtgttttgttcgagtagaaaatgttaaaggagcagtatggactgtggatgaagtagaataccagaagcgaaggtcacaaaagataacaggaagtccaaccttagtaaaaaatatacctaccagtttaggctatggagcagctcttaatgccagtttgcaggctgccttggcagagagcagtttacctttgctaagtaatcctggactgataaataatgcatccagtggcctactgcaggccgtccacgaagacctcaatggttctctggatcacattgacagcaatggaaacagtagtccgggctgctcacctcagccgcacatacattcaatccacgtcaaggaagagccagtgattgcagaggatgaagactgcccaatgtccttagtgacaacagctaatcacagtccagaattagaagacgacagagagattgaagaagagcctttatctgaagatctggaatgagaactgacttgtgaaacctcagcgtgaagggacatatcactgaccttcataaccactccacaaccatgaatatttgacaaatttttactgtgactatttattaagcatggataaaggagacagccctaaaggaacttactaagccagccctttgggattcagtaccaacaggcaaattgcttgttttcttcttcttcttcttctttttttttttttttttagaaaaaaagacaaaaactgattttcttgaaaaaaaaaaatgaactgttctttctataatggctttgcccatttaaaaaatgtggctcttaagggttcatgaaatgactgaatatgaggatacatgtcctgtagaaagcaaatgcgcctcatatactgccaaaaatagtgttagtttcattaatgtgaattttccagcattcagtagttgtaatgttagaaacaattgctggtcaagttcaacttgttgctattgtttttaatttgcacaggagtagtatcagaaattagtgtcactgcttgtatctagctgaattttaaacaacagaacattagttttttatgttggtgccaccaactgtaaatgacataagttagttattacaaaacacagtaattagactgttgcaaccatctaaaaccttaggcttccagtctgtgctgttagtgttaagatgtaaagtgcaatcctaagctaacattatctgtgcaagcaccatagaaacatttgcatatctgcatagatcttacaactgtactctttacctccttgtgataaagctttgtctacctgcaaacacagtcaaaggctacagctgcaaaccaaagccaactctaaccatggccaagagctcaaggacagaagcagccacatgctttggtcagccttctgtaacttcaattagtacaaaggaaccttttccatgaactacctgctgttttctgatgacctctgggatcttttcatttagccctaaacaaagaaacaaatatgacaaaaaccacaactaaaaaatgttaattcagtcacagagtaatcttctgaggccaaaagtccatctaaatgcaatgaagatttgctttcattaaagacagaggtgaggacaaaatccgcagtggaagttatgatatgctagaaagcaacaaatgtggatcactgaccaaaacgattatgtacttgatgcaaatgcagattgcatattgttatatatatagtactttgtgtttttgttttccctcattcagtcagttattttcagtggtgaatacatgttgttagaagatgtcttgtatggtcttaatctttgttgtgtactatttttttatagtcttaagttataatgaaaaaacaaaaagtaggaaccaaacataaaaggtctagtaaagccaaaaattaatttcatattgattttaaagtgatctagctgagtttttacactgaaagcaaagattatagcaattgtagtccatggtatttattttcagtcaaaccaaagttacatataattctgcctctgcttatacgggatattaacactaacaatacactcccttcaaagacttgcacaggccaaattgttggaatgctggttttcttgacaattccaaaccccaaaactatgataatgagttatgatgtagttgaaaatagcatagtcagatgtttgcttaaaacctagaaacttaacatgttgcttttcatgtgctgtgccaagtcttgataatactttttcccccaaccaagggacctcataacctgattatggttattgctttacaaacagttttgacagaaggtggctgctagagcttaacatacgttcccgttccatgtgatggaaccggttcttgcaaactaagctcatcattgattctttgctgaagtcagcaaatagagttagagagatacccagtcatctatcacaccaaataaaaggacataacggctttcaaaagggttttcccacttacccaaaaggctttctgaaagcttctacctctgcaaaaaaaaaaaaagaaaaaaaaaaaaagaaaaacattagaacaattatggcagattgcatgaaacgtgagaacgtcacagtaactgctacttttcattatgtttgtctttgggtcatgatcaacgaaccggaagtttacaatatggtattaaaagaaagatgggtatggtgaaagatggttttcagtcatctaggatcctactgtaaggattatctgaaaggaaaaatgggtctttcaggtgcatgttcaaaaggctttgagggactggaagtaactgcgagagttgtaccatcagaagggtggcctaagactacaatgctaaagtatgcatacctcagttagaaaacttttgaaaggaagtctcagccacagaatgcatatacctgtagagttttgcatgggttttatatgaatacaattttaaaaaatagctgcttgcacattataccagaaaaacctccaaaactgcaattgctttgaaaatagattttaggttttttggagtttcctgaaatgcttggtctgtattttgataattgtgcatattatgtaaaaatgttggtggacccataaatgaccagactttttctaagaaaaatgttgctttaatgcatttcatgaatttttactcttatatcattgcttgctagtaatagcaaatctgcttttctgcatctgctttgcgtagctattgtaaggctttgaactaatgtatgtatttattgcttgaacttctgtgcataccttataaagcataatgtctgacaatttaaatggctcatgtattcttgcttctatcataagctgattatggggactatgatcttttgtatacagcaaattttaaactgtagcacaaacatctgtttatgtattggtggaatatacctgttttatttatcttttttgaggtaaactaatttttgatacttttcattactgtgtactatgttcatactttgaattctctgacgttagaagtcatggttgagaattgtaacagctgttattcgttctgtattcatggctttcactgctgaataaaataaaggaccaaacctaggatttgaaagaaaactgtctacctctaacaccagggagttatcagattttattttacatagttttagtctacaaagacacaattgcttaaacctagtgggcttaaggcttatattctatgtggttggattcgtggcacagttgtactatttgaaaatcaattaaaattttatgtgaatgttacaagtatttggtagaattaccactaactgggttttctttagataactcagatatggagaaaatgtcatcagcattctgtgtctacagctgcttaacttcataagaatgcatttctttgtgattagggaatcgaagaatagtcagctaggaatagagctacagaagtacacttacataaaccatcctggactttaatgtccctgggcagattcagtcgcaaaatccaatatgatattttgtaaagttttcaagttggacatttacatttttgagaattttgagacttcatcttacacatgccagtattaacacacatttggacaatagctttattaagtctataaagctattgaaaggaacatggcttacccttgttatttcactagttcaggttgcaacgaaaggtttttttgtccatgaacacttggcatatcttacttagcaaaaaagaaggatgtacattttactatagaattaatgtatgaacagtgtgtcactgctgttggatgtaaaaatgtatatgaaaccatttcattcacttgattacatttctgaagtataaataaaaaaatctaattctttttgacccatttataa

SEQ ID NO: 11135 - DNA, 2274 bp, Homo sapiens
  source 1..2274: mol_type = unassigned DNA
gcacacactcatcgaaaaaaatttggattattagaagagagaggtctgcggcttccacaccgtacagcgtggtttttcttctcggtataaaagcaaagttgtttttgatacgtgacagtttcccacaagccaggctgatccttttctgtcagtccacttcaccaagcctgcccttggacaaggacccgatgcccaaccccaggcctggcaagccctcggccccttccttggcccttggcccatccccaggagcctcgcccagctggagggctgcacccaaagcctcagacctgctgggggcccggggcccagggggaaccttccagggccgagatcttcgaggcggggcccatgcctcctcttcttccttgaaccccatgccaccatcgcagctgcagctctcaacggtggatgcccacgcccggacccctgtgctgcaggtgcaccccctggagagcccagccatgatcagcctcacaccacccaccaccgccactggggtcttctccctcaaggcccggcctggcctcccacctgggatcaacgtggccagcctggaatgggtgtccagggagccggcactgctctgcaccttcccaaatcccagtgcacccaggaaggacagcaccctttcggctgtgccccagagctcctacccactgctggcaaatggtgtctgcaagtggcccggatgtgagaaggtcttcgaagagccagaggacttcctcaagcactgccaggcggaccatcttctggatgagaagggcagggcacaatgtctcctccagagagagatggtacagtctctggagcagcagctggtgctggagaaggagaagctgagtgccatgcaggcccacctggctgggaaaatggcactgaccaaggcttcatctgtggcatcatccgacaagggctcctgctgcatcgtagctgctggcagccaaggccctgtcgtcccagcctggtctggcccccgggaggcccctgacagcctgtttgctgtccggaggcacctgtggggtagccatggaaacagcacattcccagagttcctccacaacatggactacttcaagttccacaacatgcgaccccctttcacctacgccacgctcatccgctgggccatcctggaggctccagagaagcagcggacactcaatgagatctaccactggttcacacgcatgtttgccttcttcagaaaccatcctgccacctggaagaacgccatccgccacaacctgagtctgcacaagtgctttgtgcgggtggagagcgagaagggggctgtgtggaccgtggatgagctggagttccgcaagaaacggagccagaggcccagcaggtgttccaaccctacacctggcccctgacctcaagatcaaggaaaggaggatggacgaacaggggccaaactggtgggaggcagaggtggtgggggcagggatgataggccctggatgtgcccacagggaccaagaagtgaggtttccactgtcttgcctgccagggcccctgttcccccgctggcagccaccccctcccccatcatatcctttgccccaaggctgctcagaggggccccggtcctggccccagcccccacctccgccccagacacaccccccagtcgagccctgcagccaaacagagccttcacaaccagccacacagagcctgcctcagctgctcgcacagattacttcagggctggaaaagtcacacagacacacaaaatgtcacaatcctgtccctcactcaacacaaaccccaaaacacagagagcctgcctcagtacactcaaacaacctcaaagctgcatcatcacacaatcacacacaagcacagccctgacaacccacacaccccaaggcacgcacccacagccagcctcagggcccacaggggcactgtcaacacaggggtgtgcccagaggcctacacagaagcagcgtcagtaccctcaggatctgaggtcccaacacgtgctcgctcacacacacggcctgttagaattcacctgtgtatctcacgcatatgcacacgcacagccccccagtgggtctcttgagtcccgtgcagacacacacagccacacacactgccttgccaaaaataccccgtgtctcccctgccactcacctcactcccattccctgagccctgatccatgcctcagcttagactgcagaggaactactcatttatttgggatccaaggcccccaacccacagtaccgtccccaataaactgcagccgagctcccc

SEQ ID NO: 11136 - DNA, 2382 bp, Homo sapiens
  source 1..2382: mol_type = unassigned DNA
gcacacactcatcgaaaaaaatttggattattagaagagagaggtctgcggcttccacaccgtacagcgtggtttttcttctcggtataaaagcaaagttgtttttgatacgtgacagtttcccacaagccaggctgatccttttctgtcagtccacttcaccaagcctgcccttggacaaggacccgatgcccaaccccaggcctggcaagccctcggccccttccttggcccttggcccatccccaggagcctcgcccagctggagggctgcacccaaagcctcagacctgctgggggcccggggcccagggggaaccttccagggccgagatcttcgaggcggggcccatgcctcctcttcttccttgaaccccatgccaccatcgcagctgcagctgcccacactgcccctagtcatggtggcaccctccggggcacggctgggccccttgccccacttacaggcactcctccaggacaggccacatttcatgcaccagctctcaacggtggatgcccacgcccggacccctgtgctgcaggtgcaccccctggagagcccagccatgatcagcctcacaccacccaccaccgccactggggtcttctccctcaaggcccggcctggcctcccacctgggatcaacgtggccagcctggaatgggtgtccagggagccggcactgctctgcaccttcccaaatcccagtgcacccaggaaggacagcaccctttcggctgtgccccagagctcctacccactgctggcaaatggtgtctgcaagtggcccggatgtgagaaggtcttcgaagagccagaggacttcctcaagcactgccaggcggaccatcttctggatgagaagggcagggcacaatgtctcctccagagagagatggtacagtctctggagcagcagctggtgctggagaaggagaagctgagtgccatgcaggcccacctggctgggaaaatggcactgaccaaggcttcatctgtggcatcatccgacaagggctcctgctgcatcgtagctgctggcagccaaggccctgtcgtcccagcctggtctggcccccgggaggcccctgacagcctgtttgctgtccggaggcacctgtggggtagccatggaaacagcacattcccagagttcctccacaacatggactacttcaagttccacaacatgcgaccccctttcacctacgccacgctcatccgctgggccatcctggaggctccagagaagcagcggacactcaatgagatctaccactggttcacacgcatgtttgccttcttcagaaaccatcctgccacctggaagaacgccatccgccacaacctgagtctgcacaagtgctttgtgcgggtggagagcgagaagggggctgtgtggaccgtggatgagctggagttccgcaagaaacggagccagaggcccagcaggtgttccaaccctacacctggcccctgacctcaagatcaaggaaaggaggatggacgaacaggggccaaactggtgggaggcagaggtggtgggggcagggatgataggccctggatgtgcccacagggaccaagaagtgaggtttccactgtcttgcctgccagggcccctgttcccccgctggcagccaccccctcccccatcatatcctttgccccaaggctgctcagaggggccccggtcctggccccagcccccacctccgccccagacacaccccccagtcgagccctgcagccaaacagagccttcacaaccagccacacagagcctgcctcagctgctcgcacagattacttcagggctggaaaagtcacacagacacacaaaatgtcacaatcctgtccctcactcaacacaaaccccaaaacacagagagcctgcctcagtacactcaaacaacctcaaagctgcatcatcacacaatcacacacaagcacagccctgacaacccacacaccccaaggcacgcacccacagccagcctcagggcccacaggggcactgtcaacacaggggtgtgcccagaggcctacacagaagcagcgtcagtaccctcaggatctgaggtcccaacacgtgctcgctcacacacacggcctgttagaattcacctgtgtatctcacgcatatgcacacgcacagccccccagtgggtctcttgagtcccgtgcagacacacacagccacacacactgccttgccaaaaataccccgtgtctcccctgccactcacctcactcccattccctgagccctgatccatgcctcagcttagactgcagaggaactactcatttatttgggatccaaggcccccaacccacagtaccgtccccaataaactgcagccgagctccccaca

SEQ ID NO: 11137 - DNA, 1215 bp, Homo sapiens
  source 1..1215: mol_type = unassigned DNA
atgcccaaccccaggcctggcaagccctcggccccttccttggcccttggcccatccccaggagcctcgcccagctggagggctgcacccaaagcctcagacctgctgggggcccggggcccagggggaaccttccagggccgagatcttcgaggcggggcccatgcctcctcttcttccttgaaccccatgccaccatcgcagctgcagctgcccacactgcccctagtcatggtggcaccctccggggcacggctgggccccttgccccacttacaggcactcctccaggacaggccacatttcatgcaccagctctcaacggtggatgcccacgcccggacccctgtgctgcaggtgcaccccctggagagcccagccatgatcagcctcacaccacccaccaccgccactggggtcttctccctcaaggcccggcctggcctcccacctgggatcaacgtggccagcctggaatgggtgtccagggagccggcactgctctgcaccttcccaaatcccagtgcacccaggaaggacagcaccctttcggctgtgccccagagctcctacccactgctggcaaatggtgtctgcaagtggcccggatgtgagaaggtcttcgaagagccagaggacttcctcaagcactgccaggcggaccatcttctggatgagaagggcagggcacaatgtctcctccagagagagatggtacagtctctggagcagcaggcatcatccgacaagggctcctgctgcatcgtagctgctggcagccaaggccctgtcgtcccagcctggtctggcccccgggaggcccctgacagcctgtttgctgtccggaggcacctgtggggtagccatggaaacagcacattcccagagttcctccacaacatggactacttcaagttccacaacatgcgaccccctttcacctacgccacgctcatccgctgggccatcctggaggctccagagaagcagcggacactcaatgagatctaccactggttcacacgcatgtttgccttcttcagaaaccatcctgccacctggaagaacgccatccgccacaacctgagtctgcacaagtgctttgtgcgggtggagagcgagaagggggctgtgtggaccgtggatgagctggagttccgcaagaaacggagccagaggcccagcaggtgttccaaccctacacctggcccctga

SEQ ID NO: 11138 - DNA, 1213 bp, Homo sapiens
  source 1..1213: mol_type = unassigned DNA
cctgcccttggacaaggacccgatgcccaaccccaggcctggcaagccctcggccccttccttggcccttggcccatccccaggagcctcgcccagctggagggctgcacccaaagcctcagacctgctgggggcccggggcccagggggaaccttccagggccgagatcttcgaggcggggcccatgcctcctcttcttccttgaaccccatgccaccatcgcagctgcagctctcaacggtggatgcccacgcccggacccctgtgctgcaggtgcaccccctggagagcccagccatgatcagcctcacaccacccaccaccgccactggggtcttctccctcaaggcccggcctggcctcccacctgggatcaacgtggccagcctggaatgggtgtccagggagccggcactgctctgcaccttcccaaatcccagtgcacccaggaaggacagcaccctttcggctgtgccccagagctcctacccactgctggcaaatggtgtctgcaagtggcccggatgtgagaaggtcttcgaagagccagaggacttcctcaagcactgccaggcggaccatcttctggatgagaagggcagggcacaatgtctcctccagagagagatggtacagtctctggagcagcagctggtgctggagaaggagaagctgagtgccatgcaggcccacctggctgggaaaatggcactgaccaaggcttcatctgtggcatcatccgacaagggctcctgctgcatcgtagctgctggcagccaaggccctgtcgtcccagcctggtctggcccccgggaggcccctgacagcctgtttgctgtccggaggcacctgtggggtagccatggaaacagcacattcccagagttcctccacaacatggactacttcaagttccacaacatgcgaccccctttcacctacgccacgctcatccgctgggccatcctggaggctccagagaagcagcggacactcaatgagatctaccactggttcacacgcatgtttgccttcttcagaaaccatcctgccacctggaagaacgccatccgccacaacctgagtctgcacaagtgctttgtgcgggtggagagcgagaagggggctgtgtggaccgtggatgagctggagttccgcaagaaacggagccagaggcccagcaggtgttccaaccctacacctggcccctga

SEQ ID NO: 11139 - DNA, 3745 bp, Homo sapiens
  source 1..3745: mol_type = unassigned DNA
cgctagagcgacatgatggtggaatctgcctcggagacaatcaggtcggctccatctggtcagaatggcgtgggcagcctctctgggcaagccgatggcagcagcggcggggccacagggacaactgcaagtggcacgggcagggaagtgaccacgggtgcagacagcaatggtgagatgagtcccgcagagctgctgcacttccagcagcaacaggctctccaagtggcccggcagttcctgctgcagcaggcctcaggcctgagctccccagggaacaatgacagcaaacagtctgcctctgctgtgcaggtgcctgtgtcggtggccatgatgtcgccgcagatgcttaccccgcaacagatgcagcagatcctgtcgcccccgcagctgcaggccttgctccagcagcagcaagccctcatgctccagcagctacaggagtactacaagaagcagcaggagcagctccacctgcagctcctcacccagcagcaggctgggaaaccgcagcccaaagaggcactggggaacaagcagctggccttccagcagcagctcctgcaaatgcaacagttgcagcagcagcacctgctcaacctgcagaggcaggggctggtcagcctgcagcccaaccaagcctcggggcccctccagacccttccgcaagcagctgtttgcccaacagacctgccccagctgtggaagggcgagggtgcccccgggcagcctgccgaggacagcgtcaagcaggaggggctggacctcactggcacggccgccaccgctacctcgtttgccgctccccccaaggtctcaccccccctctcccaccataccctgcccaacggacagcctactgtgctcacatctcggagagacagctcttcccacgaggagacccccggctcccaccccctgtacggacacggagagtgcaagtggccaggctgtgagaccctgtgtgaagacctgggccagtttatcaaacacctcaacacagagcacgccctggatgaccggagtacagcccagtgccgggtacagatgcaggtggtgcagcagctggagatccagctcgccaaggagagcgagcggctgcaggccatgatggcccacctgcacatgcggccctcggagcccaagcccttcagccagccactgaacccggtccccggctcctcctcattctccaaggtgaccgtctctgcagcagactcattcccagatggtctcgtgcaccccccgacctcggccgcagcccctgtcacccctctacggccccctggcctgggctctgcctccctgcatggtgggggcccagcccgtcggagaagcagtgacaagttctgctcccccatctcctcagagctggcccagaatcatgagttctacaagaacgccgacgtccggccccccttcacctacgcctccctcatccgccaggccatcctggaaacccctgacaggcagctgaccctgaatgagatctataactggttcaccaggatgttcgcctatttccgcagaaacactgccacctggaagaacgccgtgcgccacaacctcagcctgcacaagtgcttcgtccgcgtggagaacgtcaagggtgccgtgtggactgtggacgagcgggagtatcagaagcggagaccgccaaagatgacagggagccccaccctggtgaagaacatgatctctggcctcagctatggagcacttaatgccagctaccaggccgccctggccgagagcagcttccccctcctcaacagccctggcatgctgaaccctggctccgccagcagcctgctgcccctcagccacgatgacgtgggtgcccccgtggagccgctgcccagcaacggcagcagcagccctcctcgcctctccccgccccagtacagccaccaggtgcaggtgaaggaggagccagcagaggcagaggaagacaggcagcccgggcctcccctgggcgcccctaaccccagcgcctcggggcctccggaagacagggacctggaggaggagctgccgggagaagaactgtcctaagggcctgtagtgaccggcagggctggggtgagacccctcccttccagaatccaggccccatctcccccaactccacagcccctcccgagcctcaaggcaagtccaggactcagaccggggaggcccgggccagcagctcccagtgtgacctgacaaaaacacgtaggggcagggacggtccccacccccagggacacaacccctggtcttggaccagtagaggacacggagggttcagacccctcctcagaccctccccacatctgaaactgcctccccccaaccaccagcagcagcagggccctcctcccccaccagctctccccacagggcccctcagcatcatggagacccgcaggcggggcttagccacccctcaaacccagggccccctggcacctggctctggccgtgttttctggccagaggcccccactttcctaactcgtgctcccttccgccttcttttccgtactgtgaagaaagaactctccaccccagctcccaccctgccctggcctgggtggaggaactgtgcctccatccccagaagaaacagccccctctgctgctggggtgggactgtctgtgtgccctgtgggggtccgtgtgagcaggcccacctggctccagacccgcccccaacctgagacagaaccaggctgagccaggcctccacccccacccccgtttgctgggggctcctccagccgcccccatgggaagaggcctggtaccgcctcacccacagaggtctgtgccaggtgcgcttctgcaggtggagccaagctctccctgaggccagaggcggggcctgggccgggagcccaggggaaggccaggctggaccccggctccacacccacatccagcctgcaggcctctctgcagtcctctcaccctccctcagctccccttcctctgcagtcaccctcagctccccttccttgcccgcctctccccccgccgccccaccagttaaacggatgaccaaagacctttcttatgccggaagcaaaaaccaaaactttttgttggctttttcctttgtcgcctccccagcacctgccctcccagtctcccaccccggccccaggctggaagccctccctccacttaagttattgttttaaaccaaagtttacagtgtctgttggtggccaagaccttctctctccacccctcctccatccaccctgaggaccctggggctcagtggaggcagggccctgcccccctcccttccgctcctgcccagcctgggggaaggagaaaggaggggagaaagcgggctctcaccccctcaggagtgggcacgggagcccttctccctgaccctgggctgcttcctgggggctctccagacccctctctaggaccaagtcacccgtcgtgctgggagtgtggattctagcaaaagagctggaaaaaagtcagactctccacagaccccctatgggggacccccaactcaaggccaaggactgggcgtatcggatgctcataacacccctggcctggcccctttactgagaagactccttggatatttcccaagaaccccccacatacacccctcacaagccacccctcctgagaggcagggggccctccgccccctccccatgtattccccacctgtgttccgtttgaccagcacagaaatattaaacgtcctctattcaccggg

SEQ ID NO: 11140 - DNA, 3300 bp, Homo sapiens
  source 1..3300: mol_type = unassigned DNA
gcgagccaagcagcccacaaagtgccatgccccggcggggttgaggcgcgcggcggtcggcccggcgcgctgggaggacgcccgggagctgcgcgacgcggggcggcgcggaagggcagccccggcgggcggcggcgggcccgggctgcgaccggagcgagccccatgccccgcgcgggctgacgggccggagcccgcacggagcggccgggcgggacaggtaccgctagagcgacatgatggtggaatctgcctcggagacaatcaggtcggctccatctggtcagaatggcgtgggcagcctctctgggcaagccgatggcagcagcggcggggccacagggacaactgcaagtggcacgggcagggaagtgaccacgggtgcagacagcaatggtgagatgagtcccgcagagctgctgcacttccagcagcaacaggctctccaagtggcccggcagttcctgctgcagcaggcctcaggcctgagctccccagggaacaatgacagcaaacagtctgcctctgctgtgcaggtgcctgtgtcggtggccatgatgtcgccgcagatgcttaccccgcaacagatgcagcagatcctgtcgcccccgcagctgcaggccttgctccagcagcagcaagccctcatgctccagcaggagtactacaagaagcagcaggagcagctccacctgcagctcctcacccagcagcaggctgggaaaccgcagcccaaagaggcactggggaacaagcagctggccttccagcagcagctcctgcaaatgcaacagttgcagcagcagcacctgctcaacctgcagaggcaggggctggtcagcctgcagcccaaccaagcctcggggcccctccagacccttccgcaagcagctgtttgcccaacagacctgccccagctgtggaagggcgagggtgcccccgggcagcctgccgaggacagcgtcaagcaggaggggctggacctcactggcacggccgccaccgctacctcgtttgccgctccccccaaggtctcaccccccctctcccaccataccctgcccaacggacagcctactgtgctcacatctcggagagacagctcttcccacgaggagacccccggctcccaccccctgtacggacacggagagtgcaagtggccaggctgtgagaccctgtgtgaagacctgggccagtttatcaaacacctcaacacagagcacgccctggatgaccggagtacagcccagtgccgggtacagatgcaggtggtgcagcagctggagatccagctcgccaaggagagcgagcggctgcaggccatgatggcccacctgcacatgcggccctcggagcccaagcccttcagccagccactgaacccggtccccggctcctcctcattctccaaggtgaccgtctctgcagcagactcattcccagatggtctcgtgcaccccccgacctcggccgcagcccctgtcacccctctacggccccctggcctgggctctgcctccctgcatggtgggggcccagcccgtcggagaagcagtgacaagttctgctcccccatctcctcagagctggcccagaatcatgagttctacaagaacgccgacgtccggccccccttcacctacgcctccctcatccgccaggccatcctggaaacccctgacaggcagctgaccctgaatgagatctataactggttcaccaggatgttcgcctatttccgcagaaacactgccacctggaagaacgccgtgcgccacaacctcagcctgcacaagtgcttcgtccgcgtggagaacgtcaagggtgccgtgtggactgtggacgagcgggagtatcagaagcggagaccgccaaagatgacagggagccccaccctggtgaagaacatgatctctggcctcagctatggagcacttaatgccagctaccaggccgccctggccgagagcagcttccccctcctcaacagccctggcatgctgaaccctggctccgccagcagcctgctgcccctcagccacgatgacgtgggtgcccccgtggagccgctgcccagcaacggcagcagcagccctcctcgcctctccccgccccagtacagccaccaggtgcaggtgaaggaggagccagcagaggcagaggaagacaggcagcccgggcctcccctgggcgcccctaaccccagcgcctcggggcctccggaagacagggacctggaggaggagctgccgggagaagaactgtcctaagggcctgtagtgaccggcagggctggggtgagacccctcccttccagaatccaggccccatctcccccaactccacagcccctcccgagcctcaaggcaagtccaggactcagaccggggaggcccgggccagcagctcccagtgtgacctgacaaaaacacgtaggggcagggacggtccccacccccagggacacaacccctggtcttggaccagtagaggacacggagggttcagacccctcctcagaccctccccacatctgaaactgcctccccccaaccaccagcagcagcagggccctcctcccccaccagctctccccacagggcccctcagcatcatggagacccgcaggcggggcttagccacccctcaaacccagggccccctggcacctggctctggccgtgttttctggccagaggcccccactttcctaactcgtgctcccttccgccttcttttccgtactgtgaagaaagaactctccaccccagctcccaccctgccctggcctgggtggaggaactgtgcctccatccccagaagaaacagccccctctgctgctggggtgggactgtctgtgtgccctgtgggggtccgtgtgagcaggcccacctggctccagacccgcccccaacctgagacagaaccaggctgagccaggcctccacccccacccccgtttgctgggggctcctccagccgcccccatgggaagaggcctggtaccgcctcacccacagaggtctgtgccaggtgcgcttctgcaggtggagccaagctctccctgaggccagaggcggggcctgggccgggagcccaggggaaggccaggctggaccccggctccacacccacatccagcctgcaggcctctctgcagtcctctcaccctccctcagctccccttcctctgcagtcaccctcagctccccttccttgcccgcctctccccccgccgccccaccagttaaacggatgaccaaagacctttcttatgccggaagcaaaaaccaaaa

SEQ ID NO: 11141 - DNA, 5948 bp, Homo sapiens
  source 1..5948: mol_type = unassigned DNA
gccgtccctgcggaccggacagtgcggccggcggccggcggccgggacggagcccccagcccgcgaggagggcgcggcgcaggcggcggcggcgcggcggggaggagcccgggccggaaccagggctgggccgggggcggggacgccggggtccgggagcccgggagccggagcgagctgacgagcgtcgcggaaggaccgggaaggaagagcggagccggagcgagccaagcagcccacaaagtgccatgccccggcggggttgaggcgcgcggcggtcggcccggcgcgctgggaggacgcccgggagctgcgcgacgcggggcggcgcggaagggcagccccggcgggcggcggcgggcccgggctgcgaccggagcgagccccatgccccgcgcgggctgacgggccggagcccgcacggagcggccgggcgggacaggtaccgctagagcgacatgatggtggaatctgcctcggagacaatcaggtcggctccatctggtcagaatggcgtgggcagcctctctgggcaagccgatggcagcagcggcggggccacagggacaactgcaagtggcacgggcagggaagtgaccacgggtgcagacagcaatggtgagatgagtcccgcagagctgctgcacttccagcagcaacaggctctccaagtggcccggcagttcctgctgcagcaggcctcaggcctgagctccccagggaacaatgacagcaaacagtctgcctctgctgtgcaggtgcctgtgtcggtggccatgatgtcgccgcagatgcttaccccgcaacagatgcagcagatcctgtcgcccccgcagctgcaggccttgctccagcagcagcaagccctcatgctccagcagctacaggagtactacaagaagcagcaggagcagctccacctgcagctcctcacccagcagcaggctgggaaaccgcagcccaaagaggcactggggaacaagcagctggccttccagcagcagctcctgcaaatgcaacagttgcagcagcagcacctgctcaacctgcagaggcaggggctggtcagcctgcagcccaaccaagcctcggggcccctccagacccttccgcaagcagctgtttgcccaacagacctgccccagctgtggaagggcgagggtgcccccgggcagcctgccgaggacagcgtcaagcaggaggggctggacctcactggcacggccgccaccgctacctcgtttgccgctccccccaaggtctcaccccccctctcccaccataccctgcccaacggacagcctactgtgctcacatctcggagagacagctcttcccacgaggagacccccggctcccaccccctgtacggacacggagagtgcaagtggccaggctgtgagaccctgtgtgaagacctgggccagtttatcaaacacctcaacacagagcacgccctggatgaccggagtacagcccagtgccgggtacagatgcaggtggtgcagcagctggagatccagctcgccaaggagagcgagcggctgcaggccatgatggcccacctgcacatgcggccctcggagcccaagcccttcagccagccactgaacccggtccccggctcctcctcattctccaaggtgaccgtctctgcagcagactcattcccagatggtctcgtgcaccccccgacctcggccgcagcccctgtcacccctctacggccccctggcctgggctctgcctccctgcatggtgggggcccagcccgtcggagaagcagtgacaagttctgctcccccatctcctcagagctggcccagaatcatgagttctacaagaacgccgacgtccggccccccttcacctacgcctccctcatccgccaggccatcctggaaacccctgacaggcagctgaccctgaatgagatctataactggttcaccaggatgttcgcctatttccgcagaaacactgccacctggaagaacgccgtgcgccacaacctcagcctgcacaagtgcttcgtccgcgtggagaacgtcaagggtgccgtgtggactgtggacgagcgggagtatcagaagcggagaccgccaaagatgacagggagccccaccctggtgaagaacatgatctctggcctcagctatggagcacttaatgccagctaccaggccgccctggccgagagcagcttccccctcctcaacagccctggcatgctgaaccctggctccgccagcagcctgctgcccctcagccacgatgacgtgggtgcccccgtggagccgctgcccagcaacggcagcagcagccctcctcgcctctccccgccccagtacagccaccaggtgcaggtgaaggaggagccagcagaggcagaggaagacaggcagcccgggcctcccctgggcgcccctaaccccagcgcctcggggcctccggaagacagggacctggaggaggagctgccgggagaagaactgtcctaagggcctgtagtgaccggcagggctggggtgagacccctcccttccagaatccaggccccatctcccccaactccacagcccctcccgagcctcaaggcaagtccaggactcagaccggggaggcccgggccagcagctcccagtgtgacctgacaaaaacacgtaggggcagggacggtccccacccccagggacacaacccctggtcttggaccagtagaggacacggagggttcagacccctcctcagaccctccccacatctgaaactgcctccccccaaccaccagcagcagcagggccctcctcccccaccagctctccccacagggcccctcagcatcatggagacccgcaggcggggcttagccacccctcaaacccagggccccctggcacctggctctggccgtgttttctggccagaggcccccactttcctaactcgtgctcccttccgccttcttttccgtactgtgaagaaagaactctccaccccagctcccaccctgccctggcctgggtggaggaactgtgcctccatccccagaagaaacagccccctctgctgctggggtgggactgtctgtgtgccctgtgggggtccgtgtgagcaggcccacctggctccagacccgcccccaacctgagacagaaccaggctgagccaggcctccacccccacccccgtttgctgggggctcctccagccgcccccatgggaagaggcctggtaccgcctcacccacagaggtctgtgccaggtgcgcttctgcaggtggagccaagctctccctgaggccagaggcggggcctgggccgggagcccaggggaaggccaggctggaccccggctccacacccacatccagcctgcaggcctctctgcagtcctctcaccctccctcagctccccttcctctgcagtcaccctcagctccccttccttgcccgcctctccccccgccgccccaccagttaaacggatgaccaaagacctttcttatgccggaagcaaaaaccaaaactttttgttggctttttcctttgtcgcctccccagcacctgccctcccagtctcccaccccggccccaggctggaagccctccctccacttaagttattgttttaaaccaaagtttacagtgtctgttggtggccaagaccttctctctccacccctcctccatccaccctgaggaccctggggctcagtggaggcagggccctgcccccctcccttccgctcctgcccagcctgggggaaggagaaaggaggggagaaagcgggctctcaccccctcaggagtgggcacgggagcccttctccctgaccctgggctgcttcctgggggctctccagacccctctctaggaccaagtcacccgtcgtgctgggagtgtggattctagcaaaagagctggaaaaaagtcagactctccacagaccccctatgggggacccccaactcaaggccaaggactgggcgtatcggatgctcataacacccctggcctggcccctttactgagaagactccttggatatttcccaagaaccccccacatacacccctcacaagccacccctcctgagaggcagggggccctccgccccctccccatgtattccccacctgtgttccgtttgaccagcacagaaatattaaacgtcctctattcaccgggccctgtgtgtgtcaccgaggtgcgggaggggaggagcattaaagctgaaagatcgctctgctcggggagcctgggcagagcagcagcaacgtgagggtcgctgtggtggtggtttctgtgagtggatggaatgagcagccctgcaggggcgctgggcatgtgccctcactgtggacagggcccacccacctccggttcccctgtgcctcctgtcccttccacgcttaaacagggttctctgtcattttcctgttttcttccagagtcccaatcctttgccctagttctttcactagtttgaaatccaagttcttgccagagtgttggagcaaggcagctgatttgctgcagggatggagaggaccaccgccgcagggttcttttacctgtgccaccagctctggagacatccacacccattcccaggtgtccttccaggcccattgtccacgtcttcaagggggctgcctggataggcgtgtgtgtgtgtagtgcccaggtgtggtggtggcatcctgaagcagtaggaccattagtgtgcgtgcacacccacgtggcacactgtgtggtgaccatggtcatcatagtgggctcacggcggaaacgggatcattcaacctatacaaaggggaccctggataggctgcaaggaaagaggccaagggccaagctgctaagccaaagatggcccctgacacctcccccagccccagcacaccagcctgcacctcttatcccgtgttaagtcctggttccccacctgctgcccctcctcaacacagagcccctcccgccgcctcagacccctgtgcacatccccagggcctcagccgtctcattggtctttattttttattttttttaagatggagtttcgctcttattgcccagactggagtgcagtgatgctatctcggctcactgcaacctttgcctcccaggttcaagtgattctcctgcctcagcctcccaagtagctgggattacaggcgtgcaccaccacgccgggctaaatttttttgtatttttagtagagacggggtttctctatgttggtcaggctgatctcgaactcccgacctcaggtgatccgccagcctcagcctcccaaagtgctgggattacaggcgtgagccactgcacccggctctcactggtcttacgccaccttctggacactccctccttgagggcagaaaggagtcccaggcctgtccctagggacaaggcccagggaagagtgtatttggggagcaggggaggggagggtgttgagaaagctgaactggagtcaatcacccttcccacaaatcaccaaactgctggaactctccagccaaatgctgggagaaggacctggagggtgagtctttgctgacctctctctactctcaggcatgtcttttgtccttttcgtccatctatttctgtctgtcgctcactcgccccgctttctctgtctcaccttcatccactctgcaggcctgctccaccacagccctaatcctctggacgcttgtgtagggcctggggtgaattccctgtcccccatggtacctcgagaggggctggggagctcagcttggtctcagagtctccccaccagatactgtttaaaaaagtagcactgatgtgttttgtaatctgcccctcccagccctccgtggaggctgccagggccttgtacggtaaacctagctgcatgtaatctgtggacaatggcattctctacaatgcaataaaaacaattacccatg

SEQ ID NO: 11142 - DNA, 5910 bp, Homo sapiens
  source 1..5910: mol_type = unassigned DNA
gccgtccctgcggaccggacagtgcggccggcggccggcggccgggacggagcccccagcccgcgaggagggcgcggcgcaggcggcggcggcgcggcggggaggagcccgggccggaaccagggctgggccgggggcggggacgccggggtccgggagcccgggagccggagcgagctgacgagcgtcgcggaaggaccgggaaggaagagcggagccggagcgagccaagcagcccacaaagtgccatgccccggcggggttgaggcgcgcggcggtcggcccggcgcgctgggaggacgcccgggagctgcgcgacgcggggcggcgcggaagggcagccccggcgggcggcggcgggcccgggctgcgaccggagcgagccccatgccccgcgcgggctgacgggccggagcccgcacggagcggccgggcgggacaggtaccgctagagcgacatgatggtggaatctgcctcggagacaatcaggtcggctccatctggtcagaatggcgtgggcagcctctctgggcaagccgatggcagcagcggcggggccacagggacaactgcaagtggcacgggcagggaagtgaccacgggtgcagacagcaatggtgagatgagtcccgcagagctgctgcacttccagcagcaacaggctctccaagtggcccggcagttcctgctgcagcaggcctcaggcctgagctccccagggaacaatgacagcaaacagtctgcctctgctgtgcaggtgcctgtgtcggtggccatgatgtcgccgcagatgcttaccccgcaacagatgcagcagatcctgtcgcccccgcagctgcaggccttgctccagcagcagcaagccctcatgctccagcagctacaggagtactacaagaagcagcaggagcagctccacctgcagctcctcacccagcagcaggctgggaaaccgcagcccaaagaggcactggggaacaagcagctggccttccagcagcagctcctgcaaatgcaacagttgcagcagcagcacctgctcaacctgcagaggcaggggctggtcagcctgcagcccaaccaagcctcggggcccctccagacccttccgcaagctgtttgcccaacagacctgccccagctgtggaagggcgagggtgcccccgggcagcctgccgaggacagcgtcaagcaggaggggctggacctcactggcacggccgccaccgctacctcgtttgccgctccccccaaggtctcaccccccctctcccaccataccctgcccaacggacagcctactgtgctcacatctcggagagacagctcttcccacgaggagacccccggctcccaccccctgtacggacacggagagtgcaagtggccaggctgtgagaccctgtgtgaagacctgggccagtttatcaaacacctcaacacagagcacgccctggatgaccggagtacagcccagtgccgggtacagatgcaggtggtgcagcagctggagatccagctcgccaaggagagcgagcggctgcaggccatgatggcccacctgcacatgcggccctcggagcccaagcccttcagccagccagtgaccgtctctgcagcagactcattcccagatggtctcgtgcaccccccgacctcggccgcagcccctgtcacccctctacggccccctggcctgggctctgcctccctgcatggtgggggcccagcccgtcggagaagcagtgacaagttctgctcccccatctcctcagagctggcccagaatcatgagttctacaagaacgccgacgtccggccccccttcacctacgcctccctcatccgccaggccatcctggaaacccctgacaggcagctgaccctgaatgagatctataactggttcaccaggatgttcgcctatttccgcagaaacactgccacctggaagaacgccgtgcgccacaacctcagcctgcacaagtgcttcgtccgcgtggagaacgtcaagggtgccgtgtggactgtggacgagcgggagtatcagaagcggagaccgccaaagatgacagggagccccaccctggtgaagaacatgatctctggcctcagctatggagcacttaatgccagctaccaggccgccctggccgagagcagcttccccctcctcaacagccctggcatgctgaaccctggctccgccagcagcctgctgcccctcagccacgatgacgtgggtgcccccgtggagccgctgcccagcaacggcagcagcagccctcctcgcctctccccgccccagtacagccaccaggtgcaggtgaaggaggagccagcagaggcagaggaagacaggcagcccgggcctcccctgggcgcccctaaccccagcgcctcggggcctccggaagacagggacctggaggaggagctgccgggagaagaactgtcctaagggcctgtagtgaccggcagggctggggtgagacccctcccttccagaatccaggccccatctcccccaactccacagcccctcccgagcctcaaggcaagtccaggactcagaccggggaggcccgggccagcagctcccagtgtgacctgacaaaaacacgtaggggcagggacggtccccacccccagggacacaacccctggtcttggaccagtagaggacacggagggttcagacccctcctcagaccctccccacatctgaaactgcctccccccaaccaccagcagcagcagggccctcctcccccaccagctctccccacagggcccctcagcatcatggagacccgcaggcggggcttagccacccctcaaacccagggccccctggcacctggctctggccgtgttttctggccagaggcccccactttcctaactcgtgctcccttccgccttcttttccgtactgtgaagaaagaactctccaccccagctcccaccctgccctggcctgggtggaggaactgtgcctccatccccagaagaaacagccccctctgctgctggggtgggactgtctgtgtgccctgtgggggtccgtgtgagcaggcccacctggctccagacccgcccccaacctgagacagaaccaggctgagccaggcctccacccccacccccgtttgctgggggctcctccagccgcccccatgggaagaggcctggtaccgcctcacccacagaggtctgtgccaggtgcgcttctgcaggtggagccaagctctccctgaggccagaggcggggcctgggccgggagcccaggggaaggccaggctggaccccggctccacacccacatccagcctgcaggcctctctgcagtcctctcaccctccctcagctccccttcctctgcagtcaccctcagctccccttccttgcccgcctctccccccgccgccccaccagttaaacggatgaccaaagacctttcttatgccggaagcaaaaaccaaaactttttgttggctttttcctttgtcgcctccccagcacctgccctcccagtctcccaccccggccccaggctggaagccctccctccacttaagttattgttttaaaccaaagtttacagtgtctgttggtggccaagaccttctctctccacccctcctccatccaccctgaggaccctggggctcagtggaggcagggccctgcccccctcccttccgctcctgcccagcctgggggaaggagaaaggaggggagaaagcgggctctcaccccctcaggagtgggcacgggagcccttctccctgaccctgggctgcttcctgggggctctccagacccctctctaggaccaagtcacccgtcgtgctgggagtgtggattctagcaaaagagctggaaaaaagtcagactctccacagaccccctatgggggacccccaactcaaggccaaggactgggcgtatcggatgctcataacacccctggcctggcccctttactgagaagactccttggatatttcccaagaaccccccacatacacccctcacaagccacccctcctgagaggcagggggccctccgccccctccccatgtattccccacctgtgttccgtttgaccagcacagaaatattaaacgtcctctattcaccgggccctgtgtgtgtcaccgaggtgcgggaggggaggagcattaaagctgaaagatcgctctgctcggggagcctgggcagagcagcagcaacgtgagggtcgctgtggtggtggtttctgtgagtggatggaatgagcagccctgcaggggcgctgggcatgtgccctcactgtggacagggcccacccacctccggttcccctgtgcctcctgtcccttccacgcttaaacagggttctctgtcattttcctgttttcttccagagtcccaatcctttgccctagttctttcactagtttgaaatccaagttcttgccagagtgttggagcaaggcagctgatttgctgcagggatggagaggaccaccgccgcagggttcttttacctgtgccaccagctctggagacatccacacccattcccaggtgtccttccaggcccattgtccacgtcttcaagggggctgcctggataggcgtgtgtgtgtgtagtgcccaggtgtggtggtggcatcctgaagcagtaggaccattagtgtgcgtgcacacccacgtggcacactgtgtggtgaccatggtcatcatagtgggctcacggcggaaacgggatcattcaacctatacaaaggggaccctggataggctgcaaggaaagaggccaagggccaagctgctaagccaaagatggcccctgacacctcccccagccccagcacaccagcctgcacctcttatcccgtgttaagtcctggttccccacctgctgcccctcctcaacacagagcccctcccgccgcctcagacccctgtgcacatccccagggcctcagccgtctcattggtctttattttttattttttttaagatggagtttcgctcttattgcccagactggagtgcagtgatgctatctcggctcactgcaacctttgcctcccaggttcaagtgattctcctgcctcagcctcccaagtagctgggattacaggcgtgcaccaccacgccgggctaaatttttttgtatttttagtagagacggggtttctctatgttggtcaggctgatctcgaactcccgacctcaggtgatccgccagcctcagcctcccaaagtgctgggattacaggcgtgagccactgcacccggctctcactggtcttacgccaccttctggacactccctccttgagggcagaaaggagtcccaggcctgtccctagggacaaggcccagggaagagtgtatttggggagcaggggaggggagggtgttgagaaagctgaactggagtcaatcacccttcccacaaatcaccaaactgctggaactctccagccaaatgctgggagaaggacctggagggtgagtctttgctgacctctctctactctcaggcatgtcttttgtccttttcgtccatctatttctgtctgtcgctcactcgccccgctttctctgtctcaccttcatccactctgcaggcctgctccaccacagccctaatcctctggacgcttgtgtagggcctggggtgaattccctgtcccccatggtacctcgagaggggctggggagctcagcttggtctcagagtctccccaccagatactgtttaaaaaagtagcactgatgtgttttgtaatctgcccctcccagccctccgtggaggctgccagggccttgtacggtaaacctagctgcatgtaatctgtggacaatggcattctctacaatgcaataaaaacaattacccatga

SEQ ID NO: 11143 - DNA, 3341 bp, Homo sapiens
  source 1..3341: mol_type = unassigned DNA
ggggtccgggagcccgggagccggagcgagctgacgagcgtcgcggaaggaccgggaaggaagagcggagccggagcgagccaagcagcccacaaagtgccatgccccggcggggttgaggcgcgcggcggtcggcccggcgcgctgggaggacgcccgggagctgcgcgacgcggggcggcgcggaagggcagccccggcgggcggcggcgggcccgggctgcgaccggagcgagccccatgccccgcgcgggctgacgggccggagcccgcacggagcggccgggcgggacaggtaccgctagagcgacatgatggtggaatctgcctcggagacaatcaggtcggctccatctggtcagaatggcgtgggcagcctctctgggcaagccgatggcagcagcggcggggccacagggacaactgcaagtggcacgggcagggaagtgaccacgggtgcagacagcaatggtgagatgagtcccgcagagctgctgcacttccagcagcaacaggctctccaagtggcccggcagttcctgctgcagcaggcctcaggcctgagctccccagggaacaatgacagcaaacagtctgcctctgctgtgcaggtgcctgtgtcggtggccatgatgtcgccgcagatgcttaccccgcaacagatgcagcagatcctgtcgcccccgcagctgcaggccttgctccagcagcagcaagccctcatgctccagcagctacaggagtactacaagaagcagcaggagcagctccacctgcagctcctcacccagcagcaggctgggaaaccgcagcccaaagaggcactggggaacaagcagctggccttccagcagcagctcctgcaaatgcaacagttgcagcagcagcacctgctcaacctgcagaggcaggggctggtcagcctgcagcccaaccaagcctcggggcccctccagacccttccgcaagcagctgtttgcccaacagacctgccccagctgtggaagggcgagggtgcccccgggcagcctgccgaggacagcgtcaagcaggaggggctggacctcactggcacggccgccaccgctacctcgtttgccgctccccccaaggtctcaccccccctctcccaccataccctgcccaacggacagcctactgtgctcacatctcggagagacagctcttcccacgaggagacccccggctcccaccccctgtacggacacggagagtgcaagtggccaggctgtgagaccctgtgtgaagacctgggccagtttatcaaacacctcaacacagagcacgccctggatgaccggagtacagcccagtgccgggtacagatgcaggtggtgcagcagctggagatccagctcgccaaggagagcgagcggctgcaggccatgatggcccacctgcacatgcggccctcggagcccaagcccttcagccagccagtgaccgtctctgcagcagactcattcccagatggtctcgtgcaccccccgacctcggccgcagcccctgtcacccctctacggccccctggcctgggctctgcctccctgcatggtgggggcccagcccgtcggagaagcagtgacaagttctgctcccccatctcctcagagctggcccagaatcatgagttctacaagaacgccgacgtccggccccccttcacctacgcctccctcatccgccaggccatcctggaaacccctgacaggcagctgaccctgaatgagatctataactggttcaccaggatgttcgcctatttccgcagaaacactgccacctggaagaacgccgtgcgccacaacctcagcctgcacaagtgcttcgtccgcgtggagaacgtcaagggtgccgtgtggactgtggacgagcgggagtatcagaagcggagaccgccaaagatgacagggagccccaccctggtgaagaacatgatctctggcctcagctatggagcacttaatgccagctaccaggccgccctggccgagagcagcttccccctcctcaacagccctggcatgctgaaccctggctccgccagcagcctgctgcccctcagccacgatgacgtgggtgcccccgtggagccgctgcccagcaacggcagcagcagccctcctcgcctctccccgccccagtacagccaccaggtgcaggtgaaggaggagccagcagaggcagaggaagacaggcagcccgggcctcccctgggcgcccctaaccccagcgcctcggggcctccggaagacagggacctggaggaggagctgccgggagaagaactgtcctaagggcctgtagtgaccggcagggctggggtgagacccctcccttccagaatccaggccccatctcccccaactccacagcccctcccgagcctcaaggcaagtccaggactcagaccggggaggcccgggccagcagctcccagtgtgacctgacaaaaacacgtaggggcagggacggtccccacccccagggacacaacccctggtcttggaccagtagaggacacggagggttcagacccctcctcagaccctccccacatctgaaactgcctccccccaaccaccagcagcagcagggccctcctcccccaccagctctccccacagggcccctcagcatcatggagacccgcaggcggggcttagccacccctcaaacccagggccccctggcacctggctctggccgtgttttctggccagaggcccccactttcctaactcgtgctcccttccgccttcttttccgtactgtgaagaaagaactctccaccccagctcccaccctgccctggcctgggtggaggaactgtgcctccatccccagaagaaacagccccctctgctgctggggtgggactgtctgtgtgccctgtgggggtccgtgtgagcaggcccacctggctccagacccgcccccaacctgagacagaaccaggctgagccaggcctccacccccacccccgtttgctgggggctcctccagccgcccccatgggaagaggcctggtaccgcctcacccacagaggtctgtgccaggtgcgcttctgcaggtggagccaagctctccctgaggccagaggcggggcctgggccgggagcccaggggaaggccaggctggaccccggctccacacccacatccagcctgcaggcctctctgcagtcctctcaccctccctcagctccccttcctctgcagtcaccctcagctccccttccttgcccgcctctccccccgccgccccaccagttaaacggatgaccaaagacctttcttatgccggaagcaaaaacc

SEQ ID NO: 11144 - DNA, 2318 bp, Homo sapiens
  source 1..2318: mol_type = unassigned DNA
ctcaacgtcgaaccgaaggcgacacccacccaactcctccctctccgccccatagtccacccaacacttgcagcccctccagagaaaaagcccagcggaagaggactccggaaaagtgactatctcggaagaccagggtagagctcccgggagaaaaaggcgaagatccccggccccggatcgccatccccttccctggcaccagcttctctaggctgcgcgaaggaagagggtacgacgccggggagggactgggtgcgcgggcatgaagttggaggtgttcgtccctcgcgcggcccacggggacaagcagggcagtgacctggagggcgcgggcggcagcgacgcgccgtccccgctgtcggcggcgggagacgactccctgggctcagatggggactgcgcggccaacagcccggccgcgggcggcggcgccagagatacgcagggcgacggcgaacagagtgcgggaggcgggccgggcgcggaggaggcgatcccggcagcagctgctgcagcggtggtggcggagggcgcggaggccggggcggcggggccaggcgcgggcggcgcggggagcggcgagggtgcacgcagcaagccatatacgcggcggcccaagcccccctactcgtacatcgcgctcatcgccatggccatccgcgactcggcgggcgggcgcttgacgctggcggagatcaacgagtacctcatgggcaagttcccctttttccgcggcagctacacgggctggcgcaactccgtgcgccacaacctttcgctcaacgactgcttcgtcaaggtgctgcgcgacccctcgcggccctggggcaaggacaactactggatgctcaaccccaacagcgagtacaccttcgccgacggggtcttccgccgccgccgcaagcgcctcagccaccgcgcgccggtccccgcgcccgggctgcggcccgaggaggccccgggcctccccgccgccccgccgcccgcgcccgccgccccggcctcgccccgcatgcgctcgcccgcccgccaggaggagcgcgccagccccgcgggcaagttctccagctccttcgccatcgacagcatcctgcgcaagcccttccgcagccgccgcctcagggacacggcccccgggacgacgcttcagtggggcgccgcgccctgcccgccgctgcccgcgttccccgcgctcctccccgcggcgccctgcagggccctgctgccgctctgcgcgtacggcgcgggcgagccggcgcggctgggcgcgcgcgaggccgaggtgccaccgaccgcgccgcccctcctgcttgcacctctcccggcggcggcccccgccaagccactccgaggcccggcggccggcggcgcgcacctgtactgccccctgcggctgcccgcagccctgcaggcggcctcagtccgccgccctggcccgcacctgccgtacccggtggagacgctcctagcctgagtagcgccgcggggcccgggaacgccgagtgcgcgccgtcggggaggcgggaacgcgggcccgcgcgcggactttgcactttgaatccagaggaagatgaatttttaaaatctccatcaaacgtgccttaaagctaaagcattttgacaggagtatttaaacttagtccaggatattttcctttgtgttttataactttacagaggaccaaagcaattcttgttttagtttctttgcgaagcctgctcctccttcccttcataaggactttttttgtctttctttaacgcccaggcttcgtcttatttctactgtttttgtcgcaacttccattgatttatgtcccttccctcccccctaagtacatcagggaacctttccacactataaatgatatgactactgtttggggtttctgggcccccatccgtgtacgtatgtggcatttccaggtatgactgagtgtgagagacatgtcagaggctcttcagtgatttcttgctattgaccgatgcttcactgtgccaaaagagaaaaaaaatgttgggttttgtaattaaattatttatatatttttgaaacccgaattgaaaatgttgcaggcaacgggctacagctttattagtggttctctaactgtggtctccttgggccaagcaatttctttaaaggaaaagttgattatgtatgtggggtgccaggaccactgccttgaaagcaagtgtgatttttatttttaatattattttatttgtgtctgtgtacatattcatgtataaattttatgaaacccaagcatagtgcttattttttaataaaacaactgacttaacacattgtg

SEQ ID NO: 11145 - DNA, 1905 bp, Homo sapiens
  source 1..1905: mol_type = unassigned DNA
cttccatctgcccagagaggagcatctggatcaaggtgctggccatgtcccagctggtggaatgcgtccccaacttttcggaggggaagaaccaggaggtgatcgacgccatctctggagccatcacacagaccccgggctgcgtgctgctggatgtggacgcaggcccttccaccaaccgcaccgtgtacaccttcgtggggccgccggagtgcgtggtggagggggccctcaacgctgcccgggtagcttcccgacttatcgacatgagcaggcaccaaggagagcacccccgcatgggggccctagacgtctgccccttcatccccgtgaggggcgtcagcgtggatgagtgtgtgctctgcgcccaggcctttggccagaggctggcagaggagctggacgtgccagtttacctgtacggcgaggcagccaggatggacagtcgccggaccctgccggccatccgggccggggagtacgaggccctccctaagaagctccagcaggccgactgggcgcccgactttggtcccagctcctttgtccccagttggggggccacggccacgggggcgaggaagttcctcattgcttttaacatcaacctgctcggcacaaaggagcaagcccaccgcatcgcgctcaacctgcgggagcagggccgcgggaaggaccagccaggacgtctgaagaaagttcagggcattggctggtacctggatgagaagaacctggctcaggtgtccaccaatcttctggactttgaggtcacggcactgcacacggtctacgaggagacctgccgagaagcacaggagctgagcctcccagtggtgggctcacagctggtgggcctggtgcccctgaaggctctgctggatgcggccgccttctactgcgagaaggagaacctcttcatcctggaggaggagcagcggatcaggctggtggtgagccggctgggcctggactccctgtgccccttcagccctaaggagcggatcatcgagtacctggtccctgagcgcgggcctgagcgaggcctgggcagcaagtccctgcgcgccttcgtgggggaggtgggtgcccgctctgcggcccccgggggcggctcggtggcggcggccgctgcggccatgggtgcggcgctgggctccatggtgggcctcatgacctacgggcggcgccaattccagtccctggacacgacgatgcggcgcctgatcccgcccttccgcgaggcttcggccaagctaaccacgctggtggatgccgacgccgaggccttcaccgcctacctggaagcaatgaggctccccaagaacacacctgaggaaaaggacaggcgcacggcggccctacaggagggtctgaggcgggcagtctctgtgccgctgacgctggcggagacggtggcctcgctgtggccggccctgcaggaactggcccggtgtgggaacctggcctgccggtcagacctccaggtggcggccaaagccctggagatgggcgtgtttggcgcatatttcaacgtgctcatcaacctgagggacatcacagacgaggcatttaaggaccagatccaccatcgtgtttccagcctcctgcaggaagccaagacccaggctgcactggtgctggactgcttggagacccggcaggagtgacgaaaccccagggacagcaggaccttcgacgctggaaggatagcctcgcttcccaggtgcagctcccggcaggtctggacagttccacagagcacggtactggccctgtcctcagttcccgtccacccttcaaccagtggctcctgggagacttttcctccctgcctcagctccctgcccagccagcctcctgtctccagagaagttctccattaaaaaataatttagcaaatca

SEQ ID NO: 11146 - DNA, 1860 bp, Homo sapiens
  source 1..1860: mol_type = unassigned DNA
cttccatctgcccagagaggagcatctggatcaaggtgctggccatgtcccagctggtggaatgcgtccccaacttttcggaggggaagaaccaggaggtgatcgacgccatctctggagccatcacacagaccccgggctgcgtgctgctggatgtggacgcaggcccttccaccaaccgcaccgtgtacaccttcgtggggccgccggagtgcgtggtggagggggccctcaacgctgcccgggtagcttcccgacttatcgacatgagcaggcaccaaggtgagcacccccgcatgggggccctagacgtctgccccttcatccccgtgaggggcgtcagcgtggatgagtgtgtgctctgcgcccaggcctttggccagaggctggcagaggagctggacgtgccagtttacctgtacggcgaggcagccaggatggacagtcgccggaccctgccggccatccgggccggggagtacgaggccctccctaagaagctccagcaggccgactgggcgcccgactttggtcccagctcctttgtccccagttggggggccacggccacgggggcgaggaagttcctcattgcttttaacatcaacctgctcggcacaaaggagcaagcccaccgcatcgcgctcaacctgcgggagcagggccgcgggaaggaccagccaggacgtctgaagaaagttcagggcattggctggtacctggatgagaagaacctggctcaggtgtccaccaatcttctggactttgaggtcacggcactgcacacggtctacgaggagacctgccgagaagcacaggagctgagcctcccagtggtgggctcacagctggtgggcctggtgcccctgaaggctctgctggatgcggccgccttctactgcgagaaggagaacctcttcatcctggaggaggagcagcggatcaggctggtggtgagccggctgggcctggactccctgtgccccttcagccctaaggagcggatcatcgagtacctggtccctgagcgcgggcctgagcgaggcctgggcagcaagtccctgcgcgccttcgtgggggaggtgggtgcccgctctgcggcccccgggggcggctcggtggcggcggccgctgcggccatgggtgcggcgctgggctccatggtgggcctcatgacctacgggcggcgccaattccagtccctggacacgacgatgcggcgcctgatcccgcccttccgcgaggcttcggccaagctaaccacgctggtggatgccgacgccgaggccttcaccgcctacctggcgcacggcggccctacaggagggtctgaggcgggcagtctctgtgccgctgacgctggcggagacggtggcctcgctgtggccggccctgcaggaactggcccggtgtgggaacctggcctgccggtcagacctccaggtggcggccaaagccctggagatgggcgtgtttggcgcatatttcaacgtgctcatcaacctgagggacatcacagacgaggcatttaaggaccagatccaccatcgtgtttccagcctcctgcaggaagccaagacccaggctgcactggtgctggactgcttggagacccggcaggagtgacgaaaccccagggacagcaggaccttcgacgctggaaggatagcctcgcttcccaggtgcagctcccggcaggtctggacagttccacagagcacggtactggccctgtcctcagttcccgtccacccttcaaccagtggctcctgggagacttttcctccctgcctcagctccctgcccagccagcctcctgtctccagagaagttctccattaaaaaataatttagcaaatc

SEQ ID NO: 11147 - DNA, 1954 bp, Homo sapiens
  source 1..1954: mol_type = unassigned DNA
cttccatctgcccagagaggagcatctggatcaaggtgctggccatgtcccagctggtggaatgcgtccccaacttttcggaggggaagaaccaggaggtgatcgacgccatctctggagccatcacacagaccccgggctgcgtgctgctggatgtggacgcaggcccttccaccaaccgcaccgtgtacaccttcgtggggccgccggagtgcgtggtggagggggccctcaacgctgcccgggtagcttcccgacttatcgacatgagcaggcaccaaggtgagcacccccgcatgggggccctagacgtctgccccttcatccccgtgaggggcgtcagcgtggatgagtgtgtgctctgcgcccaggcctttggccagaggctggcagaggagctggacgtgccagtttacctgtacggcgaggcagccaggatggacagtcgccggaccctgccggccatccgggccggggagtacgaggccctccctaagaagctccagcaggccgactgggcgcccgactttggtcccagctcctttgtccccagttggggggccacggccacgggggcgaggaagttcctcattgcttttaacatcaacctgctcggcacaaaggagcaagcccaccgcatcgcgctcaacctgcgggagcagggccgcgggaaggaccagccaggacgtctgaagaaagttcagggcattggctggtacctggatgagaagaacctggctcaggtgtccaccaatcttctggactttgaggtcacggcactgcacacggtctacgaggagacctgccgagaagcacaggagctgagcctcccagtggtgggctcacagctggtgggcctggtgcccctgaaggctctgctggatgcggccgccttctactgcgagaaggagaacctcttcatcctggaggaggagcagcggatcaggctggtggtgagccggctgggcctggactccctgtgccccttcagccctaaggagcggatcatcgagtacctggtccctgagcgcgggcctgagcgaggcctgggcagcaagtccctgcgcgccttcgtgggggaggtgggtgcccgctctgcggcccccgggggcggctcggtggcggcggccgctgcggccatgggtgcggcgctgggctccatggtgggcctcatgacctacgggcggcgccaattccagtccctggacacgacgatgcggcgcctgatcccgcccttccgcgaggcttcggccaagctaaccacgctggtggatgccgacgccgaggccttcaccgcctacctggaagcaatgaggctccccaagaacacacctgaggaaaaggacaggcgcacggcggccctacaggagggtctgaggcgggcagtctctgtgccgctgacgctggcggagacggtggcctcgctgtggccggccctgcaggaactggcccggtgtgggaacctggcctgccggtcagacctccaggtggcggccaaagccctggagatgggcgtgtttggcgcatatttcaacgtgctcatcaacctgagggacatcacagacgaggcatttaaggaccagcctcctgcaggaagccaagacccaggctgcactggtgctggactgcttggagacccggcaggagtgacggtgcgggaggcctctccgggctctgtggcccctccctcgcccatccccagagggcagagctgtgacctcgaaaccccagggacagcaggaccttcgacgctggaaggatagcctcgcttcccaggtgcagctcccggcaggtctggacagttccacagagcacggtactggccctgtcctcagttcccgtccacccttcaaccagtggctcctgggagacttttcctccctgcctcagctccctgcccagccagcctcctgtctccagagaagttctccattaaaaaataatttagcaaatc

SEQ ID NO: 11148 - DNA, 1834 bp, Homo sapiens
  source 1..1834: mol_type = unassigned DNA
cttccatctgcccagagaggagcatctggatcaaggtgctggccatgtcccagctggtggaatgcgtccccaacttttcggaggggaagaaccaggaggtgatcgacgccatctctggagccatcacacagaccccgggctgcgtgctgctggatgtggacgcaggcccttccaccaaccgcaccgtgtacaccttcgtggggccgccggagtgcgtggtggagggggccctcaacgctgcccgggtagcttcccgacttatcgacatgagcaggcaccaaggagagcacccccgcatgggggccctagacgtctgccccttcatccccgtgaggggcgtcagcgtggatgagtgtgtgctctgcgcccaggcctttggccagaggctggcagaggagctggacgtgccagtttacctgtacggcgaggcagccaggatggacagtcgccggaccctgccggccatccgggccggggagtacgaggccctccctaagaagctccagcaggccgactgggcgcccgactttggtcccagctcctttgtccccagttggggggccacggccacgggggcgaggaagttcctcattgcttttaacatcaacctgctcggcacaaaggagcaagcccaccgcatcgcgctcaacctgcgggagcagggccgcgggaaggaccagccaggacgtctgaagaaagttcagggcattggctggtacctggatgagaagaacctggctcaggtgtccaccaatcttctggactttgaggtcacggcactgcacacggtctacgaggagacctgccgagaagcacaggagctgagcctcccagtggtgggctcacagctggtgggcctggtgcccctgaaggctctgctggatgcggccgccttctactgcgagaaggagaacctcttcatcctggaggaggagcagcggatcaggctggtggtgagccggctgggcctggactccctgtgccccttcagccctaaggagcggatcatcgagtacctggtccctgagcgcgggcctgagcgaggcctgggcagcaagtccctgcgcgccttcgtgggggaggtgggtgcccgctctgcggcccccgggggcggctcggtggcggcggccgctgcggccatgggtgcggcgctgggctccatggtgggcctcatgacctacgggcggcgccaattccagtccctggacacgacgatgcggcgcctgatcccgcccttccgcgaggcttcggccaagctaaccacgctggtggatgccgacgccgaggccttcaccgcctacctggcgcacggcggccctacaggagggtctgaggcgggcagtctctgtgccgctgacgctggcggagacggtggcctcgctgtggccggccctgcaggaactggcccggtgtgggaacctggcctgccggtcagacctccaggtggcggccaaagccctggagatgggcgtgtttggcgcatatttcaacgtgctcatcaacctgagggacatcacagacgaggcatttaaggaccagatccaccatcgtgtttccagcctcctgcaggaagccaagacccaggctgcactggtgctggactgcttggagacccggcaggagtgacggtgcgggaggcctctccgggctctgtggcccctccctcgcccatccccagagggcagagctgtgacctcggtggggacacagcttgttcgtgtggggcccggagggtaggtgggcaggcagcggggcatcgcctgggaatggaggcgctggcagggacagaaggcccctagtcccatgtgacctccagtaaagttttggcaccaaa

SEQ ID NO: 11149 - DNA, 1878 bp, Homo sapiens
  source 1..1878: mol_type = unassigned DNA
cttccatctgcccagagaggagcatctggatcaaggtgctggccatgtcccagctggtggaatgcgtccccaacttttcggaggggaagaaccaggaggtgatcgacgccatctctggagccatcacacagaccccgggctgcgtgctgctggatgtggacgcaggcccttccaccaaccgcaccgtgtacaccttcgtggggccgccggagtgcgtggtggagggggccctcaacgctgcccgggtagcttcccgacttatcgacatgagcaggcaccaaggagagcacccccgcatgggggccctagacgtctgccccttcatccccgtgaggggcgtcagcgtggatgagtgtgtgctctgcgcccaggcctttggccagaggctggcagaggagctggacgtgccagtttacctgtacggcgaggcagccaggatggacagtcgccggaccctgccggccatccgggccggggagtacgaggccctccctaagaagctccagcaggccgactgggcgcccgactttggtcccagctcctttgtccccagttggggggccacggccacgggggcgaggaagttcctcattgcttttaacatcaacctgctcggcacaaaggagcaagcccaccgcatcgcgctcaacctgcgggagcagggccgcgggaaggaccagccaggacgtctgaagaaagttcagggcattggctggtacctggatgagaagaacctggctcaggtgtccaccaatcttctggactttgaggtcacggcactgcacacggtctacgaggagacctgccgagaagcacaggagctgagcctcccagtggtgggctcacagctggtgggcctggtgcccctgaaggctctgctggatgcggccgccttctactgcgagaaggagaacctcttcatcctggaggaggagcagcggatcaggctggtggtgagccggctgggcctggactccctgtgccccttcagccctaaggagcggatcatcgagtacctggtccctgagcgcgggcctgagcgaggcctgggcagcaagtccctgcgcgccttcgtgggggaggtgggtgcccgctctgcggcccccgggggcggctcggtggcggcggccgctgcggccatgggtgcggcgctgggctccatggtgggcctcatgacctacgggcggcgccaattccagtccctggacacgacgatgcggcgcctgatcccgcccttccgcgaggcttcggccaagctaaccacgctggtggatgccgacgccgaggccttcaccgcctacctggaagcaatgaggctccccaagaacacacctgaggaaaaggacaggcgcacggcggccctacaggagggtctgaggcgggcagtctctgtgccgctgacgctggcggagacggtggcctcgctgtggccggccctgcaggaactggcccggtgtgggaacctggcctgccggtcagacctccaggtggcggccaaagccctggagatgggcgtgtttggcgcatatttcaacgtgctcatcaacctgagggacatcacagacgaggcatttaaggaccagatccaccatcgtgtttccagcctcctgcaggaagccaagacccaggctgcactggtgctggactgcttggagacccggcaggagtgacggtgcgggaggcctctccgggctctgtggcccctccctcgcccatccccagagggcagagctgtgacctcggtggggacacagcttgttcgtgtggggcccggagggtaggtgggcaggcagcggggcatcgcctgggaatggaggcgctggcagggacagaaggcccctagtcccatgtgacctccagtaaagttttggcaccaaa

SEQ ID NO: 11150 - DNA, 1955 bp, Homo sapiens
  source 1..1955: mol_type = unassigned DNA
cttccatctgcccagagaggagcatctggatcaaggtgctggccatgtcccagctggtggaatgcgtccccaacttttcggaggggaagaaccaggaggtgatcgacgccatctctggagccatcacacagaccccgggctgcgtgctgctggatgtggacgcaggcccttccaccaaccgcaccgtgtacaccttcgtggggccgccggagtgcgtggtggagggggccctcaacgctgcccgggtagcttcccgacttatcgacatgagcaggcaccaaggagagcacccccgcatgggggccctagacgtctgccccttcatccccgtgaggggcgtcagcgtggatgagtgtgtgctctgcgcccaggcctttggccagaggctggcagaggagctggacgtgccagtttacctgtacggcgaggcagccaggatggacagtcgccggaccctgccggccatccgggccggggagtacgaggccctccctaagaagctccagcaggccgactgggcgcccgactttggtcccagctcctttgtccccagttggggggccacggccacgggggcgaggaagttcctcattgcttttaacatcaacctgctcggcacaaaggagcaagcccaccgcatcgcgctcaacctgcgggagcagggccgcgggaaggaccagccaggacgtctgaagaaagttcagggcattggctggtacctggatgagaagaacctggctcaggtgtccaccaatcttctggactttgaggtcacggcactgcacacggtctacgaggagacctgccgagaagcacaggagctgagcctcccagtggtgggctcacagctggtgggcctggtgcccctgaaggctctgctggatgcggccgccttctactgcgagaaggagaacctcttcatcctggaggaggagcagcggatcaggctggtggtgagccggctgggcctggactccctgtgccccttcagccctaaggagcggatcatcgagtacctggtccctgagcgcgggcctgagcgaggcctgggcagcaagtccctgcgcgccttcgtgggggaggtgggtgcccgctctgcggcccccgggggcggctcggtggcggcggccgctgcggccatgggtgcggcgctgggctccatggtgggcctcatgacctacgggcggcgccaattccagtccctggacacgacgatgcggcgcctgatcccgcccttccgcgaggcttcggccaagctaaccacgctggtggatgccgacgccgaggccttcaccgcctacctggaagcaatgaggctccccaagaacacacctgaggaaaaggacaggcgcacggcggccctacaggagggtctgaggcgggcagtctctgtgccgctgacgctggcggagacggtggcctcgctgtggccggccctgcaggaactggcccggtgtgggaacctggcctgccggtcagacctccaggtggcggccaaagccctggagatgggcgtgtttggcgcatatttcaacgtgctcatcaacctgagggacatcacagacgaggcatttaaggaccagcctcctgcaggaagccaagacccaggctgcactggtgctggactgcttggagacccggcaggagtgacggtgcgggaggcctctccgggctctgtggcccctccctcgcccatccccagagggcagagctgtgacctcgaaaccccagggacagcaggaccttcgacgctggaaggatagcctcgcttcccaggtgcagctcccggcaggtctggacagttccacagagcacggtactggccctgtcctcagttcccgtccacccttcaaccagtggctcctgggagacttttcctccctgcctcagctccctgcccagccagcctcctgtctccagagaagttctccattaaaaaataatttagcaaatca

SEQ ID NO: 11151 - DNA, 1977 bp, Homo sapiens
  source 1..1977: mol_type = unassigned DNA
attttgctgtggagcggcggggaggaggagccgccgaggagaccccgggcgaggagctgcgagccggaggaggccgcgcggactccgggctttccgccgtcgcggggatctcggggggcaaagggatcgccggggagggggaccagagagccgcgcccgccgcgcggagcgccccttcgcgtcccctgcaccatgagctggggcaccgagctctgggatcagtttgacaacttagaaaaacacacacagtggggaattgatattcttgagaaatatatcaagtttgtgaaagaaaggacagagattgaactcagctatgcaaagcaactcaggaatctttcaaagaagtaccaacctaaaaagaactcgaaggaggaagaagaatacaagtatacgtcatgtaaagctttcatttccaacctgaacgaaatgaatgattacgcagggcagcatgaagttatctccgagaacatggcatcacagatcattgtggacttggcacgctatgttcaggaactgaaacaggagaggaaatcaaactttcacgatggccgtaaagcacagcagcacatcgagacttgctggaagcagcttgaatctagtaaaaggcgatttgaacgcgattgcaaagaggcggacagggcgcagcagtactttgagaaaatggacgctgacatcaatgtcacaaaagcggatgttgaaaaggcccgacaacaagctcaaatacgtcaccaaatggcagaggacagcaaagcagattactcatccattctccagaaattcaaccatgagcagcatgaatattaccatactcacatccccaacatcttccagaaaatacaagagatggaggaaaggaggattgtgagaatgggagagtccatgaagacatatgcagaggttgatcggcaggtgatcccaatcattgggaagtgcctggatggaatagtaaaagcagccgaatcaattgatcagaaaaatgattcacagctggtaatagaagcttataaatcagggtttgagcctcctggagacattgaatttgaggattacactcagccaatgaagcgcactgtgtcagataacagcctttcaaattccagaggagaaggcaaaccagacctcaaatttggtggcaaatccaaaggaaagttatggccgttcatcaaaaaaaataagtctcccaagcagcaaaaggaacccctctcccatcgcttcaacgagttcatgacctccaaacccaaaatccactgcttcaggagcctaaagcgtgggcatagtcttctcaaaggtgcaacaccggaggatttcagcaacctcccacctgaacaaagaaggaaaaagctgcagcagaaagtcgatgagttaaataaagaaattcagaaggagatggatcaaagagatgccataacaaaaatgaaagatgtctacctaaagaatcctcagatgggagacccagccagtttggatcacaaattagcagaagtcagccaaaatatagagaaactgcgagtagagacccagaaatttgaggcctggctggctgaggttgaaggccggctcccagcacgcagcgagcaggcgcgccggcagagcggactgtacgacagccagaacccacccacagtcaacaactgcgcccaggaccgtgagagcccagatggcagttacacagaggagcagagtcaggagagtgagatgaaggtgctggccacggattttgacgacgagtttgatgatgaggagcccctccctgccatagggacgtgcaaagctctctacacatttgaaggtcagaatgaaggaacgatttccgtagttgaaggagaaacattgtatgtcatagaggaagacaaaggcgatggctggacccgcattcggagaaatgaagatgaagagggttatgtccccacttcatatgtcgaagtctgtttggacaaaaatgccaaaggtgctaagacttatatttaataccat

SEQ ID NO: 11152 - DNA, 5206 bp, Homo sapiens
  source 1..5206: mol_type = unassigned DNA
atcagatggacagatgaactttgggatcagtttgacaacttagaaaaacacacacagtggggaattgatattcttgagaaatatatcaagtttgtgaaagaaaggacagagattgaactcagctatgcaaagcaactcaggaatctttcaaagaagtaccaacctaaaaagaactcgaaggaggaagaagaatacaagtatacgtcatgtaaagctttcatttccaacctgaacgaaatgaatgattacgcagggcagcatgaagttatctccgagaacatggcatcacagatcattgtggacttggcacgctatgttcaggaactgaaacaggagaggaaatcaaactttcacgatggccgtaaagcacagcagcacatcgagacttgctggaagcagcttgaatctagtaaaaggcgatttgaacgcgattgcaaagaggcggacagggcgcagcagtactttgagaaaatggacgctgacatcaatgtcacaaaagcggatgttgaaaaggcccgacaacaagctcaaatacgtcaccaaatggcagaggacagcaaagcagattactcatccattctccagaaattcaaccatgagcagcatgaatattaccatactcacatccccaacatcttccagaaaatacaagagatggaggaaaggaggattgtgagaatgggagagtccatgaagacatatgcagaggttgatcggcaggtgatcccaatcattgggaagtgcctggatggaatagtaaaagcagccgaatcaattgatcagaaaaatgattcacagctggtaatagaagcttataaatcagggtttgagcctcctggagacattgaatttgaggattacactcagccaatgaagcgcactgtgtcagataacagcctttcaaattccagaggagaaggcaaaccagacctcaaatttggtggcaaatccaaaggaaagttatggccgttcatcaaaaaaaataagcttatgtcccttttaacatccccccatcagcctccccctccccctcctgcctctgcctcaccctctgctgttcccaacggcccccagtctcccaagcagcaaaaggaacccctctcccatcgcttcaacgagttcatgacctccaaacccaaaatccactgcttcaggagcctaaagcgtgggccttctttcaagcagggtgcaacaccggaggatttcagcaacctcccacctgaacaaagaaggaaaaagctgcagcagaaagtcgatgagttaaataaagaaattcagaaggagatggatcaaagagatgccataacaaaaatgaaagatgtctacctaaagaatcctcagatgggagacccagccagtttggatcacaaattagcagaagtcagccaaaatatagagaaactgcgagtagagacccagaaatttgaggcctggctggctgaggttgaaggccggctcccagcacgcagcgagcaggcgcgccggcagagcggactgtacgacagccagaacccacccacagtcaacaactgcgcccaggaccgtgagagcccagatggcagttacacagaggagcagagtcaggagagtgagatgaaggtgctggccacggattttgacgacgagtttgatgatgaggagcccctccctgccatagggacgtgcaaagctctctacacatttgaaggtcagaatgaaggaacgatttccgtagttgaaggagaaacattgtatgtcatagaggaagacaaaggcgatggctggacccgcattcggagaaatgaagatgaagagggttatgtccccacttcatatgtcgaagtctgtttggacaaaaatgccaaagattcctagaggggagtgcctgcgagcctcgggtgagccttcctggaggagcctccgtctgcttgttcccacaggcctccagcgccctgccctgtggacagcccacccctccgcagccccatccctgcggggcggtctctctctctctccagcatgctccctgcggccctgccctcccgcccagcccgggccacctcgtgggggacaagtctcgccagcgcccacccccatggctcgggtcagtcctcatcgctccccctccccaccccgcgcaggccactgagacggtgggacacacgcccctacctgctccttcctgggccctcagtccacccgggctcgtcctggcagcccttccgcgcttcacacagtgccttttgtgaaagtgtcatcacgggtcccctgaggagacaaggcaggtccagcgcacatcaggcggactgagcactcgatgtcatccgtgtcgatgtcatccgtgtgtcccagactgtctgctgtagaaaacacttcctcctctcctgagtctgtgaagtcctcagtggtcctttttggattctaggcttgcacctcatactaaacattgaccctttcactatgccctcaacctgggagcatctggcaggcaggggggcaggtacacacacacccacaggcacacccaccagtacacacgcgtgcgcatacacacattttggtttgacgccctgttttcagtggcctggggaggtccacactggaagtcgaattccagctcgccttgttgactcgcctgtgtccaccggccatgaggagcccacgcctgtcctccccatcactttcctgtccctgagaactgtagatcatgcgcttgtgagcgaggccctcccctctgcaccagctcattgcaaagcgaacatcctctcctttccaggagccccaggattagcatctgaaaagggtagcacttccttttttgttgttgttttttttttttttttgagacgggagtctcgctctattgttcagactggagtgcagtggcatgatctcggctcactacaacctccacctcctgggttccagcgattctcctgcctcagcctcccaaatagctgtgattacaggcgtgcaccaccacgcccggctaatgtttgtatttttagtagagacagggtttcaccgtgttggtcaggctggtctcaaactcctgacctcaggtgatccgcccgcctcagcctcccaaagtgctgagattacaggtgtgagctaccgcaccccgccgaggttagcactttcatcaccaaagaccccgtgcctctcgtggtcctttgagggatcccgccgccaccacccttgtattttatcacgtgctcttcagggcatgtggaattcgttgagtttgcttttagagccaagtttctttccctgtgtgggtttttgaggaaaacctgaggtcccctaatctgtggccaccaccccccccccccgccacgccttagagcagagcagcccctcctctcatttggtgcagaaacagtcaagaggaaccattggcctagagctcctgtgaccgagagcgccacggaagcctggggatgacgtcgggcagctttattctttgcttggctttggtaactaggtggtcccctcaagcatcctcagttcctcttgctgtttatgaatctaagacaaggaagtcctatagaagccaaagggacagggacggaaaggacaggtcccaagggatggggctgtctttacttgtggaaaccaggaaattgctcctctcagccaaccaaggttgaccacacaccacccttccggagcagctcagtcagccctcggggacgagaaaccacaagcgcagagacgctgaggcccaggcaggtgaagaggaagtggctttgggtttttaaagtaggtgagcgtgagcctctctgactgcttcttccccgggggggactgcaaaccgctcagggttgcggcagagccatggacttccggtccctgcaacgggtgacctaagcgtggtgcacccatcagtcacgcaggaggactgacttgacagacgaaagacaagcccggatgacacagggtgagaagagtcagggccgcacctctgtccctgcaaaccaacaggtgcatggtgagtgtggcagtccccacagctccacaatgggctcccccgccaacggggacgacagggatcttcaggaacttctgacctcaccaagtcaagtggaccactctccactccacgaggatgtgaaacggttctttaaaatgggattttagagcctcgggaatgcatgtgcgtcacatctttcatattatgggtcaggatagattcatttcttgcaacatagtggaaaagatataagctgcagtaatttgctctttgaatgaccgtcacccccagtataggatatgcttgtatccccccgtcactcctccgcctgttttttaaacttttccaccacctgcgtccaaaaagaatgttatagcgagtgctcttaaatgttgaacctgggtgttgcttccgggccagtctgcgtggctccatgaaaagctcactgctgccccagccgggcttcttagaggaggtcagttgtcctatgtatcatcatttactctgggaatcctactgtgaaatcatgtctgtatttttctggagcagttcacatagagtagaatgtggaatttcccgtgaacgtctccttcctcccccgtatctgccgcctgtcacttcgccaccgtgctagaatactgttgtgttgtaagatgactaattttaaaagaacctgccctgaaaagttcttagaaacgcagtgaaagggaggaacttgtcctttacccagtttttcctttgtaggatgggaaagtataaaaaggcacagaaggttgtcatgggctgttccttgggggtttttatcctgctcaccgtggagataagcctgcggcttgtctaaccagcgcagcgcaaaggtctcgatgccttttggtaacatccgtcattgcagaagaaagtttacacgacgtcaaaaagtgacgttcatgctaagtgtttttccagaaatattggtttcatgtttcttattggctctgcctcctgtgcttatatcatccaaaaactttttaaaaaggtccagaattctattttaacctgatgttgagcacctttaaaatgttcgtatgtgtgttgcactaattctaaactttggaggcattttgctgtgtgaggccgatcgccactgtaaaggtcctagagttgcctgtttgtctctggagatggaattaaaccaaataaagagcttccactggaggcttgtattgaccttgtaactatatgttaatctcgtgttaaaataaaatataacttgtg

SEQ ID NO: 11153 - DNA, 5393 bp, Homo sapiens
  source 1..5393: mol_type = unassigned DNA
gctgtggagcggcggggaggaggagccgccgaggagaccccgggcgaggagctgcgagccggaggaggccgcgcggactccgggctttccgccgtcgcggggatctcggggggcaaagggatcgccggggagggggaccagagagccgcgcccgccgcgcggagcgccccttcgcgtcccctgcaccatgagctggggcaccgagctctgggatcagtttgacaacttagaaaaacacacacagtggggaattgatattcttgagaaatatatcaagtttgtgaaagaaaggacagagattgaactcagctatgcaaagcaactcaggaatctttcaaagaagtaccaacctaaaaagaactcgaaggaggaagaagaatacaagtatacgtcatgtaaagctttcatttccaacctgaacgaaatgaatgattacgcagggcagcatgaagttatctccgagaacatggcatcacagatcattgtggacttggcacgctatgttcaggaactgaaacaggagaggaaatcaaactttcacgatggccgtaaagcacagcagcacatcgagacttgctggaagcagcttgaatctagtaaaaggcgatttgaacgcgattgcaaagaggcggacagggcgcagcagtactttgagaaaatggacgctgacatcaatgtcacaaaagcggatgttgaaaaggcccgacaacaagctcaaatacgtcaccaaatggcagaggacagcaaagcagattactcatccattctccagaaattcaaccatgagcagcatgaatattaccatactcacatccccaacatcttccagaaaatacaagagatggaggaaaggaggattgtgagaatgggagagtccatgaagacatatgcagaggttgatcggcaggtgatcccaatcattgggaagtgcctggatggaatagtaaaagcagccgaatcaattgatcagaaaaatgattcacagctggtaatagaagcttataaatcagggtttgagcctcctggagacattgaatttgaggattacactcagccaatgaagcgcactgtgtcagataacagcctttcaaattccagaggagaaggcaaaccagacctcaaatttggtggcaaatccaaaggaaagttatggccgttcatcaaaaaaaataagcttatgtcccttttaacatccccccatcagcctccccctccccctcctgcctctgcctcaccctctgctgttcccaacggcccccagtctcccaagcagcaaaaggaacccctctcccatcgcttcaacgagttcatgacctccaaacccaaaatccactgcttcaggagcctaaagcgtgggcatagtcttctcaaaggtgcaacaccggaggatttcagcaacctcccacctgaacaaagaaggaaaaagctgcagcagaaagtcgatgagttaaataaagaaattcagaaggagatggatcaaagagatgccataacaaaaatgaaagatgtctacctaaagaatcctcagatgggagacccagccagtttggatcacaaattagcagaagtcagccaaaatatagagaaactgcgagtagagacccagaaatttgaggcctggctggctgaggttgaaggccggctcccagcacgcagcgagcaggcgcgccggcagagcggactgtacgacagccagaacccacccacagtcaacaactgcgcccaggaccgtgagagcccagatggcagttacacagaggagcagagtcaggagagtgagatgaaggtgctggccacggattttgacgacgagtttgatgatgaggagcccctccctgccatagggacgtgcaaagctctctacacatttgaaggtcagaatgaaggaacgatttccgtagttgaaggagaaacattgtatgtcatagaggaagacaaaggcgatggctggacccgcattcggagaaatgaagatgaagagggttatgtccccacttcatatgtcgaagtctgtttggacaaaaatgccaaagattcctagaggggagtgcctgcgagcctcgggtgagccttcctggaggagcctccgtctgcttgttcccacaggcctccagcgccctgccctgtggacagcccacccctccgcagccccatccctgcggggcggtctctctctctctccagcatgctccctgcggccctgccctcccgcccagcccgggccacctcgtgggggacaagtctcgccagcgcccacccccatggctcgggtcagtcctcatcgctccccctccccaccccgcgcaggccactgagacggtgggacacacgcccctacctgctccttcctgggccctcagtccacccgggctcgtcctggcagcccttccgcgcttcacacagtgccttttgtgaaagtgtcatcacgggtcccctgaggagacaaggcaggtccagcgcacatcaggcggactgagcactcgatgtcatccgtgtcgatgtcatccgtgtgtcccagactgtctgctgtagaaaacacttcctcctctcctgagtctgtgaagtcctcagtggtcctttttggattctaggcttgcacctcatactaaacattgaccctttcactatgccctcaacctgggagcatctggcaggcaggggggcaggtacacacacacccacaggcacacccaccagtacacacgcgtgcgcatacacacattttggtttgacgccctgttttcagtggcctggggaggtccacactggaagtcgaattccagctcgccttgttgactcgcctgtgtccaccggccatgaggagcccacgcctgtcctccccatcactttcctgtccctgagaactgtagatcatgcgcttgtgagcgaggccctcccctctgcaccagctcattgcaaagcgaacatcctctcctttccaggagccccaggattagcatctgaaaagggtagcacttccttttttgttgttgttttttttttttttttgagacgggagtctcgctctattgttcagactggagtgcagtggcatgatctcggctcactacaacctccacctcctgggttccagcgattctcctgcctcagcctcccaaatagctgtgattacaggcgtgcaccaccacgcccggctaatgtttgtatttttagtagagacagggtttcaccgtgttggtcaggctggtctcaaactcctgacctcaggtgatccgcccgcctcagcctcccaaagtgctgagattacaggtgtgagctaccgcaccccgccgaggttagcactttcatcaccaaagaccccgtgcctctcgtggtcctttgagggatcccgccgccaccacccttgtattttatcacgtgctcttcagggcatgtggaattcgttgagtttgcttttagagccaagtttctttccctgtgtgggtttttgaggaaaacctgaggtcccctaatctgtggccaccaccccccccccccgccacgccttagagcagagcagcccctcctctcatttggtgcagaaacagtcaagaggaaccattggcctagagctcctgtgaccgagagcgccacggaagcctggggatgacgtcgggcagctttattctttgcttggctttggtaactaggtggtcccctcaagcatcctcagttcctcttgctgtttatgaatctaagacaaggaagtcctatagaagccaaagggacagggacggaaaggacaggtcccaagggatggggctgtctttacttgtggaaaccaggaaattgctcctctcagccaaccaaggttgaccacacaccacccttccggagcagctcagtcagccctcggggacgagaaaccacaagcgcagagacgctgaggcccaggcaggtgaagaggaagtggctttgggtttttaaagtaggtgagcgtgagcctctctgactgcttcttccccgggggggactgcaaaccgctcagggttgcggcagagccatggacttccggtccctgcaacgggtgacctaagcgtggtgcacccatcagtcacgcaggaggactgacttgacagacgaaagacaagcccggatgacacagggtgagaagagtcagggccgcacctctgtccctgcaaaccaacaggtgcatggtgagtgtggcagtccccacagctccacaatgggctcccccgccaacggggacgacagggatcttcaggaacttctgacctcaccaagtcaagtggaccactctccactccacgaggatgtgaaacggttctttaaaatgggattttagagcctcgggaatgcatgtgcgtcacatctttcatattatgggtcaggatagattcatttcttgcaacatagtggaaaagatataagctgcagtaatttgctctttgaatgaccgtcacccccagtataggatatgcttgtatccccccgtcactcctccgcctgttttttaaacttttccaccacctgcgtccaaaaagaatgttatagcgagtgctcttaaatgttgaacctgggtgttgcttccgggccagtctgcgtggctccatgaaaagctcactgctgccccagccgggcttcttagaggaggtcagttgtcctatgtatcatcatttactctgggaatcctactgtgaaatcatgtctgtatttttctggagcagttcacatagagtagaatgtggaatttcccgtgaacgtctccttcctcccccgtatctgccgcctgtcacttcgccaccgtgctagaatactgttgtgttgtaagatgactaattttaaaagaacctgccctgaaaagttcttagaaacgcagtgaaagggaggaacttgtcctttacccagtttttcctttgtaggatgggaaagtataaaaaggcacagaaggttgtcatgggctgttccttgggggtttttatcctgctcaccgtggagataagcctgcggcttgtctaaccagcgcagcgcaaaggtctcgatgccttttggtaacatccgtcattgcagaagaaagtttacacgacgtcaaaaagtgacgttcatgctaagtgtttttccagaaatattggtttcatgtttcttattggctctgcctcctgtgcttatatcatccaaaaactttttaaaaaggtccagaattctattttaacctgatgttgagcacctttaaaatgttcgtatgtgtgttgcactaattctaaactttggaggcattttgctgtgtgaggccgatcgccactgtaaaggtcctagagttgcctgtttgtctctggagatggaattaaaccaaataaagagcttccactggaggcttgtattgaccttgtaactatatgttaatctcgtgttaaaataaaatataacttgtg

SEQ ID NO: 11154 - DNA, 5398 bp, Homo sapiens
  source 1..5398: mol_type = unassigned DNA
cggccgcggctgctgcttcctcgggccattttgctgtggagcggcggggaggaggagccgccgaggagaccccgggcgaggagctgcgagccggaggaggccgcgcggactccgggctttccgccgtcgcggggatctcggggggcaaagggatcgccggggagggggaccagagagccgcgcccgccgcgcggagcgccccttcgcgtcccctgcaccatgagctggggcaccgagctctgggatcagtttgacaacttagaaaaacacacacagtggggaattgatattcttgagaaatatatcaagtttgtgaaagaaaggacagagattgaactcagctatgcaaagcaactcaggaatctttcaaagaagtaccaacctaaaaagaactcgaaggaggaagaagaatacaagtatacgtcatgtaaagctttcatttccaacctgaacgaaatgaatgattacgcagggcagcatgaagttatctccgagaacatggcatcacagatcattgtggacttggcacgctatgttcaggaactgaaacaggagaggaaatcaaactttcacgatggccgtaaagcacagcagcacatcgagacttgctggaagcagcttgaatctagtaaaaggcgatttgaacgcgattgcaaagaggcggacagggcgcagcagtactttgagaaaatggacgctgacatcaatgtcacaaaagcggatgttgaaaaggcccgacaacaagctcaaatacgtcaccaaatggcagaggacagcaaagcagattactcatccattctccagaaattcaaccatgagcagcatgaatattaccatactcacatccccaacatcttccagaaaatacaagagatggaggaaaggaggattgtgagaatgggagagtccatgaagacatatgcagaggttgatcggcaggtgatcccaatcattgggaagtgcctggatggaatagtaaaagcagccgaatcaattgatcagaaaaatgattcacagctggtaatagaagcttataaatcagggtttgagcctcctggagacattgaatttgaggattacactcagccaatgaagcgcactgtgtcagataacagcctttcaaattccagaggagaaggcaaaccagacctcaaatttggtggcaaatccaaaggaaagttatggccgttcatcaaaaaaaataagcctccccctccccctcctgcctctgcctcaccctctgctgttcccaacggcccccagtctcccaagcagcaaaaggaacccctctcccatcgcttcaacgagttcatgacctccaaacccaaaatccactgcttcaggagcctaaagcgtgggcatagcctcactctgcagggtgcaacaccggaggatttcagcaacctcccacctgaacaaagaaggaaaaagctgcagcagaaagtcgatgagttaaataaagaaattcagaaggagatggatcaaagagatgccataacaaaaatgaaagatgtctacctaaagaatcctcagatgggagacccagccagtttggatcacaaattagcagaagtcagccaaaatatagagaaactgcgagtagagacccagaaatttgaggcctggctggctgaggttgaaggccggctcccagcacgcagcgagcaggcgcgccggcagagcggactgtacgacagccagaacccacccacagtcaacaactgcgcccaggaccgtgagagcccagatggcagttacacagaggagcagagtcaggagagtgagatgaaggtgctggccacggattttgacgacgagtttgatgatgaggagcccctccctgccatagggacgtgcaaagctctctacacatttgaaggtcagaatgaaggaacgatttccgtagttgaaggagaaacattgtatgtcatagaggaagacaaaggcgatggctggacccgcattcggagaaatgaagatgaagagggttatgtccccacttcatatgtcgaagtctgtttggacaaaaatgccaaagattcctagaggggagtgcctgcgagcctcgggtgagccttcctggaggagcctccgtctgcttgttcccacaggcctccagcgccctgccctgtggacagcccacccctccgcagccccatccctgcggggcggtctctctctctctccagcatgctccctgcggccctgccctcccgcccagcccgggccacctcgtgggggacaagtctcgccagcgcccacccccatggctcgggtcagtcctcatcgctccccctccccaccccgcgcaggccactgagacggtgggacacacgcccctacctgctccttcctgggccctcagtccacccgggctcgtcctggcagcccttccgcgcttcacacagtgccttttgtgaaagtgtcatcacgggtcccctgaggagacaaggcaggtccagcgcacatcaggcggactgagcactcgatgtcatccgtgtcgatgtcatccgtgtgtcccagactgtctgctgtagaaaacacttcctcctctcctgagtctgtgaagtcctcagtggtcctttttggattctaggcttgcacctcatactaaacattgaccctttcactatgccctcaacctgggagcatctggcaggcaggggggcaggtacacacacacccacaggcacacccaccagtacacacgcgtgcgcatacacacattttggtttgacgccctgttttcagtggcctggggaggtccacactggaagtcgaattccagctcgccttgttgactcgcctgtgtccaccggccatgaggagcccacgcctgtcctccccatcactttcctgtccctgagaactgtagatcatgcgcttgtgagcgaggccctcccctctgcaccagctcattgcaaagcgaacatcctctcctttccaggagccccaggattagcatctgaaaagggtagcacttccttttttgttgttgttttttttttttttttgagacgggagtctcgctctattgttcagactggagtgcagtggcatgatctcggctcactacaacctccacctcctgggttccagcgattctcctgcctcagcctcccaaatagctgtgattacaggcgtgcaccaccacgcccggctaatgtttgtatttttagtagagacagggtttcaccgtgttggtcaggctggtctcaaactcctgacctcaggtgatccgcccgcctcagcctcccaaagtgctgagattacaggtgtgagctaccgcaccccgccgaggttagcactttcatcaccaaagaccccgtgcctctcgtggtcctttgagggatcccgccgccaccacccttgtattttatcacgtgctcttcagggcatgtggaattcgttgagtttgcttttagagccaagtttctttccctgtgtgggtttttgaggaaaacctgaggtcccctaatctgtggccaccaccccccccccccgccacgccttagagcagagcagcccctcctctcatttggtgcagaaacagtcaagaggaaccattggcctagagctcctgtgaccgagagcgccacggaagcctggggatgacgtcgggcagctttattctttgcttggctttggtaactaggtggtcccctcaagcatcctcagttcctcttgctgtttatgaatctaagacaaggaagtcctatagaagccaaagggacagggacggaaaggacaggtcccaagggatggggctgtctttacttgtggaaaccaggaaattgctcctctcagccaaccaaggttgaccacacaccacccttccggagcagctcagtcagccctcggggacgagaaaccacaagcgcagagacgctgaggcccaggcaggtgaagaggaagtggctttgggtttttaaagtaggtgagcgtgagcctctctgactgcttcttccccgggggggactgcaaaccgctcagggttgcggcagagccatggacttccggtccctgcaacgggtgacctaagcgtggtgcacccatcagtcacgcaggaggactgacttgacagacgaaagacaagcccggatgacacagggtgagaagagtcagggccgcacctctgtccctgcaaaccaacaggtgcatggtgagtgtggcagtccccacagctccacaatgggctcccccgccaacggggacgacagggatcttcaggaacttctgacctcaccaagtcaagtggaccactctccactccacgaggatgtgaaacggttctttaaaatgggattttagagcctcgggaatgcatgtgcgtcacatctttcatattatgggtcaggatagattcatttcttgcaacatagtggaaaagatataagctgcagtaatttgctctttgaatgaccgtcacccccagtataggatatgcttgtatccccccgtcactcctccgcctgttttttaaacttttccaccacctgcgtccaaaaagaatgttatagcgagtgctcttaaatgttgaacctgggtgttgcttccgggccagtctgcgtggctccatgaaaagctcactgctgccccagccgggcttcttagaggaggtcagttgtcctatgtatcatcatttactctgggaatcctactgtgaaatcatgtctgtatttttctggagcagttcacatagagtagaatgtggaatttcccgtgaacgtctccttcctcccccgtatctgccgcctgtcacttcgccaccgtgctagaatactgttgtgttgtaagatgactaattttaaaagaacctgccctgaaaagttcttagaaacgcagtgaaagggaggaacttgtcctttacccagtttttcctttgtaggatgggaaagtataaaaaggcacagaaggttgtcatgggctgttccttgggggtttttatcctgctcaccgtggagataagcctgcggcttgtctaaccagcgcagcgcaaaggtctcgatgccttttggtaacatccgtcattgcagaagaaagtttacacgacgtcaaaaagtgacgttcatgctaagtgtttttccagaaatattggtttcatgtttcttattggctctgcctcctgtgcttatatcatccaaaaactttttaaaaaggtccagaattctattttaacctgatgttgagcacctttaaaatgttcgtatgtgtgttgcactaattctaaactttggaggcattttgctgtgtgaggccgatcgccactgtaaaggtcctagagttgcctgtttgtctctggagatggaattaaaccaaataaagagcttccactggaggcttgtattgaccttgtaactatatgttaatctcgtgttaaaataaaatataacttgtg

SEQ ID NO: 11155 - DNA, 990 bp, Homo sapiens
  source 1..990: mol_type = unassigned DNA
tgtcatatgttaaagtcttatggttaattttatttattttatcttgttctcttgctggttattggcagactcagtctttctgttttcacaaagaactcatgaagaggacgatagggaaacccacgtatgcctttgaggctagggactatgttctttctctcaagctgggtgcaacaccggaggatttcagcaacctcccacctgaacaaagaaggaaaaagctgcagcagaaagtcgatgagttaaataaagaaattcagaaggagatggatcaaagagatgccataacaaaaatgaaagatgtctacctaaagaatcctcagatgggagacccagccagtttggatcacaaattagcagaagtcagccaaaatatagagaaactgcgagtagagacccagaaatttgaggcctggctggctgaggttgaaggccggctcccagcacgcagcgagcaggcgcgccggcagagcggactgtacgacagccagaacccacccacagtcaacaactgcgcccaggaccgtgagagcccagatggcagttacacagaggagcagagtcaggagagtgagatgaaggtgctggccacggattttgacgacgagtttgatgatgaggagcccctccctgccatagggacgtgcaaagctctctacacatttgaaggtcagaatgaaggaacgatttccgtagttgaaggagaaacattgtatgtcatagaggaagacaaaggcgatggctggacccgcattcggagaaatgaagatgaagagggttatgtccccacttcatatgtcgaagtctgtttggacaaaaatgccaaagattcctagaggggagtgcctgcgagcctcgggtgagccttcctggaggagcctccgtctgcttgttcccacaggcctccagcgccctgccctgtggacagcccacccctccgcagccccatccctgcggggcggtctctctctctctccagcatgctccctg

SEQ ID NO: 11156 - DNA, 5425 bp, Homo sapiens
  source 1..5425: mol_type = unassigned DNA
cggccgcggctgctgcttcctcgggccattttgctgtggagcggcggggaggaggagccgccgaggagaccccgggcgaggagctgcgagccggaggaggccgcgcggactccgggctttccgccgtcgcggggatctcggggggcaaagggatcgccggggagggggaccagagagccgcgcccgccgcgcggagcgccccttcgcgtcccctgcaccatgagctggggcaccgagctctgggatcagtttgacaacttagaaaaacacacacagtggggaattgatattcttgagaaatatatcaagtttgtgaaagaaaggacagagattgaactcagctatgcaaagcaactcaggaatctttcaaagaagtaccaacctaaaaagaactcgaaggaggaagaagaatacaagtatacgtcatgtaaagctttcatttccaacctgaacgaaatgaatgattacgcagggcagcatgaagttatctccgagaacatggcatcacagatcattgtggacttggcacgctatgttcaggaactgaaacaggagaggaaatcaaactttcacgatggccgtaaagcacagcagcacatcgagacttgctggaagcagcttgaatctagtaaaaggcgatttgaacgcgattgcaaagaggcggacagggcgcagcagtactttgagaaaatggacgctgacatcaatgtcacaaaagcggatgttgaaaaggcccgacaacaagctcaaatacgtcaccaaatggcagaggacagcaaagcagattactcatccattctccagaaattcaaccatgagcagcatgaatattaccatactcacatccccaacatcttccagaaaatacaagagatggaggaaaggaggattgtgagaatgggagagtccatgaagacatatgcagaggttgatcggcaggtgatcccaatcattgggaagtgcctggatggaatagtaaaagcagccgaatcaattgatcagaaaaatgattcacagctggtaatagaagcttataaatcagggtttgagcctcctggagacattgaatttgaggattacactcagccaatgaagcgcactgtgtcagataacagcctttcaaattccagaggagaaggcaaaccagacctcaaatttggtggcaaatccaaaggaaagttatggccgttcatcaaaaaaaataagcttatgtcccttttaacatccccccatcagcctccccctccccctcctgcctctgcctcaccctctgctgttcccaacggcccccagtctcccaagcagcaaaaggaacccctctcccatcgcttcaacgagttcatgacctccaaacccaaaatccactgcttcaggagcctaaagcgtgggctttctctcaagctgggtgcaacaccggaggatttcagcaacctcccacctgaacaaagaaggaaaaagctgcagcagaaagtcgatgagttaaataaagaaattcagaaggagatggatcaaagagatgccataacaaaaatgaaagatgtctacctaaagaatcctcagatgggagacccagccagtttggatcacaaattagcagaagtcagccaaaatatagagaaactgcgagtagagacccagaaatttgaggcctggctggctgaggttgaaggccggctcccagcacgcagcgagcaggcgcgccggcagagcggactgtacgacagccagaacccacccacagtcaacaactgcgcccaggaccgtgagagcccagatggcagttacacagaggagcagagtcaggagagtgagatgaaggtgctggccacggattttgacgacgagtttgatgatgaggagcccctccctgccatagggacgtgcaaagctctctacacatttgaaggtcagaatgaaggaacgatttccgtagttgaaggagaaacattgtatgtcatagaggaagacaaaggcgatggctggacccgcattcggagaaatgaagatgaagagggttatgtccccacttcatatgtcgaagtctgtttggacaaaaatgccaaagattcctagaggggagtgcctgcgagcctcgggtgagccttcctggaggagcctccgtctgcttgttcccacaggcctccagcgccctgccctgtggacagcccacccctccgcagccccatccctgcggggcggtctctctctctctccagcatgctccctgcggccctgccctcccgcccagcccgggccacctcgtgggggacaagtctcgccagcgcccacccccatggctcgggtcagtcctcatcgctccccctccccaccccgcgcaggccactgagacggtgggacacacgcccctacctgctccttcctgggccctcagtccacccgggctcgtcctggcagcccttccgcgcttcacacagtgccttttgtgaaagtgtcatcacgggtcccctgaggagacaaggcaggtccagcgcacatcaggcggactgagcactcgatgtcatccgtgtcgatgtcatccgtgtgtcccagactgtctgctgtagaaaacacttcctcctctcctgagtctgtgaagtcctcagtggtcctttttggattctaggcttgcacctcatactaaacattgaccctttcactatgccctcaacctgggagcatctggcaggcaggggggcaggtacacacacacccacaggcacacccaccagtacacacgcgtgcgcatacacacattttggtttgacgccctgttttcagtggcctggggaggtccacactggaagtcgaattccagctcgccttgttgactcgcctgtgtccaccggccatgaggagcccacgcctgtcctccccatcactttcctgtccctgagaactgtagatcatgcgcttgtgagcgaggccctcccctctgcaccagctcattgcaaagcgaacatcctctcctttccaggagccccaggattagcatctgaaaagggtagcacttccttttttgttgttgttttttttttttttttgagacgggagtctcgctctattgttcagactggagtgcagtggcatgatctcggctcactacaacctccacctcctgggttccagcgattctcctgcctcagcctcccaaatagctgtgattacaggcgtgcaccaccacgcccggctaatgtttgtatttttagtagagacagggtttcaccgtgttggtcaggctggtctcaaactcctgacctcaggtgatccgcccgcctcagcctcccaaagtgctgagattacaggtgtgagctaccgcaccccgccgaggttagcactttcatcaccaaagaccccgtgcctctcgtggtcctttgagggatcccgccgccaccacccttgtattttatcacgtgctcttcagggcatgtggaattcgttgagtttgcttttagagccaagtttctttccctgtgtgggtttttgaggaaaacctgaggtcccctaatctgtggccaccaccccccccccccgccacgccttagagcagagcagcccctcctctcatttggtgcagaaacagtcaagaggaaccattggcctagagctcctgtgaccgagagcgccacggaagcctggggatgacgtcgggcagctttattctttgcttggctttggtaactaggtggtcccctcaagcatcctcagttcctcttgctgtttatgaatctaagacaaggaagtcctatagaagccaaagggacagggacggaaaggacaggtcccaagggatggggctgtctttacttgtggaaaccaggaaattgctcctctcagccaaccaaggttgaccacacaccacccttccggagcagctcagtcagccctcggggacgagaaaccacaagcgcagagacgctgaggcccaggcaggtgaagaggaagtggctttgggtttttaaagtaggtgagcgtgagcctctctgactgcttcttccccgggggggactgcaaaccgctcagggttgcggcagagccatggacttccggtccctgcaacgggtgacctaagcgtggtgcacccatcagtcacgcaggaggactgacttgacagacgaaagacaagcccggatgacacagggtgagaagagtcagggccgcacctctgtccctgcaaaccaacaggtgcatggtgagtgtggcagtccccacagctccacaatgggctcccccgccaacggggacgacagggatcttcaggaacttctgacctcaccaagtcaagtggaccactctccactccacgaggatgtgaaacggttctttaaaatgggattttagagcctcgggaatgcatgtgcgtcacatctttcatattatgggtcaggatagattcatttcttgcaacatagtggaaaagatataagctgcagtaatttgctctttgaatgaccgtcacccccagtataggatatgcttgtatccccccgtcactcctccgcctgttttttaaacttttccaccacctgcgtccaaaaagaatgttatagcgagtgctcttaaatgttgaacctgggtgttgcttccgggccagtctgcgtggctccatgaaaagctcactgctgccccagccgggcttcttagaggaggtcagttgtcctatgtatcatcatttactctgggaatcctactgtgaaatcatgtctgtatttttctggagcagttcacatagagtagaatgtggaatttcccgtgaacgtctccttcctcccccgtatctgccgcctgtcacttcgccaccgtgctagaatactgttgtgttgtaagatgactaattttaaaagaacctgccctgaaaagttcttagaaacgcagtgaaagggaggaacttgtcctttacccagtttttcctttgtaggatgggaaagtataaaaaggcacagaaggttgtcatgggctgttccttgggggtttttatcctgctcaccgtggagataagcctgcggcttgtctaaccagcgcagcgcaaaggtctcgatgccttttggtaacatccgtcattgcagaagaaagtttacacgacgtcaaaaagtgacgttcatgctaagtgtttttccagaaatattggtttcatgtttcttattggctctgcctcctgtgcttatatcatccaaaaactttttaaaaaggtccagaattctattttaacctgatgttgagcacctttaaaatgttcgtatgtgtgttgcactaattctaaactttggaggcattttgctgtgtgaggccgatcgccactgtaaaggtcctagagttgcctgtttgtctctggagatggaattaaaccaaataaagagcttccactggaggcttgtattgaccttgtaactatatgttaatctcgtgttaaaataaaatataacttgtg

SEQ ID NO: 11157 - DNA, 2271 bp, Homo sapiens
  source 1..2271: mol_type = unassigned DNA
aactcagctatgcaaagcaactcaggaatctttcaaagaagtaccaacctaaaaagaactcgaaggaggaagaagaatacaagtatacgtcatgtaaagctttcatttccaacctgaacgaaatgaatgattacgcagggcagcatgaagttatctccgagaacatggcatcacagatcattgtggacttggcacgctatgttcaggaactgaaacaggagaggaaatcaaactttcacgatggccgtaaagcacagcagcacatcgagacttgctggaagcagcttgaatctagtaaaaggcgatttgaacgcgattgcaaagaggcggacagggcgcagcagtactttgagaaaatggacgctgacatcaatgtcacaaaagcggatgttgaaaaggcccgacaacaagctcaaatacgtcaccaaatggcagaggacagcaaagcagattactcatccattctccagaaattcaaccatgagcagcatgaatattaccatactcacatccccaacatcttccagaaaatacaagagatggaggaaaggaggattgtgagaatgggagagtccatgaagacatatgcagaggttgatcggcaggtgatcccaatcattgggaagtgcctggatggaatagtaaaagcagccgaatcaattgatcagaaaaatgattcacagctggtaatagaagcttataaatcagggtttgagcctcctggagacattgaatttgaggattacactcagccaatgaagcgcactgtgtcagataacagcctttcaaattccagaggagaaggcaaaccagacctcaaatttggtggcaaatccaaaggaaagttatggccgttcatcaaaaaaaataagcctccccctccccctcctgcctctgcctcaccctctgctgttcccaacggcccccagtctcccaagcagcaaaaggaacccctctcccatcgcttcaacgagttcatgacctccaaacccaaaatccactgcttcaggagcctaaagcgtgggcatagtcttctcaaaggtgcaacaccggaggatttcagcaacctcccacctgaacaaagaaggaaaaagctgcagcagaaagtcgatgagttaaataaagaaattcagaaggagatggatcaaagagatgccataacaaaaatgaaagatgtctacctaaagaatcctcagatgggagacccagccagtttggatcacaaattagcagaagtcagccaaaatatagagaaactgcgagtagagacccagaaatttgaggcctggctggctgaggttgaaggccggctcccagcacgcagcgagcaggcgcgccggcagagcggactgtacgacagccagaacccacccacagtcaacaactgcgcccaggaccgtgagagcccagatggcagttacacagaggagcagagtcaggagagtgagatgaaggtgctggccacggattttgacgacgagtttgatgatgaggagcccctccctgccatagggacgtgcaaagctctctacacatttgaaggtcagaatgaaggaacgatttccgtagttgaaggagaaacattgtatgtcatagaggaagacaaaggcgatggctggacccgcattcggagaaatgaagatgaagagggttatgtccccacttcatatgtcgaagtctgtttggacaaaaatgccaaaggtgctaagacttatatttaataccataaaaaaaaaaaacttaaaaaaaatggagttgtttctccccacaaccatgactgttacaggcagttcctcaagagactggctggcaagcaccataatgcacgttctcctgtagtctcacgtggacttcagggtctgggcacctgaattgccttgtctagtttgggctgtaatcaagtttcacttgctgatgaaattttatgtggaaagctgccaaccgccaacttacagctatgtcattcaaaatctgataaacatttcttcttttggcggtatctgtagattaaaaaaaaagttgcattgtagcttctcatctttctgaatttaaaagccggcacgcatcatgcaggtgccaaagacttccctactcttgtttatatctagtatccaccatacactgagctacattaggtggttacagattgtaacttaataaactgaactgtgttagtttgttaaattgtatactcattcacttgggaggaagtcacaagtgaaataacatctccttcttgactaaagcagtaaataagattcttatattggc

SEQ ID NO: 11158 - DNA, 3990 bp, Homo sapiens
  source 1..3990: mol_type = unassigned DNA
cgggattcccattgggccctgtgagtggctagcggcggccccgcctccggcagtggttacctcctggcgcgcactcggggactaatcttggctccacccccttcctcggccccgcctccgtctggccccgcccctccagccgcgtccggtccggccgggcccgaaccgcggagctacagtgtgctttgagtagaagctgcactggggccgggactcggaggcgcgctgcgtgagccggccgcagagccatggcgggcggggaagaccgcggggacggagagccggtatcagtggtgaccgtgagggtgcagtacctggaagacaccgaccccttcgcatgtgccaactttccggagccgcgccgggcccccacctgcagcctggacggggcgctgcccttgggcgcgcagatacccgcggtgcaccgcctgctgggagcgccgctcaagttggaggattgtgctctgcaagtgtctccctccggatactacctggacaccgagctgtccctggaagagcagcgggagatgctggagggcttctatgaagagatcagcaaagggcggaagcccacgctgatccttcggacccagctctctgtgagggtcaacgctatcttggaaaagctgtatagctccagtggtcctgagctccgccgctccctcttctcactgaagcagatcttccaggaggacaaagacctggtgcctgaatttgtgcattcagaggggctgagctgcctgatccgtgtgggtgctgctgccgaccacaactaccagagctacatccttagagcgctcggccagctgatgctctttgtggatggaatgctgggggtggtggcccacagtgacactattcagtggctgtacacattgtgtgccagcctgtcccgcttggtggtgaagacagccctgaagctgctgttggtgtttgtagaatactccgaaaacaacgcaccgctgttcatccgtgcagtgaactctgtggccagcaccaccggtgctcctccctgggccaatctggtgtccatcctggaggagaagaatggcgctgaccctgagttgttggtgtacacggtcaccctcatcaacaagacgctggcggcgctcccggaccaggactccttctacgatgtgacggatgcactggagcagcagggcatggaagcgctggtccagcgccacctgggcactgcgggcactgacgtcgacctgcgcacgcagcttgtgctctacgagaacgccctgaaattggaggatggagacatcgaagaagccccaggcgctggtgggcggcgggaacgacgaaagccttcttctgaggagggcaagaggagccgccgttctctggaaggcgggggctgccccgcgcgtgccccggaacctggccccacaggccccgcctcaccggtaggccccacctcttccaccggccccgccctgctgacaggccccgcctccagccctgtgggccctccctccggtctccaagcttcagtgaacctttttcctaccatctctgtggcaccctcagctgacacctccagcgagaggagcatctacaaagcccggttcctggagaatgtggcggcagcagaaacagagaagcaggttgcgctggcccagggccgggcagagacacttgccggggccatgcccaatgaggcgggtggacacccagatgcccggcaactctgggactccccagagacagcccctgcagccagaacaccccagagccctgccccctgtgtcctgctccgggcccagcgaagccttgcaccagagcccaaggagccactgataccagcaagccccaaggctgagcccatctgggagctccctacccgtgcacccaggctctctattggggacctggacttttcagatctaggggaggatgaagaccaggacatgctgaatgtagagtctgtggaggctgggaaagacatcccagctccctcacccccactgcccctgctctcgggagtacccccccctcccccacttccacctcccccacccatcaaaggccccttcccaccacctccacctctacctctggctgcccctcttccccattcagtgcctgacagctcagccctccccactaagaggaagacagtaaaacttttctggcgtgagctgaagctggctgggggccatggagtctctgcaagccgctttgggccctgcgccaccctctgggcttcactggaccctgtctcagtggacacggcccgactggaacacctctttgagtctcgtgccaaagaggtgctgccctccaagaaagctggagagggccgccggacaatgaccacagtgctggaccccaagcgcagcaacgccatcaacatcggcctaaccacactgccacctgtgcatgtcattaaggctgctctgctcaactttgatgagtttgctgtcagcaaggatggcattgagaagctactgaccatgatgcccacggaggaagagcggcagaagattgaggaagcccagctggccaaccctgacatacccctgggcccagccgagaacttcctgatgactcttgcctccattggcggcctcgctgctcgtctacaactctgggccttcaagctggactatgacagcatggagcgggaaattgctgagccactgtttgacctgaaagtgggtatggaacagctggtacagaatgccaccttccgctgcatcctggctaccctcctagcggtgggcaacttcctcaatggctcccagagcagcggctttgagctgagctacctggagaaggtgtcagaggtgaaggacacggtgcgtcgacagtcactgctacaccatctctgctccctagtgctccagacccggcctgagtcctctgacctctattcagaaatccctgccctgacccgctgtgccaaggtggactttgaacagctgactgagaacctggggcagctggagcgccggagccgggcagccgaggagagcctgcggagcttggccaagcatgagctggccccagccctgcgtgcccgcctcacccacttcctggaccagtgtgcccgccgtgttgccatgctaaggatagtgcaccgccgtgtctgcaataggttccatgccttcctgctctacctgggctacaccccgcaggcggcccgtgaagtgcgcatcatgcagttctgccacacgctgcgggaatttgcgcttgagtatcggacttgccgggaacgagtgctacagcagcagcagaagcaggccacataccgtgagcgcaacaagacccggggacgcatgatcaccgagacagagaagttctcaggtgtggctggggaagcccccagcaacccctctgtcccagtagcagtgagcagcgggccaggccggggagatgctgacagtcatgctagtatgaagagtctgctgaccagcaggcctgaggacaccacacacaatcgccgcagcagaggcatggtccagagcagctccccaatcatgcccacagtggggccctccactgcatccccagaagaacccccaggctccagtttacccagtgatacatcagatgagatcatggaccttctggtgcagtcagtgaccaagagcagtcctcgtgccttagctgctagggaacgcaagcgttcccgcggcaaccgcaagtctttgagaaggacgttgaagagtgggctcggagatgacctggtgcaggcactgggactaagcaagggtcctggcctggaggtgtgaaggtgctgtatcccggaaatctatctggaccctggactgcagtgcaggagatgacagagtgaggagggcccagagcagaattctggccccagaactctgtgcccaggagccatgccttgagcagtattagccgtgtgtgtatgcatgtgagtgtgtgtgtatgtgtgtgtgtgcatgcatatgcatgtgcatgtgtgtgagctccttgaacgcacggagcaaaataaaattttcttagctaatccaa

SEQ ID NO: 11159 - DNA, 4942 bp, Homo sapiens
  source 1..4942: mol_type = unassigned DNA
gctgcggctgcggcctcccctgcgcgcagctacccgggcgtcccggcccgcggccccgctaaccccggggcccgcgcccccgcggcagggatgcatcatggccacgctggcttgccgggtgcagttcttggacgacacggaccctttcaacagcaccaacttccccgagcccagccggccgccgctgttcacgttccgcgaggacctcgcgctcggcacccagctggcgggggtccataggctgctgcaggcgccgcacaagctggatgactgtactctgcagctctctcacaatggcgcctacctggatttggaggccaccctggcagagcagcgggatgagttggaaggcttccaggatgacgccgggcggggcaagaagcacagcatcatcctaaggacgcagctgtctgtgagggtccatgcctgcatcgaaaaactatacaactccagcggacgagatttgagaagggccctcttctccctgaagcagatatttcaggatgacaaggatttggtgcatgaatttgtagtggctgaaggtctgacatgtttgatcaaggtgggagctgaggctgatcagaactatcagaactacatcttaagggctttgggccagattatgttgtatgtggatggaatgaatggagtaataaaccgcaatgaaaccattcagtggctgtacactctcattgggtcaaagttccgcctggtggtgaagacagccctgaagctgctgctcgtctttgtagagtactcggagtccaacgcacctctcctaattcaggctgtcactgctgttgacacgaaaagaggggtcaaaccttggtcaaatatcatggaaatcctggaggaaaaagatggagttgatacggagctactggtttatgcaatgactttggtgaacaagacgttatcaggactaccagaccaagacaccttctacgacgtcgtggactgcctggaggagctgggcattgctgctgtgtcccagaggcacttgaacaagaaagggactgacctggacttagtggagcaactcaacatttatgaggtggcgctcaggcacgaggatggcgatgagaccacggagccaccccccagtgggtgccgggaccggaggagggccagcgtgtgttccagtggcggaggcgagcaccggggcctggaccgcagaaggagccgcaggcactcggtgcagagcatcaagagcaccctgtcggcccccaccagtccctgctcccagtcagctcccagcttcaagcccaaccaagtgcgagatctgcgtgaaaaatacagcaattttggcaataactcttatcactcctcaagaccctcatctggatccagtgtgcccaccacccccacatcatccgtctcacccccacaggaggccaggttggaaaggtcatcaccgagtggtcttctcacatcatccttcaggcagcaccaagagtcactggcagcagagagagagaggcggcggcaggagagagaagaaaggttgcagagaatagagcgggaagaaagaaacaaattcagccgagattatttagacaaaagagaggagcaaaggcaagcaagagaagaaagatacaaatacttggaacagttggcagctgaggagcacgagaaggagctgagaagccggagtgtgagccggggcagagccgacctctccttggacctgacctcgccagcagccccagcctgcctggctcctctgagccatagcccctcatcttcagactctcaagaggctctcacggtgtctgcctcctccccaggaacccctcaccatccccaagcaagtgccggggatcctgaacccgaatcagaggcagaaccggaagcagaggcaggggcggggcaggttgctgatgaagctggccaggacatagcctctgcccacgagggtgcagagactgaagtggagcaggcactagagcaagagccggaagaaagagcctccctcagtgaaaaagagaggcagaacgagggggtgaacgagagggacaactgctctgcctccagcgtctcgtcctccagcagcacgttggagagggaggagaaggaggacaagctctccagggacaggacaactggtttgtggcccgcaggtgtccaggatgcaggtgtaaatggacagtgtggcgacatcctcaccaacaaacggttcatgcttgacatgctgtatgcccataacaggaagtctccggatgatgaggagaagggggatggggaggctgggaggacccagcaggaggcagaggcggtagccagccttgctaccaggatatccaccctgcaggccaactctcagacccaggatgagagtgtcaggagggtggatgtcggctgtttggacaatcggggcagtgtgaaagcatttgctgagaaattcaacagtggggacctggggagaggttccatctcccctgatgctgagcccaatgacaaggtcccagaaacagcgccggtgcagccgaagacagagtctgattacatctgggaccagctcatggccaatccaagagagctcagaatccaagacatggatttcactgacctgggggaggaggatgacattgatgtcctagatgtggacctgggtcacagggaggcccctgggccacctcccccacccccacccacctttctgggtttgccgcccccaccccctccgcccctgttggacagcattcctccccctcctgtccctggtaatttattggttcctcctcctccagtgttcaacgctcctcagggcttagggtggtcccaggtacccaggggtcagcccacattcactaagaaaaagaagaccatccgtttgttctggaatgaagttcggccttttgactggccatgtaaaaacaaccgacgctgcagagaattcctgtggtcaaaactggaacccattaaggtggacacttccagactggagcacctgtttgagtctaaatccaaggaactgtctgtctcaaagaaaactgctgcagatggaaaaaggcaagagatcattgttctggattccaagaggagtaacgccatcaatattggtctgacggtgctgccccctccaaggacgattaagatcgccattttgaattttgatgagtatgccttaaacaaagaaggaatcgagaaaattctaacgatgattcccaccgatgaggagaagcagaaaatccaggaagctcagctggccaaccctgaaatccccctgggcagtgcagagcagttcctcctcaccctgtcctccatcagcgagctctctgcacgacttcacctctgggcattcaaaatggattatgaaactacagaaaaggaagtagcagaaccactcctggacctgaaggaaggaatagaccagttggagaacaataaaaccttgggctttatcctgtctactctcttagccattgggaactttctaaatggaactaatgccaaagcgtttgagttaagctacctcgagaaggttccagaagtcaaagacacagtgcacaagcagtcgcttctccaccatgtgtgcaccatggtggtagaaaacttcccagacagctccgatctgtactcggagatcggggccatcaccaggtcagccaaggttgactttgatcaacttcaggataatttatgtcagatggagagaagatgcaaagcttcatgggatcacctcaaggcaattgcaaaacatgaaatgaaaccagttttaaaacaacggatgtcagagttcctgaaagactgtgcagagcgaattataattttaaagattgtccatagaaggataatcaacagattccactcctttttactctttatgggccatccaccttatgcaattcgggaagtgaacataaacaaattctgcaggattattagtgaatttgcactagagtatcgcacaaccagggaaagggttttgcagcagaaacagaaacgggccaaccacagagagagaaataagaccagagggaagatgatcaccgattctggcaagttctccggcagttctccggcgcccccaagccagccgcagggtctgagctatgcggaggacgcggctgagcacgagaacatgaaggctgtgctgaaaacctcgtccccctccgtggaggacgccacccccgcgctgggcgtccgcacacgcagccgagcaagccgaggatccactagttcctggactatgggaactgatgactcgcccaatgtcacagatgatgcagctgatgagatcatggaccgcatcgtcaagtcagccacccaagtgcccagtcagcgagtggtgccgagggagaggaaacgatcccgggccaaccggaaatctttgcgaagaaccctgaagagcggcctgaccccagaagaagccagagccctgggcttggttggcacctcggagttgcagctgtgacactcataggttactcccaggagtgtgctgagcagaaggcaagctcttgctggatgaaacccctccaggtggggttggggagacttgatattcacatccaacagtttgaaaagggagagctcaattcccagcgtcaccccatggcttgtgttgcctgctacgcattgacttggatctccaggagtcccctgcacataccttctccatcgtgtcagctgtgtttctcttgattccgtgacacccggtttattagttcaaaagtgtgacaccttttctgggcaaggaacagcccctttaaggagcaaatcacttctgtcacagttattatggtaatatgaggcaatctgattagcttcacagactgagtctccacaacaccaaaatatccagatgtaaaccccaaacttgtacacaaaagaaagcacagattgtttacctgttgtggattttagatgtaacaaatgtttatacaaatacatacatgtacaccatgtttcaaatactaaataaatagagtttaatgcc

SEQ ID NO: 11160 - DNA, 4891 bp, Homo sapiens
  source 1..4891: mol_type = unassigned DNA
gctgcggctgcggcctcccctgcgcgcagctacccgggcgtcccggcccgcggccccgctaaccccggggcccgcgcccccgcggcagggatgcatcatggccacgctggcttgccgggtgcagttcttggacgacacggaccctttcaacagcaccaacttccccgagcccagccggccgccgctgttcacgttccgcgaggacctcgcgctcggcacccagctggcgggggtccataggctgctgcaggcgccgcacaagctggatgactgtactctgcagctctctcacaatggcgcctacctggatttggaggccaccctggcagagcagcgggatgagttggaaggcttccaggatgacgccgggcggggcaagaagcacagcatcatcctaaggacgcagctgtctgtgagggtccatgcctgcatcgaaaaactatacaactccagcggacgagatttgagaagggccctcttctccctgaagcagatatttcaggatgacaaggatttggtgcatgaatttgtagtggctgaaggtctgacatgtttgatcaaggtgggagctgaggctgatcagaactatcagaactacatcttaagggctttgggccagattatgttgtatgtggatggaatgaatggagtaataaaccgcaatgaaaccattcagtggctgtacactctcattgggtcaaagttccgcctggtggtgaagacagccctgaagctgctgctcgtctttgtagagtactcggagtccaacgcacctctcctaattcaggctgtcactgctgttgacacgaaaagaggggtcaaaccttggtcaaatatcatggaaatcctggaggaaaaagatggagttgatacggagctactggtttatgcaatgactttggtgaacaagacgttatcaggactaccagaccaagacaccttctacgacgtcgtggactgcctggaggagctgggcattgctgctgtgtcccagaggcacttgaacaagaaagggactgacctggacttagtggagcaactcaacatttatgaggtggcgctcaggcacgaggatggcgatgagaccacggagccaccccccagtgggtgccgggaccggaggagggccagcgtgtgttccagtggcggaggcgagcaccggggcctggaccgcagaaggagccgcaggcactcggtgcagagcatcaagagcaccctgtcggcccccaccagtccctgctcccagtcagctcccagcttcaagcccaaccaagtgcgagatctgcgtgaaaaatacagcaattttggcaataactcttatcactcctcaagaccctcatctggatccagtgtgcccaccacccccacatcatccgtctcacccccacaggaggccaggttggaaaggtcatcaccgagtggtcttctcacatcatccttcaggcagcaccaagagtcactggcagcagagagagagaggcggcggcaggagagagaagaaaggttgcagagaatagagcgggaagaaagaaacaaattcagatacaaatacttggaacagttggcagctgaggagcacgagaaggagctgagaagccggagtgtgagccggggcagagccgacctctccttggacctgacctcgccagcagccccagcctgcctggctcctctgagccatagcccctcatcttcagactctcaagaggctctcacggtgtctgcctcctccccaggaacccctcaccatccccaagcaagtgccggggatcctgaacccgaatcagaggcagaaccggaagcagaggcaggggcggggcaggttgctgatgaagctggccaggacatagcctctgcccacgagggtgcagagactgaagtggagcaggcactagagcaagagccggaagaaagagcctccctcagtgaaaaagagaggcagaacgagggggtgaacgagagggacaactgctctgcctccagcgtctcgtcctccagcagcacgttggagagggaggagaaggaggacaagctctccagggacaggacaactggtttgtggcccgcaggtgtccaggatgcaggtgtaaatggacagtgtggcgacatcctcaccaacaaacggttcatgcttgacatgctgtatgcccataacaggaagtctccggatgatgaggagaagggggatggggaggctgggaggacccagcaggaggcagaggcggtagccagccttgctaccaggatatccaccctgcaggccaactctcagacccaggatgagagtgtcaggagggtggatgtcggctgtttggacaatcggggcagtgtgaaagcatttgctgagaaattcaacagtggggacctggggagaggttccatctcccctgatgctgagcccaatgacaaggtcccagaaacagcgccggtgcagccgaagacagagtctgattacatctgggaccagctcatggccaatccaagagagctcagaatccaagacatggatttcactgacctgggggaggaggatgacattgatgtcctagatgtggacctgggtcacagggaggcccctgggccacctcccccacccccacccacctttctgggtttgccgcccccaccccctccgcccctgttggacagcattcctccccctcctgtccctggtaatttattggttcctcctcctccagtgttcaacgctcctcagggcttagggtggtcccaggtacccaggggtcagcccacattcactaagaaaaagaagaccatccgtttgttctggaatgaagttcggccttttgactggccatgtaaaaacaaccgacgctgcagagaattcctgtggtcaaaactggaacccattaaggtggacacttccagactggagcacctgtttgagtctaaatccaaggaactgtctgtctcaaagaaaactgctgcagatggaaaaaggcaagagatcattgttctggattccaagaggagtaacgccatcaatattggtctgacggtgctgccccctccaaggacgattaagatcgccattttgaattttgatgagtatgccttaaacaaagaaggaatcgagaaaattctaacgatgattcccaccgatgaggagaagcagaaaatccaggaagctcagctggccaaccctgaaatccccctgggcagtgcagagcagttcctcctcaccctgtcctccatcagcgagctctctgcacgacttcacctctgggcattcaaaatggattatgaaactacagaaaaggaagtagcagaaccactcctggacctgaaggaaggaatagaccagttggagaacaataaaaccttgggctttatcctgtctactctcttagccattgggaactttctaaatggaactaatgccaaagcgtttgagttaagctacctcgagaaggttccagaagtcaaagacacagtgcacaagcagtcgcttctccaccatgtgtgcaccatggtggtagaaaacttcccagacagctccgatctgtactcggagatcggggccatcaccaggtcagccaaggttgactttgatcaacttcaggataatttatgtcagatggagagaagatgcaaagcttcatgggatcacctcaaggcaattgcaaaacatgaaatgaaaccagttttaaaacaacggatgtcagagttcctgaaagactgtgcagagcgaattataattttaaagattgtccatagaaggataatcaacagattccactcctttttactctttatgggccatccaccttatgcaattcgggaagtgaacataaacaaattctgcaggattattagtgaatttgcactagagtatcgcacaaccagggaaagggttttgcagcagaaacagaaacgggccaaccacagagagagaaataagaccagagggaagatgatcaccgattctggcaagttctccggcagttctccggcgcccccaagccagccgcagggtctgagctatgcggaggacgcggctgagcacgagaacatgaaggctgtgctgaaaacctcgtccccctccgtggaggacgccacccccgcgctgggcgtccgcacacgcagccgagcaagccgaggatccactagttcctggactatgggaactgatgactcgcccaatgtcacagatgatgcagctgatgagatcatggaccgcatcgtcaagtcagccacccaagtgcccagtcagcgagtggtgccgagggagaggaaacgatcccgggccaaccggaaatctttgcgaagaaccctgaagagcggcctgaccccagaagaagccagagccctgggcttggttggcacctcggagttgcagctgtgacactcataggttactcccaggagtgtgctgagcagaaggcaagctcttgctggatgaaacccctccaggtggggttggggagacttgatattcacatccaacagtttgaaaagggagagctcaattcccagcgtcaccccatggcttgtgttgcctgctacgcattgacttggatctccaggagtcccctgcacataccttctccatcgtgtcagctgtgtttctcttgattccgtgacacccggtttattagttcaaaagtgtgacaccttttctgggcaaggaacagcccctttaaggagcaaatcacttctgtcacagttattatggtaatatgaggcaatctgattagcttcacagactgagtctccacaacaccaaaatatccagatgtaaaccccaaacttgtacacaaaagaaagcacagattgtttacctgttgtggattttagatgtaacaaatgtttatacaaatacatacatgtacaccatgtttcaaatactaaataaatagagtttaatgcc

SEQ ID NO: 11161 - DNA, 4828 bp, Homo sapiens
  source 1..4828: mol_type = unassigned DNA
gctgcggctgcggcctcccctgcgcgcagctacccgggcgtcccggcccgcggccccgctaaccccggggcccgcgcccccgcggcagggatgcatcatggccacgctggcttgccgggtgcagttcttggacgacacggaccctttcaacagcaccaacttccccgagcccagccggccgccgctgttcacgttccgcgaggacctcgcgctcggcacccagctggcgggggtccataggctgctgcaggcgccgcacaagctggatgactgtactctgcagctctctcacaatggcgcctacctggatttggaggccaccctggcagagcagcgggatgagttggaaggcttccaggatgacgccgggcggggcaagaagcacagcatcatcctaaggacgcagctgtctgtgagggtccatgcctgcatcgaaaaactatacaactccagcggacgagatttgagaagggccctcttctccctgaagcagatatttcaggatgacaaggatttggtgcatgaatttgtagtggctgaaggtctgacatgtttgatcaaggtgggagctgaggctgatcagaactatcagaactacatcttaagggctttgggccagattatgttgtatgtggatggaatgaatggagtaataaaccgcaatgaaaccattcagtggctgtacactctcattgggtcaaagttccgcctggtggtgaagacagccctgaagctgctgctcgtctttgtagagtactcggagtccaacgcacctctcctaattcaggctgtcactgctgttgacacgaaaagaggggtcaaaccttggtcaaatatcatggaaatcctggaggaaaaagatggagttgatacggagctactggtttatgcaatgactttggtgaacaagacgttatcaggactaccagaccaagacaccttctacgacgtcgtggactgcctggaggagctgggcattgctgctgtgtcccagaggcacttgaacaagaaagggactgacctggacttagtggagcaactcaacatttatgaggtggcgctcaggcacgaggatggcgatgagaccacggagccaccccccagtgggtgccgggaccggaggagggccagcgtgtgttccagtggcggaggcgagcaccggggcctggaccgcagaaggagccgcaggcactcggtgcagagcatcaagagcaccctgtcggcccccaccagtccctgctcccagtcagctcccagcttcaagcccaaccaagtgcgagatctgcgtgaaaagtcatcaccgagtggtcttctcacatcatccttcaggcagcaccaagagtcactggcagcagagagagagaggcggcggcaggagagagaagaaaggttgcagagaatagagcgggaagaaagaaacaaattcagccgagattatttagacaaaagagaggagcaaaggcaagcaagagaagaaagatacaaatacttggaacagttggcagctgaggagcacgagaaggagctgagaagccggagtgtgagccggggcagagccgacctctccttggacctgacctcgccagcagccccagcctgcctggctcctctgagccatagcccctcatcttcagactctcaagaggctctcacggtgtctgcctcctccccaggaacccctcaccatccccaagcaagtgccggggatcctgaacccgaatcagaggcagaaccggaagcagaggcaggggcggggcaggttgctgatgaagctggccaggacatagcctctgcccacgagggtgcagagactgaagtggagcaggcactagagcaagagccggaagaaagagcctccctcagtgaaaaagagaggcagaacgagggggtgaacgagagggacaactgctctgcctccagcgtctcgtcctccagcagcacgttggagagggaggagaaggaggacaagctctccagggacaggacaactggtttgtggcccgcaggtgtccaggatgcaggtgtaaatggacagtgtggcgacatcctcaccaacaaacggttcatgcttgacatgctgtatgcccataacaggaagtctccggatgatgaggagaagggggatggggaggctgggaggacccagcaggaggcagaggcggtagccagccttgctaccaggatatccaccctgcaggccaactctcagacccaggatgagagtgtcaggagggtggatgtcggctgtttggacaatcggggcagtgtgaaagcatttgctgagaaattcaacagtggggacctggggagaggttccatctcccctgatgctgagcccaatgacaaggtcccagaaacagcgccggtgcagccgaagacagagtctgattacatctgggaccagctcatggccaatccaagagagctcagaatccaagacatggatttcactgacctgggggaggaggatgacattgatgtcctagatgtggacctgggtcacagggaggcccctgggccacctcccccacccccacccacctttctgggtttgccgcccccaccccctccgcccctgttggacagcattcctccccctcctgtccctggtaatttattggttcctcctcctccagtgttcaacgctcctcagggcttagggtggtcccaggtacccaggggtcagcccacattcactaagaaaaagaagaccatccgtttgttctggaatgaagttcggccttttgactggccatgtaaaaacaaccgacgctgcagagaattcctgtggtcaaaactggaacccattaaggtggacacttccagactggagcacctgtttgagtctaaatccaaggaactgtctgtctcaaagaaaactgctgcagatggaaaaaggcaagagatcattgttctggattccaagaggagtaacgccatcaatattggtctgacggtgctgccccctccaaggacgattaagatcgccattttgaattttgatgagtatgccttaaacaaagaaggaatcgagaaaattctaacgatgattcccaccgatgaggagaagcagaaaatccaggaagctcagctggccaaccctgaaatccccctgggcagtgcagagcagttcctcctcaccctgtcctccatcagcgagctctctgcacgacttcacctctgggcattcaaaatggattatgaaactacagaaaaggaagtagcagaaccactcctggacctgaaggaaggaatagaccagttggagaacaataaaaccttgggctttatcctgtctactctcttagccattgggaactttctaaatggaactaatgccaaagcgtttgagttaagctacctcgagaaggttccagaagtcaaagacacagtgcacaagcagtcgcttctccaccatgtgtgcaccatggtggtagaaaacttcccagacagctccgatctgtactcggagatcggggccatcaccaggtcagccaaggttgactttgatcaacttcaggataatttatgtcagatggagagaagatgcaaagcttcatgggatcacctcaaggcaattgcaaaacatgaaatgaaaccagttttaaaacaacggatgtcagagttcctgaaagactgtgcagagcgaattataattttaaagattgtccatagaaggataatcaacagattccactcctttttactctttatgggccatccaccttatgcaattcgggaagtgaacataaacaaattctgcaggattattagtgaatttgcactagagtatcgcacaaccagggaaagggttttgcagcagaaacagaaacgggccaaccacagagagagaaataagaccagagggaagatgatcaccgattctggcaagttctccggcagttctccggcgcccccaagccagccgcagggtctgagctatgcggaggacgcggctgagcacgagaacatgaaggctgtgctgaaaacctcgtccccctccgtggaggacgccacccccgcgctgggcgtccgcacacgcagccgagcaagccgaggatccactagttcctggactatgggaactgatgactcgcccaatgtcacagatgatgcagctgatgagatcatggaccgcatcgtcaagtcagccacccaagtgcccagtcagcgagtggtgccgagggagaggaaacgatcccgggccaaccggaaatctttgcgaagaaccctgaagagcggcctgaccccagaagaagccagagccctgggcttggttggcacctcggagttgcagctgtgacactcataggttactcccaggagtgtgctgagcagaaggcaagctcttgctggatgaaacccctccaggtggggttggggagacttgatattcacatccaacagtttgaaaagggagagctcaattcccagcgtcaccccatggcttgtgttgcctgctacgcattgacttggatctccaggagtcccctgcacataccttctccatcgtgtcagctgtgtttctcttgattccgtgacacccggtttattagttcaaaagtgtgacaccttttctgggcaaggaacagcccctttaaggagcaaatcacttctgtcacagttattatggtaatatgaggcaatctgattagcttcacagactgagtctccacaacaccaaaatatccagatgtaaaccccaaacttgtacacaaaagaaagcacagattgtttacctgttgtggattttagatgtaacaaatgtttatacaaatacatacatgtacaccatgtttcaaatactaaataaatagagtttaatgcc

SEQ ID NO: 11162 - DNA, 1316 bp, Homo sapiens
  source 1..1316: mol_type = unassigned DNA
aatcattagagcctgagtcactctccccaggagacccagacctagaactacccagagcaagaccacagctggtgaacagtccaggagcagacaagatggagacaaattcctctctccccacgaacatctctggagggacacctgctgtatctgctggctatctcttcctggatatcatcacttatctggtatttgcagtcacctttgtcctcggggtcctgggcaacgggcttgtgatctgggtggctggattccggatgacacacacagtcaccaccatcagttacctgaacctggccgtggctgacttctgtttcacctccactttgccattcttcatggtcaggaaggccatgggaggacattggcctttcggctggttcctgtgcaaattcgtctttaccatagtggacatcaacttgttcggaagtgtcttcctgatcgccctcattgctctggaccgctgtgtttgcgtcctgcatccagtctggacccagaaccaccgcaccgtgagcctggccaagaaggtgatcattgggccctgggtgatggctctgctcctcacattgccagttatcattcgtgtgactacagtacctggtaaaacggggacagtagcctgcacttttaacttttcgccctggaccaacgaccctaaagagaggataaatgtggccgttgccatgttgacggtgagaggcatcatccggttcatcattggcttcagcgcacccatgtccatcgttgctgtcagttatgggcttattgccaccaagatccacaagcaaggcttgattaagtccagtcgtcccttacgggtcctctcctttgtcgcagcagccttttttctctgctggtccccatatcaggtggtggcccttatagccacagtcagaatccgtgagttattgcaaggcatgtacaaagaaattggtattgcagtggatgtgacaagtgccctggccttcttcaacagctgcctcaaccccatgctctatgtcttcatgggccaggacttccgggagaggctgatccacgcccttcccgccagtctggagagggccctgaccgaggactcaacccaaaccagtgacacagctaccaattctactttaccttctgcagaggtggagttacaggcaaagtgaggagggagctgggggacactttcgagctcccagctccagcttcgtctcaccttgagttaggctgagccacaggcatttcctgcttattttaggattacccactcatcagaaaaaaaaaaaaaagcctttgtgtcccctgatttggggagaataaacagatatgagttt

SEQ ID NO: 11163 - DNA, 1965 bp, Homo sapiens
  source 1..1965: mol_type = unassigned DNA
attagagcctgagtcactctccccaggagacccagacctagaactacccagagcaagaccacagctggtgaacagtccagcctgtctccagttggactagccacaattcaagtgcttgaaaaccacatgtggagcagacaagatggagacaaattcctctctccccacgaacatctctggagggacacctgctgtatctgctggctatctcttcctggatatcatcacttatctggtatttgcagtcacctttgtcctcggggtcctgggcaacgggcttgtgatctgggtggctggattccggatgacacacacagtcaccaccatcagttacctgaacctggccgtggctgacttctgtttcacctccactttgccattcttcatggtcaggaaggccatgggaggacattggcctttcggctggttcctgtgcaaattcgtctttaccatagtggacatcaacttgttcggaagtgtcttcctgatcgccctcattgctctggaccgctgtgtttgcgtcctgcatccagtctggacccagaaccaccgcaccgtgagcctggccaagaaggtgatcattgggccctgggtgatggctctgctcctcacattgccagttatcattcgtgtgactacagtacctggtaaaacggggacagtagcctgcacttttaacttttcgccctggaccaacgaccctaaagagaggataaatgtggccgttgccatgttgacggtgagaggcatcatccggttcatcattggcttcagcgcacccatgtccatcgttgctgtcagttatgggcttattgccaccaagatccacaagcaaggcttgattaagtccagtcgtcccttacgggtcctctcctttgtcgcagcagccttttttctctgctggtccccatatcaggtggtggcccttatagccacagtcagaatccgtgagttattgcaaggcatgtacaaagaaattggtattgcagtggatgtgacaagtgccctggccttcttcaacagctgcctcaaccccatgctctatgtcttcatgggccaggacttccgggagaggctgatccacgcccttcccgccagtctggagagggccctgaccgaggactcaacccaaaccagtgacacagctaccaattctactttaccttctgcagaggtggagttacaggcaaagtgaggagggagctgggggacactttcgagctcccagctccagcttcgtctcaccttgagttaggctgagccacaggcatttcctgcttattttaggattacccactcatcagaaaaaaaaaaaaaagcctttgtgtcccctgatttggggagaataaacagatatgagtttattattgacttcttttttgattttggacctcagccttgggtggtcagggtgggaaatgataggaagaagctgtcatctgcatcctagtttgcctgaaatgaacccaaataatacccattattattagtcctgaattatgagtagtgaatgatacccatcattctggcatcatgatgagtagtgtccacttccattctgaaaagtgccctgctgtgaaaaataaattatatagtcatcctaggtaaatgaaggaggagggagaagtgtgaaagagtatggcttaaatcagacaagatatacaagaagatactttatatagggcaggagcggtggctcatgcctgtaatcccagcactttgggaggccgaggcaggcggatcaccaggggtcaggaattcgagaacagcctggccaacatggtgaaaccctgtctctactaaaaatacaaaaattagctgggcgtagtggcaggctcccgtaatcccagctactcaggagaccgaggcaggagaatcgcttgaacctggaaggcggaggttgtagtgagccaagaaaacgccactacactccagcctgggtgacagagagagactccggctcag

SEQ ID NO: 11164 - DNA, 2164 bp, Homo sapiens
  source 1..2164: mol_type = unassigned DNA
gaaggaagggctggacattcagattccttgacccttgacatttggaagcatgaactccagtctctcacagaaggctagaggtgaaggaacattcagacacattggtttctaagaagagtccgctgacaacatacccaaggtgtcttctgaaaattataagaaatcctgagtttctgttaggggattggctccagctccattgtccctcccccatcattcagtagtctccgcgaaagcccttagagccggtgttgctccacaggaagccaagaagcacacaggaaaaggagcttagctgctggtgctgctggcaagatggaaaccaacttctccactcctctgaatgaatatgaagaagtgtcctatgagtctgctggctacactgttctgcggatcctcccattggtggtgcttggggtcacctttgtcctcggggtcctgggcaatgggcttgtgatctgggtggctggattccggatgacacgcacagtcaccaccatctgttacctgaacctggccctggctgacttttctttcacggccacattaccattcctcattgtctccatggccatgggagaaaaatggccttttggctggttcctgtgtaagttaattcacatcgtggtggacatcaacctctttggaagtgtcttcttgattggtttcattgcactggaccgctgcatttgtgtcctgcatccagtctgggcccagaaccaccgcactgtgagtctggccatgaaggtgatcgtcggaccttggattcttgctctagtccttaccttgccagttttcctctttttgactacagtaactattccaaatggggacacatactgtactttcaactttgcatcctggggtggcacccctgaggagaggctgaaggtggccattaccatgctgacagccagagggattatccggtttgtcattggctttagcttgccgatgtccattgttgccatctgctatgggctcattgcagccaagatccacaaaaagggcatgattaaatccagccgtcccttacgggtcctcactgctgtggtggcttctttcttcatctgttggtttccctttcaactggttgcccttctgggcaccgtctggctcaaagagatgttgttctatggcaagtacaaaatcattgacatcctggttaacccaacgagctccctggccttcttcaacagctgcctcaaccccatgctttacgtctttgtgggccaagacttccgagagagactgatccactccctgcccaccagtctggagagggccctgtctgaggactcagccccaactaatgacacggctgccaattctgcttcacctcctgcagagactgagttacaggcaatgtgaggatggggtcagggatattttgagttctgttcatcctaccctaatgccagttccagcttcatctacccttgagtcatattgaggcattcaaggatgcacagctcaagtatttattcaggaaaaatgcttttgtgtccctgatttggggctaagaaatagacagtcaggctactaaaatattagtgttattttttgttttttgacttctgcctataccctggggtaagtggagttgggaaatacaagaagagaaagaccagtggggatttgtaagacttagatgagatagcgcataataaggggaagactttaaagtataaagtaaaatgtttgctgtaggttttttatagctattaaaaaaaatcagattatggaagttttcttctatttttagtttgctaagagttttctgtttctttttcttacatcatgagtggactttgcattttatcaaatgcattttctacatgtattaagatggtcatattattcttcttcttttatgtaaatcattataaataatgttcattaagttctgaatgttaaactactcttgaattcctggaataaaccacacttagtcctgatgtactttaaatatttatatctcacaggagttggttagaatttctgtgtttatgtttatatactgttatttcactttttctactatccttgctaagttttcatagaaaataaggaacaaagagaaacttgtaatggtctctgaaaaggaattgagaagtaattcctctgattctgttttctggtgttatatctttattaaatattc

SEQ ID NO: 11165 - DNA, 2621 bp, Homo sapiens
  source 1..2621: mol_type = unassigned DNA
ggaccaggaacaacctatttgcaaagttggcgcaaacattcctgcctgacaggaccatggacacaggttgtagagatagagatggctctggctgtgcattcagcagattctgtagatagaattaataggacttggatgggattgtggtgagagaaagtgaaatgaaagataagttctagtttggaagttttaacaactgaatgtttaaactcaaatagacacaaaatattggaagagtggcaggtttgggaggatgagacaatcaactgtttggttgagccacgttaggtttgaaatgtctacgggactcccgtggggagaggttatatcagactggagcaccagagagaggccaaggctgatagtttagatgaaaagagagcatgatattttaagccctgagactggataatatcacctatagaaagactatatagagataagagaggtggggaacaagtaaaagctgcgggacactcctaaatttagagtcaaatttagagcagaaaatactagcaaaggggactgaaaagcggtggccaattgagcttcaaatgcaagtgaaagtgtgttgtgtgtacatttatcatctcatggcacaggaaaaacgtgatttaaggagaaggaagcgatccaatgggaagaagagatccaatggatcctctatcacgaagatattgagataagaaccaatatggatttgcacccactgcatttgcagccttgaggtcataagcatcctcaggaaaatgcaccaggtgctgctggcaagatggaaaccaacttctccactcctctgaatgaatatgaagaagtgtcctatgagtctgctggctacactgttctgcggatcctcccattggtggtgcttggggtcacctttgtcctcggggtcctgggcaatgggcttgtgatctgggtggctggattccggatgacacgcacagtcaccaccatctgttacctgaacctggccctggctgacttttctttcacggccacattaccattcctcattgtctccatggccatgggagaaaaatggccttttggctggttcctgtgtaagttaattcacatcgtggtggacatcaacctctttggaagtgtcttcttgattggtttcattgcactggaccgctgcatttgtgtcctgcatccagtctgggcccagaaccaccgcactgtgagtctggccatgaaggtgatcgtcggaccttggattcttgctctagtccttaccttgccagttttcctctttttgactacagtaactattccaaatggggacacatactgtactttcaactttgcatcctggggtggcacccctgaggagaggctgaaggtggccattaccatgctgacagccagagggattatccggtttgtcattggctttagcttgccgatgtccattgttgccatctgctatgggctcattgcagccaagatccacaaaaagggcatgattaaatccagccgtcccttacgggtcctcactgctgtggtggcttctttcttcatctgttggtttccctttcaactggttgcccttctgggcaccgtctggctcaaagagatgttgttctatggcaagtacaaaatcattgacatcctggttaacccaacgagctccctggccttcttcaacagctgcctcaaccccatgctttacgtctttgtgggccaagacttccgagagagactgatccactccctgcccaccagtctggagagggccctgtctgaggactcagccccaactaatgacacggctgccaattctgcttcacctcctgcagagactgagttacaggcaatgtgaggatggggtcagggatattttgagttctgttcatcctaccctaatgccagttccagcttcatctacccttgagtcatattgaggcattcaaggatgcacagctcaagtatttattcaggaaaaatgcttttgtgtccctgatttggggctaagaaatagacagtcaggctactaaaatattagtgttattttttgttttttgacttctgcctataccctggggtaagtggagttgggaaatacaagaagagaaagaccagtggggatttgtaagacttagatgagatagcgcataataaggggaagactttaaagtataaagtaaaatgtttgctgtaggttttttatagctattaaaaaaaatcagattatggaagttttcttctatttttagtttgctaagagttttctgtttctttttcttacatcatgagtggactttgcattttatcaaatgcattttctacatgtattaagatggtcatattattcttcttcttttatgtaaatcattataaataatgttcattaagttctgaatgttaaactactcttgaattcctggaataaaccacacttagtcctgatgtactttaaatatttatatctcacaggagttggttagaatttctgtgtttatgtttatatactgttatttcactttttctactatccttgctaagttttcatagaaaataaggaacaaagagaaacttgtaatggtctctgaaaaggaattgagaagtaattcctctgattctgttttctggtgttatatctttattaaatattc

SEQ ID NO: 11166 - DNA, 2517 bp, Homo sapiens
  source 1..2517: mol_type = unassigned DNA
aaaacactcattttgttttatagcatgacaggctgtctgattccatctttataaccaaagccaattaagatcttaaaaccaaacatataacttcatctttttacaagtacttagagcctgagttgctccacaggaatccaggaactgggcacaggaaaaggatctaagctggtggtgtgggaagatggaaaccaacttctccattcctctgaatgaaactgaggaggtgctccctgagcctgctggccacaccgttctgtggatcttctcattgctagtccacggagtcacctttgtcttcggggtcctgggcaatgggcttgtgatctgggtggctggattccggatgacacgcacagtcaacaccatctgttacctgaacctggccctagctgacttctctttcagtgccatcctaccattccgaatggtctcagtcgccatgagagaaaaatggccttttggctcattcctatgtaagttagttcatgttatgatagacatcaacctgtttgtcagtgtctacctgatcaccatcattgctctggaccgctgtatttgtgtcctgcatccagcctgggcccagaaccatcgcaccatgagtctggccaagagggtgatgacgggactctggattttcaccatagtccttaccttaccaaatttcatcttctggactacaataagtactacgaatggggacacatactgtattttcaactttgcattctggggtgacactgctgtagagaggttgaacgtgttcattaccatggccaaggtctttctgatcctccacttcattattggcttcagcgtgcctatgtccatcatcacagtctgctatgggatcatcgctgccaaaattcacagaaaccacatgattaaatccagccgtcccttacgtgtcttcgctgctgtggtggcttctttcttcatctgttggttcccttatgaactaattggcattctaatggcagtctggctcaaagagatgttgttaaatggcaaatacaaaatcattcttgtcctgattaacccaacaagctccttggccttttttaacagctgcctcaacccaattctctacgtctttatgggtcgtaacttccaagaaagactgattcgctctttgcccactagtttggagagggccctgactgaggtccctgactcagcccagaccagcaacacagacaccacttctgcttcacctcctgaggagacggagttacaagcaatgtgaggtcggggatatttttgggctctgtctctttctaccctgcgttaagcggaaaaaaaaaattctgacagtgtttttcttcctctttcataccaccaccaccacaatcatcaacataaaggaagtctgtaccaaatctgtagggggtttttcccacaaccaagcaatagacaccagctgggtgtcctacaattaaattccaacactatctacctggagctactgtcagatcccacaggtttaagggctcattccccaagtctgctcctccagttgagacacaagtcacaaatccaggcttctgaaacttcggaccaaccagcttcaatcagggttcccactaccccctctttgggggtagagtggctcatggaactcagagaaacatttatttcggcttgctggtttattataaaagcaaggtttattataaaagatactacaaaggatacagatgaagaggcacatagggcaaggtacggggttccacgccctccctgagtgcatcaccctctgggaacctccgtgtgttcacgtctcatgaagctctccaaatccagtcctcttgggtttttatggaagcttcatgatgtcagcattctttcctccagtgtataggatgggatcctctctggggagggtcttaagacccacaattagaaaggcaagggaagattagagtcctgctttggggtagatgaaaggaaaggagagagattctgtttcctgaggcttaatacacccaacattataacaaaggactgtagcaagggctatgggagttctgaagcagaaaccatgggctaaaaccaacatacatcttaataccagataccctaatcccagtcctaacttcatttaaccttggtcacattgagtcattccaggatgagtggctcaagtatttcctcagggaaaatacttctgtgccccctgatttgagggtaagaagtagataatgaggccactgtgggtgttattttttcatgtctggacctcagcctatatcctgagactaagtggaagtgggaaaagagtacaagagaagagacaaagtggggatatttgtaaggcttagatgagatagtgtttttttagaaaaaaactttatcttaccattaagtaaaatgtttgccataggctttctggggctttctctttttaaagtcagactgttgaaggtttcttctattcttatttgttaagagttttcttttattgtttaaatcatgaatgaatgttgaattttattaaatgcagtttctgtaaatatt

SEQ ID NO: 11167 - DNA, 1669 bp, Homo sapiens
  source 1..1669: mol_type = unassigned DNA
acgggccaaggcggcgcgtctcgggggtggagcctggaggtgaccgcgccgctgcaacgcccccaccccccgcggtcgcagtggttcagcccgagaacttttcattcataaaaagaaaagactccgcacggcgcgggtgagtcagaacccagcagccgtgtaccccgcagagccgccagccccgggcatgttccgagacttcggggaacccggcccgagctccgggaacggcggcgggtacggcggccccgcgcagcccccggccgcagcgcaggcagcccagcagaagttccacctggtgccaagcatcaacaccatgagtggcagtcaggagctgcagtggatggtacagcctcatttcctggggcccagcagttaccccaggcctctgacctaccctcagtacagccccccacaaccccggccaggagtcatccgggccctggggccgcctccaggggtacgtcgaaggccttgtgaacagatcagcccggaggaagaggagcgccgccgagtaaggcgcgagcggaacaagctggctgcggccaagtgcaggaaccggaggaaggaactgaccgacttcctgcaggcggagactgacaaactggaagatgagaaatctgggctgcagcgagagattgaggagctgcagaagcagaaggagcgcctagagctggtgctggaagcccaccgacccatctgcaaaatcccggaaggagccaaggagggggacacaggcagtaccagtggcaccagcagcccaccagccccctgccgccctgtaccttgtatctccctttccccagggcctgtgcttgaacctgaggcactgcacacccccacactcatgaccacaccctccctaactcctttcacccccagcctggtcttcacctaccccagcactcctgagccttgtgcctcagctcatcgcaagagtagcagcagcagcggagacccatcctctgacccccttggctctccaaccctcctcgctttgtgaggcgcctgagccctactccctgcagatgccaccctagccaatgtctcctccccttcccccaccggtccagctggcctggacagtatcccacatccaactccagcaacttcttctccatccctctaatgagactgaccatattgtgcttcacagtagagccagcttggggccaccaaagctgcccactgtttctcttgagctggcctctctagcacaatttgcactaaatcagagacaaaatatttcccatttgtgccagaggaatcctggcagcccagagactttgtagatccttagaggtcctctggagccctaaccccttccagatcactgccacactctccatcaccctcttcctgtgatccacccaaccctatctcctgacagaaggtgccactttacccacctagaacactaactcaccagccccactgccagcagcagcaggtgattggaccaggccattctgccgccccctcctgaaccgcacagctcaggaggcgcccttggcttctgtgatgagctgatctgcggatctcagctttgagaagccttcagctccagggaatccaagcctccacagcgagggcagctgctatttattttcctaaagagagtatttttatacaaacctaccaaaatggaataaaaggcttgaagctgtgg

SEQ ID NO: 11168 - DNA, 1427 bp, Homo sapiens
  source 1..1427: mol_type = unassigned DNA
ataaaaagaaaagactccgcacggcgcgggtgagtcagaacccagcagccgtgtaccccgcagagccgccagccccgggcatgttccgagacttcggggaacccggcccgagctccgggaacggcggcgggtacggcggccccgcgcagcccccggccgcagcgcaggcagcccagcaggagactgacaaactggaagatgagaaatctgggctgcagcgagagattgaggagctgcagaagcagaaggagcgcctagagctggtgctggaagcccaccgacccatctgcaaaatcccggaaggagccaaggagggggacacaggcagtaccagtggcaccagcagcccaccagccccctgccgccctgtaccttgtatctccctttccccagggcctgtgcttgaacctgaggcactgcacacccccacactcatgaccacaccctccctaactcctttcacccccagcctggtcttcacctaccccagcactcctgagccttgtgcctcagctcatcgcaagagtagcagcagcagcggagacccatcctctgacccccttggctctccaaccctcctcgctttgtgaggcgcctgagccctactccctgcagatgccaccctagccaatgtctcctccccttcccccaccggtccagctggcctggacagtatcccacatccaactccagcaacttcttctccatccctctaatgagactgaccatattgtgcttcacagtagagccagcttggggccaccaaagctgcccactgtttctcttgagctggcctctctagcacaatttgcactaaatcagagacaaaatatttcccatttgtgccagaggaatcctggcagcccagagactttgtagatccttagaggtcctctggagccctaaccccttccagatcactgccacactctccatcaccctcttcctgtgatccacccaaccctatctcctgacagaaggtgccactttacccacctagaacactaactcaccagccccactgccagcagcagcaggtgattggaccaggccattctgccgccccctcctgaaccgcacagctcaggaggcgcccttggcttctgtgatgagctgatctgcggatctcagctttgagaagccttcagctccagggaatccaagcctccacagcgagggcagctgctatttattttcctaaagagagtatttttatacaaacctaccaaaatggaataaaaggcttgaagctgtggcctgagtgcctcactggacccagaggccaatgggagagtatttggagccctaggtcccagccttagctctacagactcactgcatgaccttggacaaattctttgatatttttggactttgtcttatctgacaagtggggctacatccgctcggcctcatctccgggactg

SEQ ID NO: 11169 - DNA, 970 bp, Homo sapiens
  source 1..970: mol_type = unassigned DNA
gagtcagaacccagcagccgtgtaccccgcagagccgccagccccgggcatgttccgagacttcggggaacccggcccgagctccgggaacggcggcgggtacggcggccccgcgcagcccccggccgcagcgcaggcagcccagcagaagttccacctggtgccaagcatcaacaccatgagtggcagtcaggagctgcagtggatggtacagcctcatttcctggggcccagcagttaccccaggcctctgacctaccctcagtacagccccccacaaccccggccaggagtcatccgggccctggggccgcctccaggggtacgtcgaaggccttgtgaacagatcagcccggaggaagaggaatcctggcagcccagagactttgtagatccttagaggtcctctggagccctaaccccttccagatcactgccacactctccatcaccctcttcctgtgatccacccaaccctatctcctgacagaaggtgccactttacccacctagaacactaactcaccagccccactgccagcagcagcaggtgattggaccaggccattctgccgccccctcctgaaccgcacagctcaggaggcgcccttggcttctgtgatgagctgatctgcggatctcagctttgagaagccttcagctccagggaatccaagcctccacagcgagggcagctgctatttattttcctaaagagagtatttttatacaaacctaccaaaatggaataaaaggcttgaagctgtggcctgagtgcctcactggacccagaggccaatgggagagtatttggagccctaggtcccagccttagctctacagactcactgcatgaccttggacaaattctttgatatttttggactttgtcttatctgacaagtggggctacatccgctcggcctcatctccgggactgaggggagacagtcctctggggtaaaagcga

SEQ ID NO: 11170 - DNA, 6708 bp, Homo sapiens
  source 1..6708: mol_type = unassigned DNA
gtagtgactcatctcgggcagagcgctagggctccgagcgaaccagcgagcgagcgaacgagcggcgctcggcggggacagaaagagggagagagagagagagagagagggagaggcgcggccgggcgaggcgggcccgtccgggagcgggctccggggaaggggtgcgggtctgggcgccggagcggggagcggggccgcgtccctctcagcgccagctctacttgagccccacgagccgctgtccccctggcgcgctcggggccgcgggacgggcgcacgccgccttctcctagtcaagtatccgagccgccccgaaactcgggcggcgagtcggccacgggaagtttattctccggctccttttctaaaaggaagaaacagaagtttctcccagcggacagcttttctttccgcctttttggccctgtctgaaatcgggggtccccagggctggcaggccaggctcgctgggctcctaatcttttttttaatttccaatttttgattgggccgtgggtccccgctgagctccggctgcgcgcgggggcgggagggcgcgcgcaggggagggaccgagagacgcgccgactttttagagggagggatcgggtggacaactggtcccgcggcgctcgcagagccggaaagaagtgctgtaagggacgctcgggggacgctgttcctgaggtgtcgccgcctccctgtcctcgccctccgcggtgggggagaaacccaggagcgaagcccagagcccgcggcgcggccggcggacgaacgagcgcgcagcagccggtgcgcggccgcggcgagggcgggggaagaaaaacaccctgtttcctctccggcccccaccgcggatcatgtaccaggattatcccgggaactttgacacctcgtcccggggcagcagcggctctcctgcgcacgccgagtcctactccagcggcggcggcggccagcagaaattccgggtagatatgcctggctcaggcagtgcattcatccccaccatcaacgccatcacgaccagccaggacctgcagtggatggtgcagcccacagtgatcacctccatgtccaacccataccctcgctcgcacccctacagccccctgccgggcctggcctctgtccctggacacatggccctcccaagacctggcgtgatcaagaccattggcaccaccgtgggccgcaggaggagagatgagcagctgtctcctgaagaggaggagaagcgtcgcatccggcgggagaggaacaagctggctgcagccaagtgccggaaccgacgccgggagctgacagagaagctgcaggcggagacagaggagctggaggaggagaagtcaggcctgcagaaggagattgctgagctgcagaaggagaaggagaagctggagttcatgttggtggctcacggcccagtgtgcaagattagccccgaggagcgccgatcgcccccagcccctgggctgcagcccatgcgcagtgggggtggctcggtgggcgctgtagtggtgaaacaggagcccctggaagaggacagcccctcgtcctcgtcggcggggctggacaaggcccagcgctctgtcatcaagcccatcagcattgctgggggcttctacggtgaggagcccctgcacacccccatcgtggtgacctccacacctgctgtcactccgggcacctcgaacctcgtcttcacctatcctagcgtcctggagcaggagtcacccgcatctccctccgaatcctgctccaaggctcaccgcagaagcagtagcagcggggaccaatcatcagactccttgaactcccccactctgctggctctgtaacccagtgcacctccctccccagctccggagggggtcctcctcgctcctccttcccagggaccagcaccttcaagcgctccagggccgtgagggcaagagggggacctgccaccagggagcttcctggctctgggggacccaggtgggacttagcagtgagtattggaagacttgggttgatctcttagaagccatgggacctcctccctcattcatcttgcaagcaaatcccatttcttgaaaagccttggagaactcggtttggtagacttggacatctctctggcttctgaagagcctgaagctggcctggaccattcctgtccctttgttaccatactgtctctggagtgatggtgtccttccctgccccaccacgcatgctcagtgccttttggtttcaccttccctcgacttgaccctttcctcccccagcgtcagtttcactccctcttggtttttatcaaatttgccatgacatttcatctgggtggtctgaatattaaagctcttcatttctggagatggggcagcaggtggctcttctgctggggctgacttgtccagaaggggacaaagtgcaatacagagccttccctaccctgacgcctcccagtcatcatctccagaactcccagcggggctccctgagctctcaaggagatgctgccatcactgggaggctcagaggacccttcctgcccaccttcggagacggcttctggaggaacggcttggccagaagacagggtgtgagtgagacagtggggcacaggttgggtttgccaaacgcctaattaccaggccaggaagcatgccaacaaagccacacgggtgtcctagccagcttcccttcacctggtgtcttgagtagggcgtctcctgtaattactgccttgccattctgcccctggacccttctctccggaccagggaggcgtccctccctaggagccacacattatactccaagtccctgccgggctccgcctttcccccaccctggctctcagggtgacgccacccacagagatttaatgagcgtgggcctggaccttccccagatgctgccaggcagcccctccccaagcctcaaagaagcatttgctgaggatggagaggcaggggagggaggcgggaggccgtcactggagtggcgtctgcagcagctgctgccccagcacccgctcagcctgtcctggctgctcacctccccgcagggcaccgggcctttcctgccctctgtggtcatctgccacctgctggatcaagtgctttctcttttacactcccctgtccccaccccagtgcactcttctggcccaggcagcaagcaagctgtgaacagctggcctgagctgtcgctgtggcttgtggctcatgcgccattcctggttgtctgttgaatctttctggctgctggaattggagataggatgttttgcttcccactgcaggagagctgccccctttcacggggttggggaagggtccccctggcctccagcaggagcacagctcagcagggtccctgctgcccacccctctgagccttttctccccagggtatggctcctgctgagtttcttgtccagcagggccttgacaggaatccagggagtagctcctggccagaaccagcctctgcggggcttgtgctctgcaaagactctgctgctggggattcagctctagaggtcacagtatcctcgtttgaaagataattaagatcccccgtggagaaagcagtgacacattcacacagctgttccctcgcatgttatttcatgaacatgacctgttttcgtgcactagacacacagagtggaacagccgtatgcttaaagtacatgggccagtgggactggaagtgacctgtacaagtgatgcagaaaggagggtttcaaagaaaaaggattttgtttaaaatactttaaaaatgttatttcctgcatcccttggctgtgatgcccctctcccgatttcccaggggctctgggagggacccttctaagaagattgggcagttgggtttctggcttgagatgaatccaagcagcagaatgagccaggagtagcaggagatgggcaaagaaaactggggtgcactcagctctcacaggggtaatcatctcaagtggtatttgtagccaagtgggagctattttcttttttgtgcatatagatatttcttaaatgaagctgctttcttgtcttttatttctaaaagcccccttataccccactttgtgcagcaaagatccccgtgcaggtcacagcctgatttgtggccaggctggacaaattcctgaggcacaacttggcttcagttcagatttcaagctgtgttggtgttgggaccagcagaaggcaaacgtccagccaacacacaggactgtaagaggactctgagctacgtgccctgtgaagacccccaggctttgtcataggaggtcgttcagcttccccaaagtcagaggtgatttgatttggggaagactgaatattcacacctaagtcgtgagcatatcctgagttttacttccttatggcttgccctccaagttctctctctcatacacacacacacccttgctccagaatcaccagacacctccatggctccagctatgggaacagctgcattggggctgcctttctgtttggcttaggaacttctgtgcttcttgtggctccactcgcgaggcagctcggaggtgtggactccgattgggctgcaggcagctctgggacggcacagggcgggcgctctgatcagctcgtgtaaaacacaccgtcttcttggcctcctggccagtctttctgcgaatagtcctctccctggccagttgaatgggggaagctgctggcacaggaaggagaggcgatcccggctgaggcttaggaaattgctggagccggctccaagcagataattcactggggaggttttcagagtcaaacatcattctgcctgtgttgggggccaggtgtgtcacacaagcatctcaaagtcaaaagccatctggggctgctgcttctgtttctcaggctctggggaaaggaatctccctctcctctcacttgattccaagtgtggttgaattgtctggagcactgggactttttttctcttttccttgatggaccaacagtgcaaatgcaatctcgccatttaactttcaggtcgatttcctttcctgatcagacatctttgtgccccctttaggaaggaaaagaatacacctacgatgtgccaggcactgtgttaggcgcttttatatagatcctcgttaggatgagactaagggatgaggacatctctttataaaaggcccctaagtaatggataaacagaaacacttagaggtgagaaggtctgtcttcaagatccaaggtaagattgccttcagtctgatgtttgttctcaaggacttatcccctacaatattctcccactccatacttctccttctaccccaccatgtgctcccgtgcactcctcagatggtcagaggggtaacccaagtccttagagaatttggggaccaatagaatatgtgatgtgtgaattttctttaaaaaacttaaggagtctttgctaccttctgcttgttgagttgttttggcattcatattaaaagccagcatctcactatttattgacaggttgggctgtgtgtgtgcgcatgtgtgtatacatttccaggcgtgcctgtgtcctgtagctttttaaaaggaaacccagtcatcccactatgaatctggcatcttcttatgcttctagtgttttggccatacatcaaccaaggggtttaatttatccaatgcttgacgacatgttcaggaggggctggatcaaattttgagagggttatgggaaagggagggggagaagaaattgacatttattttattatttattttaaatgtttacatcttctttatgttgtatcaagcctgaatagaaactgatagcattaaaatactccgttcctctctctcttctcgcttcctttttttttttttttttaaatttaggataacacatttttgtttctaaagtgatttgtgatttgtgctgtataaactgtataaaaggttctgtttttaaaggtggattttcattcctctggggacagtggtcgccaagacatctacattgtaagagaacacagtggaagatcctgtcctgattctcaaaaattattttctctgtatgattaaaagtttattccatttattttagtttgtgtttacttgattttgaggaagaaaatatttgactttgtgtaaagagtagggtatcagggtgtcttttctgccgtgggagatgtgtatatatatagtattttggtgtatagtagaaaataagctttgtgcatctgtatttgagatatgttaatgacgtggagtaaagtcagctgtaagactctggaggcaaacaagttgtatatggttcatatggctctatggggaatttaattacctttctgggcactttttttttttttttttttttaagtaatggtgaaatggtcccattggagagtctcctaaatagaccttccaggcagaaccgcaagctcaaaatctttgtatagttttgaaaattgaggagtagctttgtttggaagcctttctggtggtggtttttgttgttgttgttgttttgttgttttactatatgtaatacaagcctacagtatttgcactaaagaaagcttgttagaaaaagcttgctgctatggaagaaagaacatattaaaacttctttcccttgcgatttttttgggggaggggggttagcatttccactttcagttgagtagcattttgtagaataaaatgaattaagattgaa

SEQ ID NO: 11171 - DNA, 983 bp, Homo sapiens
  source 1..983: mol_type = unassigned DNA
atagacgcctgcccattcggcccggcagtgtgtgaggcgcctttcaaaccggagggattggcaagaaattccgggtagatatgcctggctcaggcagtgcattcatccccaccatcaacgccatcacgaccagccaggacctgcagtggatggtgcagcccacagtgatcacctccatgtccaacccataccctcgctcgcacccctacagccccctgccgggcctggcctctgtccctggacacatggccctcccaagacctggcgtgatcaagaccattggcaccaccgtgggccgcaggaggagagatgagcagctgtctcctgaagaggaggagaagcgtcgcatccggcgggagaggaacaagctggctgcagccaagtgccggaaccgacgccgggagctgacagagaagctgcaggcggagacagaggagctggaggaggagaagtcaggcctgcagaaggagattgctgagctgcagaaggagaaggagaagctggagttcatgttggtggctcacggcccagtgtgcaagattagccccgaggagcgccgatcgcccccagcccctgggctgcagcccatgcgcagtgggggtggctcggtgggcgctgtagtggtgaaacaggagcccctggaagaggacagcccctcgtcctcgtcggcggggctggacaaggcccagcgctctgtcatcaagcccatcagcattgctgggggcttctacggtgaggagcccctgcacacccccatcgtggtgacctccacacctgctgtcactccgggcacctcgaacctcgtcttcacctatcctagcgtcctggagcaggagtcacccgcatctccctccgaatcctgctccaaggctcaccgcagaagcagtagcagcggggaccaatcatcagactccttgaactcccccactctgctggctctgtaacccagtgcacctccctccccagctccggagggggtcctc

SEQ ID NO: 11172 - DNA, 2458 bp, Homo sapiens
  source 1..2458: mol_type = unassigned DNA
caaccatatccagcctttgccgaatacatcctatctgccacacatccagcgtgaggtccctccagctacaaggtgggcaccatggcggagaagtttgactgccactactgcagggatcccttgcaggggaagaagtatgtgcaaaaggatggccaccactgctgcctgaaatgctttgacaagttctgtgccaacacctgtgtggaatgccgcaagcccatcggtgcggactccaaggaggtgcactataagaaccgcttctggcatgacacctgcttccgctgtgccaagtgccttcaccccttggccaatgagacctttgtggccaaggacaacaagatcctgtgcaacaagtgcaccactcgggaggactcccccaagtgcaaggggtgcttcaaggccattgtggcaggagatcaaaacgtggagtacaaggggaccgtctggcacaaagactgcttcacctgtagtaactgcaagcaagtcatcgggactggaagcttcttccctaaaggggaggacttctactgcgtgacttgccatgagaccaagtttgccaagcattgcgtgaagtgcaacaaggccatcacatctggaggaatcacttaccaggatcagccctggcatgccgattgctttgtgtgtgttacctgctctaagaagctggctgggcagcgtttcaccgctgtggaggaccagtattactgcgtggattgctacaagaactttgtggccaagaagtgtgctggatgcaagaaccccatcactgggaaaaggactgtgtcaagagtgagccacccagtctctaaagctaggaagcccccagtgtgccacgggaaacgcttgcctctcaccctgtttcccagcgccaacctccggggcaggcatccgggtggagagaggacttgtccctcgtgggtggtggttctttatagaaaaaatcgaagcttagcagctcctcgaggcccgggtttggtaaaggctccagtgtggtggcctatgaaggacaatcctggcacgactactgcttccactgcaaaaaatgctccgtgaatctggccaacaagcgctttgttttccaccaggagcaagtgtattgtcccgactgtgccaaaaagctgtaaactgacaggggctcctgtcctgtaaaatggcatttgaatctcgttctttgtgtccttactttctgccctataccatcaataggggaagagtggtccttcccttctttaaagttctccttccgtcttttctcccattttacagtattactcaaataagggcacacagtgatcatattagcatttagcaaaaagcaaccctgcagcaaagtgaatttctgtccggctgcaatttaaaaatgaaaacttaggtagattgactcttctgcatgtttctcatagagcagaaaagtgctaatcatttagccacttagtgatgtaagcaagaagcataggagataaaacccccactgagatgcctctcatgcctcagctgggacccaccgtgtagacacacgacatgcaagagttgcagcggctgctccaactcactgctcaccctcttctgtgagcaggaaaagaaccctactgacatgcatggtttaacttcctcatcagaactctgcccttccttctgttcttttgtgctttcaaataactaacacgaacttccagaaaattaacatttgaacttagctgtaattctaaactgacctttccccgtactaacgtttggtttccccgtgtggcatgttttctgagcgttcctactttaaagcatggaacatgcaggtgatttgggaagtgtagaaagacctgagaaaacgagcctgtttcagaggaacatcgtcacaacgaatacttctggaagcttaacaaaactaaccctgctgtcctttttattgtttttaattaatatttttgttttaattgatagcaaaatagtttatgggtttggaaacttgcatgaaaatattttagccccctcagatgttcctgcagtgctgaaattcatcctacggaagtaaccgcaaaactctagagggggagttgagcaggcgccagggctgtcatcaacatggatatgacatttcacaacagtgactagttgaatcccttgtaacgtagtagttgtctgctctttgtccatgtgttaatgaggactgcaaagtcccttctgttgtgattcctaggacttttcctcaagaggaaatctggatttccacctaccgcttacctgaaatgcaggatcacctacttactgtattctacattattatatgacatagtataatgagacaatatcaaaagtaaacatgtaatgacaatacatactaacattcttgtaggagtggttagagaagctgatgcctcatttctacattctgtcattagctattatcatctaacgtttcagtgtatccttacagaaataaagcagcatatgaataacctgc

SEQ ID NO: 11173 - DNA, 1017 bp, Homo sapiens
  source 1..1017: mol_type = unassigned DNA
atttcctttgtttggaggcttggttctgagtgagagttcaacagcctttgcccaggcggcttctcaaacacagggtgtggtttccttagctcactctctgctgtttggttgctcatggcaacaagatccaaataacttggacatgtgtttgtataaaaaaaacctgggaatggaacccaaagtgagactttggggctttcagttagtggaagagctgcggtccctccagctacaaggtgggcaccatggcggagaagtttgactgccactactgcagggatcccttgcaggggaagaagtatgtgcaaaaggatggccaccactgctgcctgaaatgctttgacaagttctgtgccaacacctgtgtggaatgccgcaagcccatcggtgcggactccaaggaggtgcactataagaaccgcttctggcatgacacctgcttccgctgtgccaagtgccttcaccccttggccaatgagacctttgtggccaaggacaacaagatcctgtgcaacaagtgcaccactcgggaggactcccccaagtgcaaggggtgcttcaaggccattgtggcaggagatcaaaacgtggagtacaaggggaccgtctggcacaaagactgcttcacctgtagtaactgcaagcaagtcatcgggactggaagcttcttccctaaaggggaggacttctactgcgtgacttgccatgagaccaagtttgccaagcattgcgtgaagtgcaacaaggccatcacatctggaggaatcacttaccaggatcagccctggcatgccgattgctttgtgtgtgttacctgctctaagaagctggctgggcagcgtttcaccgctgtggaggaccagtattactgcgtggattgctacaagaactttgtggccaagaagtgtgctggatgcaagaaccccatcactgggtttggtaaaggctccagtgtggtggcctatgaaggacaatcctggcacgactactgcttccactgcaaaaaatgctccgtga

SEQ ID NO: 11174 - DNA, 833 bp, Homo sapiens
  source 1..833: mol_type = unassigned DNA
gtatgttcacaaatgagccacagccttatcagctggggttgagggaagactggtctaggtgctgctcctgaacttggtctctgagccatggcttcccatagacactcaggtccctccagctacaaggtgggcaccatggcggagaagtttgactgccactactgcagggatcccttgcaggggaagaagtatgtgcaaaaggatggccaccactgctgcctgaaatgctttgacaagttctgtgccaacacctgtgtggaatgccgcaagcccatcggtgcggactccaaggaggtgcactataagaaccgcttctggcatgacacctgcttccgctgtgccaagtgccttcaccccttggccaatgagacctttgtggccaaggacaacaagatcctgtgcaacaagtgcaccactcgggaggactcccccaagtgcaaggggtgcttcaaggccattgtggcaggagatcaaaacgtggagtacaaggggaccgtctggcacaaagactgcttcacctgtagtaactgcaagcaagtcatcgggactggaagcttcttccctaaaggggaggacttctactgcgtgacttgccatgagaccaagtttgccaagcattgcgtgaagtgcaacaagggtttggtaaaggctccagtgtggtggcctatgaaggacaatcctggcacgactactgcttccactgcaaaaaatgctccgtgaatctggccaacaagcgctttgttttccaccaggagcaagtgtattgtcccgactgtgccaaaaagctgtaaactgacaggggctcctgtcctgtaaaatggcatttgaatctc

SEQ ID NO: 11175 - DNA, 2565 bp, Homo sapiens
  source 1..2565: mol_type = unassigned DNA
gccgagtccaaattttattccggtacagggatgactttctatgtggcctctctggctctggagctaatttggatgctgagtagccccgcaggtatttatatgtagcgtttggtatttttactgggtcctattcttctcccttggatcacctaaaatggttaagaattttctagtgggattaaggttgtgatctctggggaggggtgggacatctgctctcggttatttttgtgttagccgcttccccttaaatgtatgttcacaaatgagccacagccttatcagctggggttgagggaagactggtctaggtgctgctcctgaacttggtctctgagccatggcttcccatagacactcaggtccctccagctacaaggtgggcaccatggcggagaagtttgactgccactactgcagggatcccttgcaggggaagaagtatgtgcaaaaggatggccaccactgctgcctgaaatgctttgacaagttctgtgccaacacctgtgtggaatgccgcaagcccatcggtgcggactccaaggaggtgcactataagaaccgcttctggcatgacacctgcttccgctgtgccaagtgccttcaccccttggccaatgagacctttgtggccaaggacaacaagatcctgtgcaacaagtgcaccactcgggaggactcccccaagtgcaaggggtgcttcaaggccattgtggcaggagatcaaaacgtggagtacaaggggaccgtctggcacaaagactgcttcacctgtagtaactgcaagcaagtcatcgggactggaagcttcttccctaaaggggaggacttctactgcgtgacttgccatgagaccaagtttgccaagcattgcgtgaagtgcaacaaggccatcacatctggaggaatcacttaccaggatcagccctggcatgccgattgctttgtgtgtgttacctgctctaagaagctggctgggcagcgtttcaccgctgtggaggaccagtattactgcgtggattgctacaagaactttgtggccaagaagtgtgctggatgcaagaaccccatcactgggtttggtaaaggctccagtgtggtggcctatgaaggacaatcctggcacgactactgcttccactgcaaaaaatgctccgtgaatctggccaacaagcgctttgttttccaccaggagcaagtgtattgtcccgactgtgccaaaaagctgtaaactgacaggggctcctgtcctgtaaaatggcatttgaatctcgttctttgtgtccttactttctgccctataccatcaataggggaagagtggtccttcccttctttaaagttctccttccgtcttttctcccattttacagtattactcaaataagggcacacagtgatcatattagcatttagcaaaaagcaaccctgcagcaaagtgaatttctgtccggctgcaatttaaaaatgaaaacttaggtagattgactcttctgcatgtttctcatagagcagaaaagtgctaatcatttagccacttagtgatgtaagcaagaagcataggagataaaacccccactgagatgcctctcatgcctcagctgggacccaccgtgtagacacacgacatgcaagagttgcagcggctgctccaactcactgctcaccctcttctgtgagcaggaaaagaaccctactgacatgcatggtttaacttcctcatcagaactctgcccttccttctgttcttttgtgctttcaaataactaacacgaacttccagaaaattaacatttgaacttagctgtaattctaaactgacctttccccgtactaacgtttggtttccccgtgtggcatgttttctgagcgttcctactttaaagcatggaacatgcaggtgatttgggaagtgtagaaagacctgagaaaacgagcctgtttcagaggaacatcgtcacaacgaatacttctggaagcttaacaaaactaaccctgctgtcctttttattgtttttaattaatatttttgttttaattgatagcaaaatagtttatgggtttggaaacttgcatgaaaatattttagccccctcagatgttcctgcagtgctgaaattcatcctacggaagtaaccgcaaaactctagagggggagttgagcaggcgccagggctgtcatcaacatggatatgacatttcacaacagtgactagttgaatcccttgtaacgtagtagttgtctgctctttgtccatgtgttaatgaggactgcaaagtcccttctgttgtgattcctaggacttttcctcaagaggaaatctggatttccacctaccgcttacctgaaatgcaggatcacctacttactgtattctacattattatatgacatagtataatgagacaatatcaaaagtaaacatgtaatgacaatacatactaacattcttgtaggagtggttagagaagctgatgcctcatttctacattctgtcattagctattatcatctaacgtttcagtgtatccttacagaaataaagcagcatatgaataacctgc

SEQ ID NO: 11176 - DNA, 2441 bp, Homo sapiens
  source 1..2441: mol_type = unassigned DNA
cccaggcgcgcacccctcccctcgcgcccctcccgcgccctacatccaccgcccggcggagggggctcagtccgcagccgccgccgccaccgccgcgcctcggcctcggtgcaggcagcggccgccgccgccgagacagctgcgcgggcgagcatccccacgcagcaccttggaagttgttttcaaccatatccagcctttgccgaatacatcctatctgccacacatccagcgtgaggtccctccagctacaaggtgggcaccatggcggagaagtttgactgccactactgcagggatcccttgcaggggaagaagtatgtgcaaaaggatggccaccactgctgcctgaaatgctttgacaagttctgtgccaacacctgtgtggaatgccgcaagcccatcggtgcggactccaaggaggtgcactataagaaccgcttctggcatgacacctgcttccgctgtgccaagtgccttcaccccttggccaatgagacctttgtggccaaggacaacaagatcctgtgcaacaagtgcaccactcgggaggactcccccaagtgcaaggggtgcttcaaggccattgtggcaggagatcaaaacgtggagtacaaggggaccgtctggcacaaagactgcttcacctgtagtaactgcaagcaagtcatcgggactggaagcttcttccctaaaggggaggacttctactgcgtgacttgccatgagaccaagtttgccaagcattgcgtgaagtgcaacaaggccatcacatctggaggaatcacttaccaggatcagccctggcatgccgattgctttgtgtgtgttacctgctctaagaagctggctgggcagcgtttcaccgctgtggaggaccagtattactgcgtggattgctacaagaactttgtggccaagaagtgtgctggatgcaagaaccccatcactgggtttggtaaaggctccagtgtggtggcctatgaaggacaatcctggcacgactactgcttccactgcaaaaaatgctccgtgaatctggccaacaagcgctttgttttccaccaggagcaagtgtattgtcccgactgtgccaaaaagctgtaaactgacaggggctcctgtcctgtaaaatggcatttgaatctcgttctttgtgtccttactttctgccctataccatcaataggggaagagtggtccttcccttctttaaagttctccttccgtcttttctcccattttacagtattactcaaataagggcacacagtgatcatattagcatttagcaaaaagcaaccctgcagcaaagtgaatttctgtccggctgcaatttaaaaatgaaaacttaggtagattgactcttctgcatgtttctcatagagcagaaaagtgctaatcatttagccacttagtgatgtaagcaagaagcataggagataaaacccccactgagatgcctctcatgcctcagctgggacccaccgtgtagacacacgacatgcaagagttgcagcggctgctccaactcactgctcaccctcttctgtgagcaggaaaagaaccctactgacatgcatggtttaacttcctcatcagaactctgcccttccttctgttcttttgtgctttcaaataactaacacgaacttccagaaaattaacatttgaacttagctgtaattctaaactgacctttccccgtactaacgtttggtttccccgtgtggcatgttttctgagcgttcctactttaaagcatggaacatgcaggtgatttgggaagtgtagaaagacctgagaaaacgagcctgtttcagaggaacatcgtcacaacgaatacttctggaagcttaacaaaactaaccctgctgtcctttttattgtttttaattaatatttttgttttaattgatagcaaaatagtttatgggtttggaaacttgcatgaaaatattttagccccctcagatgttcctgcagtgctgaaattcatcctacggaagtaaccgcaaaactctagagggggagttgagcaggcgccagggctgtcatcaacatggatatgacatttcacaacagtgactagttgaatcccttgtaacgtagtagttgtctgctctttgtccatgtgttaatgaggactgcaaagtcccttctgttgtgattcctaggacttttcctcaagaggaaatctggatttccacctaccgcttacctgaaatgcaggatcacctacttactgtattctacattattatatgacatagtataatgagacaatatcaaaagtaaacatgtaatgacaatacatactaacattcttgtaggagtggttagagaagctgatgcctcatttctacattctgtcattagctattatcatctaacgtttcagtgtatccttacagaaataaagcagcatatgaataacctgc

SEQ ID NO: 11177 - DNA, 2374 bp, Homo sapiens
  source 1..2374: mol_type = unassigned DNA
taacaatgctgagtgtttgagctaatacggcttgataatgagggagccagatccactgccagtgctcatgttatatgataaacagacatttggagaagcaccttggaagttgttttcaaccatatccagcctttgccgaatacatcctatctgccacacatccagcgtgaggtccctccagctacaaggtgggcaccatggcggagaagtttgactgccactactgcagggatcccttgcaggggaagaagtatgtgcaaaaggatggccaccactgctgcctgaaatgctttgacaagttctgtgccaacacctgtgtggaatgccgcaagcccatcggtgcggactccaaggaggtgcactataagaaccgcttctggcatgacacctgcttccgctgtgccaagtgccttcaccccttggccaatgagacctttgtggccaaggacaacaagatcctgtgcaacaagtgcaccactcgggaggactcccccaagtgcaaggggtgcttcaaggccattgtggcaggagatcaaaacgtggagtacaaggggaccgtctggcacaaagactgcttcacctgtagtaactgcaagcaagtcatcgggactggaagcttcttccctaaaggggaggacttctactgcgtgacttgccatgagaccaagtttgccaagcattgcgtgaagtgcaacaaggccatcacatctggaggaatcacttaccaggatcagccctggcatgccgattgctttgtgtgtgttacctgctctaagaagctggctgggcagcgtttcaccgctgtggaggaccagtattactgcgtggattgctacaagaactttgtggccaagaagtgtgctggatgcaagaaccccatcactgggtttggtaaaggctccagtgtggtggcctatgaaggacaatcctggcacgactactgcttccactgcaaaaaatgctccgtgaatctggccaacaagcgctttgttttccaccaggagcaagtgtattgtcccgactgtgccaaaaagctgtaaactgacaggggctcctgtcctgtaaaatggcatttgaatctcgttctttgtgtccttactttctgccctataccatcaataggggaagagtggtccttcccttctttaaagttctccttccgtcttttctcccattttacagtattactcaaataagggcacacagtgatcatattagcatttagcaaaaagcaaccctgcagcaaagtgaatttctgtccggctgcaatttaaaaatgaaaacttaggtagattgactcttctgcatgtttctcatagagcagaaaagtgctaatcatttagccacttagtgatgtaagcaagaagcataggagataaaacccccactgagatgcctctcatgcctcagctgggacccaccgtgtagacacacgacatgcaagagttgcagcggctgctccaactcactgctcaccctcttctgtgagcaggaaaagaaccctactgacatgcatggtttaacttcctcatcagaactctgcccttccttctgttcttttgtgctttcaaataactaacacgaacttccagaaaattaacatttgaacttagctgtaattctaaactgacctttccccgtactaacgtttggtttccccgtgtggcatgttttctgagcgttcctactttaaagcatggaacatgcaggtgatttgggaagtgtagaaagacctgagaaaacgagcctgtttcagaggaacatcgtcacaacgaatacttctggaagcttaacaaaactaaccctgctgtcctttttattgtttttaattaatatttttgttttaattgatagcaaaatagtttatgggtttggaaacttgcatgaaaatattttagccccctcagatgttcctgcagtgctgaaattcatcctacggaagtaaccgcaaaactctagagggggagttgagcaggcgccagggctgtcatcaacatggatatgacatttcacaacagtgactagttgaatcccttgtaacgtagtagttgtctgctctttgtccatgtgttaatgaggactgcaaagtcccttctgttgtgattcctaggacttttcctcaagaggaaatctggatttccacctaccgcttacctgaaatgcaggatcacctacttactgtattctacattattatatgacatagtataatgagacaatatcaaaagtaaacatgtaatgacaatacatactaacattcttgtaggagtggttagagaagctgatgcctcatttctacattctgtcattagctattatcatctaacgtttcagtgtatccttacagaaataaagcagcatatgaataacctgc

SEQ ID NO: 11178 - DNA, 2706 bp, Homo sapiens
  source 1..2706: mol_type = unassigned DNA
cccgcccctggctagccgcgcccgcccccgcgctcctgcttcctcccctctttccctccccgcctcccaggcgcgcacccctcccctcgcgcccctcccgcgccctacatccaccgcccggcggagggggctcagtccgcagccgccgccgccaccgccgcgcctcggcctcggtgcaggcagcggccgccgccgccgagacagctgcgcgggcgagcatccccacgcagcaccttggaagttgttttcaaccatatccagcctttgccgaatacatcctatctgccacacatccagcgtgaggtccctccagctacaaggtgggcaccatggcggagaagtttgactgccactactgcagggatcccttgcaggggaagaagtatgtgcaaaaggatggccaccactgctgcctgaaatgctttgacaagttctgtgccaacacctgtgtggaatgccgcaagcccatcggtgcggactccaaggaggtgcactataagaaccgcttctggcatgacacctgcttccgctgtgccaagtgccttcaccccttggccaatgagacctttgtggccaaggacaacaagatcctgtgcaacaagtgcaccactcgggaggactcccccaagtgcaaggggtgcttcaaggccattgtggcaggagatcaaaacgtggagtacaaggggaccgtctggcacaaagactgcttcacctgtagtaactgcaagcaagtcatcgggactggaagcttcttccctaaaggggaggacttctactgcgtgacttgccatgagaccaagtttgccaagcattgcgtgaagtgcaacaaggccatcacatctggaggaatcacttaccaggatcagccctggcatgccgattgctttgtgtgtgttacctgctctaagaagctggctgggcagcgtttcaccgctgtggaggaccagtattactgcgtggattgctacaagaactttgtggccaagaagtgtgctggatgcaagaaccccatcactgggaaaaggactgtgtcaagagtgagccacccagtctctaaagctaggaagcccccagtgtgccacgggaaacgcttgcctctcaccctgtttcccagcgccaacctccggggcaggcatccgggtggagagaggacttgtccctcgtgggtggtggttctttatagaaaaaatcgaagcttagcagctcctcgaggcccgggtttggtaaaggctccagtgtggtggcctatgaaggacaatcctggcacgactactgcttccactgcaaaaaatgctccgtgaatctggccaacaagcgctttgttttccaccaggagcaagtgtattgtcccgactgtgccaaaaagctgtaaactgacaggggctcctgtcctgtaaaatggcatttgaatctcgttctttgtgtccttactttctgccctataccatcaataggggaagagtggtccttcccttctttaaagttctccttccgtcttttctcccattttacagtattactcaaataagggcacacagtgatcatattagcatttagcaaaaagcaaccctgcagcaaagtgaatttctgtccggctgcaatttaaaaatgaaaacttaggtagattgactcttctgcatgtttctcatagagcagaaaagtgctaatcatttagccacttagtgatgtaagcaagaagcataggagataaaacccccactgagatgcctctcatgcctcagctgggacccaccgtgtagacacacgacatgcaagagttgcagcggctgctccaactcactgctcaccctcttctgtgagcaggaaaagaaccctactgacatgcatggtttaacttcctcatcagaactctgcccttccttctgttcttttgtgctttcaaataactaacacgaacttccagaaaattaacatttgaacttagctgtaattctaaactgacctttccccgtactaacgtttggtttccccgtgtggcatgttttctgagcgttcctactttaaagcatggaacatgcaggtgatttgggaagtgtagaaagacctgagaaaacgagcctgtttcagaggaacatcgtcacaacgaatacttctggaagcttaacaaaactaaccctgctgtcctttttattgtttttaattaatatttttgttttaattgatagcaaaatagtttatgggtttggaaacttgcatgaaaatattttagccccctcagatgttcctgcagtgctgaaattcatcctacggaagtaaccgcaaaactctagagggggagttgagcaggcgccagggctgtcatcaacatggatatgacatttcacaacagtgactagttgaatcccttgtaacgtagtagttgtctgctctttgtccatgtgttaatgaggactgcaaagtcccttctgttgtgattcctaggacttttcctcaagaggaaatctggatttccacctaccgcttacctgaaatgcaggatcacctacttactgtattctacattattatatgacatagtataatgagacaatatcaaaagtaaacatgtaatgacaatacatactaacattcttgtaggagtggttagagaagctgatgcctcatttctacattctgtcattagctattatcatctaacgtttcagtgtatccttacagaaataaagcagcatatgaataacctgc

SEQ ID NO: 11179 - DNA, 926 bp, Homo sapiens
  source 1..926: mol_type = unassigned DNA
gcctcccgcccgccggcgtcctgggtcccgggggagcggctgcccttctgccccgccgccgccgccgctcggggctggtccctgcggtcccggctgcctggccttccagggctgggtactgcggcttcggcggcctcgctgaggccgggggccaggggccgtcccgggctgcggggtgcgggacgagggactgcgagtgcgaggtcccccctggcaccttggaagttgttttcaaccatatccagcctttgccgaatacatcctatctgccacacatccagcgtgaggtccctccagctacaaggtgggcaccatggcggagaagtttgactgccactactgcagggatcccttgcaggggaagaagtatgtgcaaaaggatggccaccactgctgcctgaaatgctttgacaagttctgtgccaacacctgtgtggaatgccgcaagcccatcggtgcggactccaaggaggtgcactataagaaccgcttctggcatgacacctgcttccgctgtgccaagtgccttcaccccttggccaatgagacctttgtggccaaggacaacaagatcctgtgcaacaagtgcaccactcgggaggactcccccaagtgcaaggggtgcttcaaggccattgtggcaggagatcaaaacgtggagtacaaggggaccgtctggcacaaagactgcttcacctgtagtaactgcaagcaagtcatcgggactggaagcttcttccctaaaggggaggacttctactgcgtgacttgccatgagaccaagtttgccaagcattgcgtgaagtgcaacaaggccatcacatctggaggaatcacttaccaggatcagccctggcatgccgattgctttgtgtgtgttacctgctctaagaagctggctgggcagcgtttcaccgctgtggagg

SEQ ID NO: 11180 - DNA, 796 bp, Homo sapiens
  source 1..796: mol_type = unassigned DNA
aggcagtctgactctggtgcccctgctgtgaagagctgtgccctgctgcattcctcctgtagctgcacgaaagggcaccttggaagttgttttcaaccatatccagcctttgccgaatacatcctatctgccacacatccagcgtgaggtccctccagctacaaggtgggcaccatggcggagaagtttgactgccactactgcagggatcccttgcaggggaagaagtatgtgcaaaaggatggccaccactgctgcctgaaatgctttgacaagttctgtgccaacacctgtgtggaatgccgcaagcccatcggtgcggactccaaggaggtgcactataagaaccgcttctggcatgacacctgcttccgctgtgccaagtgccttcaccccttggccaatgagacctttgtggccaaggacaacaagatcctgtgcaacaagtgcaccactcgggaggactcccccaagtgcaaggggtgcttcaaggccattgtggcaggagatcaaaacgtggagtacaaggggaccgtctggcacaaagactgcttcacctgtagtaactgcaagcaagtcatcgggactggaagcttcttccctaaaggggaggacttctactgcgtgacttgccatgagaccaagtttgccaagcattgcgtgaagtgcaacaaggccatcacatctggaggaatcacttaccaggatcagccctggcatgccgattgctttgtgtgtgttacctgctctaagaagctggctgggcagcgtttcaccgctgtggaggaccagtatt

SEQ ID NO: 11181 - DNA, 539 bp, Homo sapiens
  source 1..539: mol_type = unassigned DNA
tttttccctaacttaggcaccttggaagttgttttcaaccatatccagcctttgccgaatacatcctatctgccacacatccagcgtgaggtccctccagctacaaggtgggcaccatggcggagaagtttgactgccactactgcagggatcccttgcaggggaagaagtatgtgcaaaaggatggccaccactgctgcctgaaatgctttgacaagttctgtgccaacacctgtgtggaatgccgcaagcccatcggtgcggactccaaggaggtgcactataagaaccgcttctggcatgacacctgcttccgctgtgccaagtgccttcaccccttggccaatgagacctttgtggccaaggacaacaagatcctgtgcaacaagtgcaccactcgggaggactcccccaagtgcaaggggtgcttcaaggccattgtggcaggagatcaaaacgtggagtacaaggggaccgtctggcacaaagactgcttcacctgtagtaactgcaagcaagtcatcgggactggaagcttc

SEQ ID NO: 11182 - DNA, 796 bp, Homo sapiens; identical to SEQ ID NO: 11180
  source 1..796: mol_type = unassigned DNA

SEQ ID NO: 11183 - DNA, 2297 bp, Homo sapiens
  source 1..2297: mol_type = unassigned DNA
atgagccatttcatacttaggcaccttggaagttgttttcaaccatatccagcctttgccgaatacatcctatctgccacacatccagcgtcaggtccctccagctacaaggtgggcaccatggcggagaagtttgactgccactactgcagggatcccttgcaggggaagaagtatgtgcaaaaggatggccaccactgctgcctgaaatgctttgacaagttctgtgccaacacctgtgtggaatgccgcaagcccatcggtgcggactccaaggaggtgcactataagaaccgcttctggcatgacacctgcttccgctgtgccaagtgccttcaccccttggccaatgagacctttgtggccaaggacaacaagatcctgtgcaacaagtgcaccactcgggaggactcccccaagtgcaaggggtgcttcaaggccattgtggcaggagatcaaaacgtggagtacaaggggaccgtctggcacaaagactgcttcacctgtagtaactgcaagcaagtcatcgggactggaagcttcttccctaaaggggaggacttctactgcgtgacttgccatgagaccaagtttgccaagcattgcgtgaagtgcaacaaggccatcacatctggaggaatcacttaccaggatcagccctggcatgccgattgctttgtgtgtgttacctgctctaagaagctggctgggcagcgtttcaccgctgtggaggaccagtattactgcgtggattgctacaagaactttgtggccaagaagtgtgctggatgcaagaaccccatcactgggtttggtaaaggctccagtgtggtggcctatgaaggacaatcctggcacgactactgcttccactgcaaaaaatgctccgtgaatctggccaacaagcgctttgttttccaccaggagcaagtgtattgtcccgactgtgccaaaaagctgtaaactgacaggggctcctgtcctgtaaaatggcatttgaatctcgttctttgtgtccttactttctgccctataccatcaataggggaagagtggtccttcccttctttaaagttctccttccgtcttttctcccattttacagtattactcaaataagggcacacagtgatcatattagcatttagcaaaaagcaaccctgcagcaaagtgaatttctgtccggctgcaatttaaaaatgaaaacttaggtagattgactcttctgcatgtttctcatagagcagaaaagtgctaatcatttagccacttagtgatgtaagcaagaagcataggagataaaacccccactgagatgcctctcatgcctcagctgggacccaccgtgtagacacacgacatgcaagagttgcagcggctgctccaactcactgctcaccctcttctgtgagcaggaaaagaaccctactgacatgcatggtttaacttcctcatcagaactctgcccttccttctgttcttttgtgctttcaaataactaacacgaacttccagaaaattaacatttgaacttagctgtaattctaaactgacctttccccgtactaacgtttggtttccccgtgtggcatgttttctgagcgttcctactttaaagcatggaacatgcaggtgatttgggaagtgtagaaagacctgagaaaacgagcctgtttcagaggaacatcgtcacaacgaatacttctggaagcttaacaaaactaaccctgctgtcctttttattgtttttaattaatatttttgttttaattgatagcaaaatagtttatgggtttggaaacttgcatgaaaatattttagccccctcagatgttcctgcagtgctgaaattcatcctacggaagtaaccgcaaaactctagagggggagttgagcaggcgccagggctgtcatcaacatggatatgacatttcacaacagtgactagttgaatcccttgtaacgtagtagttgtctgctctttgtccatgtgttaatgaggactgcaaagtcccttctgttgtgattcctaggacttttcctcaagaggaaatctggatttccacctaccgcttacctgaaatgcaggatcacctacttactgtattctacattattatatgacatagtataatgagacaatatcaaaagtaaacatgtaatgacaatacatactaacattcttgtaggagtggttagagaagctgatgcctcatttctacattctgtcattagctattatcatctaacgtttcagtgtatccttacagaaataaagcagcatatgaataacctgc

SEQ ID NO: 11184 - DNA, 775 bp, Homo sapiens
  source 1..775: mol_type = unassigned DNA
gagggagccagatccactgccagtgctcatgttatatgataaacagacatttggagaagcaccttggaagttgttttcaaccatatccagcctttgccgaatacatcctatctgccacacatccagcgtgaggtccctccagctacaaggtgggcaccatggcggagaagtttgactgccactactgcagggatcccttgcaggggaagaagtatgtgcaaaaggatggccaccactgctgcctgaaatgctttgacaagttctgtgccaacacctgtgtggaatgccgcaagcccatcggtgcggactccaaggaggtgcactataagaaccgcttctggcatgacacctgcttccgctgtgccaagtgccttcaccccttggccaatgagacctttgtggccaaggacaacaagatcctgtgcaacaagtgcaccactcgggaggactcccccaagtgcaaggggtgcttcaaggccattgtggcaggagatcaaaacgtggagtacaaggggaccgtctggcacaaagactgcttcacctgtagtaactgcaagcaagtcatcgggactggaagcttcttccctaaaggggaggacttctactgcgtgacttgccatgagaccaagtttgccaagcattgcgtgaagtgcaacaaggccatcacatctggaggaatcacttaccaggatcagccctggcatgccgattgctttgtgtgtgttacctgctctaagaagctggctgggcagcgtttcaccgctgtggaggacca

SEQ ID NO: 11185 - DNA, 601 bp, Homo sapiens
  source 1..601: mol_type = unassigned DNA
tagcaggggctgtggggagcgggtgaggatgaagcggcaccttggaagttgttttcaaccatatccagcctttgccgaatacatcctatctgccacacatccagcgtgaggtccctccagctacaaggtgggcaccatggcggagaagtttgactgccactactgcagggatcccttgcaggggaagaagtatgtgcaaaaggatggccaccactgctgcctgaaatgctttgacaagttctgtgccaacacctgtgtggaatgccgcaagcccatcggtgcggactccaaggaggtgcactataagaaccgcttctggcatgacacctgcttccgctgtgccaagtgccttcaccccttggccaatgagacctttgtggccaaggacaacaagatcctgtgcaacaagtgcaccactcgggaggactcccccaagtgcaaggggtgcttcaaggccattgtggcaggagatcaaaacgtggagtacaaggggaccgtctggcacaaagactgcttcacctgtagtaactgcaagcaagtcatcgggactggaagcttcttccctaaaggggaggacttctactgcgtgacttgccatgag

SEQ ID NO: 11186 - DNA, 2437 bp, Homo sapiens
  source 1..2437: mol_type = unassigned DNA
acagaggtttctgctttcgaagtttctcttcctttcctctctgctcttagcgtccaggactaggtaaaggttaaaaaatcatcaaggctaagcgactgttgtgtcgttcgtgttgagcgctgtattattttctgcatttgggaatgtgcgagtttctcaggcaccttggaagttgttttcaaccatatccagcctttgccgaatacatcctatctgccacacatccagcgtgaggtccctccagctacaaggtgggcaccatggcggagaagtttgactgccactactgcagggatcccttgcaggggaagaagtatgtgcaaaaggatggccaccactgctgcctgaaatgctttgacaagttctgtgccaacacctgtgtggaatgccgcaagcccatcggtgcggactccaaggaggtgcactataagaaccgcttctggcatgacacctgcttccgctgtgccaagtgccttcaccccttggccaatgagacctttgtggccaaggacaacaagatcctgtgcaacaagtgcaccactcgggaggactcccccaagtgcaaggggtgcttcaaggccattgtggcaggagatcaaaacgtggagtacaaggggaccgtctggcacaaagactgcttcacctgtagtaactgcaagcaagtcatcgggactggaagcttcttccctaaaggggaggacttctactgcgtgacttgccatgagaccaagtttgccaagcattgcgtgaagtgcaacaaggccatcacatctggaggaatcacttaccaggatcagccctggcatgccgattgctttgtgtgtgttacctgctctaagaagctggctgggcagcgtttcaccgctgtggaggaccagtattactgcgtggattgctacaagaactttgtggccaagaagtgtgctggatgcaagaaccccatcactgggtttggtaaaggctccagtgtggtggcctatgaaggacaatcctggcacgactactgcttccactgcaaaaaatgctccgtgaatctggccaacaagcgctttgttttccaccaggagcaagtgtattgtcccgactgtgccaaaaagctgtaaactgacaggggctcctgtcctgtaaaatggcatttgaatctcgttctttgtgtccttactttctgccctataccatcaataggggaagagtggtccttcccttctttaaagttctccttccgtcttttctcccattttacagtattactcaaataagggcacacagtgatcatattagcatttagcaaaaagcaaccctgcagcaaagtgaatttctgtccggctgcaatttaaaaatgaaaacttaggtagattgactcttctgcatgtttctcatagagcagaaaagtgctaatcatttagccacttagtgatgtaagcaagaagcataggagataaaacccccactgagatgcctctcatgcctcagctgggacccaccgtgtagacacacgacatgcaagagttgcagcggctgctccaactcactgctcaccctcttctgtgagcaggaaaagaaccctactgacatgcatggtttaacttcctcatcagaactctgcccttccttctgttcttttgtgctttcaaataactaacacgaacttccagaaaattaacatttgaacttagctgtaattctaaactgacctttccccgtactaacgtttggtttccccgtgtggcatgttttctgagcgttcctactttaaagcatggaacatgcaggtgatttgggaagtgtagaaagacctgagaaaacgagcctgtttcagaggaacatcgtcacaacgaatacttctggaagcttaacaaaactaaccctgctgtcctttttattgtttttaattaatatttttgttttaattgatagcaaaatagtttatgggtttggaaacttgcatgaaaatattttagccccctcagatgttcctgcagtgctgaaattcatcctacggaagtaaccgcaaaactctagagggggagttgagcaggcgccagggctgtcatcaacatggatatgacatttcacaacagtgactagttgaatcccttgtaacgtagtagttgtctgctctttgtccatgtgttaatgaggactgcaaagtcccttctgttgtgattcctaggacttttcctcaagaggaaatctggatttccacctaccgcttacctgaaatgcaggatcacctacttactgtattctacattattatatgacatagtataatgagacaatatcaaaagtaaacatgtaatgacaatacatactaacattcttgtaggagtggttagagaagctgatgcctcatttctacattctgtcattagctattatcatctaacgtttcagtgtatccttacagaaataaagcagcatatgaataacctgc

SEQ ID NO: 11187 - DNA, 1432 bp, Homo sapiens
  source 1..1432: mol_type = unassigned DNA
agtccgcagccgccgccgccaccgccgcgcctcggcctcggtgcaggcagcggccgccgccgccgagacagctgcgcgggcgagcatccccacgcagcaccttggaagttgttttcaaccatatccagcctttgccgaatacatcctatctgccacacatccagcgtgaggtccctccagctacaaggtgggcaccatggcggagaagtttgactgctgcctgaaatgctttgacaagttctgtgccaacacctgtgtggaatgccgcaagcccatcggtgcggactccaaggaggtgcactataagaaccgcttctggcatgacacctgcttccgctgtgccaagtgccttcaccccttggccaatgagacctttgtggccaaggacaacaagatcctgtgcaacaagtgcaccactcgggaggactcccccaagtgcaaggggtgcttcaaggccattgtggcaggagatcaaaacgtggagtacaaggggaccgtctggcacaaagactgcttcacctgtagtaactgcaagcaagtcatcgggactggaagcttcttccctaaaggggaggacttctactgcgtgacttgccatgagaccaagtttgccaagcattgcgtgaagtgcaacaaggccatcacatctggaggaatcacttaccaggatcagccctggcatgccgattgctttgtgtgtgttacctgctctaagaagctggctgggcagcgtttcaccgctgtggaggaccagtattactgcgtggattgctacaagaactttgtggccaagaagtgtgctggatgcaagaaccccatcactgggtttggtaaaggctccagtgtggtggcctatgaaggacaatcctggcacgactactgcttccactgcaaaaaatgctccgtgaatctggccaacaagcgctttgttttccaccaggagcaagtgtattgtcccgactgtgccaaaaagctgtaaactgacaggggctcctgtcctgtaaaatggcatttgaatctcgttctttgtgtccttactttctgccctataccatcaataggggaagagtggtccttcccttctttaaagttctccttccgtcttttctcccattttacagtattactcaaataagggcacacagtgatcatattagcatttagcaaaaagcaaccctgcagcaaagtgaatttctgtccggctgcaatttaaaaatgaaaacttaggtagattgactcttctgcatgtttctcatagagcagaaaagtgctaatcatttagccacttagtgatgtaagcaagaagcataggagataaaacccccactgagatgcctctcatgcctcagctgggacccaccgtgtagacacacgacatgcaagagttgcagcggctgctccaactcactgctcaccctcttctgtgagcagg

SEQ ID NO: 11188 - DNA, 2313 bp, Homo sapiens
  source 1..2313: mol_type = unassigned DNA
agcgttaagctatgccagagccgagtccaaattttattccggtacagggatgactttctatgtggcctctctggctctggagctaatttggatgctgagtagccccgcaggtccctccagctacaaggtgggcaccatggcggagaagtttgactgccactactgcagggatcccttgcaggggaagaagtatgtgcaaaaggatggccaccactgctgcctgaaatgctttgacaagttctgtgccaacacctgtgtggaatgccgcaagcccatcggtgcggactccaaggaggtgcactataagaaccgcttctggcatgacacctgcttccgctgtgccaagtgccttcaccccttggccaatgagacctttgtggccaaggacaacaagatcctgtgcaacaagtgcaccactcgggaggactcccccaagtgcaaggggtgcttcaaggccattgtggcaggagatcaaaacgtggagtacaaggggaccgtctggcacaaagactgcttcacctgtagtaactgcaagcaagtcatcgggactggaagcttcttccctaaaggggaggacttctactgcgtgacttgccatgagaccaagtttgccaagcattgcgtgaagtgcaacaaggccatcacatctggaggaatcacttaccaggatcagccctggcatgccgattgctttgtgtgtgttacctgctctaagaagctggctgggcagcgtttcaccgctgtggaggaccagtattactgcgtggattgctacaagaactttgtggccaagaagtgtgctggatgcaagaaccccatcactgggtttggtaaaggctccagtgtggtggcctatgaaggacaatcctggcacgactactgcttccactgcaaaaaatgctccgtgaatctggccaacaagcgctttgttttccaccaggagcaagtgtattgtcccgactgtgccaaaaagctgtaaactgacaggggctcctgtcctgtaaaatggcatttgaatctcgttctttgtgtccttactttctgccctataccatcaataggggaagagtggtccttcccttctttaaagttctccttccgtcttttctcccattttacagtattactcaaataagggcacacagtgatcatattagcatttagcaaaaagcaaccctgcagcaaagtgaatttctgtccggctgcaatttaaaaatgaaaacttaggtagattgactcttctgcatgtttctcatagagcagaaaagtgctaatcatttagccacttagtgatgtaagcaagaagcataggagataaaacccccactgagatgcctctcatgcctcagctgggacccaccgtgtagacacacgacatgcaagagttgcagcggctgctccaactcactgctcaccctcttctgtgagcaggaaaagaaccctactgacatgcatggtttaacttcctcatcagaactctgcccttccttctgttcttttgtgctttcaaataactaacacgaacttccagaaaattaacatttgaacttagctgtaattctaaactgacctttccccgtactaacgtttggtttccccgtgtggcatgttttctgagcgttcctactttaaagcatggaacatgcaggtgatttgggaagtgtagaaagacctgagaaaacgagcctgtttcagaggaacatcgtcacaacgaatacttctggaagcttaacaaaactaaccctgctgtcctttttattgtttttaattaatatttttgttttaattgatagcaaaatagtttatgggtttggaaacttgcatgaaaatattttagccccctcagatgttcctgcagtgctgaaattcatcctacggaagtaaccgcaaaactctagagggggagttgagcaggcgccagggctgtcatcaacatggatatgacatttcacaacagtgactagttgaatcccttgtaacgtagtagttgtctgctctttgtccatgtgttaatgaggactgcaaagtcccttctgttgtgattcctaggacttttcctcaagaggaaatctggatttccacctaccgcttacctgaaatgcaggatcacctacttactgtattctacattattatatgacatagtataatgagacaatatcaaaagtaaacatgtaatgacaatacatactaacattcttgtaggagtggttagagaagctgatgcctcatttctacattctgtcattagctattatcatctaacgtttcagtgtatccttacagaaataaagcagcatatgaataacctgc

SEQ ID NO: 11189 - DNA, 969 bp, Homo sapiens
  source 1..969: mol_type = unassigned DNA
atcagctggggttgagggaagactggtctaggtgctgctcctgaacttggtctctgagccatggcttcccatagacactcaggtccctccagctacaaggtgggcaccatggcggagaagtttgactgccactactgcagggatcccttgcaggggaagaagtatgtgcaaaaggatggccaccactgctgcctgaaatgctttgacaagttctgtgccaacacctgtgtggaatgccgcaagcccatcggtgcggactccaaggaggtgcactataagaaccgcttctggcatgacacctgcttccgctgtgccaagtgcaccactcgggaggactcccccaagtgcaaggggtgcttcaaggccattgtggcaggagatcaaaacgtggagtacaaggggaccgtctggcacaaagactgcttcacctgtagtaactgcaagcaagtcatcgggactggaagcttcttccctaaaggggaggacttctactgcgtgacttgccatgagaccaagtttgccaagcattgcgtgaagtgcaacaaggccatcacatctggaggaatcacttaccaggatcagccctggcatgccgattgctttgtgtgtgttacctgctctaagaagctggctgggcagcgtttcaccgctgtggaggaccagtattactgcgtggattgctacaagaactttgtggccaagaagtgtgctggatgcaagaaccccatcactgggtttggtaaaggctccagtgtggtggcctatgaaggacaatcctggcacgactactgcttccactgcaaaaaatgctccgtgaatctggccaacaagcgctttgttttccaccaggagcaagtgtattgtcccgactgtgccaaaaagctgtaaactgacaggggctcctgtcctgtaaaatggcatttgaatctcgttctttgtgtccttactttctgccctataccatcaata

SEQ ID NO: 11190 - DNA, 2888 bp, Homo sapiens
  source 1..2888: mol_type = unassigned DNA
acacctgtttcctagtgctgcagaaccctcgtcctgggatgagcctgcccgctagtctgcatcctaatcctgctgttgattggagataacttcagcggtcacagggcacctcgtctccatggcaacccctctaaatattcctctagtgacttgtgctctacattctggctggatcagagccctcctgtggcaaaatattctaaagatgttaaaagagagagagagaaaaaaaaaggctcaactaataaatctattctaaacgactgagtcatttgttttgattacccgggtgattgccaaatgttaatttaaaactgaaataggccatgagctcactcccctaacaatgctgagtgtttgagctaatacggcttgataatgagggagccagatccactgccagtgctcatgttatatgataaacagacatttggagaagtatgcagaacatcttggcagttttcctttaactctaagggttgtaaatacaaagtagaatgtgttaccatgagccatttcataggaagttgactttatttttttagaattcagaactttgcttctaaaaaggtaactttgcctcttgattctcatttttttccctaacttaggcaccttggaagttgttttcaaccatatccagcctttgccgaatacatcctatctgccacacatccagcgtgaggtccctccagctacaaggtgggcaccatggcggagaagtttgactgccactactgcagggatcccttgcaggggaagaagtatgtgcaaaaggatggccaccactgctgcctgaaatgctttgacaagttctgtgccaacacctgtgtggaatgccgcaagcccatcggtgcggactccaaggaggtgcactataagaaccgcttctggcatgacacctgcttccgctgtgccaagtgccttcaccccttggccaatgagacctttgtggccaaggacaacaagatcctgtgcaacaagtgcaccactcgggaggactcccccaagtgcaaggggtgcttcaaggccattgtggcaggagatcaaaacgtggagtacaaggggaccgtctggcacaaagactgcttcacctgtagtaactgcaagcaagtcatcgggactggaagcttcttccctaaaggggaggacttctactgcgtgacttgccatgagaccaagtttgccaagcattgcgtgaagtgcaacaaggccatcacatctggaggaatcacttaccaggatcagccctggcatgccgattgctttgtgtgtgttacctgctctaagaagctggctgggcagcgtttcaccgctgtggaggaccagtattactgcgtggattgctacaagaactttgtggccaagaagtgtgctggatgcaagaaccccatcactgggtttggtaaaggctccagtgtggtggcctatgaaggacaatcctggcacgactactgcttccactgcaaaaaatgctccgtgaatctggccaacaagcgctttgttttccaccaggagcaagtgtattgtcccgactgtgccaaaaagctgtaaactgacaggggctcctgtcctgtaaaatggcatttgaatctcgttctttgtgtccttactttctgccctataccatcaataggggaagagtggtccttcccttctttaaagttctccttccgtcttttctcccattttacagtattactcaaataagggcacacagtgatcatattagcatttagcaaaaagcaaccctgcagcaaagtgaatttctgtccggctgcaatttaaaaatgaaaacttaggtagattgactcttctgcatgtttctcatagagcagaaaagtgctaatcatttagccacttagtgatgtaagcaagaagcataggagataaaacccccactgagatgcctctcatgcctcagctgggacccaccgtgtagacacacgacatgcaagagttgcagcggctgctccaactcactgctcaccctcttctgtgagcaggaaaagaaccctactgacatgcatggtttaacttcctcatcagaactctgcccttccttctgttcttttgtgctttcaaataactaacacgaacttccagaaaattaacatttgaacttagctgtaattctaaactgacctttccccgtactaacgtttggtttccccgtgtggcatgttttctgagcgttcctactttaaagcatggaacatgcaggtgatttgggaagtgtagaaagacctgagaaaacgagcctgtttcagaggaacatcgtcacaacgaatacttctggaagcttaacaaaactaaccctgctgtcctttttattgtttttaattaatatttttgttttaattgatagcaaaatagtttatgggtttggaaacttgcatgaaaatattttagccccctcagatgttcctgcagtgctgaaattcatcctacggaagtaaccgcaaaactctagagggggagttgagcaggcgccagggctgtcatcaacatggatatgacatttcacaacagtgactagttgaatcccttgtaacgtagtagttgtctgctctttgtccatgtgttaatgaggactgcaaagtcccttctgttgtgattcctaggacttttcctcaagaggaaatctggatttccacctaccgcttacctgaaatgcaggatcacctacttactgtattctacattattatatgacatagtataatgagacaatatcaaaagtaaacatgtaatgacaatacatactaacattcttgtaggagtggttagagaagctgatgcctcatttctacattctgtcattagctattatcatctaacgtttcagtgtatccttacagaaataaagcagcatatgaataacctgc

SEQ ID NO: 11191 - DNA, 1462 bp, Homo sapiens
  source 1..1462: mol_type = unassigned DNA
gcagcgctccactcggccggcagcggagccgcagccaccagccgcccgcgccctccagccccgtccgggagtccccggcccgctgcggtgcctggctgagaactgtgtcttcctggagactaggctggcattttgactttggggttgctgaaaagccaggagtcaaaatgactgagcgctttgactgccaccattgcaacgaatctctctttggcaagaagtacatcctgcgggaggagagcccctactgcgtggtgtgctttgagaccctgttcgccaacacctgcgaggagtgtgggaagcccatcggctgtgactgcaaggacttgtcttacaaggaccggcactggcatgaagcctgtttccactgctcgcagtgcagaaactcactggtggacaagccctttgctgccaaggaggaccagctgctctgtacagactgctattccaacgagtactcatccaagtgccaggaatgcaagaagaccatcatgccaggtacccgcaagatggagtacaagggcagcagctggcatgagacctgcttcatctgccaccgctgccagcagccaattggaaccaagagtttcatccccaaagacaatcagaatttctgtgtgccctgctatgagaaacaacatgccatgcagtgcgttcagtgcaaaaagcccatcaccacgggaggggtcacttaccgggagcagccctggcacaaggagtgcttcgtgtgcaccgcctgcaggaagcagctgtctgggcagcgcttcacagctcgcgatgactttgcctactgcctgaactgcttctgtgacttgtatgccaagaagtgtgctgggtgcaccaaccccatcagcggacttggtggcacaaaatacatctcctttgaggaacggcagtggcataacgactgctttaactgtaagaagtgctccctctcactggtggggcgtggcttcctcacagagagggacgacatcctgtgccccgactgtgggaaagacatctgaattcaacacagagaagttgctgcttgtgatctcacacacagatttttatgttttctttctcacccaggcaatcttgccttctggtttcttccagccacattgagactttcttctagtgcttttcagtgatactcacgtttgcttaaaccctttagtgctttgtgatagttcagtcccagggaaagagaaaactcgccctaggccctaggtgggaagatggtttgaaatttttgtaatcgagtaaggcacacccaaatgtaaaaatccttttgaatgatgcctttataaatctttctctcactgtctatttaagtgcaattaacatatgtcacgaacttgaaagttttctaaactcaataaggtaatgaccagttgttatttacagctctgtaacctcccgttgcgtcaagtctaaaccaagattatgtgacttgcaataaagttattcagaacag

SEQ ID NO: 11192 - DNA, 1241 bp, Homo sapiens
  source 1..1241: mol_type = unassigned DNA
cagaaggttggggccatccaaccaggcagtccgcctgcacagcagctgtccctgctcatcgggctggaggacagaagacagaaccctaaaaccacaggttgctgaaaagccaggagtcaaaatgactgagcgctttgactgccaccattgcaacgaatctctctttggcaagaagtacatcctgcgggaggagagcccctactgcgtggtgtgctttgagaccctgttcgccaacacctgcgaggagtgtgggaagcccatcggctgtgactgcaaggtacccgcaagatggagtacaagggcagcagctggcatgagacctgcttcatctgccaccgctgccagcagccaattggaaccaagagtttcatccccaaagacaatcagaatttctgtgtgccctgctatgagaaacaacatgccatgcagtgcgttcagtgcaaaaagcccatcaccacgggaggggtcacttaccgggagcagccctggcacaaggagtgcttcgtgtgcaccgcctgcaggaagcagctgtctgggcagcgcttcacagctcgcgatgactttgcctactgcctgaactgcttctgtgacttgtatgccaagaagtgtgctgggtgcaccaaccccatcagcggacttggtggcacaaaatacatctcctttgaggaacggcagtggcataacgactgctttaactgtaagaagtgctccctctcactggtggggcgtggcttcctcacagagagggacgacatcctgtgccccgactgtgggaaagacatctgaattcaacacagagaagttgctgcttgtgatctcacacacagatttttatgttttctttctcacccaggcaatcttgccttctggtttcttccagccacattgagactttcttctagtgcttttcagtgatactcacgtttgcttaaaccctttagtgctttgtgatagttcagtcccagggaaagagaaaactcgccctaggccctaggtgggaagatggtttgaaatttttgtaatcgagtaaggcacacccaaatgtaaaaatccttttgaatgatgcctttataaatctttctctcactgtctatttaagtgcaattaacatatgtcacgaacttgaaagttttctaaactcaataaggtaatgaccagttgttatttacagctctgtaacctcccgttgcgtcaagtctaaaccaagattatgtgacttgcaataaagttattcagaacag

SEQ ID NO: 11193 - DNA, 1769 bp, Homo sapiens
  source 1..1769: mol_type = unassigned DNA
agggtacgggccgggaccgccgcagcccggggcgggggcacggcaaccgcgaggcctgggggcgcccgccccccgcgccccacgcccggtgccagcgagccgaggcgtgcatctccttatatggtcaaatgacacggcggggtttctcgagggcgggagctgcgcagcgctccactcggccggcagcggagccgcagccaccagccgcccgcgccctccagccccgtccgggagtccccggcccgctgcggtgccgtgagtacctccaaccccctgcgccccggagggaggccgaggggcttagccaccagggctcggaagtgggggccgaatccggtgcgagacccaaggagaggggagcagagccggagttggggagactgtggctgagaactgtgtcttcctggagactaggctggcattttgactttggggttgctgaaaagccaggagtcaaaatgactgagcgctttgactgccaccattgcaacgaatctctctttggcaagaagtacatcctgcgggaggagagcccctactgcgtggtgtgctttgagaccctgttcgccaacacctgcgaggagtgtgggaagcccatcggctgtgactgcaaggacttgtcttacaaggaccggcactggcatgaagcctgtttccactgctcgcagtgcagaaactcactggtggacaagccctttgctgccaaggaggaccagctgctctgtacagactgctattccaacgagtactcatccaagtgccaggaatgcaagaagaccatcatgccaggtacccgcaagatggagtacaagggcagcagctggcatgagacctgcttcatctgccaccgctgccagcagccaattggaaccaagagtttcatccccaaagacaatcagaatttctgtgtgccctgctatgagaaacaacatgccatgcagtgcgttcagtgcaaaaagcccatcaccacgggaggggtcacttaccgggagcagccctggcacaaggagtgcttcgtgtgcaccgcctgcaggaagcagctgtctgggcagcgcttcacagctcgcgatgactttgcctactgcctgaactgcttctgtgacttgtatgccaagaagtgtgctgggtgcaccaaccccatcagcggacttggtggcacaaaatacatctcctttgaggaacggcagtggcataacgactgctttaactgtaagaagtgctccctctcactggtggggcgtggcttcctcacagagagggacgacatcctgtgccccgactgtgggaaagacatctgaattcaacacagagaagttgctgcttgtgatctcacacacagatttttatgttttctttctcacccaggcaatcttgccttctggtttcttccagccacattgagactttcttctagtgcttttcagtgatactcacgtttgcttaaaccctttagtgctttgtgatagttcagtcccagggaaagagaaaactcgccctaggccctaggtgggaagatggtttgaaatttttgtaatcgagtaaggcacacccaaatgtaaaaatccttttgaatgatgcctttataaatctttctctcactgtctatttaagtgcaattaacatatgtcacgaacttgaaagttttctaaactcaataaggtaatgaccagttgttatttacagctctgtaacctcccgttgcgtcaagtctaaaccaagattatgtgacttgcaataaagttattcagaacagaatcttttgccaggca

SEQ ID NO: 11194 - DNA, 1872 bp, Homo sapiens
  source 1..1872: mol_type = unassigned DNA
agggtacgggccgggaccgccgcagcccggggcgggggcacggcaaccgcgaggcctgggggcgcccgccccccgcgccccacgcccggtgccagcgagccgaggcgtgcatctccttatatggtcaaatgacacggcggggtttctcgagggcgggagctgcgcagcgctccactcggccggcagcggagccgcagccaccagccgcccgcgccctccagccccgtccgggagtccccggcccgctgcggtgccgtgagtacctccaaccccctgcgccccggagggaggccgaggggcttagccaccagggctcggaagtgggggccgaatccggtgcgagacccaaggagaggggagcagagccggagttggggagactgtggctgagaactgtgtcttcctggagactaggctggcattttgactttgggacggagtctcgctttgtcgcccaggctggagtgcagtggcacgatctcagctcactgcaagctctacctcttggttcacgccattctcctgccccagcctcccaagtagctgggactacaggttgctgaaaagccaggagtcaaaatgactgagcgctttgactgccaccattgcaacgaatctctctttggcaagaagtacatcctgcgggaggagagcccctactgcgtggtgtgctttgagaccctgttcgccaacacctgcgaggagtgtgggaagcccatcggctgtgactgcaaggacttgtcttacaaggaccggcactggcatgaagcctgtttccactgctcgcagtgcagaaactcactggtggacaagccctttgctgccaaggaggaccagctgctctgtacagactgctattccaacgagtactcatccaagtgccaggaatgcaagaagaccatcatgccaggtacccgcaagatggagtacaagggcagcagctggcatgagacctgcttcatctgccaccgctgccagcagccaattggaaccaagagtttcatccccaaagacaatcagaatttctgtgtgccctgctatgagaaacaacatgccatgcagtgcgttcagtgcaaaaagcccatcaccacgggaggggtcacttaccgggagcagccctggcacaaggagtgcttcgtgtgcaccgcctgcaggaagcagctgtctgggcagcgcttcacagctcgcgatgactttgcctactgcctgaactgcttctgtgacttgtatgccaagaagtgtgctgggtgcaccaaccccatcagcggacttggtggcacaaaatacatctcctttgaggaacggcagtggcataacgactgctttaactgtaagaagtgctccctctcactggtggggcgtggcttcctcacagagagggacgacatcctgtgccccgactgtgggaaagacatctgaattcaacacagagaagttgctgcttgtgatctcacacacagatttttatgttttctttctcacccaggcaatcttgccttctggtttcttccagccacattgagactttcttctagtgcttttcagtgatactcacgtttgcttaaaccctttagtgctttgtgatagttcagtcccagggaaagagaaaactcgccctaggccctaggtgggaagatggtttgaaatttttgtaatcgagtaaggcacacccaaatgtaaaaatccttttgaatgatgcctttataaatctttctctcactgtctatttaagtgcaattaacatatgtcacgaacttgaaagttttctaaactcaataaggtaatgaccagttgttatttacagctctgtaacctcccgttgcgtcaagtctaaaccaagattatgtgacttgcaataaagttattcagaac

SEQ ID NO: 11195 - DNA, 1426 bp, Homo sapiens
  source 1..1426: mol_type = unassigned DNA
cagctgcacagaaggttggggccatccaaccaggcagtccgcctgcacagcagctgtccctgctcatcgggctggaggacagaagacagaaccctaaaaccacaggttgctgaaaagccaggagtcaaaatgactgagcgctttgactgccaccattgcaacgaatctctctttggcaagaagtacatcctgcgggaggagagcccctactgcgtggtgtgctttgagaccctgttcgccaacacctgcgaggagtgtgggaagcccatcggctgtgactgcaaggacttgtcttacaaggaccggcactggcatgaagcctgtttccactgctcgcagtgcagaaactcactggtggacaagccctttgctgccaaggaggaccagctgctctgtacagactgctattccaacgagtactcatccaagtgccaggaatgcaagaagaccatcatgccaggtacccgcaagatggagtacaagggcagcagctggcatgagacctgcttcatctgccaccgctgccagcagccaattggaaccaagagtttcatccccaaagacaatcagaatttctgtgtgccctgctatgagaaacaacatgccatgcagtgcgttcagtgcaaaaagcccatcaccacgggaggggtcacttaccgggagcagccctggcacaaggagtgcttcgtgtgcaccgcctgcaggaagcagctgtctgggcagcgcttcacagctcgcgatgactttgcctactgcctgaactgcttctgtgacttgtatgccaagaagtgtgctgggtgcaccaaccccatcagcggacttggtggcacaaaatacatctcctttgaggaacggcagtggcataacgactgctttaactgtaagaagtgctccctctcactggtggggcgtggcttcctcacagagagggacgacatcctgtgccccgactgtgggaaagacatctgaattcaacacagagaagttgctgcttgtgatctcacacacagatttttatgttttctttctcacccaggcaatcttgccttctggtttcttccagccacattgagactttcttctagtgcttttcagtgatactcacgtttgcttaaaccctttagtgctttgtgatagttcagtcccagggaaagagaaaactcgccctaggccctaggtgggaagatggtttgaaatttttgtaatcgagtaaggcacacccaaatgtaaaaatccttttgaatgatgcctttataaatctttctctcactgtctatttaagtgcaattaacatatgtcacgaacttgaaagttttctaaactcaataaggtaatgaccagttgttatttacagctctgtaacctcccgttgcgtcaagtctaaaccaagattatgtgacttgcaataaagttattcagaacagaa

SEQ ID NO: 11196 - DNA, 1531 bp, Homo sapiens
  source 1..1531: mol_type = unassigned DNA
actcggccggcagcggagccgcagccaccagccgcccgcgccctccagccccgtccgggagtccccggcccgctgcggtgccgtgagtacctccaaccccctgcgccccggagggaggccgaggggcttagccaccagggctcggaagtgggggccgaatccggtgcgagacccaaggagaggggagcagagccggagttggggagactggttgctgaaaagccaggagtcaaaatgactgagcgctttgactgccaccattgcaacgaatctctctttggcaagaagtacatcctgcgggaggagagcccctactgcgtggtgtgctttgagaccctgttcgccaacacctgcgaggagtgtgggaagcccatcggctgtgactgcaaggacttgtcttacaaggaccggcactggcatgaagcctgtttccactgctcgcagtgcagaaactcactggtggacaagccctttgctgccaaggaggaccagctgctctgtacagactgctattccaacgagtactcatccaagtgccaggaatgcaagaagaccatcatgccaggtacccgcaagatggagtacaagggcagcagctggcatgagacctgcttcatctgccaccgctgccagcagccaattggaaccaagagtttcatccccaaagacaatcagaatttctgtgtgccctgctatgagaaacaacatgccatgcagtgcgttcagtgcaaaaagcccatcaccacgggaggggtcacttaccgggagcagccctggcacaaggagtgcttcgtgtgcaccgcctgcaggaagcagctgtctgggcagcgcttcacagctcgcgatgactttgcctactgcctgaactgcttctgtgacttgtatgccaagaagtgtgctgggtgcaccaaccccatcagcggacttggtggcacaaaatacatctcctttgaggaacggcagtggcataacgactgctttaactgtaagaagtgctccctctcactggtggggcgtggcttcctcacagagagggacgacatcctgtgccccgactgtgggaaagacatctgaattcaacacagagaagttgctgcttgtgatctcacacacagatttttatgttttctttctcacccaggcaatcttgccttctggtttcttccagccacattgagactttcttctagtgcttttcagtgatactcacgtttgcttaaaccctttagtgctttgtgatagttcagtcccagggaaagagaaaactcgccctaggccctaggtgggaagatggtttgaaatttttgtaatcgagtaaggcacacccaaatgtaaaaatccttttgaatgatgcctttataaatctttctctcactgtctatttaagtgcaattaacatatgtcacgaacttgaaagttttctaaactcaataaggtaatgaccagttgttatttacagctctgtaacctcccgttgcgtcaagtctaaaccaagattatgtgacttgcaataaagttattcagaacagaa

SEQ ID NO: 11197 - DNA, 1367 bp, Homo sapiens
  source 1..1367: mol_type = unassigned DNA
ctcggccggcagcggagccgcagccaccagccgcccgcgccctccagccccgtccgggagtccccggcccgctgcggtgccgttgctgaaaagccaggagtcaaaatgactgagcgctttgactgccaccattgcaacgaatctctctttggcaagaagtacatcctgcgggaggagagcccctactgcgtggtgtgctttgagaccctgttcgccaacacctgcgaggagtgtgggaagcccatcggctgtgactgcaaggacttgtcttacaaggaccggcactggcatgaagcctgtttccactgctcgcagtgcagaaactcactggtggacaagccctttgctgccaaggaggaccagctgctctgtacagactgctattccaacgagtactcatccaagtgccaggaatgcaagaagaccatcatgccaggtacccgcaagatggagtacaagggcagcagctggcatgagacctgcttcatctgccaccgctgccagcagccaattggaaccaagagtttcatccccaaagacaatcagaatttctgtgtgccctgctatgagaaacaacatgccatgcagtgcgttcagtgcaaaaagcccatcaccacgggaggggtcacttaccgggagcagccctggcacaaggagtgcttcgtgtgcaccgcctgcaggaagcagctgtctgggcagcgcttcacagctcgcgatgactttgcctactgcctgaactgcttctgtgacttgtatgccaagaagtgtgctgggtgcaccaaccccatcagcggacttggtggcacaaaatacatctcctttgaggaacggcagtggcataacgactgctttaactgtaagaagtgctccctctcactggtggggcgtggcttcctcacagagagggacgacatcctgtgccccgactgtgggaaagacatctgaattcaacacagagaagttgctgcttgtgatctcacacacagatttttatgttttctttctcacccaggcaatcttgccttctggtttcttccagccacattgagactttcttctagtgcttttcagtgatactcacgtttgcttaaaccctttagtgctttgtgatagttcagtcccagggaaagagaaaactcgccctaggccctaggtgggaagatggtttgaaatttttgtaatcgagtaaggcacacccaaatgtaaaaatccttttgaatgatgcctttataaatctttctctcactgtctatttaagtgcaattaacatatgtcacgaacttgaaagttttctaaactcaataaggtaatgaccagttgttatttacagctctgtaacctcccgttgcgtcaagtctaaaccaaga

SEQ ID NO: 11198 - DNA, 4881 bp, Homo sapiens
  source 1..4881: mol_type = unassigned DNA
actttggttttcccgccctggaggggaatccaagatgtctaactagtcttctggccccgagagggagaggtggggataggaccttcctttagtcccctccgtagtggaacgaaggattctttatggtcatctgtggtgttcatttcgtaaagaagcatctgcagggtaagaaggaaaaacgtccaccttgcaaatatatcccaggcacatgcctcctgagaagtgaccccctcctccctccgcctcccccggcacgtcctggggcttctccagtctcccgctcctgggaccaggcagagatcccggcgtgggcagacccctgccaccgcgcccaggcctcgtccgaaactcgcgcccgagagcccacgccggaggcgacgctcccgataactactgtgctcccaagacccggagggcacgaagaaaggagccctggcaaacaaagggttgctgaaaagccaggagtcaaaatgactgagcgctttgactgccaccattgcaacgaatctctctttggcaagaagtacatcctgcgggaggagagcccctactgcgtggtgtgctttgagaccctgttcgccaacacctgcgaggagtgtgggaagcccatcggctgtgactgcaaggacttgtcttacaaggaccggcactggcatgaagcctgtttccactgctcgcagtgcagaaactcactggtggacaagccctttgctgccaaggaggaccagctgctctgtacagactgctattccaacgagtactcatccaagtgccaggaatgcaagaagaccatcatgccaggtacccgcaagatggagtacaagggcagcagctggcatgagacctgcttcatctgccaccgctgccagcagccaattggaaccaagagtttcatccccaaagacaatcagaatttctgtgtgccctgctatgagaaacaacatgccatgcagtgcgttcagtgcaaaaagcccatcaccacgggaggggtcacttaccgggagcagccctggcacaaggagtgcttcgtgtgcaccgcctgcaggaagcagctgtctgggcagcgcttcacagctcgcgatgactttgcctactgcctgaactgcttctgtgacttgtatgccaagaagtgtgctgggtgcaccaaccccatcagcggacttggtggcacaaaatacatctcctttgaggaacggcagtggcataacgactgctttaactgtaagaagtgctccctctcactggtggggcgtggcttcctcacagagagggacgacatcctgtgccccgactgtgggaaagacatctgaattcaacacagagaagttgctgcttgtgatctcacacacagatttttatgttttctttctcacccaggcaatcttgccttctggtttcttccagccacattgagactttcttctagtgcttttcagtgatactcacgtttgcttaaaccctttagtgctttgtgatagttcagtcccagggaaagagaaaactcgccctaggccctaggtgggaagatggtttgaaatttttgtaatcgagtaaggcacacccaaatgtaaaaatccttttgaatgatgcctttataaatctttctctcactgtctatttaagtgcaattaacatatgtcacgaacttgaaagttttctaaactcaataaggtaatgaccagttgttatttacagctctgtaacctcccgttgcgtcaagtctaaaccaagattatgtgacttgcaataaagttattcagaacagaatcttttgccaggcacagagtgtgaaatcatgattacaggtcgaggcactgagtctaagtaacactttattgcatggtcccatggtcactgtatgaagtgcagttccaatgttccaatggcctggggcattgccaactggaacagcatcacaccctttaaaggaagccttcggctgggcacggtggctcacgcctgtaatcccagcactttgggaggccaaggcgggtggatcatgaggtcaggagatcaagaccatcctggctaacatggtgaaaccccgtctctacgaaaaatacaaaaaattagccgggtgtggtggtgagcgcctgtagtcccagctactcgggaggctgaggcaggagaatggcatgaacccgggaggcagagcttgcagtgagctgagatggcaccactgaactccagcctggaagacaaagagactccgtctcaaaaaaaaaaagccttcagtcagcaccaggcacctcttccttgctaccttctctcccttttttttttttttttttgagacagagtctcgctctgtcgcccaggctaaagtgcaatggcacaatctcagctcactgcaacctccacttcccgcgttcaagcgattctcctgccctcagcctcctgagtagctgggattacaggcacccaccattatgcccggctaatttttgtatttttagtagagatggggtttcaccatgttaggctggtcttgaactcctgacctcaggtgatccacctgcctcggtcccccaaagtgctgggattataggcatgagccaccgcacccagctaccttctctgtctttcccatactctttctcttggaatgtaatcctctgcatttgacacagtaacataaactgacagtgaagccaattttcaggtcatttttcttggcagagcttatcggctctgtcccagtgttatggatccacatcttacaccgacttccataaagtgaaagattgcacaaggacataagcaacttgaggccagagacgacatcctgttcatctttatgttctcaacaccctcgcaactgagggcacactgggagccttcagtgtttctgaaaagggcagtaaagcaggagagacacacagtcattacagtaaaaataacattctgagctactagtgtggcagtagtctgtggaataatctcagatagcagtatacagttgggaagcacggagccaatgtatgggatagaacattgcacagttctctttagaatgggagcatcagtgacctttttgtccttagttttctaagacaatgcaatataataaaatgataggctgagcaacagaaaaatttggtggaaatcaagtctgatatatgctgagcatatgtgaaatcagtttcttaatctgagtgttagtcactgttagaatgtttgataatgtctggaatgagtcttttggttttatagttgacttgaggttttgcttaaaaagaataatttcatcctttgttagttgttttgctgttttctacttcataatataaaagtaaaagcactccaaatttcattttggaacatcttacttgttcctcattaaaaccatagactctcccaaccttaaattacccattctaaaattaatggttagggggaattccacttctagtaaatagctccaattggactaattctcctccaaattaacagtcattctggacaaaatatttatttaattgttaagaacactggagcacgatccaaagcaggcagatattggagggcagtagacacttggaagaagagaacgacactgggtgattttcctgtttcggccttttatccaatggcaggcccccgccagggatctaaaactctgttaggaaacctgcagtcttactggcctgaggaaccagaggccagagttcgggacaaacagcctctggaaagtgaggaagaaaatcctgaaaaggagagccccaagttcgtcgcatgaacttagaaatttctggctgacaactgaaccgtgtatacttaggccagactccaagcagcccagccaaggctaaaagcattgactgacaggactttacagatagtggtttgcagggcttagctgaccgaccctcttcctactgaaggaaattacttgtatataaaccacacaacacaaagtctctgaaaatttccccagaagcatacaacaaataaacattcattcaggaaaatccactactaagtcttagaaagaacagtgagtctgtggcatttgagccacagcctcatcctatcccatccccactccccagcttcatgtgacaaactctattctggaccaatgcagccaaaaattaaggggtctctcttcctccagctaccagtctagggctttgccccaggtgcgacaggctgagaatcgtagagctccaattgcccctaccctagcctgcttagtgcggaggctccacattgggaggggcaatctgagaagaccagcggctatcaacccactcacagagaagggatgtcagtcctggagaagcaggctgctgtccagcccccagaggagatccaggctctgagactggtaacccagcagttatgcccaaggggactggtatttggtacggagaacgagaaatctttgcctaaggggattgtcaaaaacaataagacatcttaccagtgagccattaaggaaggggctggtaactccatgctattagtagcaaaaagcaaaatgacagaccagccagaagtttaacacagaaaaccagagaaagagatagccaagaagagccctcctggaatctggtttatccttgaggttcgggaagtatgtatggacagggctgtatccactcaggagcaatcagatgtgaaacaaacttgaaagcattctctaaggcatacacagatccatcagcaaagagcagaaatcttattagctcaaagtgcttaagcagaacctctgaccaaacactggctgaacacataaatgtgtttgttcaaagaactaaaggaaatcatatttaaaaaaggaaggtaaaggaacaattacagttgttcctccatatccatggattcctcatctgtggattcaaccaactgtggatcaaaagtatttaggaaaaaaaa

SEQ ID NO: 11199 - DNA, 1601 bp, Homo sapiens
  source 1..1601: mol_type = unassigned DNA
tcagcctcagtgactcaggcagcctcctttgtcagcaccgggcctgagtcgctaagcggctctctgactcagatgccctgaggtacaaagttccttgagcttgggtgaatggaaacattagacattgggttcttctgtgcggttttattatgagaatttgatcaaagccacatttattaagtgtccatctcaagttgcattatactgagttcgcttcctcaagatgaccatctgaaacaaaacacgtgtgctttctctagtggctgagaactgtgtcttcctggagactaggctggcattttgactttggggttgctgaaaagccaggagtcaaaatgactgagcgctttgactgccaccattgcaacgaatctctctttggcaagaagtacatcctgcgggaggagagcccctactgcgtggtgtgctttgagaccctgttcgccaacacctgcgaggagtgtgggaagcccatcggctgtgactgcaaggacttgtcttacaaggaccggcactggcatgaagcctgtttccactgctcgcagtgcagaaactcactggtggacaagccctttgctgccaaggaggaccagctgctctgtacagactgctattccaacgagtactcatccaagtgccaggaatgcaagaagaccatcatgccaggtacccgcaagatggagtacaagggcagcagctggcatgagacctgcttcatctgccaccgctgccagcagccaattggaaccaagagtttcatccccaaagacaatcagaatttctgtgtgccctgctatgagaaacaacatgccatgcagtgcgttcagtgcaaaaagcccatcaccacgggaggggtcacttaccgggagcagccctggcacaaggagtgcttcgtgtgcaccgcctgcaggaagcagctgtctgggcagcgcttcacagctcgcgatgactttgcctactgcctgaactgcttctgtgacttgtatgccaagaagtgtgctgggtgcaccaaccccatcagcggacttggtggcacaaaatacatctcctttgaggaacggcagtggcataacgactgctttaactgtaagaagtgctccctctcactggtggggcgtggcttcctcacagagagggacgacatcctgtgccccgactgtgggaaagacatctgaattcaacacagagaagttgctgcttgtgatctcacacacagatttttatgttttctttctcacccaggcaatcttgccttctggtttcttccagccacattgagactttcttctagtgcttttcagtgatactcacgtttgcttaaaccctttagtgctttgtgatagttcagtcccagggaaagagaaaactcgccctaggccctaggtgggaagatggtttgaaatttttgtaatcgagtaaggcacacccaaatgtaaaaatccttttgaatgatgcctttataaatctttctctcactgtctatttaagtgcaattaacatatgtcacgaacttgaaagttttctaaactcaataaggtaatgaccagttgttatttacagctctgtaacctcccgttgcgtcaagtctaaaccaagattat

SEQ ID NO: 11200 - DNA, 574 bp, Homo sapiens
  source 1..574: mol_type = unassigned DNA
tttattaagtgtccatctcaagttgcattatactgagttcgcttcctcaagatgaccatctgaaacaaaacacgtgtgctttctctagtggctgagaactgtgtcttcctggagactaggctggcattttgactttgggacggagtctcgctttgtcgcccaggctggagtgcagtggcacgatctcagctcactgcaagctctacctcttggttcacgccattctcctgccccagcctcccaagtagctgggactacaggtgcccgccaccacacccggataattttttttttgtatttttagtagagatggggtttcaccgtgttagccaggatggtctcaatctcctgacctcgtgtttcacccgcctcagcctcccaaagtgctgggattacaggcgtgagccaccgcacctggccagattttttttgtttttgtttttttctgtcctggtcctgtagaatcagaggaagtggaaaacacatatcaggttgctgaaaagccaggagtcaaaatgactgagcgctttgactgccaccattgcaacgaatctctctttggcaagaagtacat

SEQ ID NO: 11201 - DNA, 1876 bp, Homo sapiens
  source 1..1876: mol_type = unassigned DNA
agggtacgggccgggaccgccgcagcccggggcgggggcacggcaaccgcgaggcctgggggcgcccgccccccgcgccccacgcccggtgccagcgagccgaggcgtgcatctccttatatggtcaaatgacacggcggggtttctcgagggcgggagctgcgcagcgctccactcggccggcagcggagccgcagccaccagccgcccgcgccctccagccccgtccgggagtccccggcccgctgcggtgccgtgagtacctccaaccccctgcgccccggagggaggccgaggggcttagccaccagggctcggaagtgggggccgaatccggtgcgagacccaaggagaggggagcagagccggagttggggagactgtggctgagaactgtgtcttcctggagactaggctggcattttgactttgggacggagtctcgctttgtcgcccaggctggagtgcagtggcacgatctcagctcactgcaagctctacctcttggttcacgccattctcctgccccagcctcccaagtagctgggactacaggttgctgaaaagccaggagtcaaaatgactgagcgctttgactgccaccattgcaacgaatctctctttggcaagaagtacatcctgcgggaggagagcccctactgcgtggtgtgctttgagaccctgttcgccaacacctgcgaggagtgtgggaagcccatcggctgtgactgcaaggacttgtcttacaaggaccggcactggcatgaagcctgtttccactgctcgcagtgcagaaactcactggtggacaagccctttgctgccaaggaggaccagctgctctgtacagactgctattccaacgagtactcatccaagtgccaggaatgcaagaagaccatcatgccaggtacccgcaagatggagtacaagggcagcagctggcatgagacctgcttcatctgccaccgctgccagcagccaattggaaccaagagtttcatccccaaagacaatcagaatttctgtgtgccctgctatgagaaacaacatgccatgcagtgcgttcagtgcaaaaagcccatcaccacgggaggggtcacttaccgggagcagccctggcacaaggagtgcttcgtgtgcaccgcctgcaggaagcagctgtctgggcagcgcttcacagctcgcgatgactttgcctactgcctgaactgcttctgtgacttgtatgccaagaagtgtgctgggtgcaccaaccccatcagcggacttggtggcacaaaatacatctcctttgaggaacggcagtggcataacgactgctttaactgtaagaagtgctccctctcactggtggggcgtggcttcctcacagagagggacgacatcctgtgccccgactgtgggaaagacatctgaattcaacacagagaagttgctgcttgtgatctcacacacagatttttatgttttctttctcacccaggcaatcttgccttctggtttcttccagccacattgagactttcttctagtgcttttcagtgatactcacgtttgcttaaaccctttagtgctttgtgatagttcagtcccagggaaagagaaaactcgccctaggccctaggtgggaagatggtttgaaatttttgtaatcgagtaaggcacacccaaatgtaaaaatccttttgaatgatgcctttataaatctttctctcactgtctatttaagtgcaattaacatatgtcacgaacttgaaagttttctaaactcaataaggtaatgaccagttgttatttacagctctgtaacctcccgttgcgtcaagtctaaaccaagattatgtgacttgcaataaagttattcagaacagaa

SEQ ID NO: 11202 - DNA, 1647 bp, Homo sapiens
  source 1..1647: mol_type = unassigned DNA
cacggtccgtctgcagtcggcagcctcgccggcagctcgctcggcccccgcttggcccggcccgcaggtaggagccgccgagggacgcggcgcccggttcccggccccgcctgcgccgcgcgctccccgctcccgccgcccgcttcgagggttctctccccttgccaccatgagcgagtcatttgactgtgcaaaatgcaacgagtccctgtatggacgcaagtacatccagacagacagcggcccctactgtgtgccctgctatgacaatacctttgccaacacctgtgctgagtgccagcagcttatcgggcatgactcgagggagctgttctatgaagaccgccatttccacgagggctgcttccgctgctgccgctgccagcgctcactagccgatgaacccttcacctgccaggacagtgagctgctctgcaatgactgctactgcagtgcgttttcctcgcagtgctccgcttgtggggagactgtcatgcctgggtcccggaagctggaatatggaggccagacatggcatgagcactgcttcctgtgcagtggctgtgaacagccactgggctcccgttcttttgtgcccgacaagggtgctcactactgcgtgccctgctatgagaacaagtttgctcctcgctgcgcccgctgcagcaagacgctgacacagggtggagtgacataccgtgatcagccgtggcatcgagaatgtctggtctgtaccggatgccagacgcccctggcagggcagcagttcacctcccgggatgaagatccctactgtgtggcctgttttggagaactctttgcacctaagtgcagcagctgcaagcgccccatcgtaggactcggtggaggcaagtatgtgtcctttgaagaccgacactggcaccacaactgcttctcctgcgcccgctgctctacctccctggtgggccagggcttcgtaccggatggagaccaagtgctctgccagggctgtagccaggcagggccctaagccagggctcctggacccaggctttcccataccacgggcccaggactgtggctccttttctaaaccacctctgggactcagctccccccgccaaaaaaaatgggtctccttctgggctccaggattgtctccccactccagcatccccaaactggtactccctgacccagggccccaaacctgggctcttacagagcctccatgagtcaagccccctccccacacctggactccagaattcaccctctcccctgcagtctgggttcccagactgagtcctctccccaaatcagggctctagacccgagccctccaaacctggactctgggacttaggcccccttaaatctagacttctctttataggtttcaggtctcctatgggtgcctgggaagtccttgaaagtggactgttctcaggcttgacctgccccaccccatccccgcggttgaggctgtgggggcagcagatcaggagcccactgataaggggccctagggtacagggtgctgcccagcaggtcgccaccgagtgtcttctcattttatttcagctccattttgcccatagatgggcagaggggtgagattggctcatcccccttccagattctgcaataaagcggtgtgaggaa

SEQ ID NO: 11203 - DNA, 2031 bp, Homo sapiens
  source 1..2031: mol_type = unassigned DNA
tgcaagtccagagagcagggaactaccttgagtattctactcaaacttatgtctcagagttccccaatttcccaagaagggagagatagaggccacaatccagggggccatctcttaaggtaccaataattttgcagcccagtaggagtcatgtacacggtataagacttggaggaaatgcagggacccttctgttttctcctgcaaagttgaaaaagctgcatgcagttggaagggatcttcagatggtgctggtgactttctgttccttttggagttgacatgcatgtggattggaggaaaaataatcaacatatattctcctttcgtactgtttaaatcacaggaagaagcggctttaagacaaagatcaaaccaaaatgacaactgctcacttttactgtcaatactgcacagcatcacttcttgggaagaaatatgtactaaaggatgacagtccatactgtgttacatgttatgatcgtgtattttctaactattgcgaggaatgcaaaaaaccaattgaatctgattctaaggatctttgttacaaagaccggcactggcatgaaggatgcttcaagtgcaccaaatgcaatcactctttggtggaaaagccttttgctgccaaggatgagcgcctgctgtgcacggagtgctattctaacgagtgctcctccaagtgcttccactgcaagaggaccatcatgcctggttcccgcaaaatggaatttaagggaaactactggcatgaaacctgttttgtgtgtgagaattgccgacaacctatagggacaaagcctttgatctccaaagagagtggcaattattgtgtgccatgttttgagaaggagtttgctcactactgcaacttttgtaagaaggtgataacttcaggtgggataacattttgtgaccagctatggcataaagagtgttttctgtgtagtggctgtaggaaagatctctgtgaagaacagttcatgtccagagacgactatccattctgcgtggactgctacaaccatctttatgccaacaagtgtgtagcctgttccaaacccattagtggtctcacaggtgccaagtttatctgctttcaagacagccagtggcatagcgaatgctttaactgcgggaaatgctctgtctccttggtgggtaaaggcttcctgacccagaacaaggaaatcttctgccaaaaatgtggctccggaatggacactgacatctaggagacagtccttgcccacctaaaatccattttgccttcgttgtcactaaagccagaactcagttgcggtcttatttttgacttaagttttagaaaatattcatgtagtttagagtggaaaagtttttgcacacattttgatcgaactatattctaagcacacaaaaagcacagtagaacagaaatgaatatatgctaaatcacaaagacaactctccttgcaaaatactgcactctgctgttagaagcagaggaaaatatctcttcataatcaaatatatgacatatacctaggagctgtggatgtaattactgaagaatgaggtttttcatacctgaagagtaaaagaaaaactaagagatcaaactgagaggtatacatgaggctagtgtttgcattcctggttatatgtaatgtgataaattagctatgaatggtaaaagaacaaaactgatcagagtaaattcattagcaattatcacatttaagaattgttatcatttaaaaatcatcctttttttcacacatactgactgtagaattaaaaaacaaagctacaatttgccctcatacacactgcttccacagcttgctagttctgtgtttactcaatggaatatgagaactgaggacattatggctctcataatctgcataggtataaagaggatcatttctacctagggatagccaaagcatgggtttcaacacgttttgtattaaatatattttcaaagtccacagtgatttttctaaacgcttacagattccatgaaataaaagtctattctttcaa

SEQ ID NO: 11204 - DNA, 779 bp, Homo sapiens
  source 1..779: mol_type = unassigned DNA
tgcaagtccagagagcagggaactaccttgagtattctactcaaacttatgtctcagagttccccaatttcccaagaagggagagatagaggccacaatccagggggccatctcttaaggtaccaataattttgcaggatcaaaccaaaatgacaactgctcacttttactgtcaatactgcacagcatcacttcttgggaagaaatatgtactaaaggatgacagtccatactgtgttacatgttatgatcgtgtattttctaactattgcgaggaatgcaaaaaaccaattgaatctgattctaaggatctttgttacaaagaccggcactggcatgaaggatgcttcaagtgcaccaaatgcaatcactctttggtggaaaagccttttgctgccaaggatgagcgcctgctgtgcacggagtgctattctaacgagtgctcctccaagtgcttccactgcaagaggaccatcatgcctggttcccgcaaaatggaatttaagggaaactactggcatgaaacctgttttgtgtgtgagaattgccgacaacctatagggacaaagcctttgatctccaaagagagtggcaattattgtgtgccatgttttgagaaggagtttgctcactactgcaacttttgtaagaaggtgataacttcaggtgggataacattttgtgaccagctatggcataaagagtgttttctgtgtagtggctgtaggaaagatctctgtgaagaacagttcatgtccagagacgactatccattctgc

SEQ ID NO: 11205 - DNA, 1904 bp, Homo sapiens
  source 1..1904: mol_type = unassigned DNA
aggaagcaggcagagcggggaaggctgagtccacactgcaagtccagagagcagggaactaccttgagtattctactcaaacttatgtctcagagttccccaatttcccaagaagggagagatagaggccacaatccagggggccatctcttaaggtaccaataattttgcaggatcaaaccaaaatgacaactgctcacttttactgtcaatactgcacagcatcacttcttgggaagaaatatgtactaaaggatgacagtccatactgtgttacatgttatgatcgtgtattttctaactattgcgaggaatgcaaaaaaccaattgaatctgattctaaggatctttgttacaaagaccggcactggcatgaaggatgcttcaagtgcaccaaatgcaatcactctttggtggaaaagccttttgctgccaaggatgagcgcctgctgtgcacggagtgctattctaacgagtgctcctccaagtgcttccactgcaagaggaccatcatgcctggttcccgcaaaatggaatttaagggaaactactggcatgaaacctgttttgtgtgtgagaattgccgacaacctatagggacaaagcctttgatctccaaagagagtggcaattattgtgtgccatgttttgagaaggagtttgctcactactgcaacttttgtaagaaggtgataacttcaggtgggataacattttgtgaccagctatggcataaagagtgttttctgtgtagtggctgtaggaaagatctctgtgaagaacagttcatgtccagagacgactatccattctgcgtggactgctacaaccatctttatgccaacaagtgtgtagcctgttccaaacccattagtggtctcacaggtgccaagtttatctgctttcaagacagccagtggcatagcgaatgctttaactgcgggaaatgctctgtctccttggtgggtaaaggcttcctgacccagaacaaggaaatcttctgccaaaaatgtggctccggaatggacactgacatctaggagacagtccttgcccacctaaaatccattttgccttcgttgtcactaaagccagaactcagttgcggtcttatttttgacttaagttttagaaaatattcatgtagtttagagtggaaaagtttttgcacacattttgatcgaactatattctaagcacacaaaaagcacagtagaacagaaatgaatatatgctaaatcacaaagacaactctccttgcaaaatactgcactctgctgttagaagcagaggaaaatatctcttcataatcaaatatatgacatatacctaggagctgtggatgtaattactgaagaatgaggtttttcatacctgaagagtaaaagaaaaactaagagatcaaactgagaggtatacatgaggctagtgtttgcattcctggttatatgtaatgtgataaattagctatgaatggtaaaagaacaaaactgatcagagtaaattcattagcaattatcacatttaagaattgttatcatttaaaaatcatcctttttttcacacatactgactgtagaattaaaaaacaaagctacaatttgccctcatacacactgcttccacagcttgctagttctgtgtttactcaatggaatatgagaactgaggacattatggctctcataatctgcataggtataaagaggatcatttctacctagggatagccaaagcatgggtttcaacacgttttgtattaaatatattttcaaagtccacagtgatttttctaaacgcttacagattccatgaaataaaagtctattctttcaagtggagctaaccaggataatctttgtccccaaaggcaaacctttaaaataaatagatcattaaatctt

SEQ ID NO: 11206 - DNA, 2685 bp, Homo sapiens
  source 1..2685: mol_type = unassigned DNA
tacgccccggcgcgggcgcagccagtccggcttcctccaggcccccaagtcccggaccgagtgtggggccgcctctccctctcggaaggagccatcgccgctttaagtggaagaggagaggaagggggcgggggagcggggggcggggagcggaggcggaggagggggagggggatccccctggctcccacgtggtccgggcgcctgtgaatcgcgcccaccggagggtctcacagcgaaatacaaaagcagctgggaagcggcggggactcgagttcccagcgccgggcggagcgccggacagagccccgcagcgccccgcggccgcgatggggccgaagcgcccgaagccccggagcccacaaactgccgggcccgcctcgccgccgggacccgggtgcctgggctcggcttgaagcggcggcggcgcaccggcacagccgcgggagcatgggcaggaggatgcggggcgccgccgccaccgcggggctctggctgctggcgctgggctcgctgctggcgctgtggggagggctcctgccgccgcggaccgagctgcccgcctcccggccgcccgaagaccgactcccacggcgcccggcccggagcggcggccccgcgcccgcgcctcgcttccctctgcccccgcccctggcgtgggacgcccgcggcggctccctgaaaactttccgggcgctgctcaccctggcggccggcgcggacggcccgccccggcagtcccggagcgagcccaggtggcacgtgtcagccaggcagccccggccggaggagagcgccgcggtgcacgggggcgtcttctggagccgcggcctggaggagcaggtgcccccgggcttttcggaggcccaggcggcggcgtggctggaggcggctcgcggcgcccggatggtggccctggagcgcgggggttgcgggcgcagctccaaccgactggcccgttttgccgacggcacccgcgcctgcgtgcgctacggcatcaacccggagcagattcagggcgaggccctgtcttactatctggcgcgcctgctgggcctccagcgccacgtgccgccgctggcactggctcgggtggaggctcggggcgcgcagtgggcgcaggtgcaggaggagctgcgcgctgcgcactggaccgagggcagcgtggtgagcctgacacgctggctgcccaacctcacggacgtggtggtgcccgcgccctggcgctcggaggacggccgtctgcgccccctccgggatgccgggggtgagctggccaacctcagccaggcggagctggtggacctagtacaatggaccgacttaatccttttcgactacctgacggccaacttcgaccggctcgtaagcaacctcttcagcctgcagtgggacccgcgcgtcatgcagcgtgccaccagcaacctgcaccgcggtccgggcggggcgctggtctttctggacaatgaggcgggcttggtgcacggctaccgggtagcaggcatgtgggacaagtataacgagccgctgttgcagtcagtgtgcgtgttccgcgagcggaccgcgcggcgcgtcctggagctgcaccgcggacaggacgccgcggcccggctgctgcgcctctaccggcgccacgagcctcgcttccccgagctggccgcccttgcagacccccacgctcagctgctacagcgccgcctcgacttcctcgccaagcacattttgcactgtaaggccaagtacggccgccggtctgggacttagtgtcaccgggaggaaaagagagagatctggggctggggtatggatgatggggggaagggcggtcgcctctgccactgtcagggaccagccggccaacgcccacccgcaaaggtgtctaaaaacttcagcttttcacccacctgcccctttctttcaatcccacgctgtttcctttcaaagttctgggaggacgaactcaccgaggcgagaagtgtaacattctctccacccagcttataaaaggattctttactgtgccagcacggggattggatccgaagaaactggctactggggtttggcccccgagtggccgtccctgtgggagatgcaccccattcttgggccccccctcattccctttccgaaaaaggaaaacttgcgtttgagccgttgagctaattctgcaattttctaccaaacagagcgctggtggccccggagcagggctgtgacattggctggtggagcccccttcctgtgttctccctttgttccagcgccgcgatggtgagatcactgttccaagcagggggacggctcgcgataggacaaagagagcaggacctccagactctggggagccctgcagaccttgacaatttgcctgactcattcctgacctcttgtcattttggcctgaaggctacaaattcagggtcagctgtatgcactaagtcaaataatgaatttcttcctccctctcgcaaccgaccaaaattttgacaacgatgatgttcaccagaaggaaaaaaaaaaatcagttttatgcactttattttgttttgattttcattttttattaagaaaaaattttattttacagaatttaccttctctgtatatatgtgcataaagtgtggtgtaaatatactaaacaaacttatatttcaataaaagggagtttaaaatttataattt

SEQ ID NO: 11207 - DNA, 2840 bp, Homo sapiens
  source 1..2840: mol_type = unassigned DNA
gagaggttacttccggggcggcaccgagaagctgaaacggaagtggcgtacggcatgcgccggtggcgtgatggagcggcagcagcagcagcaacagcaactgcgaaacctgcgtgacttcctgttggtctacaatcggatgacagaactctgcttccagcgctgtgtgcccagcttgcaccaccgagctctggacgctgaggaggaggcctgtctgcacagctgtgctgggaagctgatccattccaaccaccgcctcatggccgcttacgtgcagctcatgcctgccctggtacagcgccgcatcgcagactacgaggctgcctcggctgtgccaggcgttgctgctgaacagcctggggtctctccatcaggcagctagccatacccaaccccaggaaggaaggccttggatggaccctcagattgaaggacccggtggaccttggggttggtgaatcctaaacagagagaattcgaggttgcctgaaagctgggtgtccttgctccttttcctggagccaatatacccagtttttactcagtttgatttatattctgggcaaggaagctttgcctactttattggcacaatccgttgttctgtcgtttagtgcatatctgctggcttcagccctggcagctgagaaattgttttctatatgtagaaggaaaacctgagcatttgcaggcatctggttaaagcagggtctgtgtgtacaattttaaaacgggtaatatgtcatgctcttagttcatcttcacaacaaaactatgagtaagcggtattagcctcacttaacagatgaggaagcaagattccagaaagtaccagaaggtcattttatacaacaggagattggttcctgcccagatgacagaaaatgggagctctgtctagttgtccttaagtctgactgacttcagtggctcataaccgtgagccaagtatttgttggttcataactgttgttttgtgaactatgtcttacatgtctagagttctgctggatctagggaaaggaggagctatcgaagtacaacggatcaaaaaaccacagggcttttgggcactgcctccttgggaagttagtggccacagaagagagatgaaacctgtaagaagtctggagtcttttggaacttcagccatttccccaggttgttactttcttagtatgtacagtcttctcaggatgagcagtaaaacctttgaacaaaggtctgtgtggttgtcttcacgggcaatcaggaagggagagagctggggaccatattctgcaatgcagccaaatccgaggaagagaaactgaagggagaagtagatggcaatggttatgataaaaagggataaaactaaatcttcgggacttctttaatgctacgttaatgtttcactgctcgtctagaaactcctaaatccagctttctatcatctgccccacattggtcccattgagtacattctgtgatttctaattccagcctctccattcttttctcattattgcctcccccgccccccaactttgtgtaatttacttctgtattcagcagcctggatagcatatcattccatcaccccattttcttgccaccattggccatctttttgtatcattccacttattctgtcttttccattccttcattcaaactgctagagaaaaacagttgtgtaatgaatgccactaaatattcaaggcctccaacctcagccaagtcctcacaccaacacgcagtcacaccaacacacacctttatgggttcctggtccatttccttctctaattaccatggcagttattttacacctctactgctgtccttaatcccataccccaccctcatcaggtgaccctgtttccttttttagagaaattgaagctcttagacattggtttccacagtaataattttaaaacttcttacaactacctacaaagcagatgttctatcctatctacagagcagaaaattgaaattctcaagtagcagacccggtattaaagtgcagatctgactttaaagtccatgttcattttacacagcaggctgcctcttaagatagtatttattgagcacacactttgtgtaggttctgattttggtagatgtcatgctttatattaatctttacaacaactataagtaagaggtattaacctcacttaacagatgaggaagcaagaatccagaatgtgccagaaggcacattctgcagatttcgtgcaaacatttatacacagcttcttttttttttttttgagacagagtctcgctctgtcacccaggctggagtgcagtggagcgatctaggctcactgcaacctccgccacccgggttcaagcagttctcctgcctcagcctctcgagtagctgggattacaggcatgcgccaccacgcccagctaattttgtttttgtattttaagtagagacggggtttcactgtattggtcaggctggtcttgaactcctgaccttgtgatccgcccgcctcggcctccaaaagtgctgggattacaggtgtgagccaccacggccggcctatacaaagtttcttattgagaaaagtggttccaatcatgttttttgccccctttagctgctatctcttgaacagaaaagtttgttaggaaggtaaaagttgctgactaggaccttacccacagggtggcactctgtccttgggaaatataaatgcaagtaaaacaggtttgaacttcttaacttccagaagataggaggatgggacctgtgatactgtgctgctggtgggaggacccttccacatcaacatttgtgtgtatccttgcaataaacttccattgtgaat

SEQ ID NO: 11208 - DNA, 595 bp, Homo sapiens
  source 1..595: mol_type = unassigned DNA
atgcgccggtggcgtgatggagcggcagcagcagcagcaacagcaactgcgaaacctgcgtgacttcctgttggtctacaatcggatgacagaactctgcttccagcgctgtgtgcccagcttgcaccaccgagctctggacgctgaggaggaggcctgtctgcacagctgtgctgggaagctgatccattccaaccaccgcctcatggccgcttacgtgcagctcatgcctgccctggtacagcgccgcatcgcagactacgaggctgcctcggctgtgccaggcgttgctgctgaacagcctggggtctctccatcaggcagctagccatacccaaccccaggaaggaaggccttggatggaccctcagattgaaggacccggtggaccttggggcgatcgccagctcgagtgcagattccttgctgtgaccgaggttcagagtgagctctgtcggtgtgtcagtttgcctcttcaggtgaggccccgcatctggcatcctggaactggcagttggagcctgagctatgggcaaggtcacttcgacagcagttgaatgcccagctcctcatggtcccggaggagaggagggta

SEQ ID NO: 11209 - DNA, 608 bp, Homo sapiens
  source 1..608: mol_type = unassigned DNA
ggtggcgtgatggagcggcagcagcagcagcaacagcaactgcgaaacctgcgtgacttcctgttggtctacaatcggatgacagaactctgcttccagcgctgtgtgcccagcttgcaccaccgagctctggacgctgaggaggaggcctgtctgcacagctgtgctgggaagctgatccattccaaccaccgcctcatggccgcttacgtgcagctcatgcctgccctggtacagcgccgcatcgcagactacgaggctgcctcggctgtgccaggcgttgctgctgaacagcctggggtctctccatcaggcagctagccatacccaaccccaggaaggaaggccttggatggaccctcagattgaaggacccggtggaccttgggagttctgctggatctagggaaaggaggagctatcgaagtacaacggatcaaaaaaccacagggcttttgggcactgcctccttgggaagttagtggccacagaagagagatgaaacctgtaagaagtctggagtcttttggaacttcagccatttccccaggttgttactttcttagtatgtacagtcttctcaggatgagcagtaaaacctttgaaca

SEQ ID NO: 11210 - DNA, 3089 bp, Homo sapiens
  source 1..3089: mol_type = unassigned DNA
acccgtagggagaggcgggttgcgggcggcggcggcggcggcggcggcggtggtggttgtggcgaggctgtgcggcagggcgcacgggacctgtgctgcagcggctctctcaggccgtgggtcgtcgctgcagctgccgggaaagaaggaaacgacgactccgggggcgaacttggcacacagggaggaagggaaaggatgcatggtcatggaggctatgattctgattttagtgatgatgaacgctgtggagaatccagcaaaaggaaaaaaaggacagttgaagatgacttactgctccaaaaaccatttcagaaagaaaaacatggaaaggtggcccataaacaagttgcagcagaattgctggatagggaagaagcaagaaatagaaggtttcatctcatagctatggatgcttatcaaagacatacaaagttcgtaaatgactatattttatactatggtggcaaaaaagaagacttcaagcgtttgggggaaaatgacaagacagacttggatgttatacgagaaaatcatagattcctatggaatgaggaggacgaaatggacatgacttgggagaagagacttgctaagaaatactatgataaattatttaaggaatactgcatagcagatctcagtaaatataaagaaaataagtttggatttaggtggcgagtagaaaaagaagtaatttcaggaaaaggtcaatttttctgtggaaataaatattgtgataaaaaagaaggcttaaagagttgggaagttaattttggttatattgagcatggtgagaagagaaatgcacttgttaaattaaggttatgccaagaatgttccattaaattaaatttccatcacaggagaaaagaaatcaagtcaaaaaaaagaaaagataaaaccaaaaaagactgtgaagagtcatcacataaaaaatccagattatcttctgcagaagaggcctccaagaaaaaagataaaggacattcatcttcaaagaaatctgaagattctctacttagaaactctgatgaggaagaaagtgcttcagaatctgaactttggaagggtccactaccagagacagatgaaaaatcacaggaagaagaatttgatgagtattttcaggatttgtttctatgagacgagagagagaagcctccgctccttaatgtgaaacttcatgaagttttaaacttcatgcaatttgaaattccatataagtttttatctgcaagttacagcttgtgtggtttgtctttggaaataaaaatccaggttctctcagaatgtcagaggctttggaagttcattagttcaattaaagactttcctgtcctttaaatatcttttcaattgcttatctacaattctgttttatttgtagctcctagaggatagagctggacagattccattgttcctacattttgtaggttttttttcactgccttcattatgtatcttctcttgccttcattattttattttattatttcttctttttctcttttttagagccaccaatactggatttgtttgtttttcatttttttcttttgtggaaacggagtcctcctgtgttgcccaggctggtattcaaactcctggccttatgcattcctcccaccctggcctcccagagtgctgggattacaggtgtgagccaccatgctctgccaattattttaaattactaggattaaagtatattatgtatgtctttaacttctttctttcccattgataaactggcacccttcttttaagtacctgctctcccattaccacctatttccagctgctttttgaggttttttgcttgcctgtctcttgcttccttcttaacctctaccacttaagagagtttgttataatcaaatttgacttcctagcctgtggataatttactattaagtaaattattaccacagggagccagtgaggtcccagtagtctaaaacagttcatgtgttcacaaaaattgcctccccggcagagattatgcagtaagataatttaactgaataatactatgtgcatgtatcttgcctcagatatactcatgcaaatatgaatatacctctgatatggtttggctctgtgtccccacccaaatctcatcttgaatgtgtactcccataattcccacattttataggagggatccagtgagagataatttgaatcaagggggcggtttcccccatattgttcttgtggtagtgaataagtctcacaagatctgatggttttatcaggggcttctgcttttgcatccttctcattttcttttgctgctgccatgtaagaagtgccttttgcctcccaccatgattctgaggctttcccagccatgtggaactgtaagtccaattaaacctctttttcttccccagtctctggtatgtctttatcagcagtgtgaaaatggactaatagaacttctatgcagaaatataaaatgtaacttcttaacataaggtcctagtcgcaagggtctatggaggtgcttcaggagatccaagcctttttagaatctgtgcaaacttctgtgtatgttttttggaggaaaagtccataaatttcaaattttcaaaaatcagattttcaaaaggatttattgatttctgaaaactagcaaagatctgcttttataaagagcaaatagatggatagatataggagaagatgcttgacttgatgaataagagaaaggacatatagaaaatgaactgaacataagcaagtattttattgaagatatactattttaaataacatttaaacacggaatgattggcaataaactgcaaaatgagtaatttggtatcattttaaaatggttattatcagagattttccttttattaaacagttattcattaattccacaaatatttatcaggcttctattatatgtgaggcactgagctgggcatggctgtaaaggaaccatctaggaagtaattatgcaatcatttctgaacctgtttcagaaaagtaaatcagtgttgggtttatcagtgtttaacattgtttgatagtcccctcacttcttgaataaattgttttttttcacctca

SEQ ID NO: 11211 - DNA, 1143 bp, Homo sapiens
  source 1..1143: mol_type = unassigned DNA
acccgtagggagaggcgggttgcgggcggcggcggcggcggcggcggcggtggtggttgtggcgaggctgtgcggcagggcgcacgggacctgtgctgcagcggctctctcaggccgtgggtcgtcgctgcagctgccgggaaagaaggaaacgacgactccgggggcgaacttggcacacagggaggaagggaaaggatgcatggtcatggaggctatgattctgattttagtgatgatgaacgctgtggagaatccagcaaaaggaaaaaaaggacagttgaagatgacttactgctccaaaaaccatttcagaaagaaaaacatggaaaggtggcccataaacaagttgcagcagaattgctggatagggaagaagcaagaaatagaaggtttcatctcatagctatggatgcttatcaaagacatacaaagttcgtaaatgactatattttatactatggtggcaaaaaagaagacttcaagcgtttgggggaaaatgacaagacagacttggatgttatacgagaaaatcatagattcctatggaatgaggaggacgaaatggacatgacttgggagaagagacttgctaagaaatactatgataaattatttaaggaatactgcatagcagatctcagtaaatataaagaaaataagtttggatttaggtggcgagtagaaaaagaagtaatttcaggaaaaggtcaatttttctgtggaaataaatattgtgataaaaaagaaggcttaaagagttgggaagttaattttggttatattgagcatggtgagaagagaaatgcacttgttaaattaaggttatgccaagaatgttccattaaattaaatttccatcacaggagaaaagaaatcaagtcaaaaaaaagaaaagataaaaccaaaaaagactgtgaagagtcatcacataaaaaatccagattatcttctgcagaagaggcctccaagaaaaaagataaaggacattcatcttcaaagaaatctgaagattctctacttagaagaatgttggaggaactgcagatgtttacctgggagaagagtgaaaggatgggagggaagagactaataatcattattggagaggagttgtctgctaatgtaactacttttaaaatg

SEQ ID NO: 11212 - DNA, 1140 bp, Homo sapiens
  source 1..1140: mol_type = unassigned DNA
acccgtagggagaggcgggttgcgggcggcggcggcggcggcggcggcggtggtggttgtggcgaggctgtgcggcagggcgcacgggacctgtgctgcagcggctctctcaggccgtgggtcgtcgctgcagctgccgggaaagaaggaaacgacgactccgggggcgaacttggcacacagggaggaagggaaaggatgcatggtcatggaggctatgattctgattttagtgatgatgaacgctgtggagaatccagcaaaaggaaaaaaaggacagttgaagatgacttactgctccaaaaaccatttcagaaagaaaaacatggaaaggtggcccataaacaagttgcagcagaattgctggatagggaagaagcaagaaatagaaggtttcatctcatagctatggatgcttatcaaagacatacaaagttcgtaaatgactatattttatactatggtggcaaaaaagaagacttcaagcgtttgggggaaaatgacaagacagacttggatgttatacgagaaaatcatagattcctatggaatgaggaggacgaaatggacatgacttgggagaagagacttgctaagaaatactatgataaattatttaaggaatactgcatagcagatctcagtaaatataaagaaaataagtttggatttaggtggcgagtagaaaaagaagtaatttcaggaaaaggtcaatttttctgtggaaataaatattgtgataaaaaagaaggcttaaagagttgggaagttaattttggttatattgagcatggtgagaagagaaatgcacttgttaaattaaggttatgccaagaatgttccattaaattaaatttccatcacaggagaaaagaaatcaagtcaaaaaaaagaaaagataaaaccaaaaaagactgtgaagagtcatcacataaaaaatccagattatcttctgcagaagaggcctccaagaaaaaagataaaggacattcatcttcaaagaaatctgaagattctctacttaatggagtcatgctctttcacccaggttggagtgcagtggcgcgatctcagctgactgcagcccctgcttcccaggttcaaactaataatcattattggagaggagttgtctgctaa

SEQ ID NO: 11213 - DNA, 1077 bp, Homo sapiens
  source 1..1077: mol_type = unassigned DNA
acccgtagggagaggcgggttgcgggcggcggcggcggcggcggcggcggtggtggttgtggcgaggctgtgcggcagggcgcacgggacctgtgctgcagcggctctctcaggccgtgggtcgtcgctgcagctgccgggaaagaaggaaacgacgactccgggggcgaacttggcacacagggaggaagggaaaggatgcatggtcatggaggctatgattctgattttagtgatgatgaacgctgtggagaatccagcaaaaggaaaaaaaggacagttgaagatgacttactgctccaaaaaccatttcagaaagaaaaacatggaaaggtggcccataaacaagttgcagcagaattgctggatagggaagaagcaagaaatagaaggtttcatctcatagctatggatgcttatcaaagacatacaaagttcgtaaatgactatattttatactatggtggcaaaaaagaagacttcaagcgtttgggggaaaatgacaagacagacttggatgttatacgagaaaatcatagattcctatggaatgaggaggacgaaatggacatgacttgggagaagagacttgctaagaaatactatgataaattatttaaggaatactgcatagcagatctcagtaaatataaagaaaataagtttggatttaggtggcgagtagaaaaagaagtaatttcaggaaaaggtcaatttttctgtggaaataaatattgtgataaaaaagaaggcttaaagagttgggaagttaattttggttatattgagcatggtgagaagagaaatgcacttgttaaattaaggttatgccaagaatgttccattaaattaaatttccatcacaggagaaaagaaatcaagtcaaaaaaaagaaaagataaaaccaaaaaagactgtgaagagtcatcacataaaaaatccagattatcttctgcagaagaggcctccaagaaaaaagataaaggacattcatcttcaaagaaatctgaagattctctacttaagacctacttcgttggattattatcagaatcaaatgagaaaacatacatgtaa

SEQ ID NO: 11214 - DNA, 1392 bp, Homo sapiens
  source 1..1392: mol_type = unassigned DNA
gtagggagaggcgggttgcgggcggcggcggcggcggcggcggcggtggtggttgtggcgaggctgtgcggcagggcgcacgggacctgtgctgcagcggctctctcaggccgtgggtcgtcgctgcagctgccgggaaagaaggaaacgacgactccgggggcgaacttggcacacagggaggaagggaaaggatgcatggtcatggaggctatgattctgattttagtgatgatgaacgctgtggagaatccagcaaaaggaaaaaaaggacagttgaagatgacttactgctccaaaaaccatttcagaaagaaaaacatggaaaggtggcccataaacaagttgcagcagaattgctggatagggaagaagcaagaaatagaaggtttcatctcatagctatggatgcttatcaaagacatacaaagttcgtaaatgactatattttatactatggtggcaaaaaagaagacttcaagcgtttgggggaaaatgacaagacagacttggatgttatacgagaaaatcatagattcctatggaatgaggaggacgaaatggacatgacttgggagaagagacttgctaagaaatactatgataaattatttaaggaatactgcatagcagatctcagtaaatataaagaaaataagtttggatttaggtggcgagtagaaaaagaagtaatttcaggaaaaggtcaatttttctgtggaaataaatattgtgataaaaaagaaggcttaaagagttgggaagttaattttggttatattgagcatggtgagaagagaaatgcacttgttaaattaaggttatgccaagaatgttccattaaattaaatttccatcacaggagaaaagaaatcaagtcaaaaaaaagaaaagataaaaccaaaaaagactgtgaagagtcatcacataaaaaatccagattatcttctgcagaagaggcctccaagaaaaaagataaaggacattcatcttcaaagaaatctgaagattctctacttaactaataatcattattggagaggagttgtctgctaatgtaactactttgaaactctgatgaggaagaaagtgcttcagaatctgaactttggaagggtccactaccagagacagatgaaaaatcacaggaagaagaatttgatgagtattttcaggatttgtttctatgagacgagagagagaagcctccgctccttaatgtgaaacttcatgaagttttaaacttcatgcaatttgaaattccatataagtttttatctgcaagttacagcttgtgtggtttgtctttggaaataaaaatccaggttctctcagaatgtcagaggctttggaagttcattagttcaattaaagactttcctgtcctttaaa

SEQ ID NO: 11215 - DNA, 4333 bp, Homo sapiens
  source 1..4333: mol_type = unassigned DNA
acttccggtggagggccgcctctgagcgggcggcgggccgacggcgagcgcgggcggcggcggtgacggaggcgccgctgccagggggcgtgcggcagcgcggcggcggcggcggcggcggcggcggcggaggcggcggcggcggcggcggcggcggcggctgggcctcgagcgcccgcagcccacctctcgggggcgggctcccggcgctagcagggctgaagagaagatggaggagctggtggtggaagtgcggggctccaatggcgctttctacaaggcatttgtaaaggatgttcatgaagattcaataacagttgcatttgaaaacaactggcagcctgataggcagattccatttcatgatgtcagattcccacctcctgtaggttataataaagatataaatgaaagtgatgaagttgaggtgtattccagagcaaatgaaaaagagccttgctgttggtggttagctaaagtgaggatgataaagggtgagttttatgtgatagaatatgcagcatgtgatgcaacttacaatgaaattgtcacaattgaacgtctaagatctgttaatcccaacaaacctgccacaaaagatactttccataagatcaagctggatgtgccagaagacttacggcaaatgtgtgccaaagaggcggcacataaggattttaaaaaggcagttggtgccttttctgtaacttatgatccagaaaattatcagcttgtcattttgtccatcaatgaagtcacctcaaagcgagcacatatgctgattgacatgcactttcggagtctgcgcactaagttgtctctgataatgagaaatgaagaagctagtaagcagctggagagttcaaggcagcttgcctcgagatttcatgaacagtttatcgtaagagaagatctgatgggtctagctattggtactcatggtgctaatattcagcaagctagaaaagtacctggggtcactgctattgatctagatgaagatacctgcacatttcatatttatggagaggatcaggatgcagtgaaaaaagctagaagctttctcgaatttgctgaagatgtaatacaagttccaaggaacttagtaggcaaagtaataggaaaaaatggaaagctgattcaggagattgtggacaagtcaggagttgtgagggtgaggattgaggctgaaaatgagaaaaatgttccacaagaagaggaaattatgccaccaaattcccttccttccaataattcaagggttggacctaatgccccagaagaaaaaaaacatttagatataaaggaaaacagcacccatttttctcaacctaacagtacaaaagtccagaggggtatggtaccatttgtttttgtgggaacaaaggacagcatcgctaatgccactgttcttttggattatcacctgaactatttaaaggaagtagaccagttgcgtttggagagattacaaattgatgagcagttgcgacagattggagctagttctagaccaccaccaaatcgtacagataaggaaaaaagctatgtgactgatgatggtcaaggaatgggtcgaggtagtagaccttacagaaatagggggcacggcagacgcggtcctggatatacttcaggaactaattctgaagcatcaaatgcttctgaaacagaatctgaccacagagacgaactcagtgattggtcattagctccaacagaggaagagagggagagcttcctgcgcagaggagacggacggcggcgtggagggggaggaagaggacaaggaggaagaggacgtggaggaggcttcaaaggaaacgacgatcactcccgaacagataatcgtccacgtaatccaagagaggctaaaggaagaacaacagatggatcccttcagatcagagttgactgcaataatgaaaggagtgtccacactaaaacattacagaatacctccagtgaaggtagtcggctgcgcacgggtaaagatcgtaaccagaagaaagagaagccagacagcgtggatggtcagcaaccactcgtgaatggagtaccctaaactgcataattctgaagttatatttcctataccatttccgtaattcttattccatattagaaaactttgttaggccaaagacaaatagtaggcaagatggcacagggcatgaaatgaacacaaattatgctaagaattttttattttttggtattggccataagcaacaattttcagatttgcacaaaaagataccttaaaatttgaaacattgcttttaaaactacttagcacttcagggcagattttagttttattttctaaagtactgagcagtgatattctttgttaatttggaccattttcctgcattgggtgatcattcaccagtacattctcagtttttcttaatatatagcatttatggtaatcatattagacttctgttttcaatctcgtatagaagtcttcatgaaatgctatgtcatttcatgtcctgtgtcagtttatgttttggtccacttttccagtattttagtggaccctgaaatgtgtgtgatgtgacatttgtcattttcattagcaaaaaaagttgtatgatctgtgccttttttatatcttggcaggtaggaatattatatttggatgcagagttcagggaagataagttggaaacactaaatgttaaagatgtagcaaaccctgtcaaacattagtactttatagaagaatgcatgctttccatatttttttccttacataaacatcaggttaggcagtataaagaataggacttgtttttgtttttgttttgttgcactgaagtttgataaatagtgttattgagagagatgtgtaatttttctgtatagacaggagaagaaagaactatcttcatctgagagaggctaaaatgttttcagctaggaacaaatcttcctggtcgaaagttagtaggatatgcctgctctttggcctgatgaccaattttaacttagagctttttttttttaattttgtctgccccaagttttgtgaaatttttcatattttaatttcaagcttattttggagagataggaaggtcatttccatgtatgcataataatcctgcaaagtacaggtactttgtctaagaaacattggaagcaggttaaatgttttgtaaactttgaaatatatggtctaatgtttaagcagaattggaaaagactaagatcggttaacaaataacaacttttttttctttttttcttttgttttttgaagtgttggggtttggttttgttttttgagtcttttttttttaagtgaaatttattgaggaaaaatatgtgaaggaccttcactctaagatgttatatttttcttaaaaagtaactcctagtaggggtaccactgaatctgtacagagccgtaaaaactgaagttctgcctctgatgtattttgtgagtttgtttctttgaattttcattttacagttacttttccttgcatacaaacaagcatataaaatggcaacaaactgcacatgatttcacaaatattaaaaagtcttttaaaaagtattgccaaacattaatgttgatttctagttatttattctgggaatgtatagtatttgaaaacagaaattggtaccttgcacacatcatctgtaagctgtttggttttaaaatactgtagataattaaccaaggtagaatgaccttgtaatgtaactgctcttgggcaatattctctgtacatattagcgacaacagattggattttatgttgacatttgtttggttatagtgcaatatattttgtatgcaagcagtttcaataaagtttgatcttcctctgctaaattgatgttgatgcaatccttacaaatgattgcttttaaaattttaagctaggaaaagaaatctatagaaagtgttctgttacaaaatgtaactgttaccattggaaatttcacgtcataggaagttagcctttatctaccaactttcaagaacttgtttaataaagcgaaaaactcaaccaaatggtacaaaaccacagtgtaccattaaaatatgcactaagtctcttttttacaaaggctgtattcagcaaggcgctaacttgcttaaatgtgaattactaacttctaaaactgtactttgattcacatgttttcaaatggagttggagttcattcatattacaatatttgtgtgctaaacgtgtatgtttttcagttcaaagtcatgatgtttttaaaatcttattaaagtttcaaaaatctgaagattgtttatctagatgtaaatttttattaaaaagttgcacttatg

SEQ ID NO: 11216 - DNA, 1295 bp, Homo sapiens
  source 1..1295: mol_type = unassigned DNA
ggcggcggcggcggcggcggcggcggcggaggcggcggcggcggcggcggcggcggcggctgggcctcgagcgcccgcagcccacctctcgggggcgggctcccggcgctagcagggctgaagagaagatggaggagctggtggtggaagtgcggggctccaatggcgctttctacaaggcatttgtaaaggatgttcatgaagattcaataacagttgcatttgaaaacaactggcagcctgataggcagattccatttcatgatgtcagattcccacctcctgtaggttataataaagatataaatgaaagtgatgaagttgaggtgtattccagagcaaatgaaaaagagccttgctgttggtggttagctaaagtgaggatgataaagggtgagttttatgtgatagaatatgcagcatgtgatgcaacttacaatgaaattgtcacaattgaacgtctaagatctgttaatcccaacaaacctgccacaaaagatactttccataagatcaagctggatgtgccagaagacttacggcaaatgtgtgccaaagaggcggcacataaggattttaaaaaggcagttggtgccttttctgtaacttatgatccagaaaattatcagcttgtcattttgtccatcaatgaagtcacctcaaagcgagcacatatgctgattgacatgcactttcggagtctgcgcactaagttgtctctgataatgagaaatgaagaagctagtaagcagctggagagttcaaggcagcttgcctcgagatttcatgaacagtttatcgtaagagaagatctgatgggtctagctattggtactcatggtgctaatattcagcaagctagaaaagtacctggggtcactgctattgatctagatgaagatacctgcacatttcatatttatggagaggatcaggatgcagtgaaaaaagctagaagctttctcgaatttgctgaagatgtaatacaagttccaaggaacttagtagggttgaagatctgaacataggttacttaaatctaaaaagtcccaaagctagaagaaacttcagatgtctctgggactttctgcaaagtcaatagtaattctccattttgacttgagtagtgttttatcaccatcaccatcgtgagtatcagcaaatatttaggagctcttcaccaatactcctaaatgctgcagatatctttagtagaacatatcaaaaccaggtgcagttttatcaagaaagctacatatgtttttaatttgtaaataaaattgggacatactgcc

SEQ ID NO: 11217 - DNA, 1774 bp, Homo sapiens
  source 1..1774: mol_type = unassigned DNA
atggaggagctggtggtggaagtgcggggctccaatggcgctttctacaaggcatttgtaaaggatgttcatgaagattcaataacagttgcatttgaaaacaactggcagcctgataggcagattccatttcatgatgtcagattcccacctcctgtaggttataataaagatataaatgaaagtgatgaagttgaggtgtattccagagcaaatgaaaaagagccttgctgttggtggttagctaaagtgaggatgataaagggtgagttttatgtgatagaatatgcagcatgtgatgcaacttacaatgaaattgtcacaattgaacgtctaagatctgttaatcccaacaaacctgccacaaaagatactttccataagatcaagctggatgtgccagaagacttacggcaaatgtgtgccaaagaggcggcacataaggattttaaaaaggcagttggtgccttttctgtaacttatgatccagaaaattatcagcttgtcattttgtccatcaatgaagtcacctcaaagcgagcacatatgctgattgacatgcactttcggagtctgcgcactaagttgtctctgataatgagaaatgaagaagctagtaagcagctggagagttcaaggcagcttgcctcgagatttcatgaacagtttatcgtaagagaagatctgatgggtctagctattggtactcatggtgctaatattcagcaagctagaaaagtacctggggtcactgctattgatctagatgaagatacctgcacatttcatatttatggagaggatcaggatgcagtgaaaaaagctagaagctttctcgaatttgctgaagatgtaatacaagttccaaggaacttagtaggcaaagtaataggaaaaaatggaaagctgattcaggagattgtggacaagtcaggagttgtgagggtgaggattgaggctgaaaatgagaaaaatgttccacaagaagaggaaattatgccaccaaattcccttccttccaataattcaagggttggacctaatgccccagaagaaaaaaaacatttagatataaaggaaaacagcacccatttttctcaacctaacagtacaaaagtccagagggtgttagtggcttcatcagttgtagcaggggaatcccagaaacctgaactcaaggcttggcagggtatggtaccatttgtttttgtgggaacaaaggacagcatcgctaatgccactgttcttttggattatcacctgaactatttaaaggaagtagaccagttgcgtttggagagattacaaattgatgagcagttgcgacagattggagctagttctagaccaccaccaaatcgtacagataaggaaaaaagctatgtgactgatgatggtcaaggaatgggtcgaggtagtagaccttacagaaatagggggcacggcagacgcggtcctggatatacttcagctccaacagaggaagagagggagagcttcctgcgcagaggagacggacggcggcgtggagggggaggaagaggacaaggaggaagaggacgtggaggaggcttcaaaggaaacgacgatcactcccgaacagataatcgtccacgtaatccaagagaggctaaaggaagaacaacagatggatcccttcagaatacctccagtgaaggtagtcggctgcgcacgggtaaagatcgtaaccagaagaaagagaagccagacagcgtggatggtcagcaaccactcgtgaatggagtaccctaaa

SEQ ID NO: 11218 - DNA, 4125 bp, Homo sapiens
  source 1..4125: mol_type = unassigned DNA
acttccggtggagggccgcctctgagcgggcggcgggccgacggcgagcgcgggcggcggcggtgacggaggcgccgctgccagggggcgtgcggcagcgcggcggcggcggcggcggcggcggcggcggaggcggcggcggcggcggcggcggcggcggctgggcctcgagcgcccgcagcccacctctcgggggcgggctcccggcgctagcagggctgaagagaagatggaggagctggtggtggaagtgcggggctccaatggcgctttctacaaggcatttgtaaaggatgttcatgaagattcaataacagttgcatttgaaaacaactggcagcctgataggcagattccatttcatgatgtcagattcccacctcctgtaggttataataaagatataaatgaaagtgatgaagttgaggtgtattccagagcaaatgaaaaagagccttgctgttggtggttagctaaagtgaggatgataaagggtgagttttatgtgatagaatatgcagcatgtgatgcaacttacaatgaaattgtcacaattgaacgtctaagatctgttaatcccaacaaacctgccacaaaagatactttccataagatcaagctggatgtgccagaagacttacggcaaatgtgtgccaaagaggcggcacataaggattttaaaaaggcagttggtgccttttctgtaacttatgatccagaaaattatcagcttgtcattttgtccatcaatgaagtcacctcaaagcgagcacatatgctgattgacatgcactttcggagtctgcgcactaagttgtctctgataatgagaaatgaagaagctagtaagcagctggagagttcaaggcagcttgcctcgagatttcatgaacagtttatcgtaagagaagatctgatgggtctagctattggtactcatggtgctaatattcagcaagctagaaaagtacctggggtcactgctattgatctagatgaagatacctgcacatttcatatttatggagaggatcaggatgcagtgaaaaaagctagaagctttctcgaatttgctgaagatgtaatacaagttccaaggaacttagtaggcaaagtaataggaaaaaatggaaagctgattcaggagattgtggacaagtcaggagttgtgagggtgaggattgaggctgaaaatgagaaaaatgttccacaagaagaggaaattatgccaccaaattcccttccttccaataattcaagggttggacctaatgccccagaagaaaaaaaacatttagatataaaggaaaacagcacccatttttctcaacctaacagtacaaaagtccagagggtgttagtggcttcatcagttgtagcaggggaatcccagaaacctgaactcaaggcttggcagggtatggtaccatttgtttttgtgggaacaaaggacagcatcgctaatgccactgttcttttggattatcacctgaactatttaaagctccaacagaggaagagagggagagcttcctgcgcagaggagacggacggcggcgtggagggggaggaagaggacaaggaggaagaggacgtggaggaggcttcaaaggaaacgacgatcactcccgaacagataatcgtccacgtaatccaagagaggctaaaggaagaacaacagatggatcccttcagatcagagttgactgcaataatgaaaggagtgtccacactaaaacattacagaatacctccagtgaaggtagtcggctgcgcacgggtaaagatcgtaaccagaagaaagagaagccagacagcgtggatggtcagcaaccactcgtgaatggagtaccctaaactgcataattctgaagttatatttcctataccatttccgtaattcttattccatattagaaaactttgttaggccaaagacaaatagtaggcaagatggcacagggcatgaaatgaacacaaattatgctaagaattttttattttttggtattggccataagcaacaattttcagatttgcacaaaaagataccttaaaatttgaaacattgcttttaaaactacttagcacttcagggcagattttagttttattttctaaagtactgagcagtgatattctttgttaatttggaccattttcctgcattgggtgatcattcaccagtacattctcagtttttcttaatatatagcatttatggtaatcatattagacttctgttttcaatctcgtatagaagtcttcatgaaatgctatgtcatttcatgtcctgtgtcagtttatgttttggtccacttttccagtattttagtggaccctgaaatgtgtgtgatgtgacatttgtcattttcattagcaaaaaaagttgtatgatctgtgccttttttatatcttggcaggtaggaatattatatttggatgcagagttcagggaagataagttggaaacactaaatgttaaagatgtagcaaaccctgtcaaacattagtactttatagaagaatgcatgctttccatatttttttccttacataaacatcaggttaggcagtataaagaataggacttgtttttgtttttgttttgttgcactgaagtttgataaatagtgttattgagagagatgtgtaatttttctgtatagacaggagaagaaagaactatcttcatctgagagaggctaaaatgttttcagctaggaacaaatcttcctggtcgaaagttagtaggatatgcctgctctttggcctgatgaccaattttaacttagagctttttttttttaattttgtctgccccaagttttgtgaaatttttcatattttaatttcaagcttattttggagagataggaaggtcatttccatgtatgcataataatcctgcaaagtacaggtactttgtctaagaaacattggaagcaggttaaatgttttgtaaactttgaaatatatggtctaatgtttaagcagaattggaaaagactaagatcggttaacaaataacaacttttttttctttttttcttttgttttttgaagtgttggggtttggttttgttttttgagtcttttttttttaagtgaaatttattgaggaaaaatatgtgaaggaccttcactctaagatgttatatttttcttaaaaagtaactcctagtaggggtaccactgaatctgtacagagccgtaaaaactgaagttctgcctctgatgtattttgtgagtttgtttctttgaattttcattttacagttacttttccttgcatacaaacaagcatataaaatggcaacaaactgcacatgatttcacaaatattaaaaagtcttttaaaaagtattgccaaacattaatgttgatttctagttatttattctgggaatgtatagtatttgaaaacagaaattggtaccttgcacacatcatctgtaagctgtttggttttaaaatactgtagataattaaccaaggtagaatgaccttgtaatgtaactgctcttgggcaatattctctgtacatattagcgacaacagattggattttatgttgacatttgtttggttatagtgcaatatattttgtatgcaagcagtttcaataaagtttgatcttcctctgctaaattgatgttgatgcaatccttacaaatgattgcttttaaaattttaagctaggaaaagaaatctatagaaagtgttctgttacaaaatgtaactgttaccattggaaatttcacgtcataggaagttagcctttatctaccaactttcaagaacttgtttaataaagcgaaaaactcaaccaaatggtacaaaaccacagtgtaccattaaaatatgcactaagtctcttttttacaaaggctgtattcagcaaggcgctaacttgcttaaatgtgaattactaacttctaaaactgtactttgattcacatgttttcaaatggagttggagttcattcatattacaatatttgtgtgctaaacgtgtatgtttttcagttcaaagtcatgatgtttttaaaatcttattaaagtttcaaaaatctgaagattgtttatctagatgtaaatttttattaaaaagttgcacttatg

SEQ ID NO: 11219 - DNA, 4308 bp, Homo sapiens
  source 1..4308: mol_type = unassigned DNA
ggcggcggcggcggcggcggcggcggcggaggcggcggcggcggcggcggcggcggcggctgggcctcgagcgcccgcagcccacctctcgggggcgggctcccggcgctagcagggctgaagagaagatggaggagctggtggtggaagtgcggggctccaatggcgctttctacaaggcatttgtaaaggatgttcatgaagattcaataacagttgcatttgaaaacaactggcagcctgataggcagattccatttcatgatgtcagattcccacctcctgtaggttataataaagatataaatgaaagtgatgaagttgaggtgtattccagagcaaatgaaaaagagccttgctgttggtggttagctaaagtgaggatgataaagggtgagttttatgtgatagaatatgcagcatgtgatgcaacttacaatgaaattgtcacaattgaacgtctaagatctgttaatcccaacaaacctgccacaaaagatactttccataagatcaagctggatgtgccagaagacttacggcaaatgtgtgccaaagaggcggcacataaggattttaaaaaggcagttggtgccttttctgtaacttatgatccagaaaattatcagcttgtcattttgtccatcaatgaagtcacctcaaagcgagcacatatgctgattgacatgcactttcggagtctgcgcactaagttgtctctgataatgagaaatgaagaagctagtaagcagctggagagttcaaggcagcttgcctcgagatttcatgaacagtttatcgtaagagaagatctgatgggtctagctattggtactcatggtgctaatattcagcaagctagaaaagtacctggggtcactgctattgatctagatgaagatacctgcacatttcatatttatggagaggatcaggatgcagtgaaaaaagctagaagctttctcgaatttgctgaagatgtaatacaagttccaaggaacttagtaggcaaagtaataggaaaaaatggaaagctgattcaggagattgtggacaagtcaggagttgtgagggtgaggattgaggctgaaaatgagaaaaatgttccacaagaagaggaaattatgccaccaaattcccttccttccaataattcaagggttggacctaatgccccagaagaaaaaaaacatttagatataaaggaaaacagcacccatttttctcaacctaacagtacaaaagtccagagggtgttagtggcttcatcagttgtagcaggggaatcccagaaacctgaactcaaggcttggcagggtatggtaccatttgtttttgtgggaacaaaggacagcatcgctaatgccactgttcttttggattatcacctgaactatttaaaggaagtagaccagttgcgtttggagagattacaaattgatgagcagttgcgacagattggagctagttctagaccaccaccaaatcgtacagataaggaaaaaagctatgtgactgatgatggtcaaggaatgggtcgaggtagtagaccttacagaaatagggggcacggcagacgcggtcctggatatacttcaggaactaattctgaagcatcaaatgcttctgaaacagaatctgaccacagagacgaactcagtgattggtcattagctccaacagaggaagagagggagagcttcctgcgcagaggagacggacggcggcgtggagggggaggaagaggacaaggaggaagaggacgtggaggaggcttcaaaggaaacgacgatcactcccgaacagataatcgtccacgtaatccaagagaggctaaaggaagaacaacagatggatcccttcagatcagagttgactgcaataatgaaaggagtgtccacactaaaacattacagaatacctccagtgaaggtagtcggctgcgcacgggtaaagatcgtaaccagaagaaagagaagccagacagcgtggatggtcagcaaccactcgtgaatggagtaccctaaactgcataattctgaagttatatttcctataccatttccgtaattcttattccatattagaaaactttgttaggccaaagacaaatagtaggcaagatggcacagggcatgaaatgaacacaaattatgctaagaattttttattttttggtattggccataagcaacaattttcagatttgcacaaaaagataccttaaaatttgaaacattgcttttaaaactacttagcacttcagggcagattttagttttattttctaaagtactgagcagtgatattctttgttaatttggaccattttcctgcattgggtgatcattcaccagtacattctcagtttttcttaatatatagcatttatggtaatcatattagacttctgttttcaatctcgtatagaagtcttcatgaaatgctatgtcatttcatgtcctgtgtcagtttatgttttggtccacttttccagtattttagtggaccctgaaatgtgtgtgatgtgacatttgtcattttcattagcaaaaaaagttgtatgatctgtgccttttttatatcttggcaggtaggaatattatatttggatgcagagttcagggaagataagttggaaacactaaatgttaaagatgtagcaaaccctgtcaaacattagtactttatagaagaatgcatgctttccatatttttttccttacataaacatcaggttaggcagtataaagaataggacttgtttttgtttttgttttgttgcactgaagtttgataaatagtgttattgagagagatgtgtaatttttctgtatagacaggagaagaaagaactatcttcatctgagagaggctaaaatgttttcagctaggaacaaatcttcctggtcgaaagttagtaggatatgcctgctctttggcctgatgaccaattttaacttagagctttttttttttaattttgtctgccccaagttttgtgaaatttttcatattttaatttcaagcttattttggagagataggaaggtcatttccatgtatgcataataatcctgcaaagtacaggtactttgtctaagaaacattggaagcaggttaaatgttttgtaaactttgaaatatatggtctaatgtttaagcagaattggaaaagactaagatcggttaacaaataacaacttttttttctttttttcttttgttttttgaagtgttggggtttggttttgttttttgagtcttttttttttaagtgaaatttattgaggaaaaatatgtgaaggaccttcactctaagatgttatatttttcttaaaaagtaactcctagtaggggtaccactgaatctgtacagagccgtaaaaactgaagttctgcctctgatgtattttgtgagtttgtttctttgaattttcattttacagttacttttccttgcatacaaacaagcatataaaatggcaacaaactgcacatgatttcacaaatattaaaaagtcttttaaaaagtattgccaaacattaatgttgatttctagttatttattctgggaatgtatagtatttgaaaacagaaattggtaccttgcacacatcatctgtaagctgtttggttttaaaatactgtagataattaaccaaggtagaatgaccttgtaatgtaactgctcttgggcaatattctctgtacatattagcgacaacagattggattttatgttgacatttgtttggttatagtgcaatatattttgtatgcaagcagtttcaataaagtttgatcttcctctgctaaattgatgttgatgcaatccttacaaatgattgcttttaaaattttaagctaggaaaagaaatctatagaaagtgttctgttacaaaatgtaactgttaccattggaaatttcacgtcataggaagttagcctttatctaccaactttcaagaacttgtttaataaagcgaaaaactcaaccaaatggtacaaaaccacagtgtaccattaaaatatgcactaagtctcttttttacaaaggctgtattcagcaaggcgctaacttgcttaaatgtgaattactaacttctaaaactgtactttgattcacatgttttcaaatggagttggagttcattcatattacaatatttgtgtgctaaacgtgtatgtttttcagttcaaagtcatgatgtttttaaaatcttattaaagtttcaaaaatctgaagattgtttatctagatgtaaatttttattaaaaagttgcacttatgaaaaagcaaaaaa

SEQ ID NO: 11220 - DNA, 3437 bp, Homo sapiens
  source 1..3437: mol_type = unassigned DNA
gggccgcctctgagcgggcggcgggccgacggcgagcgcgggcggcggcggtgacggaggcgccgctgccagggggcgtgcggcagcgcggcggcggcggcggcggcggcggcggcggaggcggcggcggcggcggcggcggcggcggctgggcctcgagcgcccgcagcccacctctcgggggcgggctcccggcgctagcagggctgaagagaagatggaggagctggtggtggaagtgcggggctccaatggcgctttctacaaggcatttgtaaaggatgttcatgaagattcaataacagttgcatttgaaaacaactggcagcctgataggcagattccatttcatgatgtcagattcccacctcctgtaggttataataaagatataaatgaaagtgatgaagttgaggtgtattccagagcaaatgaaaaagagccttgctgttggtggttagctaaagtgaggatgataaagggtgagttttatgtgatagaatatgcagcatgtgatgcaacttacaatgaaattgtcacaattgaacgtctaagatctgttaatcccaacaaacctgccacaaaagatactttccataagatcaagctggatgtgccagaagacttacggcaaatgtgtgccaaagaggcggcacataaggattttaaaaaggcagttggtgccttttctgtaacttatgatccagaaaattatcagcttgtcattttgtccatcaatgaagtcacctcaaagcgagcacatatgctgattgacatgcactttcggagtctgcgcactaagttgtctctgataatgagaaatgaagaagctagtaagcagctggagagttcaaggcagcttgcctcgagatttcatgaacagtttatcgtaagagaagatctgatgggtctagctattggtactcatggtgctaatattcagcaagctagaaaagtacctggggtcactgctattgatctagatgaagatacctgcacatttcatatttatggagaggatcaggatgcagtgaaaaaagctagaagctttctcgaatttgctgaagatgtaatacaagttccaaggaacttagtaggcaaagtaataggaaaaaatggaaagctgattcaggagattgtggacaagtcaggagttgtgagggtgaggattgaggctgaaaatgagaaaaatgttccacaagaagaggaaattatgccaccaaattcccttccttccaataattcaagggttggacctaatgccccagaagaaaaaaaacatttagatataaaggaaaacagcacccatttttctcaacctaacagtacaaaagtccagaggggtatggtaccatttgtttttgtgggaacaaaggacagcatcgctaatgccactgttcttttggattatcacctgaactatttaaaggaagtagaccagttgcgtttggagagattacaaattgatgagcagttgcgacagattggagctagttctagaccaccaccaaatcgtacagataaggaaaaaagctatgtgactgatgatggtcaaggaatgggtcgaggtagtagaccttacagaaatagggggcacggcagacgcggtcctggatatacttcagaatctgaccacagagacgaactcagtgattggtcattagctccaacagaggaagagagggagagcttcctgcgcagaggagacggacggcggcgtggagggggaggaagaggacaaggaggaagaggacgtggaggaggcttcaaaggaaacgacgatcactcccgaacagataatcgtccacgtaatccaagagaggctaaaggaagaacaacagatggatcccttcagaatacctccagtgaaggtagtcggctgcgcacgggtaaagatcgtaaccagaagaaagagaagccagacagcgtggatggtcagcaaccactcgtgaatggagtaccctaaactgcataattctgaagttatatttcctataccatttccgtaattcttattccatattagaaaactttgttaggccaaagacaaatagtaggcaagatggcacagggcatgaaatgaacacaaattatgctaagaattttttattttttggtattggccataagcaacaattttcagatttgcacaaaaagataccttaaaatttgaaacattgcttttaaaactacttagcacttcagggcagattttagttttattttctaaagtactgagcagtgatattctttgttaatttggaccattttcctgcattgggtgatcattcaccagtacattctcagtttttcttaatatatagcatttatggtaatcatattagacttctgttttcaatctcgtatagaagtcttcatgaaatgctatgtcatttcatgtcctgtgtcagtttatgttttggtccacttttccagtattttagtggaccctgaaatgtgtgtgatgtgacatttgtcattttcattagcaaaaaaagttgtatgatctgtgccttttttatatcttggcaggtaggaatattatatttggatgcagagttcagggaagataagttggaaacactaaatgttaaagatgtagcaaaccctgtcaaacattagtactttatagaagaatgcatgctttccatatttttttccttacataaacatcaggttaggcagtataaagaataggacttgtttttgtttttgttttgttgcactgaagtttgataaatagtgttattgagagagatgtgtaatttttctgtatagacaggagaagaaagaactatcttcatctgagagaggctaaaatgttttcagctaggaacaaatcttcctggtcgaaagttagtaggatatgcctgctctttggcctgatgaccaattttaacttagagctttttttttttaattttgtctgccccaagttttgtgaaatttttcatattttaatttcaagcttattttggagagataggaaggtcatttccatgtatgcataataatcctgcaaagtacaggtactttgtctaagaaacattggaagcaggttaaatgttttgtaaactttgaaatatatggtctaatgtttaagcagaattggaaaagactaagatcggttaacaaataacaacttttttttctttttttcttttgttttttgaagtgttggggtttggttttgttttttgagtcttttttttttaagtgaaatttattgaggaaaaatatgtgaaggaccttcactctaagatgttatatttttcttaaaaagtaactcctagtaggggtaccactgaatctgtacagagccgtaaaaactgaagttctgcctctgatgtattttgtgagtttgtttctttgaattttcattttacagttacttttccttgcatacaaacaagcatataaaatggcaacaaactgca

SEQ ID NO: 11221 - DNA, 3699 bp, Homo sapiens
  source 1..3699: mol_type = unassigned DNA
ggcggcggcggcggcggcggcggcggcggaggcggcggcggcggcggcggcggcggcggctgggcctcgagcgcccgcagcccacctctcgggggcgggctcccggcgctagcagggctgaagagaagatggaggagctggtggtggaagtgcggggctccaatggcgctttctacaaggcatttgtaaaggatgttcatgaagattcaataacagttgcatttgaaaacaactggcagcctgataggcagattccatttcatgatgtcagattcccacctcctgtaggttataataaagatataaatgaaagtgatgaagttgaggtgtattccagagcaaatgaaaaagagccttgctgttggtggttagctaaagtgaggatgataaagggtgagttttatgtgatagaatatgcagcatgtgatgcaacttacaatgaaattgtcacaattgaacgtctaagatctgttaatcccaacaaacctgccacaaaagatactttccataagatcaagctggatgtgccagaagacttacggcaaatgtgtgccaaagaggcggcacataaggattttaaaaaggcagttggtgccttttctgtaacttatgatccagaaaattatcagcttgtcattttgtccatcaatgaagtcacctcaaagcgagcacatatgctgattgacatgcactttcggagtctgcgcactaagttgtctctgataatgagaaatgaagaagctagtaagcagctggagagttcaaggcagcttgcctcgagatttcatgaacagtttatcgtaagagaagatctgatgggtctagctattggtactcatggtgctaatattcagcaagctagaaaagtacctggggtcactgctattgatctagatgaagatacctgcacatttcatatttatggagaggatcaggatgcagtgaaaaaagctagaagctttctcgaatttgctgaagatgtaatacaagttccaaggaacttagtagtaataggaaaaaatggaaagctgattcaggagattgtggacaagtcaggagttgtgagggtgaggattgaggctgaaaatgagaaaaatgttccacaagaagaggaaattatgccaccaaattcccttccttccaataattcaagggttggacctaatgccccagaagaaaaaaaacatttagatataaaggaaaacagcacccatttttctcaacctaacagtacaaaagtccagaggggtatggtaccatttgtttttgtgggaacaaaggacagcatcgctaatgccactgttcttttggattatcacctgaactatttaaaggaagtagaccagttgcgtttggagagattacaaattgatgagcagttgcgacagattggagctagttctagaccaccaccaaatcgtacagataaggaaaaaagctatgtgactgatgatggtcaaggaatgggtcgaggtagtagaccttacagaaatagggggcacggcagacgcggtcctggatatacttcaggaactaattctgaagcatcaaatgcttctgaaacagaatctgaccacagagacgaactcagtgattggtcattagctccaacagaggaagagagggagagcttcctgcgcagaggagacggacggcggcgtggagggggaggaagaggacaaggaggaagaggacgtggaggaggcttcaaaggaaacgacgatcactcccgaacagataatcgtccacgtaatccaagagaggctaaaggaagaacaacagatggatcccttcagaatacctccagtgaaggtagtcggctgcgcacgggtaaagatcgtaaccagaagaaagagaagccagacagcgtggatggtcagcaaccactcgtgaatggagtaccctaaactgcataattctgaagttatatttcctataccatttccgtaattcttattccatattagaaaactttgttaggccaaagacaaatagtaggcaagatggcacagggcatgaaatgaacacaaattatgctaagaattttttattttttggtattggccataagcaacaattttcagatttgcacaaaaagataccttaaaatttgaaacattgcttttaaaactacttagcacttcagggcagattttagttttattttctaaagtactgagcagtgatattctttgttaatttggaccattttcctgcattgggtgatcattcaccagtacattctcagtttttcttaatatatagcatttatggtaatcatattagacttctgttttcaatctcgtatagaagtcttcatgaaatgctatgtcatttcatgtcctgtgtcagtttatgttttggtccacttttccagtattttagtggaccctgaaatgtgtgtgatgtgacatttgtcattttcattagcaaaaaaagttgtatgatctgtgccttttttatatcttggcaggtaggaatattatatttggatgcagagttcagggaagataagttggaaacactaaatgttaaagatgtagcaaaccctgtcaaacattagtactttatagaagaatgcatgctttccatatttttttccttacataaacatcaggttaggcagtataaagaataggacttgtttttgtttttgttttgttgcactgaagtttgataaatagtgttattgagagagatgtgtaatttttctgtatagacaggagaagaaagaactatcttcatctgagagaggctaaaatgttttcagctaggaacaaatcttcctggtcgaaagttagtaggatatgcctgctctttggcctgatgaccaattttaacttagagctttttttttttaattttgtctgccccaagttttgtgaaatttttcatattttaatttcaagcttattttggagagataggaaggtcatttccatgtatgcataataatcctgcaaagtacaggtactttgtctaagaaacattggaagcaggttaaatgttttgtaaactttgaaatatatggtctaatgtttaagcagaattggaaaagactaagatcggttaacaaataacaacttttttttctttttttcttttgttttttgaagtgttggggtttggttttgttttttgagtcttttttttttaagtgaaatttattgaggaaaaatatgtgaaggaccttcactctaagatgttatatttttcttaaaaagtaactcctagtaggggtaccactgaatctgtacagagccgtaaaaactgaagttctgcctctgatgtattttgtgagtttgtttctttgaattttcattttacagttacttttccttgcatacaaacaagcatataaaatggcaacaaactgcacatgatttcacaaatattaaaaagtcttttaaaaagtattgccaaacattaatgttgatttctagttatttattctgggaatgtatagtatttgaaaacagaaattggtaccttgcacacatcatctgtaagctgtttggttttaaaatactgtagataattaaccaaggtagaatgaccttgtaatgtaactgctcttgggcaatattctctgtacatattagcgacaacagattggattttatgttgacatttgtttggttatagtgcaatatattttgtatgcaagcagtttcaataaagtttgatcttcctctgcta

SEQ ID NO: 11222 - DNA, 1853 bp, Homo sapiens
  source 1..1853: mol_type = unassigned DNA
gtctctgataatgagaaatgaagaagctagtaagcagctggagagttcaaggcagcttgcctcgagatttcatgaacagtttatcgtaagagaagatctgatgggtctagctattggtactcatggtgctaatattcagcaagctagaaaagtacctggggtcactgctattgatctagatgaagatacctgcacatttcatatttatggagaggatcaggatgcagtgaaaaaagctagaagctttctcgaatttgctgaagatgtaatacaagttccaaggaacttagtagggttgaagatctgaacataggttacttaaatctaaaaagtcccaaagctagaagaaacttcagatgtctctgggactttctgcaaagtcaatagtaattctccattttgacttgagtagtgttttatcaccatcaccatcgcaaagtaataggaaaaaatggaaagctgattcaggagattgtggacaagtcaggagttgtgagggtgaggattgaggctgaaaatgagaaaaatgttccacaagaagaggaaattatgccaccaaattcccttccttccaataattcaagggttggacctaatgccccagaagaaaaaaaacatttagatataaaggaaaacagcacccatttttctcaacctaacagtacaaaagtccagaggggtatggtaccatttgtttttgtgggaacaaaggacagcatcgctaatgccactgttcttttggattatcacctgaactatttaaaggaagtagaccagttgcgtttggagagattacaaattgatgagcagttgcgacagattggagctagttctagaccaccaccaaatcgtacagataaggaaaaaagctatgtgactgatgatggtcaaggaatgggtcgaggtagtagaccttacagaaatagggggcacggcagacgcggtcctggatatacttcaggaactaattctgaagcatcaaatgcttctgaaacagaatctgaccacagagacgaactcagtgattggtcattagctccaacagaggaagagagggagagcttcctgcgcagaggagacggacggcggcgtggagggggaggaagaggacaaggaggaagaggacgtggaggaggcttcaaaggaaacgacgatcactcccgaacagataatcgtccacgtaatccaagagaggctaaaggaagaacaacagatggatcccttcagaatacctccagtgaaggtagtcggctgcgcacgggtaaagatcgtaaccagaagaaagagaagccagacagcgtggatggtcagcaaccactcgtgaatggagtaccctaaactgcataattctgaagttatatttcctataccatttccgtaattcttattccatattagaaaactttgttaggccaaagacaaatagtaggcaagatggcacagggcatgaaatgaacacaaattatgctaagaattttttattttttggtattggccataagcaacaattttcagatttgcacaaaaagataccttaaaatttgaaacattgcttttaaaactacttagcacttcagggcagattttagttttattttctaaagtactgagcagtgatattctttgttaatttggaccattttcctgcattgggtgatcattcaccagtacattctcagtttttcttaatatatagcatttatggtaatcatattagacttctgttttcaatctcgtatagaagtcttcatgaaatgctatgtcatttcatgtcctgtgtcagtttatgttttggtccacttttccagtattttagtggaccctgaaatgtgtgtgatgtgacatttgtcatt

SEQ ID NO: 11223 - DNA, 3277 bp, Homo sapiens
  source 1..3277: mol_type = unassigned DNA
aaagccggtgatgcagggtgcgcagggatcccacctggagagtcggggcggcacgttgagaccccaggggtgaagggcgggggatcccaatcccagccctgttttcccctcccctttccccgcctccttctcgcccctcccccctcctcccctctggttggaaagtttctagaatctcttcccagcggcctttgcggttccaacatggcggagctgacggtggaggttcgcggctctaacggggctttctacaagtcaattcacaatgaatcaaatgtccccattttggaactctgaagtatttataattgatctctatacatatctacaatctactgcttgtttctacttagactttgactccattactcattttgcctcacaaagtgagttggtactttgacaaaggttggaaaggacactagccacctgtgtgtgcactgaaatcatgtacgcttgaacatttggaattttatgtccagccataatccacttgcatatgcactttgtggaaactgtggtcttcagaactctggaagaatgagaatggcggagtggaaaagagtcctggatttgaagtaaacagatgagaattctagggatttatcaaagatgttcatgaagactcccttacagttgtttttgaaaataattggcaaccagaacgccaggttccatttaatgaagttagattaccaccaccacctgatataaaaaaagaaattagtgaaggagatgaagtagaggtatattcaagagcaaatgaccaagagccatgtgggtggtggttggctaaagttcggatgatgaaaggagaattttatgtcattgaatatgctgcttgtgacgctacttacaatgaaatagtcacatttgaacgacttcggcctgtcaatcaaaataaaactgtcaaaaaaaataccttctttaaatgcacagtggatgttcctgaggatttgagagaggcgtgtgctaatgaaaatgcacataaagattttaagaaagcagtaggagcatgcagaattttttaccatccagaaacaacacagctaatgatactgtctgccagtgaagcaactgtgaagagagtaaacatcttaagtgacatgcatttgcgaagtattcgtacgaagttgatgcttatgtccagaaatgaagaggccactaagcatttagaatgcacaaaacaacttgcagcagcttttcatgaggaatttgttgtgagagaagatttaatgggcctggcaataggaacacatggtagtaacatccagcaagctaggaaggttcctggagttaccgccattgagctagatgaagatactggaacattcagaatctacggagagagtgctgatgctgtaaaaaaggctagaggtttcttggaatttgtggaggattttattcaggttcctaggaatctcgttggaaaagtaattggaaaaaatggcaaagttattcaagaaatagtggacaaatctggtgtggttcgagtgagaattgaaggggacaatgaaaataaattacccagagaagacggtatggttccatttgtatttgttggcactaaagaaagcattggaaatgtgcaggttcttctagagtatcatattgcctatctaaaggaagtagaacagctaagaatggaacgcctacagattgatgaacagctgcgacagattggttctaggtcttatagcggaagaggcagaggtcgtcggggacctaattacacctccggttatggtacaaattctgagctgtctaacccctctgaaacggaatctgagcgtaaagacgagctgagtgattggtcattggcaggagaagatgatcgagacagccgacatcagcgtgacagcaggagacgcccaggaggaagaggcagaagtgtttcagggggtcgaggtcgtggtggaccacgtggtggcaaatcctccatcagttctgtgctcaaagatccagacagcaatccatacagcttacttgataatacagaatcagatcagactgcagacactgatgccagcgaatctcatcacagtactaaccgtcgtaggcggtctcgtagacgaaggactgatgaagatgctgttctgatggatggaatgactgaatctgatacagcttcagttaatgaaaatgggctagtcacagttgcagattatatttctagagctgagtctcagagcagacaaagaaacctcccaagggaaactttggctaaaaacaagaaagaaatggcaaaagatgtgattgaagagcatggtccttcagaaaaggcaataaacggcccaactagtgcttctggcgatgacatttctaagctacagcgtactccaggagaagaaaagattaataccttaaaagaagaaaacactcaagaagcagcagtcctgaatggtgtttcataaactgaagaagttcctagtttacagttcttttacattacatttacaatagtgcttgtacaagcttgccaaagatagaatatggatcgccagtctttacatcgcactttcagttcctccatttggaattcaaaaaggggagggatcctgaagaaatcatatgttaaacatactttgacacctactgtgttataaaatatatcatcagatgtgccttgagaatagtatatgtaacattaaaaaaaagttgctggctataggaaatgttattttgttttcaaaatatggcagagatggggggtggtgggtggggtgggatccctaacgtaatattctttatgaaagcattagctgcttttgttacatttttaatatgcaaccacttcttcacctgaggaaaactagaatgaaatgcagtctaaaatattttgcactgaattgtaatttcttcattagtttagtctggaaactggtctgttttaatgtgttttttaaatgctgtatgtagaggaaaatctgcagaccactggaatacatttgttaaactctcatctgcagggacactgggcgatacttggcagtgactgttctaccttgaggctttgtttggtttatttattaaagtgtacagtatttaaaaatcaaacatagctttagttaaaacactaagctgaattagtcatgtccattcagacataacctgaactactgaaaagatcaatttccagaaggtttattctgtataaactacatgttagtcttcagtagagtatcttttttttttccttttttttttttttatttcggttgtttgatgtgcaatatgtttttgtatgcaggtagtaaataaactttgatcttccatt

SEQ ID NO: 11224 - DNA, 3120 bp, Homo sapiens
  source 1..3120: mol_type = unassigned DNA
atgccgatgcgccgggcaggctgtgcctgggcagttcattctgtggcagctggaggcactactcggccgccgcggtgcgaactgcgggcactgtggggcggagacctaggggcgggtcaacaaaggtcgggcgattgtgtctggaggcaaatccgacgtagacggcggcaggcggagcccaaagccggtgatgcagggtgcgcagggatcccacctggagagtcggggcggcacgttgagaccccaggggtgaagggcgggggatcccaatcccagccctgttttcccctcccctttccccgcctccttctcgcccctcccccctcctcccctctggttggaaagtttctagaatctcttcccagcggcctttgcggttccaacatggcggagctgacggtggaggttcgcggctctaacggggctttctacaagggatttatcaaagatgttcatgaagactcccttacagttgtttttgaaaataattggcaaccagaacgccaggttccatttaatgaagttagattaccaccaccacctgatataaaaaaagaaattagtgaaggagatgaagtagaggtatattcaagagcaaatgaccaagagccatgtgggtggtggttggctaaagttcggatgatgaaaggagaattttatgtcattgaatatgctgcttgtgacgctacttacaatgaaatagtcacatttgaacgacttcggcctgtcaatcaaaataaaactgtcaaaaaaaataccttctttaaatgcacagtggatgttcctgaggatttgagagaggcgtgtgctaatgaaaatgcacataaagattttaagaaagcagtaggagcatgcagaattttttaccatccagaaacaacacagctaatgatactgtctgccagtgaagcaactgtgaagagagtaaacatcttaagtgacatgcatttgcgaagtattcgtacgaagttgatgcttatgtccagaaatgaagaggccactaagcatttagaatgcacaaaacaacttgcagcagcttttcatgaggaatttgttgtgagagaagatttaatgggcctggcaataggaacacatggtagtaacatccagcaagctaggaaggttcctggagttaccgccattgagctagatgaagatactggaacattcagaatctacggagagagtgctgatgctgtaaaaaaggctagaggtttcttggaatttgtggaggattttattcaggttcctaggaatctcgttggaaaagtaattggaaaaaatggcaaagttattcaagaaatagtggacaaatctggtgtggttcgagtgagaattgaaggggacaatgaaaataaattacccagagaagacggtatggttccatttgtatttgttggcactaaagaaagcattggaaatgtgcaggttcttctagagtatcatattgcctatctaaaggaagtagaacagctaagaatggaacgcctacagattgatgaacagctgcgacagattggttctaggtcttatagcggaagaggcagaggtcgtcggggacctaattacacctccggttatggtacaaattctgagctgtctaacccctctgaaacggaatctgagcgtaaagacgagctgagtgattggtcattggcaggagaagatgatcgagacagccgacatcagcgtgacagcaggagacgcccaggaggaagaggcagaagtgtttcagggggtcgaggtcgtggtggaccacgtggtggcaaatcctccatcagttctgtgctcaaagatccagacagcaatccatacagcttacttgataatacagaatcagatcagactgcagacactgatgccagcgaatctcatcacagtactaaccgtcgtaggcggtctcgtagacgaaggactgatgaagatgctgttctgatggatggaatgactgaatctgatacagcttcagttaatgaaaatgggctagtcacagttgcagattatatttctagagctgagtctcagagcagacaaagaaacctcccaagggaaactttggctaaaaacaagaaagaaatggcaaaagatgtgattgaagagcatggtccttcagaaaaggcaataaacggcccaactagtgcttctggcgatgacatttctaagctacagcgtactccaggagaagaaaagattaataccttaaaagaagaaaacactcaagaagcagcagtcctgaatggtgtttcataaactgaagaagttcctagtttacagttcttttacattacatttacaatagtgcttgtacaagcttgccaaagatagaatatggatcgccagtctttacatcgcactttcagttcctccatttggaattcaaaaaggggagggatcctgaagaaatcatatgttaaacatactttgacacctactgtgttataaaatatatcatcagatgtgccttgagaatagtatatgtaacattaaaaaaaagttgctggctataggaaatgttattttgttttcaaaatatggcagagatggggggtggtgggtggggtgggatccctaacgtaatattctttatgaaagcattagctgcttttgttacatttttaatatgcaaccacttcttcacctgaggaaaactagaatgaaatgcagtctaaaatattttgcactgaattgtaatttcttcattagtttagtctggaaactggtctgttttaatgtgttttttaaatgctgtatgtagaggaaaatctgcagaccactggaatacatttgttaaactctcatctgcagggacactgggcgatacttggcagtgactgttctaccttgaggctttgtttggtttatttattaaagtgtacagtatttaaaaatcaaacatagctttagttaaaacactaagctgaattagtcatgtccattcagacataacctgaactactgaaaagatcaatttccagaaggtttattctgtataaactacatgttagtcttcagtagagtatcttttttttttccttttttttttttttatttcggttgtttgatgtgcaatatgtttttgtatgcaggtagtaaataaactttgatcttccatttgctgaa

SEQ ID NO: 11225 - DNA, 2651 bp, Homo sapiens
  source 1..2651: mol_type = unassigned DNA
tttgcggttccaacatggcggagctgacggtggaggttcgcggctctaacggggctttctacaagggatttatcaaagatgttcatgaagactcccttacagttgtttttgaaaataattggcaaccagaacgccaggttccatttaatgaagttagattaccaccaccacctgatataaaaaaagaaattagtgaaggagatgaagtagaggtatattcaagagcaaatgaccaagagccatgtgggtggtggttggctaaagttcggatgatgaaaggagaattttatgtcattgaatatgctgcttgtgacgctacttacaatgaaatagtcacatttgaacgacttcggcctgtcaatcaaaataaaactgtcaaaaaaaataccttctttaaatgcacagtggatgttcctgaggatttgagagaggcgtgtgctaatgaaaatgcacataaagattttaagaaagcagtaggagcatgcagaattttttaccatccagaaacaacacagctaatgatactgtctgccagtgaagcaactgtgaagagagtaaacatcttaagtgacatgcatttgcgaagtattcgtacgaagttgatgcttatgtccagaaatgaagaggccactaagcatttagaatgcacaaaacaacttgcagcagcttttcatgaggaatttgttgtgagagaagatttaatgggcctggcaataggaacacatggtagtaacatccagcaagctaggaaggttcctggagttaccgccattgagctagatgaagatactggaacattcagaatctacggagagagtgctgatgctgtaaaaaaggctagaggtttcttggaatttgtggaggattttattcaggttcctaggaatctcgttggaaaagtaattggaaaaaatggcaaagttattcaagaaatagtggacaaatctggtgtggttcgagtgagaattgaaggggacaatgaaaataaattacccagagaagacggtatggttccatttgtatttgttggcactaaagaaagcattggaaatgtgcaggttcttctagagtatcatattgcctatctaaaggaagtagaacagctaagaatggaacgcctacagattgatgaacagctgcgacagattggttctaggtcttatagcggaagaggcagaggtcgtcggggacctaattacacctccggttatggtacaaattctgagctgtctaacccctctgaaacggaatctgagcgtaaagacgagctgagtgattggtcattggcaggagaagatgatcgagacagccgacatcagcgtgacagcaggagacgcccaggaggaagaggcagaagtgtttcagggggtcgaggtcgtggtggaccacgtggtggcaaatcctccatcagttctgtgctcaaagatccagacagcaatccatacagcttacttgataatacagaatcagatcagactgcagacactgatgccagcgaatctcatcacagtactaaccgtcgtaggcggtctcgtagacgaaggactgatgaagatgctgttctgatggatggaatgactgaatctgatacagcttcagttaatgaaaatgggctaggcaaaagatgtgattgaagagcatggtccttcagaaaaggcaataaacggcccaactagtgcttctggcgatgacatttctaagctacagcgtactccaggagaagaaaagattaataccttaaaagaagaaaacactcaagaagcagcagtcctgaatggtgtttcataaactgaagaagttcctagtttacagttcttttacattacatttacaatagtgcttgtacaagcttgccaaagatagaatatggatcgccagtctttacatcgcactttcagttcctccatttggaattcaaaaaggggagggatcctgaagaaatcatatgttaaacatactttgacacctactgtgttataaaatatatcatcagatgtgccttgagaatagtatatgtaacattaaaaaaaagttgctggctataggaaatgttattttgttttcaaaatatggcagagatggggggtggtgggtggggtgggatccctaacgtaatattctttatgaaagcattagctgcttttgttacatttttaatatgcaaccacttcttcacctgaggaaaactagaatgaaatgcagtctaaaatattttgcactgaattgtaatttcttcattagtttagtctggaaactggtctgttttaatgtgttttttaaatgctgtatgtagaggaaaatctgcagaccactggaatacatttgttaaactctcatctgcagggacactgggcgatacttggcagtgactgttctaccttgaggctttgtttggtttatttattaaagtgtacagtatttaaaaatcaaacatagctttagttaaaacactaagctgaattagtcatgtccattcagacataacctgaactactgaaaagatcaatttccagaaggtttattctgtataaactacatgttagtcttcagtagagtatcttttttttttccttttttttttttttatttcggttgtttgatgtgcaatatgtttttgtatgcaggtagtaaataaactttgatcttccatt

SEQ ID NO: 11226 - DNA, 1996 bp, Homo sapiens
  source 1..1996: mol_type = unassigned DNA
gtgtagtgttttgagtccggcttccatttagcgtagaagcaatttaattttaattagtttttttccaatttagaagataatacatggtcactgagggatttatcaaagatgttcatgaagactcccttacagttgtttttgaaaataattggcaaccagaacgccaggttccatttaatgaagttagattaccaccaccacctgatataaaaaaagaaattagtgaaggagatgaagtagaggtatattcaagagcaaatgaccaagagccatgtgggtggtggttggctaaagttcggatgatgaaaggagaattttatgtcattgaatatgctgcttgtgacgctacttacaatgaaatagtcacatttgaacgacttcggcctgtcaatcaaaataaaactgtcaaaaaaaataccttctttaaatgcacagtggatgttcctgaggatttgagagaggcgtgtgctaatgaaaatgcacataaagattttaagaaagcagtaggagcatgcagaattttttaccatccagaaacaacacagctaatgatactgtctgccagtgaagcaactgtgaagagagtaaacatcttaagtgacatgcatttgcgaagtattcgtacgaagttgatgcttatgtccagaaatgaagaggccactaagcatttagaatgcacaaaacaacttgcagcagcttttcatgaggaatttgttgtgagagaagatttaatgggcctggcaataggaacacatggtagtaacatccagcaagctaggaaggttcctggagttaccgccattgagctagatgaagatactggaacattcagaatctacggagagagtgctgatgctgtaaaaaaggctagaggtttcttggaatttgtggaggattttattcaggttcctaggaatctcgttggaaaagtaattggaaaaaatggcaaagttattcaagaaatagtggacaaatctggtgtggttcgagtgagaattgaaggggacaatgaaaataaattacccagagaagacggtatggttccatttgtatttgttggcactaaagaaagcattggaaatgtgcaggttcttctagagtatcatattgcctatctaaaggaagtagaacagctaagaatggaacgcctacagattgatgaacagctgcgacagattggttctaggtcttatagcggaagaggcagaggtcgtcggggacctaattacacctccggttatggtacaaattctgagctgtctaacccctctgaaacggaatctgagcgtaaagacgagctgagtgattggtcattggcaggagaagatgatcgagacagccgacatcagcgtgacagcaggagacgcccaggaggaagaggcagaagtgtttcagggggtcgaggtcgtggtggaccacgtggtggcaaatcctccatcagttctgtgctcaaagatccagacagcaatccatacagcttacttgataatacagaatcagatcagactgcagacactgatgccagcgaatctcatcacagtactaaccgtcgtaggcggtctcgtagacgaaggactgatgaagatgctgttctgatggatggaatgactgaatctgatacagcttcagttaatgaaaatgggctagtcacagttgcagattatatttctagagctgagtctcagagcagacaaagaaacctcccaagggaaactttggctaaaaacaagaaagaaatggcaaaagatgtgattgaagagcatggtccttcagaaaaggcaataaacggcccaactagtgcttctggcgatgacatttctaagctacagcgtactccaggagaagaaaagattaataccttaaaagaagaaaacactcaagaagcagcagtcctgaatggtgtttcataaactgaagaagttcctagtttacagttcttttacattacatttacaatagtgcttgtacaagcttgccaaagatagaatatggatcg

SEQ ID NO: 11227 - DNA, 2987 bp, Homo sapiens
  source 1..2987: mol_type = unassigned DNA
gcagtaggcggcggtggcagggggaggtggaggctgtggagcggcagcggcagcagcgggtcccgggactgaggcagcagcgggggcggcggcgggcggaagctgaggtgacgaaggcagcggcggcggcggccgtttccctcacggtggcggagaccaaggcggcggcggcggacggggagcggcccggccccggccccctgctcgttggctgtggcagggccgccgtggggccggcccggctcccgccccccgcggctccccctccggctcctcctccggggagacgccgggggcctggcccggcccgcactcagactgctgctgcagccgccgccgggggagtcggaggcggtggcggcgccatgggcggcctggcctctgggggggatgtggagccgggactgcccgtcgaggtgcgcggctccaacggggccttctacaagggctttgtgaaggatgtccatgaagactctgtcaccatcttctttgaaaacaactggcagagtgagagacaaattccttttggggatgtccggctaccacctccagctgactataataaggagatcacagaaggggatgaagtggaggtttattctcgagccaatgaacaggaaccttgtggctggtggctggcccgggtgcggatgatgaagggagatttctatgtcattgaatatgctgcctgtgatgccacctacaatgaaattgttaccctggagcgacttcggccagttaatcccaatccccttgcaaccaaaggcagcttcttcaaggttaccatggctgtgcccgaggatctgagagaagcctgctccaatgaaaacgtccataaagagttcaagaaagccctgggagccaactgcatctttctcaacatcacaaacagtgagctcttcattctgtcaaccacagaagcccctgtgaagcgagcatctctgctgggtgatatgcatttccgaagcctgcgcaccaaactgctacttatgtcccgcaatgaagaagctaccaagcacctagagacaagcaagcagttggcagcagccttccaagaggagttcacagtgcgagaggacctgatgggactggcaattgggactcacggtgccaacatccagcaggcccgaaaagtacctggggtgaccgccattgagttgggtgaagagacctgcactttccgcatctatggggagactcccgaggcttgccgacaggcccgaagctaccttgagttttctgaggactcagtgcaagtgcccaggaacctggttggcaaagtgattggaaagaacgggaaagtgatccaggagattgtggataaatctggtgtggtgagggttcgagtggaaggtgataatgacaagaagaaccccagggaggagggaatggttcccttcatttttgttggcacccgagagaacatcagcaatgcccaggctttgctggagtatcacctctcctacctgcaggaggtagagcagcttcgcttggagaggctacaaattgatgagcagcttcggcagattgggctgggctttcgccctcctgggagtgggcggggcagcggtggcagcgacaaggctggatatagcactgatgagagctcctcctcctccctccatgcgactcgaacctatgggggcagctatgggggccgtggccgtggccggaggacaggcggtcctgcctatggccccagctcagatgtgtctacagcttcagagactgagtcagagaagagagaggagcccaaccgagctgggcctggcgacagggatcccccaacccgaggggaagaaagccggaggcggccgactgggggccggggtaggggacccccacctgccccccggcccacttcgagatacaattcttcatctattagctcagtgctgaaggatccagacagtaatccctacagcctattggacacgtctgaaccagagcccccggttgattcagaacctggggaaccccccccagcaagtgccaggcgccgccgctcccgccgccgccgcactgatgaagacaggaccgtcatggatggaggcctggaatcagatgggcccaacatgacagagaatggcctggaagatgaatcaagacctcaacgtcgtaatcgcagccgccgccgccgtaaccgtggtaatcggactgatggctctatcagtggagaccgccagccagtgactgtggctgactatatctcacgagcagagtctcagagccgccagaggccacccctggaacgcactaaaccctcagaagactctctttcaggacagaagggtgactctgtcagcaagcttcctaagggcccctcggagaatggggagctctccgcccccttggagttgggtagtatggtgaatggggtttcataaaacctccaacctgcacccctcccttctccatctcgcttgctgcccaacaccatggccctcacaggcccaactgacctgcgctggagctgctcttatctaggggggaggggggtggcacagcagcttgggtaccccccaacctccaggagctagtggaggggtgtgtaacagggtcataccccctccctcttgtccaccctacccccagggtaaggggagcctctctccttccccatcagactggatgtgcctttatcctctaatgccccaatctctctctgaacacccccattctccacctgttggtggggggtgctcctcgacccacccagatttgaccgttcagggggcctcccctgctatccctcctcccatcctgtaccccccatttctggggcctcatcactgtggaagacggggatagtaagagataagtgggtgggaggcacggggaaggttttggagtagaaccaggggtgtgtatgaaggggggtgacaaggtccccctggggaggggaccaaccttgtctggtggatgagaaggcgtatttatttttcactgtacagtatttaaaaagagaataaaaaaatccaaatggc

SEQ ID NO: 11228 - DNA, 7324 bp, Homo sapiens
  source 1..7324: mol_type = unassigned DNA
ttagtacaaaactagtagtgagaaaggaagctgggaagagactgggaagaggcaaccgacctcattaacaaaagctcagttttgtccctgcggacccaaccagcagaaggcacggggctagcggtggctgtccgccagggaggtcgggctctgtgtaaacagtagaaggcatctttatcatgcccttctcacagggagtcctgaggcttggcgctcaggaagtttgcaaagctgcagcagctgccttggagaagaccagcaaagaaagtggagtgtgtatgtgaacttcaattctgtattttctgtgaggtgggttaatggatttttagtaaaaagaaatctcaaacacagctgacctgaaagactggaatttcagctctcttccttcccggggttctttttcctcccccttcctctcaaagccctttaaaccagattgctgtgtcagtgactcttatcctgcccgccagttccaagggtttctaactttttgtcttggaaaggaaaaccactacctgattagaaaagcacttgggaagcccattaatcttgccggcgttgtcaggagtgatcagcgagttttattaaaagccctgggattgcctgaaaggcccccttgtctgactttgaaatgaaaggggcatgttaagatctcggggcacattgtcaggacccctcaccctgccccttggactatgagctgaccctccaggaggaagcacagaagccctcctttgttaaagggatttcgccggtggacagagaagagttgggccctgtcagcatgaactctctgagttggggggctgcgaatgccgtgctgctgctgctcctcctggcctgggccagccccaccttcatcagcatcaaccgcggggtgagggtgatgaagggccactctgccttcctgtcaggagatgacctgaagtttgccatccctaaagagaaagatgcctgcaaagtggaagttgtgatgaatgagccaataacccagagggttgggaaactcactccacaggtctttgactgccatttccttcccaacgaagtcaagtatgttcacaatggttgtccaattcttgatgaagacacagtgaagctcagactttacagatttactgaaagagataccttcatagaaacttttatcctgtgggtctatctcctggaaccagactgtaacatcatccatatgagtaacaatgtgctggaggtgcctgaattcaatggcttgtcccaagcgattgataaaaatctgctcagattcgattatgataggatggctagcctggaatgtaccgtcagcctggacactgcgagaactcggctgccagcccatggccagatggttctcggggagcctcgaccagaagaacctcgtggagatcagccacacagttttttcccagagtcccaactgagagcaaaactgaagtgtccaggtgggagctgtaccccaggattaaagaaaataggaagcctcaaagtgagctgtgaggagttcctgctgatgggccttcgttatcagcatctggatcccccttcacccaacattgattatatctccatccaactggacctcacagataccaggagcaaaattgtgtacaagtcagagagtgcgtggctgcctgtctatatcagagctggaattccgaatcagattccaaaggctgcattcatggccgtgtttattctggaagtggatcagttcatcctgacctccttgactacatcagttctggactgtgaagaagatgagacccctaaacccttgctggtgttcaacattactaaagccccgctccagggctatgtgactcacctgttggatcacaccagaccaatctcctcattcacctggaaagatctcagtgacatgcagatcgcctatcagccaccaaacagcagccattctgagaggagacatgatgaggtagaattggaggtatacgacttcttctttgaaaggagtgcacctatgacagtccacatctccatcagaacagcagatacaaatgccccccgtgtatcctggaatacaggtctgagtctccttgaggggcagtctcgagccatcacttgggaacagtttcaggttgtcgacaatgacgacattggtgctgtccggctagtcaccgttggtggcctgcagcatggatggctgactttaagaggggggaaagggtttctcttcaccgtggctgacctccaggctggagttgttcgctatcatcatgatgacagcgactccaccaaagacttcgtggtcttccggatatttgatggccatcacagcatccgtcacaaattccccatcaacgtcttgcccaaagatgatagtcccccgttcctcataaccaatgttgtgattgaactggaggaggggcagaccatcctgatccagggatccatgctgcgagcttcagatgtggacgccagtgatgactacatcttcttcaatatcacaaagcctccacaggctggggagatcatgaagaagccagggccaggactgataggctatcctgtccatggcttccttcagagggatttgtttaatggaatcatttattatcgtcattttggtggagaaatctttgaagattcttttcaatttgtcctgtgggacagccatgaacctccaaatctttcagtgccacaggtggcaacaatccatataactccagtggatgaccagcttccaaaagaggctcctggagtttctcggcatttggttgtcaaggaaactgaggtggcctatataactaagaaacagctacattttatagattcagaatcatatgacagggagctggtctacacaataactactcctccatttttctccttcagccacagacacttggatgctgggaaattatttatggtggacagcataccaaaagtagttaagaatcctacggccctggagctgaggtcattcactcagcatgctgtgaactatatgaaagtggcctacatgccccccatgcaagacattggtccccattgcagagatgtccagttcacattttctgtcagtaaccaacatggcggtactttgcatgggatctgctttaacattacaatcctcccagtggacaatcaagttcctgaggcgttcaccaaccctctgaaagtgactgagggaggtcaaagcatcatcagcacagagcacattctaatttctgatgcagataccaagctggacaatattgacctctccctgcgggaattgcctctgcacggaagggtggagctgaatggatttcctctaaattcagggggcacattttcttggggcgatctccataccttaaaagttaggtatcaacatgatggaactgaagttcttcaggatgacctactcttggaggtcaccgatggcacaaattcagcagaatttgtactacatgttgaggtattccctgtcaacgatgagccaccagtcttaaaggctgacctcatgcctgtcatgaattgctcagagggaggagaggtggtcatcacctctgaatacatttttgctactgatgtggacagcgataacttgaagttgatgtttgtgattgctcgcgaacctcagcatggggtggtgaggagagctggagtcacagtggatcagttctctcagagagatgttatctcagaggccgtgacatacaaacacacaggtggcgagattggcctgatgccttgttttgacaccattacattggtggtttcggatggagaggctggcccttttgtgaatggctgttgctacaatggacccaatccatctgttccacttcatgcgtcctttccagtgtatgatctcaacatcacggtatacccagtagacaaccagccaccttccattgcaataggtcccgtgtttgttgtagatgagggctgctcaacagcccttactgttaaccatttgtccgccactgaccctgacactgcagcagatgacttggaatttgttttggtttctcctcctcagtttggctacctcgaaaatatactcccttctgtgggttttgaaaaaagcaatattggcataagtatagattcatttcagtggaaagacatgaacgcttttcacattaactatgtgcagtccaggcatctgaggatagaaccaactgccgaccagttcacggtgtacgtcacagatgggaagcatcactccttggagataccattttctattataatcaaccccacaaatgatgaagctcctgactttgtagtgcagaatattactgtgtgtgagggtcagatgaaagagctggactcttccatcatcagcgctgtggacctggacattccccaggatgccctgctgttcagcatcactcaaaagccacgccatggcctcctcatcgatagggggtttagcaaagacttctctgagaataagcagccagccaaccctcaccagaaacatgcacctgttcacagcttttccatggaactcctcaagactggaatgaggttgacgtacatgcatgatgactcagagagccttgctgatgattttacaatccaattgtcagatgggaaacataagatacttaaaaccatttcagtagaggtcatcccagttaatgatgaaaaaccaatgctgagcaagaaggctgaaattgcaatgaatatgggtgaaactcgtattatttccagtgctattctttcagccatagatgaagactcacccagggagaagatttactatgtatttgaaaggcttccccaaaatgggcaacttcagcttaagatagggagggactgggttcctctctcccctggcatgaaatgcactcaggaggaagtggatctgaacttgctgagatacacacacaccggggcaatggattcccagaatcaagatagcttcaccttctacctttgggatggcaacaacaggtcccctgctcttgactgtcaaatcaccatcaaggacatggaaaaaggtgatattgtcatccttacaaaaccactcgtggtgtctaaaggtgatagaggtttcttaacaaccaccacgctcctggctgtggacggaacagacaagcctgaggaactgctctatgtcatcacctcccctccgcgatatggccagatcgaatatgttcactatcctggagttcccattacaaacttcagccaaatggatgtagtggggcagacagtttgctatgtacacaagagcaaggtgactgtctccagtgacagattcagattcatcatcagcaatggactgcggaccgagcacggggtgtttgagatcacactggagactgtggacagagccctgcctgtggtaaccaggaacaaggggttgagactggcccaaggggccgtgggcctgctttcccctgacctccttcagctgaccgaccctgatacacctgcggagaacctcaccttcctcttggttcagctcccccagcatggccagctctacctgtgggggacagggctacttcaacacaatttcacccagcaggatgtggacagcaagaatgtggcctatcggcactcaggaggggactcccagactgactgctttactttcatggccacagatgggacaaaccaaggctttattgtgaatgggagagtgtgggaagaacctgttttattcaccattcaggtagaccaattggacaaaacagctcctcgtatcacactcttgcattccccttctcaagtggggctcctgaaaaatggctgctacgggatttacatcacttcccgcgtgttgaaggcatcagaccctgacactgaggacgatcagatcatctttaaaattctacaaggcccaaaacatggacatctggagaacacaacaacaggtgaatttatccatgagaaatttagccaaaaggacttaaacagtaagactattctttacatcataaacccatctttggaagtaaattcagataccgtggaatttcaaatcatggaccccacagggaactcggccactcctcaaattttggaactgaagtggtctcatattgaatggtcacagaccgaatatgaagtctgtgagaatgtgggtttgttgcccttggaaattatcagaaggggatattccatggactcggcctttgtgggtataaaggtcaaccaagtgtcagctgcagttggaaaagatttcaccgtgattccatctaaactgattcagtttgacccaggaatgtcaactaagatgtggaatatagcaattacctatgacggattagaggaagatgatgaggtctttgaagtaattctgaactcccctgtgaatgcagttcttggcacaaagacaaaagctgcagtgaaaattttggactcaaaaggaggacaatgccatccttcatattcctccaaccaaagcaagcacagcacatgggagaagggcatttggcatctgctgcccccagggtcttcctcatccaccacttctggttcctttcatctggaaagaagacctcttccatcttccatgcagctagcagtcatcaggggagacaccctgcggggctttgattctacagatctttctcaaaggaagcttaggacccgtgggaatggcaaaacagttcgtccatcctctgtttatagaaatggaacagacatcatctataattatcatgggatagtttccttgaaactggaggatgacagtttcccaactcacaaaaggaaggccaaagtatccatcattagtcagccacaaaagacaatcaaagtggcagaactgcctcaagcagataaggtggaatccacaactgactcacacttccccagacaggaccagttgccctcatttccaaagaactgcactctggaattaaagggactcttccattttgaagaaggcatccagaagctgtatcagtgcaatgggatcgcctggaaagcctggagtccccaaaccaaggatgtggaagacaaatcctgtccagccgggtggcaccagcactcaggctactgtcacatcttgatcacagagcagaaaggcacctggaatgcggctgcccaagcttgcagggaacaatacctgggcaaccttgtaactgtattctccaggcagcacatgcggtggctctgggacattggtgggagaaagtccttttggataggtttgaacgaccaagtgcatgctggccactgggagtggatcggtggtgaacctgttgccttcaccaatgggagaagagggccctctcaacgctccaagcttggaaagagctgtgttttggttcaaagacaagggaaatggcaaacaaaagactgtaggagagccaaacctcataattatgtgtgttccagaaaactctaa

SEQ ID NO: 11229 - DNA, 10089 bp, Homo sapiens
  source 1..10089: mol_type = unassigned DNA
acacaaaaagccttacaaatggaagaactaaggtggtacttaaaaacagcaccttaggatctagttccatcctatcttttcccttaaatgccatgacaaaagttaaaacgggccctgtcccttctgaatgctgggcttctcatctaaatttaaataaaaacctttgaagatgggaatgtgttggaagaaaagaagggcagaaaaaaagtgtgttggaagagtctgtggagtcctgaggcttggcgctcaggaagtttgcaaagctgcagcagctgccttggagaagaccagcaaagaaagtggagtgtgtatgtgaacttcaattctgtattttctgtgaggtgggttaatggatttttagtaaaaagaaatctcaaacacagctgacctgaaagactggaatttcagctctcttccttcccggggttctttttcctcccccttcctctcaaagccctttaaaccagattgctgtgtcagtgactcttatcctgcccgccagttccaagggtttctaactttttgtcttggaaaggaaaaccactacctgattagaaaagcacttgggaagcccattaatcttgccggcgttgtcaggagtgatcagcgagttttattaaaagccctgggattgcctgaaaggcccccttgtctgactttgaaatgaaaggggcatgttaagatctcggggcacattgtcaggacccctcaccctgccccttggactatgagctgaccctccaggaggaagcacagaagccctcctttgttaaagggatttcgccggtggacagagaagagttgggccctgtcagcatgaactctctgagttggggggctgcgaatgccgtgctgctgctgctcctcctggcctgggccagccccaccttcatcagcatcaaccgcggggtgagggtgatgaagggccactctgccttcctgtcaggagatgacctgaagtttgccatccctaaagagaaagatgcctgcaaagtggaagttgtgatgaatgagccaataacccagagggttgggaaactcactccacaggtctttgactgccatttccttcccaacgaagtcaagtatgttcacaatggttgtccaattcttgatgaagacacagtgaagctcagactttacagatttactgaaagagataccttcatagaaacttttatcctgtgggtctatctcctggaaccagactgtaacatcatccatatgagtaacaatgtgctggaggtgcctgaattcaatggcttgtcccaagcgattgataaaaatctgctcagattcgattatgataggatggctagcctggaatgtaccgtcagcctggacactgcgagaactcggctgccagcccatggccagatggttctcggggagcctcgaccagaagaacctcgtggagatcagccacacagttttttcccagagtcccaactgagagcaaaactgaagtgtccaggtgggagctgtaccccaggattaaagaaaataggaagcctcaaagtgagctgtgaggagttcctgctgatgggccttcgttatcagcatctggatcccccttcacccaacattgattatatctccatccaactggacctcacagataccaggagcaaaattgtgtacaagaagtcagagagtgcgtggctgcctgtctatatcagagctggaattccgaatcagattccaaaggctgcattcatggccgtgtttattctggaagtggatcagttcatcctgacctccttgactacatcagttctggactgtgaagaagatgagacccctaaacccttgctggtgttcaacattactaaagccccgctccagggctatgtgactcacctgttggatcacaccagaccaatctcctcattcacctggaaagatctcagtgacatgcagatcgcctatcagccaccaaacagcagccattctgagaggagacatgatgaggtagaattggaggtatacgacttcttctttgaaaggagtgcacctatgacagtccacatctccatcagaacagcagatacaaatgccccccgtgtatcctggaatacaggtctgagtctccttgaggggcagtctcgagccatcacttgggaacagtttcaggttgtcgacaatgacgacattggtgctgtccggctagtcaccgttggtggcctgcagcatggatggctgactttaagaggggggaaagggtttctcttcaccgtggctgacctccaggctggagttgttcgctatcatcatgatgacagcgactccaccaaagacttcgtggtcttccggatatttgatggccatcacagcatccgtcacaaattccccatcaacgtcttgcccaaagatgatagtcccccgttcctcataaccaatgttgtgattgaactggaggaggggcagaccatcctgatccagggatccatgctgcgagcttcagatgtggacgccagtgatgactacatcttcttcaatatcacaaagcctccacaggctggggagatcatgaagaagccagggccaggactgataggctatcctgtccatggcttccttcagagggatttgtttaatggaatcatttattatcgtcattttggtggagaaatctttgaagattcttttcaatttgtcctgtgggacagccatgaacctccaaatctttcagtgccacaggtggcaacaatccatataactccagtggatgaccagcttccaaaagaggctcctggagtttctcggcatttggttgtcaaggaaactgaggtggcctatataactaagaaacagctacattttatagattcagaatcatatgacagggagctggtctacacaataactactcctccatttttctccttcagccacagacacttggatgctgggaaattatttatggtggacagcataccaaaagtagttaagaatcctacggccctggagctgaggtcattcactcagcatgctgtgaactatatgaaagtggcctacatgccccccatgcaagacattggtccccattgcagagatgtccagttcacattttctgtcagtaaccaacatggcggtactttgcatgggatctgctttaacattacaatcctcccagtggacaatcaagttcctgaggcgttcaccaaccctctgaaagtgactgagggaggtcaaagcatcatcagcacagagcacattctaatttctgatgcagataccaagctggacaatattgacctctccctgcgggaattgcctctgcacggaagggtggagctgaatggatttcctctaaattcagggggcacattttcttggggcgatctccataccttaaaagttaggtatcaacatgatggaactgaagttcttcaggatgacctactcttggaggtcaccgatggcacaaattcagcagaatttgtactacatgttgaggtattccctgtcaacgatgagccaccagtcttaaaggctgacctcatgcctgtcatgaattgctcagagggaggagaggtggtcatcacctctgaatacatttttgctactgatgtggacagcgataacttgaagttgatgtttgtgattgctcgcgaacctcagcatggggtggtgaggagagctggagtcacagtggatcagttctctcagagagatgttatctcagaggccgtgacatacaaacacacaggtggcgagattggcctgatgccttgttttgacaccattacattggtggtttcggatggagaggctggcccttttgtgaatggctgttgctacaatggacccaatccatctgttccacttcatgcgtcctttccagtgtatgatctcaacatcacggtatacccagtagacaaccagccaccttccattgcaataggtcccgtgtttgttgtagatgagggctgctcaacagcccttactgttaaccatttgtccgccactgaccctgacactgcagcagatgacttggaatttgttttggtttctcctcctcagtttggctacctcgaaaatatactcccttctgtgggttttgaaaaaagcaatattggcataagtatagattcatttcagtggaaagacatgaacgcttttcacattaactatgtgcagtccaggcatctgaggatagaaccaactgccgaccagttcacggtgtacgtcacagatgggaagcatcactccttggagataccattttctattataatcaaccccacaaatgatgaagctcctgactttgtagtgcagaatattactgtgtgtgagggtcagatgaaagagctggactcttccatcatcagcgctgtggacctggacattccccaggatgccctgctgttcagcatcactcaaaagccacgccatggcctcctcatcgatagggggtttagcaaagacttctctgagaataagcagccagccaaccctcaccagaaacatgcacctgttcacagcttttccatggaactcctcaagactggaatgaggttgacgtacatgcatgatgactcagagagccttgctgatgattttacaatccaattgtcagatgggaaacataagatacttaaaaccatttcagtagaggtcatcccagttaatgatgaaaaaccaatgctgagcaagaaggctgaaattgcaatgaatatgggtgaaactcgtattatttccagtgctattctttcagccatagatgaagactcacccagggagaagatttactatgtatttgaaaggcttccccaaaatgggcaacttcagcttaagatagggagggactgggttcctctctcccctggcatgaaatgcactcaggaggaagtggatctgaacttgctgagatacacacacaccggggcaatggattcccagaatcaagatagcttcaccttctacctttgggatggcaacaacaggtcccctgctcttgactgtcaaatcaccatcaaggacatggaaaaaggtgatattgtcatccttacaaaaccactcgtggtgtctaaaggtgatagaggtttcttaacaaccaccacgctcctggctgtggacggaacagacaagcctgaggaactgctctatgtcatcacctcccctccgcgatatggccagatcgaatatgttcactatcctggagttcccattacaaacttcagccaaatggatgtagtggggcagacagtttgctatgtacacaagagcaaggtgactgtctccagtgacagattcagattcatcatcagcaatggactgcggaccgagcacggggtgtttgagatcacactggagactgtggacagagccctgcctgtggtaaccaggaacaaggggttgagactggcccaaggggccgtgggcctgctttcccctgacctccttcagctgaccgaccctgatacacctgcggagaacctcaccttcctcttggttcagctcccccagcatggccagctctacctgtgggggacagggctacttcaacacaatttcacccagcaggatgtggacagcaagaatgtggcctatcggcactcaggaggggactcccagactgactgctttactttcatggccacagatgggacaaaccaaggctttattgtgaatgggagagtgtgggaagaacctgttttattcaccattcaggtagaccaattggacaaaacagctcctcgtatcacactcttgcattccccttctcaagtggggctcctgaaaaatggctgctacgggatttacatcacttcccgcgtgttgaaggcatcagaccctgacactgaggacgatcagatcatctttaaaattctacaaggcccaaaacatggacatctggagaacacaacaacaggtgaatttatccatgagaaatttagccaaaaggacttaaacagtaagactattctttacatcataaacccatctttggaagtaaattcagataccgtggaatttcaaatcatggaccccacagggaactcggccactcctcaaattttggaactgaagtggtctcatattgaatggtcacagaccgaatatgaagtctgtgagaatgtgggtttgttgcccttggaaattatcagaaggggatattccatggactcggcctttgtgggtataaaggtcaaccaagtgtcagctgcagttggaaaagatttcaccgtgattccatctaaactgattcagtttgacccaggaatgtcaactaagatgtggaatatagcaattacctatgacggattagaggaagatgatgaggtctttgaagtaattctgaactcccctgtgaatgcagttcttggcacaaagacaaaagctgcagtgaaaattttggactcaaaaggaggacaatgccatccttcatattcctccaaccaaagcaagcacagcacatgggagaagggcatttggcatctgctgcccccagggtcttcctcatccaccacttctggttcctttcatctggaaagaagacctcttccatcttccatgcagctagcagtcatcaggggagacaccctgcggggctttgattctacagatctttctcaaaggaagcttaggacccgtgggaatggcaaaacagttcgtccatcctctgtttatagaaatggaacagacatcatctataattatcatgggatagtttccttgaaactggaggatgacagtttcccaactcacaaaaggaaggccaaagtatccatcattagtcagccacaaaagacaatcaaagtggcagaactgcctcaagcagataaggtggaatccacaactgactcacacttccccagacaggaccagttgccctcatttccaaagaactgcactctggaattaaagggactcttccattttgaagaaggcatccagaagctgtatcagtgcaatgggatcgcctggaaagcctggagtccccaaaccaaggatgtggaagacaaatcctgtccagccgggtggcaccagcactcaggctactgtcacatcttgatcacagagcagaaaggcacctggaatgcggctgcccaagcttgcagggaacaatacctgggcaaccttgtaactgtattctccaggcagcacatgcggtggctctgggacattggtgggagaaagtccttttggataggtttgaacgaccaagtgcatgctggccactgggagtggatcggtggtgaacctgttgccttcaccaatgggagaagagggccctctcaacgctccaagcttggaaagagctgtgttttggttcaaagacaagggaaatggcaaacaaaagactgtaggagagccaaacctcataattatgtgtgttccagaaaactctaaatataacagaccctacagggggccacctggagtttgtcacctatttattcacaggatctgtgaatattgctccatagaaaacaaattgttatgattgagtgggtatacctttgtgattctgtctagtgaaaatgggacatttttaatagtgccagaaagattgataaataaatattttttacaagataagatacaatttttgtatctcaataccttttaaaataaatgccagcagtattataaagtgtaaggtttgtttattccagaagaccctcacccttaccccattccaaatctcagggagcaccagtctcatagtccttggatttttttaaaaaaaatttttggtcccgttacctctaatgaatttattctgaaatatgtatcgtaggtgctcctaccactttagtctgagtgaagctaactctactagttcattaaaccaaagttgaaccgcaaagttgtccctttggagccctttaaatgtgaaatctaagattagaggctggggttgaaaaagagaattttctatgatgaaaaagaaagactttagatgaaagaatcttgtaggtggaggctcatctacaaagctgtagttcaggtaagaattcggggggctggctgtactcagagttctactcatcactattcatgaaacagatctccctttccaatttgagtgttggcattgtaccatcccaaagctaatgattgggtttccccagccttacagagtcatgagaaatttcaagtaacataatctgttcctctgtgtttattgtactgacaagcatttctcagggacacttgggataaggagtatatatgaatgatggttgacacatggaagaaaaatactgcttcctcagaaatgtcctgatgaactgtgctgatgaacagagaaaaataataccgaaaacagagcccctgaaagcctacattctcggaaaggattttgaggaattttgagccaccttaaatctttaatatttgcagaaatgccatgttaactagattctctaacggaaaggtaccttattaatttataatctcaggtgagtggaacatttttgtaacaatgaagtatgttgcagcgttaccagaactcccttctgaaatcaaggtttaacagttataggaaattagaatgtctgaaacatttatttaaagtttttctcttttcataatcactgagaaatatggttgtgccaaatgtcacttgctctatgagcaccaatgtaacttcagaatcaaattggggttatcaagtaggctagagctctggtgctggttttattataaaaataccttgagtgttgtagacactaaaactgcttgaagaaagtcagttcagtttctgggatataaaaacatggcaagctttttttatttcagttcatttatcaaggttgtaattaatagaaacatttagaaagagatattggaatatgatccagacattctgtctattacttaaatctaaacataattatagtgtcagagggtccttacctgagatgtcgcaggtgggctccagattggcataatgtacaggttctctgtgagacacaagcagtttctggcatttaaccaaaagatgccacacctatcctcttaccagctcctttcaaattccttctggtccacaggcttcttgcagtatggaaatgtgagatttgggctaaagaaaaaatagttgtttacctaaagggttaagtcctaggaaggaagtagaagtttgggaaatgagggattcaagggccactccttccactggaactctaaaactatataaaccatctaaaactggaaatctagaactatgtcaactgtgtagaaccttgtcagcatggcagatttattatacatttctgcaatataaatgataaatgatactgaactaattgcaaatgttagcataaagagtgttttgatttttataacaattagaaatgctacaagaatatttaaaaatattcctgatcatgaaagcattaatcaaattagaaaatccaagtcattttaagaagataaaaatagaaattcaggcaagtttgggtgatgggcggtattcatcacaaccttcattttattcttacaattgagctttgactcagggggaaaagaagtaaatgattgtcaaggttccctctgccttgattgatagtttctgatgggagtgggaaggaaggaattggagtaatgggtagaatgggaatgagagattacgggagagagagatgagatgggttgaacagaagaggatgggaactgatggtagctaggaaggaaagcgtcaagaaggacctgaatgtacccagcttttctccccaaacttcaataccacctcaggaaaaggcccactgtgtccaggggcgtcagtccagctcaatagtgtctagcttttcagaatcttctgattgtttggtctttaacaaaaacatagcatctatttgctaacaataaacttaagcaacatatgataatcatttcatctccttccaagaagtggtgaaaatgaaccaggtgacattaatttaacttctgtttttgtttatttttaatacaaccaaaaagatatgcacatattttaatttacattatggtactgtataatttaaaccataaactggtgctgattaatttctgcaacaaagcagcatattaaatgtactacatctagtgttgtagcaaaattaataaacttgttttaagttctgagacactttc

SEQ ID NO: 11230 - DNA, 1779 bp, Homo sapiens
  source 1..1779: mol_type = unassigned DNA
atgctggatgagtccttggcagtcaggaggtccaaaaaatgcaaagaaatgataatgcactgggagaagaaagaagatattgacatcgtgaacacagtagaccaattggacaaaacagctcctcgtatcacactcttgcattccccttctcaagtggggctcctgaaaaatggctgctacgggatttacatcacttcccgcgtgttgaaggcatcagaccctgacactgaggacgatcagatcatctttaaaattctacaaggcccaaaacatggacatctggagaacacaacaacaggtgaatttatccatgagaaatttagccaaaaggacttaaacagtaagactattctttacatcataaacccatctttggaagtaaattcagataccgtggaatttcaaatcatggaccccacagggaactcggccactcctcaaattttggaactgaagtggtctcatattgaatggtcacagaccgaatatgaagtctgtgagaatgtgggtttgttgcccttggaaattatcagaaggggatattccatggactcggcctttgtgggtataaaggtcaaccaagtgtcagctgcagttggaaaagatttcaccgtgattccatctaaactgattcagtttgacccaggaatgtcaactaagatgtggaatatagcaattacctatgacggattagaggaagatgatgaggtctttgaagtaattctgaactcccctgtgaatgcagttcttggcacaaagacaaaagctgcagtgaaaattttggactcaaaaggaggacaatgccatccttcatattcctccaaccaaagcaagcacagcacatgggagaagggcatttggcatctgctgcccccagggtcttcctcatccaccacttctggttcctttcatctggaaagaagacctcttccatcttccatgcagctagcagtcatcaggggagacaccctgcggggctttgattctacagatctttctcaaaggaagcttaggacccgtgggaatggcaaaacagttcgtccatcctctgtttatagaaatggaacagacatcatctataattatcatgggatagtttccttgaaactggaggatgacagtttcccaactcacaaaaggaaggccaaagtatccatcattagtcagccacaaaagacaatcaaagtggcagaactgcctcaagcagataaggtggaatccacaactgactcacacttccccagacaggaccagttgccctcatttccaaagaactgcactctggaattaaagggactcttccattttgaagaaggcatccagaagctgtatcagtgcaatgggatcgcctggaaagcctggagtccccaaaccaaggatgtggaagacaaatcctgtccagccgggtggcaccagcactcaggctactgtcacatcttgatcacagagcagaaaggcacctggaatgcggctgcccaagcttgcagggaacaatacctgggcaaccttgtaactgtattctccaggcagcacatgcggtggctctgggacattggtgggagaaagtccttttggataggtttgaacgaccaagtgcatgctggccactgggagtggatcggtggtgaacctgttgccttcaccaatgggagaagagggccctctcaacgctccaagcttggaaagagctgtgttttggttcaaagacaagggaaatggcaaacaaaagactgtaggagagccaaacctcataattatgtgtgttccagaaaactctaa

SEQ ID NO: 11231 - DNA, 2481 bp, Homo sapiens
  source 1..2481: mol_type = unassigned DNA
agtctgcagggaggaaagtcagaattagatattcaagatggccgcctctgatggagtccctggcactcactcaagcttgcatttggtagatggtgacacaagaatccatgctgaaggctgccttgcctctctttaccagattcatcatcagcaatggactgcggaccgagcacggggtgtttgagatcacactggagactgtggacagagccctgcctgtggtaaccaggaacaaggggttgagactggcccaaggggccgtgggcctgctttcccctgacctccttcagctgaccgaccctgatacacctgcggagaacctcaccttcctcttggttcagctcccccagcatggccagctctacctgtgggggacagggctacttcaacacaatttcacccagcaggatgtggacagcaagaatgtggcctatcggcactcaggaggggactcccagactgactgctttactttcatggccacagatgggacaaaccaaggctttattgtgaatgggagagtgtgggaagaacctgttttattcaccattcaggtagaccaattggacaaaacagctcctcgtatcacactcttgcattccccttctcaagtggggctcctgaaaaatggctgctacgggatttacatcacttcccgcgtgttgaaggcatcagaccctgacactgaggacgatcagatcatctttaaaattctacaaggcccaaaacatggacatctggagaacacaacaacaggtgaatttatccatgagaaatttagccaaaaggacttaaacagtaagactattctttacatcataaacccatctttggaagtaaattcagataccgtggaatttcaaatcatggaccccacagggaactcggccactcctcaaattttggaactgaagtggtctcatattgaatggtcacagaccgaatatgaagtctgtgagaatgtgggtttgttgcccttggaaattatcagaaggggatattccatggactcggcctttgtgggtataaaggtcaaccaagtgtcagctgcagttggaaaagatttcaccgtgattccatctaaactgattcagtttgacccaggaatgtcaactaagatgtggaatatagcaattacctatgacggattagaggaagatgatgaggtctttgaagtaattctgaactcccctgtgaatgcagttcttggcacaaagacaaaagctgcagtgaaaattttggactcaaaaggaggacaatgccatccttcatattcctccaaccaaagcaagcacagcacatgggagaagggcatttggcatctgctgcccccagggtcttcctcatccaccacttctggttcctttcatctggaaagaagacctcttccatcttccatgcagctagcagtcatcaggggagacaccctgcggggctttgattctacagatctttctcaaaggaagcttaggacccgtgggaatggcaaaacagttcgtccatcctctgtttatagaaatggaacagacatcatctataattatcatgggatagtttccttgaaactggaggatgacagtttcccaactcacaaaaggaaggccaaagtatccatcattagtcagccacaaaagacaatcaaagtggcagaactgcctcaagcagataaggtggaatccacaactgactcacacttccccagacaggaccagttgccctcatttccaaagaactgcactctggaattaaagggactcttccattttgaagaaggcatccagaagctgtatcagtgcaatgggatcgcctggaaagcctggagtccccaaaccaaggatgtggaagacaaatcctgtccagccgggtggcaccagcactcaggctactgtcacatcttgatcacagagcagaaaggcacctggaatgcggctgcccaagcttgcagggaacaatacctgggcaaccttgtaactgtattctccaggcagcacatgcggtggctctgggacattggtgggagaaagtccttttggataggtttgaacgaccaagtgcatgctggccactgggagtggatcggtggtgaacctgttgccttcaccaatgggagaagagggccctctcaacgctccaagcttggaaagagctgtgttttggttcaaagacaagggaaatggcaaacaaaagactgtaggagagccaaacctcataattatgtgtgttccagaaaactctaaatataacagaccctacagggggccacctggagtttgtcacctatttattcacaggatctgtgaatattgctccatagaaaacaaattgttatgattgagtgggtatacctttgtgattctgtctagtgaaaatgggacatttttaatagtgccagaaagattgataaataaatattttttacaagataagatacaatttttgtatctcaataccttttaaaataaatgccagcagtattataaa

SEQ ID NO: 11232 - DNA, 10086 bp, Homo sapiens
  source 1..10086: mol_type = unassigned DNA
acacaaaaagccttacaaatggaagaactaaggtggtacttaaaaacagcaccttaggatctagttccatcctatcttttcccttaaatgccatgacaaaagttaaaacgggccctgtcccttctgaatgctgggcttctcatctaaatttaaataaaaacctttgaagatgggaatgtgttggaagaaaagaagggcagaaaaaaagtgtgttggaagagtctgtggagtcctgaggcttggcgctcaggaagtttgcaaagctgcagcagctgccttggagaagaccagcaaagaaagtggagtgtgtatgtgaacttcaattctgtattttctgtgaggtgggttaatggatttttagtaaaaagaaatctcaaacacagctgacctgaaagactggaatttcagctctcttccttcccggggttctttttcctcccccttcctctcaaagccctttaaaccagattgctgtgtcagtgactcttatcctgcccgccagttccaagggtttctaactttttgtcttggaaaggaaaaccactacctgattagaaaagcacttgggaagcccattaatcttgccggcgttgtcaggagtgatcagcgagttttattaaaagccctgggattgcctgaaaggcccccttgtctgactttgaaatgaaaggggcatgttaagatctcggggcacattgtcaggacccctcaccctgccccttggactatgagctgaccctccaggaggaagcacagaagccctcctttgttaaagggatttcgccggtggacagagaagagttgggccctgtcagcatgaactctctgagttggggggctgcgaatgccgtgctgctgctgctcctcctggcctgggccagccccaccttcatcagcatcaaccgcggggtgagggtgatgaagggccactctgccttcctgtcaggagatgacctgaagtttgccatccctaaagagaaagatgcctgcaaagtggaagttgtgatgaatgagccaataacccagagggttgggaaactcactccacaggtctttgactgccatttccttcccaacgaagtcaagtatgttcacaatggttgtccaattcttgatgaagacacagtgaagctcagactttacagatttactgaaagagataccttcatagaaacttttatcctgtgggtctatctcctggaaccagactgtaacatcatccatatgagtaacaatgtgctggaggtgcctgaattcaatggcttgtcccaagcgattgataaaaatctgctcagattcgattatgataggatggctagcctggaatgtaccgtcagcctggacactgcgagaactcggctgccagcccatggccagatggttctcggggagcctcgaccagaagaacctcgtggagatcagccacacagttttttcccagagtcccaactgagagcaaaactgaagtgtccaggtgggagctgtaccccaggattaaagaaaataggaagcctcaaagtgagctgtgaggagttcctgctgatgggccttcgttatcagcatctggatcccccttcacccaacattgattatatctccatccaactggacctcacagataccaggagcaaaattgtgtacaagtcagagagtgcgtggctgcctgtctatatcagagctggaattccgaatcagattccaaaggctgcattcatggccgtgtttattctggaagtggatcagttcatcctgacctccttgactacatcagttctggactgtgaagaagatgagacccctaaacccttgctggtgttcaacattactaaagccccgctccagggctatgtgactcacctgttggatcacaccagaccaatctcctcattcacctggaaagatctcagtgacatgcagatcgcctatcagccaccaaacagcagccattctgagaggagacatgatgaggtagaattggaggtatacgacttcttctttgaaaggagtgcacctatgacagtccacatctccatcagaacagcagatacaaatgccccccgtgtatcctggaatacaggtctgagtctccttgaggggcagtctcgagccatcacttgggaacagtttcaggttgtcgacaatgacgacattggtgctgtccggctagtcaccgttggtggcctgcagcatggatggctgactttaagaggggggaaagggtttctcttcaccgtggctgacctccaggctggagttgttcgctatcatcatgatgacagcgactccaccaaagacttcgtggtcttccggatatttgatggccatcacagcatccgtcacaaattccccatcaacgtcttgcccaaagatgatagtcccccgttcctcataaccaatgttgtgattgaactggaggaggggcagaccatcctgatccagggatccatgctgcgagcttcagatgtggacgccagtgatgactacatcttcttcaatatcacaaagcctccacaggctggggagatcatgaagaagccagggccaggactgataggctatcctgtccatggcttccttcagagggatttgtttaatggaatcatttattatcgtcattttggtggagaaatctttgaagattcttttcaatttgtcctgtgggacagccatgaacctccaaatctttcagtgccacaggtggcaacaatccatataactccagtggatgaccagcttccaaaagaggctcctggagtttctcggcatttggttgtcaaggaaactgaggtggcctatataactaagaaacagctacattttatagattcagaatcatatgacagggagctggtctacacaataactactcctccatttttctccttcagccacagacacttggatgctgggaaattatttatggtggacagcataccaaaagtagttaagaatcctacggccctggagctgaggtcattcactcagcatgctgtgaactatatgaaagtggcctacatgccccccatgcaagacattggtccccattgcagagatgtccagttcacattttctgtcagtaaccaacatggcggtactttgcatgggatctgctttaacattacaatcctcccagtggacaatcaagttcctgaggcgttcaccaaccctctgaaagtgactgagggaggtcaaagcatcatcagcacagagcacattctaatttctgatgcagataccaagctggacaatattgacctctccctgcgggaattgcctctgcacggaagggtggagctgaatggatttcctctaaattcagggggcacattttcttggggcgatctccataccttaaaagttaggtatcaacatgatggaactgaagttcttcaggatgacctactcttggaggtcaccgatggcacaaattcagcagaatttgtactacatgttgaggtattccctgtcaacgatgagccaccagtcttaaaggctgacctcatgcctgtcatgaattgctcagagggaggagaggtggtcatcacctctgaatacatttttgctactgatgtggacagcgataacttgaagttgatgtttgtgattgctcgcgaacctcagcatggggtggtgaggagagctggagtcacagtggatcagttctctcagagagatgttatctcagaggccgtgacatacaaacacacaggtggcgagattggcctgatgccttgttttgacaccattacattggtggtttcggatggagaggctggcccttttgtgaatggctgttgctacaatggacccaatccatctgttccacttcatgcgtcctttccagtgtatgatctcaacatcacggtatacccagtagacaaccagccaccttccattgcaataggtcccgtgtttgttgtagatgagggctgctcaacagcccttactgttaaccatttgtccgccactgaccctgacactgcagcagatgacttggaatttgttttggtttctcctcctcagtttggctacctcgaaaatatactcccttctgtgggttttgaaaaaagcaatattggcataagtatagattcatttcagtggaaagacatgaacgcttttcacattaactatgtgcagtccaggcatctgaggatagaaccaactgccgaccagttcacggtgtacgtcacagatgggaagcatcactccttggagataccattttctattataatcaaccccacaaatgatgaagctcctgactttgtagtgcagaatattactgtgtgtgagggtcagatgaaagagctggactcttccatcatcagcgctgtggacctggacattccccaggatgccctgctgttcagcatcactcaaaagccacgccatggcctcctcatcgatagggggtttagcaaagacttctctgagaataagcagccagccaaccctcaccagaaacatgcacctgttcacagcttttccatggaactcctcaagactggaatgaggttgacgtacatgcatgatgactcagagagccttgctgatgattttacaatccaattgtcagatgggaaacataagatacttaaaaccatttcagtagaggtcatcccagttaatgatgaaaaaccaatgctgagcaagaaggctgaaattgcaatgaatatgggtgaaactcgtattatttccagtgctattctttcagccatagatgaagactcacccagggagaagatttactatgtatttgaaaggcttccccaaaatgggcaacttcagcttaagatagggagggactgggttcctctctcccctggcatgaaatgcactcaggaggaagtggatctgaacttgctgagatacacacacaccggggcaatggattcccagaatcaagatagcttcaccttctacctttgggatggcaacaacaggtcccctgctcttgactgtcaaatcaccatcaaggacatggaaaaaggtgatattgtcatccttacaaaaccactcgtggtgtctaaaggtgatagaggtttcttaacaaccaccacgctcctggctgtggacggaacagacaagcctgaggaactgctctatgtcatcacctcccctccgcgatatggccagatcgaatatgttcactatcctggagttcccattacaaacttcagccaaatggatgtagtggggcagacagtttgctatgtacacaagagcaaggtgactgtctccagtgacagattcagattcatcatcagcaatggactgcggaccgagcacggggtgtttgagatcacactggagactgtggacagagccctgcctgtggtaaccaggaacaaggggttgagactggcccaaggggccgtgggcctgctttcccctgacctccttcagctgaccgaccctgatacacctgcggagaacctcaccttcctcttggttcagctcccccagcatggccagctctacctgtgggggacagggctacttcaacacaatttcacccagcaggatgtggacagcaagaatgtggcctatcggcactcaggaggggactcccagactgactgctttactttcatggccacagatgggacaaaccaaggctttattgtgaatgggagagtgtgggaagaacctgttttattcaccattcaggtagaccaattggacaaaacagctcctcgtatcacactcttgcattccccttctcaagtggggctcctgaaaaatggctgctacgggatttacatcacttcccgcgtgttgaaggcatcagaccctgacactgaggacgatcagatcatctttaaaattctacaaggcccaaaacatggacatctggagaacacaacaacaggtgaatttatccatgagaaatttagccaaaaggacttaaacagtaagactattctttacatcataaacccatctttggaagtaaattcagataccgtggaatttcaaatcatggaccccacagggaactcggccactcctcaaattttggaactgaagtggtctcatattgaatggtcacagaccgaatatgaagtctgtgagaatgtgggtttgttgcccttggaaattatcagaaggggatattccatggactcggcctttgtgggtataaaggtcaaccaagtgtcagctgcagttggaaaagatttcaccgtgattccatctaaactgattcagtttgacccaggaatgtcaactaagatgtggaatatagcaattacctatgacggattagaggaagatgatgaggtctttgaagtaattctgaactcccctgtgaatgcagttcttggcacaaagacaaaagctgcagtgaaaattttggactcaaaaggaggacaatgccatccttcatattcctccaaccaaagcaagcacagcacatgggagaagggcatttggcatctgctgcccccagggtcttcctcatccaccacttctggttcctttcatctggaaagaagacctcttccatcttccatgcagctagcagtcatcaggggagacaccctgcggggctttgattctacagatctttctcaaaggaagcttaggacccgtgggaatggcaaaacagttcgtccatcctctgtttatagaaatggaacagacatcatctataattatcatgggatagtttccttgaaactggaggatgacagtttcccaactcacaaaaggaaggccaaagtatccatcattagtcagccacaaaagacaatcaaagtggcagaactgcctcaagcagataaggtggaatccacaactgactcacacttccccagacaggaccagttgccctcatttccaaagaactgcactctggaattaaagggactcttccattttgaagaaggcatccagaagctgtatcagtgcaatgggatcgcctggaaagcctggagtccccaaaccaaggatgtggaagacaaatcctgtccagccgggtggcaccagcactcaggctactgtcacatcttgatcacagagcagaaaggcacctggaatgcggctgcccaagcttgcagggaacaatacctgggcaaccttgtaactgtattctccaggcagcacatgcggtggctctgggacattggtgggagaaagtccttttggataggtttgaacgaccaagtgcatgctggccactgggagtggatcggtggtgaacctgttgccttcaccaatgggagaagagggccctctcaacgctccaagcttggaaagagctgtgttttggttcaaagacaagggaaatggcaaacaaaagactgtaggagagccaaacctcataattatgtgtgttccagaaaactctaaatataacagaccctacagggggccacctggagtttgtcacctatttattcacaggatctgtgaatattgctccatagaaaacaaattgttatgattgagtgggtatacctttgtgattctgtctagtgaaaatgggacatttttaatagtgccagaaagattgataaataaatattttttacaagataagatacaatttttgtatctcaataccttttaaaataaatgccagcagtattataaagtgtaaggtttgtttattccagaagaccctcacccttaccccattccaaatctcagggagcaccagtctcatagtccttggatttttttaaaaaaaatttttggtcccgttacctctaatgaatttattctgaaatatgtatcgtaggtgctcctaccactttagtctgagtgaagctaactctactagttcattaaaccaaagttgaaccgcaaagttgtccctttggagccctttaaatgtgaaatctaagattagaggctggggttgaaaaagagaattttctatgatgaaaaagaaagactttagatgaaagaatcttgtaggtggaggctcatctacaaagctgtagttcaggtaagaattcggggggctggctgtactcagagttctactcatcactattcatgaaacagatctccctttccaatttgagtgttggcattgtaccatcccaaagctaatgattgggtttccccagccttacagagtcatgagaaatttcaagtaacataatctgttcctctgtgtttattgtactgacaagcatttctcagggacacttgggataaggagtatatatgaatgatggttgacacatggaagaaaaatactgcttcctcagaaatgtcctgatgaactgtgctgatgaacagagaaaaataataccgaaaacagagcccctgaaagcctacattctcggaaaggattttgaggaattttgagccaccttaaatctttaatatttgcagaaatgccatgttaactagattctctaacggaaaggtaccttattaatttataatctcaggtgagtggaacatttttgtaacaatgaagtatgttgcagcgttaccagaactcccttctgaaatcaaggtttaacagttataggaaattagaatgtctgaaacatttatttaaagtttttctcttttcataatcactgagaaatatggttgtgccaaatgtcacttgctctatgagcaccaatgtaacttcagaatcaaattggggttatcaagtaggctagagctctggtgctggttttattataaaaataccttgagtgttgtagacactaaaactgcttgaagaaagtcagttcagtttctgggatataaaaacatggcaagctttttttatttcagttcatttatcaaggttgtaattaatagaaacatttagaaagagatattggaatatgatccagacattctgtctattacttaaatctaaacataattatagtgtcagagggtccttacctgagatgtcgcaggtgggctccagattggcataatgtacaggttctctgtgagacacaagcagtttctggcatttaaccaaaagatgccacacctatcctcttaccagctcctttcaaattccttctggtccacaggcttcttgcagtatggaaatgtgagatttgggctaaagaaaaaatagttgtttacctaaagggttaagtcctaggaaggaagtagaagtttgggaaatgagggattcaagggccactccttccactggaactctaaaactatataaaccatctaaaactggaaatctagaactatgtcaactgtgtagaaccttgtcagcatggcagatttattatacatttctgcaatataaatgataaatgatactgaactaattgcaaatgttagcataaagagtgttttgatttttataacaattagaaatgctacaagaatatttaaaaatattcctgatcatgaaagcattaatcaaattagaaaatccaagtcattttaagaagataaaaatagaaattcaggcaagtttgggtgatgggcggtattcatcacaaccttcattttattcttacaattgagctttgactcagggggaaaagaagtaaatgattgtcaaggttccctctgccttgattgatagtttctgatgggagtgggaaggaaggaattggagtaatgggtagaatgggaatgagagattacgggagagagagatgagatgggttgaacagaagaggatgggaactgatggtagctaggaaggaaagcgtcaagaaggacctgaatgtacccagcttttctccccaaacttcaataccacctcaggaaaaggcccactgtgtccaggggcgtcagtccagctcaatagtgtctagcttttcagaatcttctgattgtttggtctttaacaaaaacatagcatctatttgctaacaataaacttaagcaacatatgataatcatttcatctccttccaagaagtggtgaaaatgaaccaggtgacattaatttaacttctgtttttgtttatttttaatacaaccaaaaagatatgcacatattttaatttacattatggtactgtataatttaaaccataaactggtgctgattaatttctgcaacaaagcagcatattaaatgtactacatctagtgttgtagcaaaattaataaacttgttttaagttctgagacactttc

SEQ ID NO: 11233 - DNA, 14876 bp, Homo sapiens
  source 1..14876: mol_type = unassigned DNA
ggacggcctgggaaggcttcggctcctcggctgcggctccagcccggacggcgccgcgcaactttgccatccttctggcccagccccggctacaggaggaccccgcgggcaacgcgcggagttcctggcacttcccggcggtgtctcttgttgtctgcccggggaccgacttcgcatgctctcaggctgacctgtccaagcccgaacaccgggaccatgcactcagccgggactcccgggttatcctcgcgccggacaggcaactccaccagctttcaaccaggaccgccaccgccgccccggctgctgctgctgctgctgcttctcctgtcactggtaagccgcgtcccggcacagcccgctgccttcggcagggcgttgctgtcccctggtctcgcgggggctgcaggggtccctgctgaggaggccatagtgctggcgaaccgcggactccgggtgcctttcggccgtgaagtctggctggatcccctgcatgacctggtgttgcaggtgcagcccggggaccgctgcgcggtttcggtactagacaacgacgcactggcccagcgaccgggccgcctgagtcccaagcgcttcccgtgcgactttggccctggcgaggtgcgctactctcacctgggcgcgcgcagcccgtctcgggaccgcgtccggctgcagctgcgctatgacgcgcccggaggggcagtagtgctaccactggtactggaggtggaggtggtcttcacccagctggaggttgtgactcggaacttgcctctggtcgtggaagagctgctggggaccagcaatgccctggacgcgcggagcctggagttcgccttccagcccgagacagaggagtgccgcgtgggcatcctgtccggcttgggcgcgctgcctcgctatggagaactcctccactacccgcaggtccctggaggagccagagagggaggcgccccggagactctcctgatggactgcaaagctttccaggaactaggcgtgcgctatcgccacacagccgccagtcgctcaccaaacagggactggatacccatggtggtggagctgcgttcacgaggggctcctgtgggcagccctgctttgaaacgcgagcacttccaggttctggtgaggatccgaggaggggccgagaacactgcacccaagcccagtttcgtggccatgatgatgatggaggtggaccagtttgtactgacggccctgaccccagacatgctggcagccgaggatgctgagtctccctctgacctgttgatcttcaaccttacttctccattccagcctggccagggctacttggtgagcaccgatgatcgcagcctgcccctttcctccttcactcagagggatctgcggctcctgaagattgcctaccagcccccttctgaagactctgaccaggagcgcctctttgaactggaattggaggtagtggatctagaaggagcagcttcagacccttttgccttcatggtagtggtgaagcccatgaacacaatggctccggtggtcacccggaataccggtcttattctctatgagggtcagtctcggcccctcacaggccctgcaggcagtggtccgcaaaacttggtcatcagcgatgaggatgacctagaagcagtgcggctagaggtggtggctgggctccggcatggtcaccttgtcattctgggtgcttccagtggcagctctgctcccaagagctttacagtggctgagctggcagccggccaggtggtctaccagcatgatgacagagacggctcgctgagcgacaacctggtgcttcgcatggtggatggaggaggcaggcaccaggtacagtttctgttccccatcaccttagtgcctgtggatgaccagccacctgttctcaatgccaacacggggctgacactggcagagggtgaaacagtgcccatcctgcccctttccctgagtgcaactgacatggattcagatgattctctgctgctttttgtgctggagtcacccttcttaactacggggcatctgcttctccgccaaactcaccctccccatgagaagcaggaacttctcagaggcctttggaggaaggagggggcattttatgagcgaacagtgacagagtggcagcagcaggacataacagagggcaggctgttctatagacactctgggccccatagtcctgggccagtcacagaccagttcacatttagagtccaggataaccatgaccctcctaatcagtccgggctacagcggtttgtgattcgtatccatcctgtggatcgcctccctccggagctgggcagtggctgtccccttcgtatggtggtacaggaatcccagctcacaccactgaggaagaagtggctgcgctacactgacctggacacagatgaccgagaactacgttacacagtgactcagtcccccacagacacagacgaaaatcacctgccagccccactgggtaccttggtcttgactgacaacccctcagtcgtggtgacccattttacccaagcccagatcaaccatcataaaattgcttacagacccccgggtcaagaactgggcgtggctactcgagtggcccagttccagttccaggtggaagaccgagctgggaatgtggctccaggtacctttaccctttacttgcatcccgtggacaaccagccacctgagatcctcaacaccggcttcactattcaggagaagggtcaccacatcctgagtgagacagagttgcacgtgaatgatgtagacactgatgttgcccatatctctttcactctcactcaggcacccaaacatggccacatgagagtgtctggacagatcctgcatgtagggggtctcttccacttggaggacataaaacagggccgagtttcctatgcccataatggggacaagtccctgactgatagctgctccttggaagtcagtgacagacatcatgtggtgcccatcactctcagagtaaatgtccggccagtggatgatgaagtgcccatactgagccatcctactggcactctggagtcctatctagatgtcttagaaaatggggctactgaaatcactgccaatgttattaaggggaccaatgaggaaactgatgacttgatgttgactttcctcttggaagatccacctttgtatggggaaatcttggtcaatggcattccagcagagcagtttactcaaagggacatcttggagggctctgttgtatatacccacaccagtggtgagataggcctattgcctaaagcggattcttttaacctgagtctgtcagatatgtctcaagaatggagaattggtggcaatactatccaaggagttactatatgggtgaccatcctgcctgttgatagccaggccccagaaatctttgtaggtgaacagttgatagtaatggaaggtgataaaagtgttataacatcagtgcatataagtgctgaagatgtcgactccctgaatgatgacatcttgtgcactatagttattcagcctacttcaggttatgttgaaaacatttctccagcaccaggctctgagaaatcaagagcagggattgccataagtgctttcaacttgaaagatctcaggcagggccacataaactatgtccagagtgtccataaaggggtggaacctgtggaggaccgatttgtatttcgttgttctgatggcattaacttttcagagagacagttcttccccattgtaatcattcccaccaatgatgaacagccagagatgtttatgagagaatttatggtgatggaaggcatgagtctggtaattgatacacccattctcaatgctgctgatgctgatgttcccctggatgatttaactttcactattacccaattccccactcatggtcacatcatgaatcagctgataaatggcacggttttggtcgaaagcttcaccttggatcagatcatagagagttccagcattatttatgagcatgatgactccgagacccaggaagacagttttgtgattaaactaacagatgggaagcactctgtggaaaagacggtcctcattatagttatccctgttgatgatgagacgcccagaatgactatcaataatggactagaaatagaaattggggataccaagattatcaacaacaaaatattaatggcaacagatttagattcagaagacaaatctttggtttatattattcgttatgggccaggacatggcttattacagagacgaaaacctactggtgcctttgaaaatatcacactgggcatgaattttacccaggatgaagtagacagaaacttaattcagtatgtccatttggggcaagagggcattcgggacctaattaaatttgatgtgactgatggaataaatcccctcatagatcgttacttttatgtgtccatcgggagcattgacattgtcttccctgatgtgataagtaagggagtgtccttgaaagaaggtggcaaagtcactcttacaacagacctactaagcactagtgacttgaacagtcctgatgaaaacttggtttttaccatcaccagggctcccatgcgaggtcacctggaatgcacggatcagcctggtgtgtccatcacgtctttcactcagctgcaactggctggaaacaaaatctactacatccacacagctgatgatgaagtgaaaatggacagttttgagtttcaagtcaccgatggacgtaaccctgtctttcggacattccgtatctccattagcgatgtggacaataaaaagccagtggtcaccatccacaagctggttgtcagtgaaagtgaaaacaagctgattactccttttgagctcactgtcgaagacagagatactcctgacaagctcctgaaattcactatcacccaggtgcctattcatggccatctcctattcaacaataccagacctgtcatggtttttaccaagcaagacttgaatgaaaacttaatcagctacaaacatgatggcactgagtcaagtgaagatagcttctccttcacagtgactgatggcacccatacagacttctatgtttttcctgatacggtgtttgaaacaaggagaccccaagtgatgaagatccaggtcttggctgttgacaacagtgtcccccaaatcgcagtgaataagggggcctctacacttcgcactctagccactggccacttggggttcatgatcacaagcaaaatattgaaagtggaggacagagacagcttacacatttctcttagatttatcgtgacagaggcccctcaacatggatatcttctcaacctggacaaaggcaaccacagcatcactcagttcacacaagctgacattgatgacatgaaaatatgctatgtcttaagagaaggggctaatgccacaagtgatatgttctattttgcagttgaagatggtggtggaaacaagttaacgtaccagaattttcgtctgaattgggcatggatctcctttgaaaaggaatattacctggtcaatgaggactccaaatttctagatgttgttcttaaacgtagaggttacttgggagaaacttcttttataagtattggcacaagagacagaactgcagaaaaagacaaagacttcaagggcaaagcacagaaacaagtgcagttcaacccaggccagaccagggccacatggcgagtgcggatcctgagtgatggggagcatgagcagtctgaaacctttcaggtggtactctcagagcccgtgctggctgccttggaattccccacagtcgccactgttgagatcgttgatccaggagatgagccaactgtgtttattccccagtccaaatactccgttgaagaagatgttggtgagctgttcattcccatcaggaggagcggagatgtgagccaggagttgatggtggtctgttatacccaacaaggaacagcaactggaactgtgccgacttccgtgttgtcttactctgattacatatccaggcctgaggaccacaccagtgttgtccgctttgacaaagatgaacgggagaaactgtgtcggatagtcataattgatgactctttgtacgaggaggaggaaaccttccatgtccttctgagcatgcccatggggggaagaatcggatcagagttcccaggggctcaagttacaatcgttcctgacaaagatgatgaacccatcttttacttcggtgatgtggaatactctgtggatgagagtgctggctatgtggaagtgcaggtgtggagaacgggcactgacctgtccaagtcttctagtgtcacagtgaggtctcggaaaacagatcctccctctgcagatgctggaacagactatgtgggcatcagccgtaatttagattttgcacctggagtcaacatgcagcctgttcgtgttgtcattctggatgaccttggacaaccagcgctggagggaattgagaaatttgaactggtgcttcgcatgcctatgaacgcagcccttggcgagcccagcaaagccacagtgtccataaatgactctgtctccgatttgcctaagatgcaattcaaagaacgaatatatactggcagcgaaagtgatgggcagatagttacaatgatccataggactggggatgtccagtacagatcttcagtgagatgctacacccggcaggggtctgcacaggtgatgatggactttgaagaacgcccaaacactgatacctccatcatcacattcctccctggtgagacagaaaagccctgcattcttgagctgatggacgatgtgctctatgaggaggtagaggagctccgcctggtactcggcactccacaaagcaactctccctttggggctgcagttggtgaacaaaatgaaactctcataaggatccgagatgatgctgataagactgttattaaatttggagaaaccaaatttagtgtcactgaacccaaagaacctggagagtcggtggttataagaattccagtgattcgccaaggagacacttcaaaggtttccattgtgagagtccacaccaaggatggctcggccacctctggagaagactaccaccctgtgtcagaagaaattgagtttaaggaaggggaaacccagcacgtggttgaaatcgaagttacctttgacggggtgagagagatgagagaggccttcactgttcacctaaaacctgatgaaaatatgatagcagagatgcagttgacgaaagccattgtgtacatagaagaaatgagcagcatggcagatgtcacttttccttctgtccctcaaattgtatccctgttgatgtatgacgacacttccaaagctaaggagagtgctgaacccatgtctggctatcctgtcatctgtatcacagcttgcaaccccaaatattcagactacgataaaacaggctctatctgtgcaagtgagaacatcaatgacactttgacgcggtaccggtggctgattagtgcacctgcgggccctgacggtgtgaccagccctatgagagaagtggacttcgacaccttttttacgtcatccaagatggtcacactggactccatatactttcagcctggctcccgggtacagtgcgcagctcgtgctgtgaacaccaatggggatgaaggcctggagctcatgagccctattgtaaccatcagcagagaagaaggtctttgtcagccccgtgtacctggggttgttggagcagagccgttctcagctaaattgcgctacacaggccctgaggatgcagactacacaaaccttatcaagctcactgtcacaatgccacacatagatggcatgctccccgtgatctccactagagagctttccaactttgagctcaccctcagccctgatggcacaagagttggaaaccacaagtgctccaacctcctggattatactgaagtgaagactcattatggtttcttgactgatgctaccaaaaatccagaaataattggagagacatatccttaccagtacagcttgtccatcagaggttccactaccttgcgcttctaccggaacctgaacctagaggcctgtttatgggagttcgttagctactatgacatgtcagaactccttgctgactgtggtggcaccattggaacagatggacaggtcctaaacctagtgcagtcctatgtgacccttcgagtccctctgtatgtttcctacgtgttccattcccccgtgggggtaggaggctggcagcattttgacttgaagtcagagcttcgtctaacttttgtgtacgacaccgccatcttgtggaatgatggaattggcagccccccagaggctgaacttcaaggttctctctatccaaccagcatgcgcatcggtgatgaggggcgcttggccgtgcacttcaagacagaggctcagttccatggcttatttgtgctgtcacatcccgcatcctttacaagctcagtgatcatgtcagctgatcatccaggcctgacattttccctccgcctcataaggagtgaaccaacctataaccagccagtacagcagtggagctttgtctctgactttgccgtacgtgactactcagggacctatactgtgaagctggtgccatgcactgccccatcacatcaggaataccgcctgccagtcacctgcaaccccagagaacctgtcacctttgaccttgacatccgattccaacaggtcagtgatccagtggctgctgagtttagcttgaacacccaaatgtacctgctctctaagaagagtctctggttgtctgatggatccatgggattcgggcaagagagtgatgttgcttttgcagaaggtgatataatttatggtcgtgtcatggtggatcctgtccagaatctgggtgactccttttactgcagcattgagaaggtgtttctatgcactggagctgatggctatgttcccaagtatagtccaatgaatgcagaatatggctgcttagccgactctccttcactcttatatagatttaaaattgtggacaaagctcagccagagacacaagcgaccagttttggaaatgtcctatttaatgccaaactagcagtggatgaccctgaagccattctcttagtgaatcagcctggatctgatggatttaaagtcgactcaacaccactctttcaggtcgctctaggccgagaatggtatatacatacgatctatacagtgagatcgaaagacaatgccaatcgaggtattggcaaaagaagtgtggagtaccattctctggtgagtcaaggaaagccccaatccaccaccaagagccggaagaagagagagatcaggagcacaccctcactggcatgggagattggtgctgaaaacagtcgaggaacaaacatccagcacattgccctggaccgcaccaagaggcagatcccccatgggagagcacctccagatggcatcctcccctgggagctcaacagccccagctctgcagtcagcctggtcactgtggtgggaggcaccacggtagggttactcaccatctgcctcactgtcattgcagtgctgatgtgcaggggcaaggaaagtttcagggggaaggatgccccgaaaggctccagcagcagtgagcccatggtgcccccacagagccatcacaatgacagctcagaagtttgatgactgcaggtagaattcaaccttttccgtaagtgcctcggaaaagatcacaatggaaccttaaatacttctggtaaaccatagagaatggaggatggctgtgatgaagctgcttagagaatatgactgtactaatggagtttgatttgaattctccatactcttttttgcatcaaaggacaaattaaggcatctttcctcttgccccaaaggcagcaacaacgtactcatatgtacacagagccatgatgtgaggaatgtactcctcattttagacatattctctatgcagtggagataaatctattaaaaggtgctaacagactctcttacaagtgtaagaggaatctactgttgctatgttagtgtgaatgttgaaggtgcaattatcacattgtttattaattgtataacagattattactagaaaggtttttgttgctagtctggaaaactggtgaacacactgtttattatgacaagttttcaaataggtgaagacagcatagaattatgaccagggtggctcaacccacaaatcaactgatctactacttgggagacagtggaaggaaagatagagggaaggaagttcactcacttgaatttgaattgcttctcattctcatcagactctccttgttttgtttgcatatttaattttaaattaaaccaaagaatatgttaattctgaaagagatttttaagagatgctgctctgttttggcatatagtgagtaatggtagagctcttgcatggtaatataccttattggtgctcaacatttgtgggaaattagagggttggtgagattttggtgatgaataaatgccatagagttagagtcactacaagacaatgttctctaagaactgagcctagatgtttgcagtattgaacccataaatgataataagaaacattgttacagatggtgaagggagaaagtggtatttattaatataatgtgtataatcagagtgcctcttatacatactttatagaataaaggaacattttgacagatgaggttatccctcggagtagcgtaatcacacaataacatttagaacttaaattggctacaggacattttattagctttctatccagcatctggtccaaacgatgggactctctgcaactatcattccagaaatggtcttggaggtggccagaatcattgaccatatttttatttggttcaagaagacatcgctctggcatccccagttcagtgaactggtacaatgtggtccctctcaatatttaaaaatataatttgtaacagtgcttaccattcacctcccaaagccaaggaacttgagtgagcttccttggcaagcctcccattgcctttctgcatcaatgtgtttgttaccaaatagcagaaatttcgcttagaaggggaaaacttcagctttccaaaagctagtaaacatgtttcaaagaaaaataaggtcaggagaaaaagaataatgcctacagattatccttcagatgctggctagaatcccctttgacttctagccataagctggccacattggacatcttggtcactgcagaattttaaaaggcaaacttctcagaacagatgtgcacatcttaatttggtgtctgtaagtatcaaccatttcttgatcaagataaggaagcaacactgatactgagagagaggtcatatgtccaatagttgcctttcttctcttaggcagctctgcacttcatgttcagttttttaaaaatagactgtagtatcctttcattggagaatttacaaaaatatcatctacagctcaaaagtcccactaacggcttatatgaacagaaagtactgtgtagcccaggagtttatttagcaagataaatagtggtaatttcttaatcattcccctttcctttgctttaccttctggcagatgcttagctacttctttggctacctcataatttgtatgggaatgaacatgaattagggaacttcaaatagtgcgtagacttttccctacttaccattgggttcaattgatgtagactgttagagcaagtatactcaatcaacttgctgatattttagtagttaacagcttccgagcctatcatgcaatttggagtctgtcaatgaatatagcaatcggtgaagcattactgtacgaagtctgttttcaggctttgggtcaagctggttttataccaaatttcactctacaatgcatattctaatgaagctactttatataaattggagagcttataaaatgcagaacatttctatcctatcctaccaaatatttatccttctctgtcctctattctcttactctcctctctccctttttccttccctttattcccttgaaaaaagagaatctgtgggaaataggcagatatagctttttaaaatataaagtacttgggattttgcattatttttcttaatatctatttactaagtatgtaatttaatatacattaattattttttgaaactcttgttagtgggaagaatatggtaaattttttgttaaataaaatagacccttatgtttagcattttgtttttagagaactattctggtactatcagaacaaatacataaaataacttcccatagagaacaggatatagcaataatagctccttagatactcagtggcttctgactccaatcaaggtcttgttgatattatatagtaaaaataaaaccaaaaataaatattattcaagtggctcttctaagcatgtgaatcatgaagcactgaaatatgtattttaatgatgatcttatttattcccatttttgcccttagttaacatttactggtgctcacctaggattggctattctgagggattgcatagaaaccaagctccacttgctgtccttgggaaggttataactgaatgcagctctttatttggactaaagtgtcaggatatgcattagattctctcctgaaccaaaaacacaacagtcattatctgtgaaccataatttaaaaatctttctagaataacaacagcagactccactcttgtttgtctaaaagagccctactgggtatggatcattctgatgacagatttatacaaaatgattcaaaccagtaacttagtaaaattgaccttcgcaaaacctcactgggggagtgccttgtagagctgtgggtgggactgcacattcttttcctcttagtaaaagataggcccactttattccaagaataacacttagcacataaactcttcttccagctcgttagcagcattagcaccttctgaattccaccctctcagaagaatccacagtgtttgaacaatttgcataaaggtcagctagcatcctgctgccaagccactgcatagcatttgtgataagaaggaccaactctaggctcaatatgaagggatttagttctgtaagcagcaaaaaagcttctttatcaagtcatcttacctctaattcttttccagtgtgccaactccaaagtcaacattaaaaatgtaaatggacctgtgtaaatatcacagagagcttttccttatacatctcaatgctgagagttaaaatattcccaggttaaaatttttttaaagtaccaataatagagctaaatacaatgacatttgcttttaaaaggtggatattttatttctgctttttgaaaatacttatttagtattgacttggaagccaatttggtcctttaataagtaaagaaaataatatgtttaaaaatgtaaatgttttacaaatttgaaactttcataattgtattaatcagaaaacaagcacattgccattctttgaaactcatgtttctagacatgacagcagtaataaaaggatgaaaacaagtgtcttcactaagcgtatggccaataaatgggacccaaacgttcaatctgttcagtttaccaaggttcagaaatacgtaatttagcaggaaactataaataccagtgctatcacagccacacatacacacacacagacataaaataaccaaacatctcatttctaggaaagagataacactaaaggcatcataggtttaactgaaatacgttatatgaagttttacaaaaaggtcaacagaaagctcatttgtgaaaacatactctcatgggagcttctttaacattagttcagaggttaatatatttcctggaggtgttttcctagaattgattgcactattgcatggtaataacatttaattgttaaggaaacattatatataggttcaaattatcccttaatgttgatttctccccttttccatggattttgatactaagaaacaaaatgctttgagattttggtaactattttgattttgataaaacatgttaaaatagaaggacatgatatttttctatagtttccatcaggaagagtacatcagaaacttctccataaggaaagaaaactgactctctcttgaactagtgttgacaaaatacactaatgtctttcttaattttattttattaggagaaaaatcagaatattaaatttgcaaacttttgaacagcagtaatagctccttagacactcagtatctttcttccctatctttcaagcacatttaatttctttcccctggtatttgtttgctttgtgttttttcaatattttgtttgctaaagaacaataacaacaacaaagctggtccagccctgacacctacttttgctttttttctttctttcttttaatttgttgaactataggtttctttctgagatgtatttttcattcttccaataatgctctctttttcatttcaaaaccattaccactttcaatatgtaattaacatcctcattcatcagaaagctggtaagtccacacagcatttgtgcagtatcccttctgtgtaaaatgttaaggctttcagatgaaagaaaaaagaacttcctgcaaaagatcaaaagcatcatactaaataaaatgatgacaatatgtgccttgatttttctctcaatggaggttcaacattgacatttaagatgtaaaaaaaattactttgatggtttaattaagaataataagtcaaatatcacatgtatgtagttcttttggatgaccgaataccttaaaatgaactaaataactgaaataaagtgttaaaatgttaa

SEQ ID NO: 11234 - DNA, 12479 bp, Homo sapiens
  source 1..12479: mol_type = unassigned DNA
aactttaaaaagctgcttcggacaaaccagagccaggatttccactgtcggggacccgggatcggaagggtctagcccgagggaaatgctggaagatcccatcggccagtgaccagcaactttccggcgagattttgacgcggagaactgtgctctgcctcctcttattctcccaaagctcacgttggcgtcctgccttgcgggggaactcggcgcgctctctgcctgagcagcgagtgaattgaaccccagcccgctccggcgcctccgggctgatgagtgtcgctctccgcccgtccatctctttttcccggaggtaaaggcccgcggtcccccaccttcagtgcgcccgggttccaagcgccggagccagcgttttggcggagccgcttcttggatgctgaaggctgggctcctccatcgtgggtgccgaggcggcgatgggtgtcctcaaagtgtggctcgggctggccctagcgttggcggaatttgcagtattgcctcatcattccgaaggtgcttgtgtctatcaggattccttgttggcggatgccacaatttggaagcccgattcatgccagagctgccgttgccatggtgatattgttatctgcaaacctgctgtttgcagaaaccctcaatgtgcctttgagaagggagaagtgcttcaaatagctgccaaccaatgctgtcctgagtgtgttttgaggactccaggatcttgccatcatgaaaagaaaatccatgagcatgggacagaatgggcctcttctccatgtagtgtgtgctcttgcaatcatggggaagtccgatgtaccccccaaccatgcccaccgctgtcatgtggacaccaggagctggcattcatccctgaaggaagctgctgcccagtttgtgtgggccttgggaaaccctgttcctatgaaggccatgtgtttcaggatggggaggactggcggctgagccggtgtgccaaatgtctgtgtagaaatggggttgcccagtgcttcacagctcagtgtcagcctctattttgtaaccaggatgagactgtagtccgagtccctggaaaatgttgcccgcagtgctctgcaagatcctgctctgcagctggccaagtatacgagcatggtgagcagtggagcgaaaatgcctgcaccacgtgtatatgtgaccggggtgaggtcaggtgtcacaagcaggcctgcctgcccctgagatgcggaaagggtcagagcagggctcggcgtcatgggcaatgctgtgaggaatgtgtgtctcctgccgggagctgctcctatgatggagttgtgcggtaccaggacgaaatgtggaagggctcggcctgtgagttctgcatgtgtgatcatggccaagtgacctgccagactggagagtgtgccaaagtggagtgtgcccgggatgaagaattaattcacttagatggaaagtgttgtcctgaatgcatttcaaggaatggttattgtgtttatgaagaaactggagaatttatgtcatcaaatgctagtgaagttaaacgtattccagagggagagaagtgggaagatggcccttgcaaggtgtgtgagtgccgaggggctcaggtaacttgctacgagccctcttgcccaccatgtccagtgggcacactggccttagaggtgaagggacagtgctgtccagactgcacatcagttcattgccatccagattgtttgacatgctctcagtctccagaccactgtgacctctgccaagatcctaccaagttactgcagaatggatggtgtgtgcacagctgtggactgggtttttaccaagctggcagtctctgtttagcctgccagccccagtgctccacgtgtaccagtgggctggagtgctcatcctgccagcctcccctgctgatgcggcacgggcagtgtgtgcctacctgtggggacggcttctaccaagatcgccattcctgtgcagtctgccatgagtcctgtgcaggttgctggggcccaacggagaagcactgcttggcctgcagagatcccctccacgtgctgagagatggcggctgtgagagcagctgtggaaaaggcttctacaacaggcagggcacctgtagcgcttgtgaccaatcctgtgacagttgtggccccagtagccccaggtgtcttacctgtactgagaagacagtgctgcatgatgggaaatgcatgtctgaatgccctggcgggtactatgctgatgccactggcaggtgcaaagtttgtcataactcatgtgccagctgctctgggcccacaccctctcactgtacagcctgcagcccccccaaggctctgcgtcaaggccactgtctgccccgctgtggagagggtttctactctgaccatggagtctgcaaagcctgtcactcctcctgcctggcttgtatgggtcccgcaccctctcactgtactgggtgtaagaagccagaggaaggactgcaagtggagcagctgtctgacgtgggcatcccctctggcgagtgtctagcccagtgtagagcccatttttacttggagagcactggcatatgtgaagcttgccaccagtcctgtttcagatgtgcagggaaaagcccacataactgcacagactgtgggccttcccatgtgctgttggatgggcagtgcctctcccagtgcccagatggctactttcaccaggaaggtagttgcacagagtgtcacccaacctgcaggcagtgtcatgggccgttggagtctgactgcatctcctgttaccctcacatctctcttaccaatggtaactgcaggaccagctgcagggaagagcagttcctcaacctcgtgggatactgtgctgactgccatcacctgtgccagcactgtgcagctgatctccacaacactgggagcatctgcctcaggtgccagaatgcccactacctgctgctcggggaccactgtgttcctgactgcccttcaggatactatgcagagagaggagcttgtaaaaaatgccactcctcctgcagaacctgccagggcagaggacctttctcctgctcctcatgtgacaccaacctcgtgctgtcccacactggcacctgcagcaccacctgcttccctgggcactatcttgatgacaatcatgtttgccagccatgcaacacacactgtggaagctgtgattcacaggccagctgtacctcctgccgagatccaaacaaggttctgctctttggggaatgtcaatacgagagctgcgccccacagtactatcttgacttctccaccaacacgtgcaaagagtgtgattggagctgcagtgcatgcagtgggcccctgaaaacagactgcctgcagtgcatggatggctatgttctccaggatggggcctgcgtggagcagtgcttgtcatcattttaccaggactcgggcctctgcaagaactgtgacagctactgtctccagtgccaaggtccccatgagtgtacccgctgcaaagggccatttctcctcttggaagcccagtgtgtccaggaatgtgggaaggggtactttgcagatcatgcaaagcacaaatgcacagcctgccctcaggggtgcttgcagtgcagccacagggaccgttgtcacctctgtgaccatgggttctttctgaagagtggcctctgtgtttacaactgtgttcctggcttttctgtccacacctctaatgaaacatgttctggcaaaatacacacccctagtcttcatgtgaatggttccctgatcctcccaattggttcaataaagccactggatttttccctcctgaatgtccaagaccaggagggtagggtcgaagatctcctatttcatgttgtgagcactcccaccaatggtcagctagtgctctcaagaaatggaaaagaggttcagctggacaaggctggccgttttagctggaaagatgtgaacgagaagaaagtgcgttttgtgcacagcaaagaaaaactcaggaaaggttaccttttcctgaaaattagtgaccagcagttcttctctgagccacagctgatcaacatacaagcattttcaacacaggccccctatgtgctgagaaatgaagttctccacattagcagaggagagagggcaaccatcaccacccagatgcttgacatccgagatgatgacaacccacaggatgtggtcattgaaataatcgatcctccacttcatggccaattgcttcagacacttcagtccccggcaacccctatctatcaattccagctggatgaactctctagaggccttctccactatgctcatgatggttcagacagcacatccgatgttgcagtcttgcaggccaatgatggacactccttccataatatactgttccaagtgaagaccgtgcctcagaatgacaggggtcttcagcttgtggctaattcgatggtgtgggttccagaaggggggatgctgcagatcaccaacagaatcttacaggccgaggctcctggtgccagtgctgaagaaatcatctacaagattacacaagactacccccagtttggggaggtggtccttctagtgaatatgcctgcagacagccctgcagatgaagggcagcacctgcctgatgggaggacagctacccccaccagcaccttcacccagcaggacatcaatgaaggcatcgtatggtacaggcactcaggagccccagcccagagcgactccttccgcttcgaggtgtccagtgcctccaatgcccagacccgcctggagagccacatgttcaacatcgcgatcttaccacagacacctgaagcacctaaagtgtctctggaagcatctctccatatgactgctagagaagatggcctgactgttattcagcctcattccctctccttcataaactctgagaagccaagtggaaagattgtctacaacatcactctacctctgcatccaaatcaaggtatcatcgagcaccgggaccaccctcactctcctatccggtatttcacgcaagaggatattaaccagggcaaagtcatgtaccgccctcccccggcagcaccccacctccaggagctcatggccttctcgttcgctggtctcccagaatcagtgaaattccacttcacagtttcagatggagaacacacaagtccggagatggtcctcaccattcacttacttcccagtgatcagcaactgccagtgttccaggtcacagctccacggctggcggtcagcccaggaggcagcacttctgtaggacttcaggtggtagtaagagatgctgagacagcgcccaaagaactcttctttgagcttcggagacctccacagcatggtgtgcttcttaagcatacagctgagttccgaaggccgatggccacaggtgacactttcacctatgaggatgttgagaaaaatgctctacagtatatacatgatggttcctctacccgggaagacagcatggagatctcagtcacagatggcctcacagtgacaatgctggaggtgagagtagaggtgtccctgtcagaagaccgagggcctcgactggctgctggctcctctctgagcattactgttgccagtaaaagcacagccataatcactaggtcacaccttgcttacgtggatgattcttcccccgacccagagatctggattcagttaaattatctgccctcatatggtactctcttaagaatctcaggatctgaggtggaagagctctcagaagtttccaatttcacaatggaagacatcaataacaagaaaatcagatactcagctgtgtttgaaactgatggtcatctggttactgatagcttctatttctctgtctctgacatggaccacaaccatctggataatcagatatttaccatcatgatcactcctgctgaaaatccacctccagtcattgcttttgctgaccttatcacggttgatgagggagggagagcaccactctcatttcaccatttttttgctactgatgatgatgacaacctccagagagatgccatcattaaactaagtgctctgcccaaatatggctgcattgagaacacaggaacaggtgatcgttttggccctgaaactgccagtgacctagaggcatcatttcctattcaagacgtcctggaaaactacatttactactttcagagtgttcatgaaagcattgagccaacccatgatatttttagtttttatgtgagtgatggaaccagtcgttcagaaattcacagcatcaatatcaccattgagaggaagaacgatgagcctcccaggatgaccttgcagcccctcagagtgcagctgagctcgggagtggtgataagcaattcttctttgagcctgcaagacctggacaccccagataatgagctcatttttgtattgacaaaaaagcctgaccacggtcatgtactctggaggcaaactgcttctgagcctctggagaatgggagagttttagtccagggctcaaccttcacctaccaggatatcctagctgggctggttgggtatgtgcctagtgtccctggcatggtcgtggatgagttccagttctccctcactgatggcctccacgtggacacagggaggatgaagatctacacagaactgcctgcaagtgacacacctcacttggctataaaccaaggcctacagctctcagcagggtctgtagcacgcatcacagaacagcacttgaaagtgacagatattgactcagatgaccatcaggttatgtacatcatgaaggaagatcctggtgcagggcgcctgcagatgatgaagcatggcaacctggagcaaatttctattaaaggccccatccgaagtttcacccaggcagacattagccaaggccacgtagaatatagtcatggaacaggagaacctggagggagctttgcttttaaatttgatgtggttgatggagaaggcaacagattgattgacaagtcattttccatcagcattctagaagacaaatccccaccagtcatcaccaccaataaaggactggtcttggatgaaaactcagtgaagaaaatcaccaccctgcagctgtctgccactgaccaggacagtgggcctacagaattgatctacagaatcaccagacagccccagctgggccacttggaacatgcagcatcaccaggtatccagattagttcctttactcaagctgatctgacttcacgaaatgttcagtatgtccattctagtgaggctgagaaacattcagatgccttcagctttacactgtctgatggagtcagtgaggtgactcagactttccatatcactcttcaccctgtcgatgattcgctgcccgtcgtacagaacttaggaatgcgggtgcaggagggcatgaggaagaccatcacagagtttgagcttaaggcggtggatgctgacacagaggccgagtctgtcacattcaccatcgtgcagcctccacgccatggcaccatcgagcgaaccagcaatgggcagcatttccacctcacctccaccttcaccatgaaagatatctaccagaaccgggtcagctacagccatgacggcagtaactccctcaaggaccggttcaccttcactgtttctgatgggacaaaccccttctttatcattgaggaagggggaaaagagattatgacagcagcacctcagccgttccgagtagacatcctcccggtagatgatggcacgcctagaattgtcaccaacctgggactccagtggctggaatacatggatggcaaggcaaccaacctgatcaccaagaaggaactgctgaccatggacccagacaccgaggacgcgcagcttgtctatgagataacgacgggccctaagcatggctttgtggagaacaagctgcagcctggcagagctgctgccactttcacccaggaggatgtgaacttggggttgattcgttatgtgttgcacaaggagaagatccgtgagatgatggatagttttcagtttctggtgaaagacagtaaacccaatgtggtcagcgacaatgtcttccatatccagtggtcactcatcagctttaaatataccagctacaatgtcagtgagaaggcagggtctgtcagtgtcacggtgcagaggactgggaacctgaaccaatatgccatcgtcctgtgtcgcaccgagcaaggcaccgccagctccagctccagggtcagctcccaacctgggcaacaggactatgtagagtatgctggccaggtccagtttgatgagcgagaggacaccaagtcctgcaccattgtcatcaacgatgatgacgtgtttgaaaatgttgagagtttcactgtggagctcagcatgccagcttatgccctgttaggggaattcacccaggcgaaggtcattatcaacgataccgaggatgaacccacattagagtttgacaagaagatctactgggttaacgagagcgctggttttctgtttgcacctattgaaagaaaaggagatgcaagcagcattgtatctgcaatttgctacacagtccctaagtcagctatgggaagtagcctctatgctctagaatcaggctctgattttaaatctagagggatgtctgccgcgagtcgtgtgatattcgggcctggtgtgaccatgtccacctgtgatgtcatgcttattgatgacagcgagtatgaagaggaagaagagtttgagattgccttggcagatgcctctgacaatgcccgcattggaagggtggcgacagccaaggtgctcattagtggtcccaacgatgcctcgactgtgtccctgggcaacacggctttcactgtcagtgaggacgcaggcacagtaaagattccagttatccgccatggtactgacctctctactttcgcatctgtctggtgtgcaacgcggccctcagacccagcttctgccacaccaggagttgactacgttcccagctctcggaaggtggaatttgggcctggtgtcattgaacagtattgcaccttgactatcttggatgacactcagtatccggtaattgaaggactggagacatttgtggttttcctcagctcagcacaaggagccgaactgaccaaacccttccaggcagtcattgcaattaatgacacattccaagatgtgcccagcatgcagtttgccaaggatttgctcctagtgaaggagaaggagggtgtcctgcatgtccctatcactcggagcggagacctgagctatgagtcatcagtgaggtgctatactcagagccattccgctcaggtcatggaggactttgaggagagacaaaatgcagactcttcacggattacatttctcaaaggggacaaagtgaagaactgtacggtctatatccacgatgactccatgtttgagccagaggaacagttcagggtctacctcggccttcctcttggaaaccactggagtggagctagaattggaaagaataacatggccaccatcaccatatccaatgatgaagatgcccccaccattgagtttgaagaagctgcataccaagtccgggaacccgcaggcccagatgccattgcgattctgaacatcaaggtgatccgcagaggggatcagaacaggacctccaaggttcgctgcagcacgcgggatggctctgcccagtctggtgtggattattacccaaagagccgagtcttgaagttcagtcccggtgtggatcatatcttttttaaagttgagatcctgtccaatgaagaccgggaatggcatgaatctttctcactagtccttggcccagatgacccagtggaagcagttcttggggatgtgactactgccacggtgacaattctagaccaggaggcagcagggagcctcatattgccagcaccacccattgtggtcacacttgctgactatgaccatgtggaagaagttaccaaggaaggagtcaagaaatccccctccccaggctacccactggtctgtgtcaccccctgcgaccctcatttccccagatacgctgtcatgaaggagcgctgcagtgaggccggcatcaaccagacatctgtgcagttcagctgggaagtggctgcccccactgatggcaatggggcccggtctccctttgaaaccatcactgacaacacaccattcaccagtgtcaaccacatggtcctggacagcatttacttcagccggaggttccatgtgcgttgtgtggccaaggctgtggacaaggtgggccatgtggggacccccttaaggagcaacattgttaccattggaacagacagtgctatctgccacacaccagtggtggctgggacatccagaggcttccaggctcagtccttcatcgcaaccttgaaatacctggatgtcaaacataaggagcatccgaacagaatccacatttcggtgcagatcccacaccaggatggaatgctgccccttatctccaccatgccgttgcacaacttacattttctactgtctgagtccatctacagacaccagcacgtctgctccaatttagttaccacctatgacctgagaggcatctcagaggcagggttcctggatgatgtggtctatgatagcactgccctggggcctggctacgatcgccccttccagtttgaccccagcgtgcgagagccgaagaccatccagctctacaaacacctgaacctgaagagctgcgtgtggacctttgatgcttattatgacatgactgagctgattgacgtctgtgggggctctgtaaccgctgacttccaggtgagggactctgcccagtccttcttgacagtgcacgtgcctctatatgtgtcctacatctatgtgacagcccccaggggctgggcctccttggagcaccacaccgagatggagttttctttcttctatgacactgttctctggagaacaggaatccagacagacagcgtgctctctgcaaggcttcagataataagaatctacattcgagaggatggccgtcttgtcattgaattcaagacccatgccaaattcagaggacagtttgtgatggagcatcacactctcccagaagtgaaatctttcgtattgactccagaccacctaggaggaattgaatttgacttgcagctattatggagcgctcagacttttgattctccacatcaactctggagagccacaagctcttataacaggaaggactactcaggagagtacaccatctacctgatcccttgcacagtgcagcccacacagccatgggttgacccaggagagaagcctttggcctgcactgcacatgccccagaaagattcctgatacccattgcattccagcagaccaaccgccctgtgccagttgtgtattcacttaacactgaatttcagctctgcaataatgagaaggtgttcctaatggatcccaatacatctgatatgtcactagcagaaatggattacaaaggagccttttcaaaaggtcaaatcctttatggccgagtactttggaatccagaacaaaatcttaattctgcttacaaactccagctggagaaagtctatctttgtacgggcaaggatggttatgtgcctttctttgatcccacggggacaatctacaatgaagggccccagtatggatgcattcagccaaacaaacacctaaaacacagattcctgctgttggaccgcaatcagccagaggtaactgataagtacttccatgatgtgccttttgaggctcactttgcctctgagttgcctgatttccatgtggtcagtaacatgccaggtgtggatggatttactctaaaagtagatgcactctataaggtggaagcaggacaccagtggtatctccaggtcatctacatcattggccctgacaccatctcagggccccgggtccagcgctctctcacagctccactcagacgcaaccgaagggacctggtagagcccgatggccagctgatccttgatgattccctcatctatgacaatgaaggagaccaagtcaagaatggcaccaatatgaagtccctgaatctggagatgcaagagttggcggtagctgcgtccctgtcacagactggggcgtccattggcagtgccctggctgcaatcatgcttctacttctggtgtttttggtggcttgttttatcaacaggaaatgccagaaacagaggaagaagaagcccgcagaggacattttggaagaatatcctctgaataccaaggtagaagtgcccaagaggcacccggaccgggtggagaagaacgtgaatagacactactgcactgtgcggaacgtcaacatcctgagtgagcctgaggcggcttacacgttcaaaggtgctaaagtcaaaagactgaatctagaagtcagagttcacaacaatttacaagatggaacagaagtttaa

SEQ ID NO: 11235 - DNA, 2654 bp, Homo sapiens
  source 1..2654: mol_type = unassigned DNA
aactttaaaaagctgcttcggacaaaccagagccaggatttccactgtcggggacccgggatcggaagggtctagcccgagggaaatgctggaagatcccatcggccagtgaccagcaactttccggcgagattttgacgcggagaactgtgctctgcctcctcttattctcccaaagctcacgttggcgtcctgccttgcgggggaactcggcgcgctctctgcctgagcagcgagtgaattgaaccccagcccgctccggcgcctccgggctgatgagtgtcgctctccgcccgtccatctctttttcccggaggtaaaggcccgcggtcccccaccttcagtgcgcccgggttccaagcgccggagccagcgttttggcggagccgcttcttggatgctgaaggctgggctcctccatcgtgggtgccgaggcggcgatgggtgtcctcaaagtgtggctcgggctggccctagcgttggcggaatttgcagtattgcctcatcattccgaaggtgcttgtgtctatcaggattccttgttggcggatgccacaatttggaagcccgattcatgccagagctgccgttgccatggtgatattgttatctgcaaacctgctgtttgcagaaaccctcaatgtgcctttgagaagggagaagtgcttcaaatagctgccaaccaatgctgtcctgagtgtgttttgaggactccaggatcttgccatcatgaaaagaaaatccatgagcatgggacagaatgggcctcttctccatgtagtgtgtgctcttgcaatcatggggaagtccgatgtaccccccaaccatgcccaccgctgtcatgtggacaccaggagctggcattcatccctgaaggaagctgctgcccagtttgtgtgggccttgggaaaccctgttcctatgaaggccatgtgtttcaggatggggaggactggcggctgagccggtgtgccaaatgtctgtgtagaaatggggttgcccagtgcttcacagctcagtgtcagcctctattttgtaaccaggatgagactgtagtccgagtccctggaaaatgttgcccgcagtgctctgcaagatcctgctctgcagctggccaagtatacgagcatggtgagcagtggagcgaaaatgcctgcaccacgtgtatatgtgaccggggtgaggtcaggtgtcacaagcaggcctgcctgcccctgagatgcggaaagggtcagagcagggctcggcgtcatgggcaatgctgtgaggaatgtgtgtctcctgccgggagctgctcctatgatggagttgtgcggtaccaggacgaaatgtggaagggctcggcctgtgagttctgcatgtgtgatcatggccaagtgacctgccagactggagagtgtgccaaagtggagtgtgcccgggatgaagaattaattcacttagatggaaagtgttgtcctgaatgcatttcaaggaatggttattgtgtttatgaagaaactggagaatttatgtcatcaaatgctagtgaagttaaacgtattccagagggagagaagtgggaagatggcccttgcaaggtgtgtgagtgccgaggggctcaggtaacttgctacgagccctcttgcccaccatgtccagtgggcacactggccttagaggtgaagggacagtgctgtccagactgcacatcagttcattgccatccagattgtttgacatgctctcagtctccagaccactgtgacctctgccaagatcctaccaagttactgcagaatggatggtgtgtgcacagctgtggactgggtttttaccaagctggcagtctctgtttagcctgccagccccagtgctccacgtgtaccagtgggctggagtgctcatcctgccagcctcccctgctgatgcggcacgggcagtgtgtgcctacctgtggggacggcttctaccaagatcgccattcctgtgcagtctgccatgagtcctgtgcaggttgctggggcccaacggagaagcactgcttggcctgcagagatcccctccacgtgctgagagatggcggctgtgagagcagctgtggaaaaggcttctacaacaggcagggcacctgtagcgcttgtgaccaatcctgtgacagttgtggccccagtagccccaggtgtcttacctgtactgagaagacagtgctgcatgatgggaaatgcatgtctgaatgccctggcgggtactatgctgatgccactggcaggtgcaaagtttgtcataactcatgtgccagctgctctgggcccacaccctctcactgtacagcctgcagcccccccaaggctctgcgtcaaggccactgtctgccccgctgtggagagggtttctactctgaccatggagtctgcaaagcctgtcactcctcctgcctggcttgtatgggtcccgcaccctctcactgtactgggtgtaagaagccagaggaaggactgcaagtggagcagctgtctgacgtgggcatcccctctggcgagtgtctagcccagtgtagagcccatttttacttggagagcactggcatatgtgaagggcaaaatctggacttctgtcagaatttagaagtgatttctgctgtttgccttggcatatcatctacagagaattga

SEQ ID NO: 11236 - DNA, 3330 bp, Homo sapiens
  source 1..3330: mol_type = unassigned DNA
ggctcctccatcgtgggtgccgaggcggcgatgggtgtcctcaaagtgtggctcgggctggccctagcgttggcggaatttgcagtattgcctcatcattccgaaggtgcttgtgtctatcaggattccttgttggcggatgccacaatttggaagcccgattcatgccagagctgccgttgccatggtgatattgttatctgcaaacctgctgtttgcagaaaccctcaatgtgcctttgagaagggagaagtgcttcaaatagctgccaaccaatgctgtcctgagtgtgttttgaggactccaggatcttgccatcatgaaaagaaaatccatgagcatgggacagaatgggcctcttctccatgtagtgtgtgctcttgcaatcatggggaagtccgatgtaccccccaaccatgcccaccgctgtcatgtggacaccaggagctggcattcatccctgaaggaagctgctgcccagtttgtgtgggccttgggaaaccctgttcctatgaaggccatgtgtttcaggatggggaggactggcggctgagccggtgtgccaaatgtctgtgtagaaatggggttgcccagtgcttcacagctcagtgtcagcctctattttgtaaccaggatgagactgtagtccgagtccctggaaaatgttgcccgcagtgctctgcaagatcctgctctgcagctggccaagtatacgagcatggtgagcagtggagcgaaaatgcctgcaccacgtgtatatgtgaccggggtgaggtcaggtgtcacaagcaggcctgcctgcccctgagatgcggaaagggtcagagcagggctcggcgtcatgggcaatgctgtgaggaatgtgtgtctcctgccttggcctcccaaagtgttgggattacaggcatgagccaccatgcccagtcactacttgggccatttttgactcaaataaagaagccacatttctcctgtttagagtgataaatttaagaaaaaagtaaaaattggaaggaattttagccgttccttctggaaaccctgaactgtatagcctaatgattattgggtcactggccgcttagacctctctcagcttctgttgcctagaggaataaaatctgaggggtaaaatttaaaaaaattcatgttattgaagaaaaaaaaatggtgttgagctcttctttcaaatgaattctaataaatatgacactgtctataattcaggaagttaatagccttttaattttggatctgatttttgcaaagggtcatggagaagggaaggggaaagcctgttgccttcagatctgctagctgcacttttctgtgttgatgtatatccaggcaatgtttgaagacacaagggttttcttggtctcctctctctagaataacattgtgatgacaatttcaaatcaatcagttagactcaaattaaaatcaagtaaaaaacaagacatctatcatttagatattgcttactcttcccctgggccttttgcagtgtttggggttgggatgagaggagtaatctgagccagcattttctgtggagctctgaatggtaactgggcatctcggtacctgaatggtggtacccaagcgcctcagtgcctgaatcccacctgagcatcatagtatctgaatggtacctgagctctgaatggtcctggagcatcacaatagccctggtgctctatcccaggggctgggctctgacccatgcagaggttcccttaagaaactgggaggtccaatgaaaacatgctgcaaatgtttcttcgattaaaagatacacagttaacactacagatgtttttagattaaaagatatgcatttaacattttcttatgtagtgaaagagggttcctcatgcaggatatgccagatagaatggttttgaaactagctggagcttaaggtagaatctctgcttctgtattgtcacttgccctagtaacagaagttatgatcagagactcctaataaaacaaccagtggttctatgttatataaattattgtaagtttttttgcatattatctcatttgattccttttggaaatggcagggcaggtatatccatttatagatgagaaatagtcagtgaggaaacggatctgacccaggccttccaattcctggtcttgtgcttatcccactctcccaactttatcctcaaatacattttctttttttttgccgaaaatgataccttgttttctagttcagcctagtaagcaggaattgatagatcaaggtaaaaatgctctcttgatgttgatgcaggtgatcgttttggccctgaaactgccagtgacctagaggcatcatttcctattcaagacgtcctggaaaactacatttactactttcagagtgttcatgaaagcattgagccaacccatgatatttttagtttttatgtgagtgatggaaccagtcgttcagaaattcacagcatcaatatcaccattgaggtaaagactttggaagttggaaaggttgagcccttgaccacaatatttcacaccattagagagctttctttatagggactcaaaagcaaagaagattggatttgaccttcaaaattgaaggtcgttcttaaaatatagccttcaggaatcttgtagaattaaggttggcatttggggaaggcttgagttagaaatctaaatttccatttcaggattgaatttatttgttcggtgtgaaaaacagtttgtgaaggtcagagatgctttgccagtctcatatataaatgaaaacttacatatgtctatgtttctctgaaattgtgtttggttctatatgcatatttgccttttcttattttactgcatttatttatttaattgtaacatcaaagaaatgtgttccttgatgctgtatttattctcatttgagcaactacacaggcttgctctaccgagagagagacacaggggaggggaaagataaatctcagaatgaaataccctctgccttgggaaaataaaatgtaaagaaccctctgcactcttaagggtcagtggtggaaaggggctggcaccagggcagggagacagctttagagacccacactttcaaatatagtgtccttctacaggtactgtggtatgcttagcattttctaagagagttctgagttatattagtatggtcttttatcttcaaagtatgttaatacttgtacttgtcaaagcacatatccatatttttggtctagaaaatatggtcattgtacttacggaagatatctgagaaaacttttatgaaatgtccatcagcttcttttgaagggggcattttgttgcctggac

SEQ ID NO: 11237 - DNA, 9869 bp, Homo sapiens
  source 1..9869: mol_type = unassigned DNA
ctcagaagtttccaatttcacaatggaagacatcaataacaagaaaatcagatactcagctgtgtttgaaactgatggtcatctggttactgatagcttctatttctctgtctctgacatggaccacaaccatctggataatcagatatttaccatcatgatcactcctgctgaaaatccacctccagtcattgcttttgctgaccttatcacggttgatgagggagggagagcaccactctcatttcaccatttttttgctactgatgatgatgacaacctccagagagatgccatcattaaactaagtgctctgcccaaatatggctgcattgagaacacaggaacaggtgatcgttttggccctgaaactgccagtgacctagaggcatcatttcctattcaagacgtcctggaaaactacatttactactttcagagtgttcatgaaagcattgagccaacccatgatatttttagtttttatgtgagtgatggaaccagtcgttcagaaattcacagcatcaatatcaccattgagaggaagaacgatgagcctcccaggatgaccttgcagcccctcagagtgcagctgagctcgggagtggtgataagcaattcttctttgagcctgcaagacctggacaccccagataatgagctcatttttgtattgacaaaaaagcctgaccacggtcatgtactctggaggcaaactgcttctgagcctctggagaatgggagagttttagtccagggctcaaccttcacctaccaggatatcctagctgggctggttgggtatgtgcctagtgtccctggcatggtcgtggatgagttccagttctccctcactgatggcctccacgtggacacagggaggatgaagatctacacagaactgcctgcaagtgacacacctcacttggctataaaccaaggcctacagctctcagcagggtctgtagcacgcatcacagaacagcacttgaaagtgacagatattgactcagatgaccatcaggttatgtacatcatgaaggaagatcctggtgcagggcgcctgcagatgatgaagcatggcaacctggagcaaatttctattaaaggccccatccgaagtttcacccaggcagacattagccaaggccacgtagaatatagtcatggaacaggagaacctggagggagctttgcttttaaatttgatgtggttgatggagaaggcaacagattgattgacaagtcattttccatcagcattctagaagacaaatccccaccagtcatcaccaccaataaaggactggtcttggatgaaaactcagtgaagaaaatcaccaccctgcagctgtctgccactgaccaggacagtgggcctacagaattgatctacagaatcaccagacagccccagctgggccacttggaacatgcagcatcaccaggtatccagattagttcctttactcaagctgatctgacttcacgaaatgttcagtatgtccattctagtgaggctgagaaacattcagatgccttcagctttacactgtctgatggagtcagtgaggtgactcagactttccatatcactcttcaccctgtcgatgattcgctgcccgtcgtacagaacttaggaatgcgggtgcaggagggcatgaggaagaccatcacagagtttgagcttaaggcggtggatgctgacacagaggccgagtctgtcacattcaccatcgtgcagcctccacgccatggcaccatcgagcgaaccagcaatgggcagcatttccacctcacctccaccttcaccatgaaagatatctaccagaaccgggtcagctacagccatgacggcagtaactccctcaaggaccggttcaccttcactgtttctgatgggacaaaccccttctttatcattgaggaagggggaaaagagattatgacagcagcacctcagccgttccgagtagacatcctcccggtagatgatggcacgcctagaattgtcaccaacctgggactccagtggctggaatacatggatggcaaggcaaccaacctgatcaccaagaaggaactgctgaccatggacccagacaccgaggacgcgcagcttgtctatgagataacgacgggccctaagcatggctttgtggagaacaagctgcagcctggcagagctgctgccactttcacccaggaggatgtgaacttggggttgattcgttatgtgttgcacaaggagaagatccgtgagatgatggatagttttcagtttctggtgaaagacagtaaacccaatgtggtcagcgacaatgtcttccatatccagtggtcactcatcagctttaaatataccagctacaatgtcagtgagaaggcagggtctgtcagtgtcacggtgcagaggactgggaacctgaaccaatatgccatcgtcctgtgtcgcaccgagcaaggcaccgccagctccagctccagggtcagctcccaacctgggcaacaggactatgtagagtatgctggccaggtccagtttgatgagcgagaggacaccaagtcctgcaccattgtcatcaacgatgatgacgtgtttgaaaatgttgagagtttcactgtggagctcagcatgccagcttatgccctgttaggggaattcacccaggcgaaggtcattatcaacgataccgaggatgaacccacattagagtttgacaagaagatctactgggttaacgagagcgctggttttctgtttgcacctattgaaagaaaaggagatgcaagcagcattgtatctgcaatttgctacacagtccctaagtcagctatgggaagtagcctctatgctctagaatcaggctctgattttaaatctagagggatgtctgccgcgagtcgtgtgatattcgggcctggtgtgaccatgtccacctgtgatgtcatgcttattgatgacagcgagtatgaagaggaagaagagtttgagattgccttggcagatgcctctgacaatgcccgcattggaagggtggcgacagccaaggtgctcattagtggtcccaacgatgcctcgactgtgtccctgggcaacacggctttcactgtcagtgaggacgcaggcacagtaaagattccagttatccgccatggtactgacctctctactttcgcatctgtctggtgtgcaacgcggccctcagacccagcttctgccacaccaggagttgactacgttcccagctctcggaaggtggaatttgggcctggtgtcattgaacagtattgcaccttgactatcttggatgacactcagtatccggtaattgaaggactggagacatttgtggttttcctcagctcagcacaaggagccgaactgaccaaacccttccaggcagtcattgcaattaatgacacattccaagatgtgcccagcatgcagtttgccaaggatttgctcctagtgaaggagaaggagggtgtcctgcatgtccctatcactcggagcggagacctgagctatgagtcatcagtgaggtgctatactcagagccattccgctcaggtcatggaggactttgaggagagacaaaatgcagactcttcacggattacatttctcaaaggggacaaagtgaagaactgtacggtctatatccacgatgactccatgtttgagccagaggaacagttcagggtctacctcggccttcctcttggaaaccactggagtggagctagaattggaaagaataacatggccaccatcaccatatccaatgatgaagatgcccccaccattgagtttgaagaagctgcataccaagtccgggaacccgcaggcccagatgccattgcgattctgaacatcaaggtgatccgcagaggggatcagaacaggacctccaaggttcgctgcagcacgcgggatggctctgcccagtctggtgtggattattacccaaagagccgagtcttgaagttcagtcccggtgtggatcatatcttttttaaagttgagatcctgtccaatgaagaccgggaatggcatgaatctttctcactagtccttggcccagatgacccagtggaagcagttcttggggatgtgactactgccacggtgacaattctagaccaggaggcagcagggagcctcatattgccagcaccacccattgtggtcacacttgctgactatgaccatgtggaagaagttaccaaggaaggagtcaagaaatccccctccccaggctacccactggtctgtgtcaccccctgcgaccctcatttccccagatacgctgtcatgaaggagcgctgcagtgaggccggcatcaaccagacatctgtgcagttcagctgggaagtggctgcccccactgatggcaatggggcccggtctccctttgaaaccatcactgacaacacaccattcaccagtgtcaaccacatggtcctggacagcatttacttcagccggaggttccatgtgcgttgtgtggccaaggctgtggacaaggtgggccatgtggggacccccttaaggagcaacattgttaccattggaacagacagtgctatctgccacacaccagtggtggctgggacatccagaggcttccaggctcagtccttcatcgcaaccttgaaatacctggatgtcaaacataaggagcatccgaacagaatccacatttcggtgcagatcccacaccaggatggaatgctgccccttatctccaccatgccgttgcacaacttacattttctactgtctgagtccatctacagacaccagcacgtctgctccaatttagttaccacctatgacctgagaggcatctcagaggcagggttcctggatgatgtggtctatgatagcactgccctggggcctggctacgatcgccccttccagtttgaccccagcgtgcgagagccgaagaccatccagctctacaaacacctgaacctgaagagctgcgtgtggacctttgatgcttattatgacatgactgagctgattgacgtctgtgggggctctgtaaccgctgacttccaggtgagggactctgcccagtccttcttgacagtgcacgtgcctctatatgtgtcctacatctatgtgacagcccccaggggctgggcctccttggagcaccacaccgagatggagttttctttcttctatgacactgttctctggagaacaggaatccagacagacagcgtgctctctgcaaggcttcagataataagaatctacattcgagaggatggccgtcttgtcattgaattcaagacccatgccaaattcagaggacagtttgtgatggagcatcacactctcccagaagtgaaatctttcgtattgactccagaccacctaggaggaattgaatttgacttgcagctattatggagcgctcagacttttgattctccacatcaactctggagagccacaagctcttataacaggaaggactactcaggagagtacaccatctacctgatcccttgcacagtgcagcccacacagccatgggttgacccaggagagaagcctttggcctgcactgcacatgccccagaaagattcctgatacccattgcattccagcagaccaaccgccctgtgccagttgtgtattcacttaacactgaatttcagctctgcaataatgagaaggtgttcctaatggatcccaatacatctgatatgtcactagcagaaatggattacaaaggagccttttcaaaaggtcaaatcctttatggccgagtactttggaatccagaacaaaatcttaattctgcttacaaactccagctggagaaagtctatctttgtacgggcaaggatggttatgtgcctttctttgatcccacggggacaatctacaatgaagggccccagtatggatgcattcagccaaacaaacacctaaaacacagattcctgctgttggaccgcaatcagccagaggtaactgataagtacttccatgatgtgccttttgaggctcactttgcctctgagttgcctgatttccatgtggtcagtaacatgccaggtgtggatggatttactctaaaagtagatgcactctataaggtggaagcaggacaccagtggtatctccaggtcatctacatcattggccctgacaccatctcagggccccgggtccagcgctctctcacagctccactcagacgcaaccgaagggacctggtagagcccgatggccagctgatccttgatgattccctcatctatgacaatgaaggagaccaagtcaagaatggcaccaatatgaagtccctgaatctggagatgcaagagttggcggtagctgcgtccctgtcacagactggggcgtccattggcagtgccctggctgcaatcatgcttctacttctggtgtttttggtggcttgttttatcaacaggaaatgccagaaacagaggaagaagaagcccgcagaggacattttggaagaatatcctctgaataccaaggtagaagtgcccaagaggcacccggaccgggtggagaagaacgtgaatagacactactgcactgtgcggaacgtcaacatcctgagtgagcctgaggcggcttacacgttcaaaggtgctaaagtcaaaagactgaatctagaagtcagagttcacaacaatttacaagatggaacagaagtttaatggaggagacctatgtgtatttttttctaaaatcatttttataaaatggggggaaatactggtatttttataatctcgcagataaaaaagggaaaactatagctttgagtggcagacagcacacatcacatgcatcaactcacaactgagctacctcattcagcaaagaaccactgagaaccccagagtattacagttatttccgtagatccctttaatagtgtcaacaactgtacacagctccttctgtaaggctggtcttagaaaacaagtactttagtatcaggacaggagttgaacaattaggttagcagatggagatgagaggactgggtagagtaccatggcagatctcagagagaagaagtaggtacgggcctttggttccctcccccagccccagctttctcctacagggcttttcctgagtccccagacagcagagtatgaactgctgacacccagattccattaaaaattctgctaatcgacacaacacatatatttgctcatgatttcacttgacagcgtatgctccttggcctctaattgtactttgcttttccagagccctttttacctggggatttcagtgtgcttaagtaaaatcctctgaaaaccacgggagcctctgcctcctcagccacagagaactccctcctacaaagggggagactgaaacccgagttaaggaggggcctggcaggcgtatcagagcacattagtgatgcccttcaccccagggaggtgtctgttcccaactagtttatgtggcactgagacatccatccctgaccaaggatgctgcgaaacaggatcaatgtactacggccttttaattcaacattgccataaatgctttaaagaaaacccaccacactttcctcctactccggtctttgcccgttcctgtaacagacaatcccatgtcctaggtatggttttttattctgttagtgcttcgggaaagtaagtgattcatttgaataaggcaaattaggagaaagcccaggttggggtgaaatcagacttaacagatacatgctggttctccttgctgtgtgtgacacagcagacagaggcactattcctggtgcagtatttcagggatttctctttgaggggttcttttctggtagctcaggcaattatttttaccatatcagcacatgacaaggccatgaacacatggctctaaaataatttagtgttcaagtatcagcttaactattttgtgtaggctacacacagcttgcttttgtttctcttctgtttctgccttattggcggaaacataagcgtgcatgccatgttgttttgaattggaggcacaatttcattattcgagagtaaaagacatgtcctcttctgatgcatggcacaccatagtcaccaagcaaataacagagccttcacattgtgtaatatttgtatgagaatgactcaagctctttgagaacattccaaactagtaacatttcgctactaaaagctagaaaggatgaactgtgaaaggttctaggcagctctgtgagactccaagctccttgaaagtaggacctttgtgagccacgcctttcattcttcaacagtgccttgcatgtaacaagcactccagaaatgtttgttgaatgaatgaatggtgtcatgggtgaatgatggggagtaaatttaggaaggggaagtgagagagtatggtggcaatatcacaagggaggagagaggaaaacaattatcttctctacttggattatgagataaccttttcttggaggaaagaaacaccgctttacaaaggcatgactctggcggtggtcctaaggaagcatgagcagaaaattcataaaaatgtatcatcagcaggagatgagactatgaattggcatccagaacaggagatttagagcaaaatctaatttagcattctgagatgagtgtcaggttttcaggagagaatgagttggggtgagcccagagtctgaaactcctgactggtcaggtgctacttaagaccagcttgggcaattcagggcagaactcctgtatcagcctcatggacacccagaattggtatctcatggctggagagctgatcagccaggcacagaatctccagaacaacctagagagtgaatgctaatttgtagagcgaacttccatttggcccattatttgtaactgtgtaactgctccaagtgccagaatgcttacacgttaaagcagcacctttccatttgcccacatattcttcttgcacaccccttccattactgctgaataggacattgcatgggaagagtacagaggtggcagaatgaagctagagtgggaaggactaaagactgagccccagagtgctcccagcaaccgccacgtacaaggtctgaaatgacaagggcaagagtgagataggaaactgtgtgtgaaaggaaagcccttgcagtatttctgcctccctttctttctgcctttcaccccactaaatgtatgttattgaatgccagtacttctctagtggatgcacacttgttaaatagtgttaagagatgtggagatgagatatacccctttgatgtagaattattcatttggtttgtttcatacttcattataggaatcaagtaatttgatgactaatgtggattatatttcagtcaaagctctgctttcaatttctctgatttgctcactaatgccttgtgtgtgttttactaaccttttatatcttgccttcaagtgagaaggaacaaacaactctcagtggttactacttgcttttatatgctggctgtgaaggttaaaagaaagaatggtctgtaccattctgctttgctgcccttttattgtaccccaggcctcctagaggactcctgcagattctattgttgggtgggaaatagtgttggaatgtgtttgcacagtcttatgatattcagtctcagtctgctataggtatttgttattcttggatactacacacctgctcagactgagtaaacatttgtggtgctgtcaacctgatttcttgactctcaaatgatttttgtatttccaatatgaatttgtgtgttatgaatttctgatttctccaatagtatatgccactatataaatttgtattaataaatgacagtcttgttggttt

SEQ ID NO: 11238 - DNA, 765 bp, Homo sapiens
  source 1..765: mol_type = unassigned DNA
gagaggcaaggtcagagcagggctcggcgtcatgggcaatgctgtgaggaatgtgtgtctcctgccgggagctgctcctatgatggagttgtgcggtaccaggacgaaatgtggaagggctcggcctgtgagttctgcatgtgtgatcatggccaagtgacctgccagactggagagtgtgccaaagtggagtgtgcccgggatgaagaattaattcacttagatggaaagtgttgtcctgaatgcatttcaaggaatggttattgtgtttatgaagaaactggagaatttatgtcatcaaatgctagtgaagttaaacgtattccagagggagagaagtgggaagatggcccttgcaaggtgtgtgagtgccgaggggctcaggtaacttgctacgagccctcttgcccaccatgtccagtgggcacactggccttagaggtgaagggacagtgctgtccagactgcacatcagttcattgccatccagattgtttgacatgctctcagtctccagaccactgtgacctctgccaagatcctaccaagttactgcagaatggatggtgtgtgcacagctgtggactgggtttttaccaagctggcagtctctgtttagatgatggcttcagcctgccagccccagtgctccacgtgtaccagtgggctggagtgctcatcctgccagcctcccctgctgatgcggcacgggcagtgtgtgcctacctgtggggacggcttctaccaagatcgccattcctgtgc

SEQ ID NO: 11239 - DNA, 2121 bp, Homo sapiens
  source 1..2121: mol_type = unassigned DNA
cactctacctctgcatccaaatcaaggtctcccagaatcagtgaaattccacttcacagtttcagatggagaacacacaagtccggagatggtcctcaccattcacttacttcccagtgatcagcaactgccagtgttccaggtcacagctccacggctggcggtcagcccaggaggcagcacttctgtaggacttcaggtggtagtaagagatgctgagacagcgcccaaagaactcttctttgagcttcggagacctccacagcatggtgtgcttcttaagcatacagctgagttccgaaggccgatggccacaggtgacactttcacctatgaggatgttgagaaaaatgctctacagtatatacatgatggttcctctacccgggaagacagcatggagatctcagtcacagatggcctcacagtgacaatgctggaggtgagagtagaggtgtccctgtcagaagaccgagggcctcgactggctgctggctcctctctgagcattactgttgccagtaaaagcacagccataatcactaggtcacaccttgcttacgtggatgattcttcccccgacccagagatctggattcagttaaattatctgccctcatatggtactctcttaagaatctcaggatctgaggtggaagagctctcagaagtttccaatttcacaatggaagacatcaataacaagaaaatcagatactcagctgtgtttgaaactgatggtcatctggttactgatagcttctatttctctgtctctgacatggaccacaaccatctggataatcagatatttaccatcatgatcactcctgctgaaaatccacctccagtcattgcttttgctgaccttatcacggttgatgagggagggagagcaccactctcatttcaccatttttgctactgatgatgatgacaacctccagagagatgccatcattaaactaagtgctctgcccaaatatggctgcattgagaacacaggaacaggtgatcgttttggccctgaaactgccagtgacctagaggcatcatttcctattcaagacgtcctggaaaactacatttactactttcagagtgttcatgaaagcattgagccaacccatgatatttttagtttttatgtgagtgatggaaccagtcgttcagaaattcacagcatcaatatcaccattgaggtaaagactttggaagttggaaaggttgagcccttgaccacaatatttcacaccattagagagctttctttatagggactcaaaagcaaagaagattggatttgaccttcaaaattgaaggtcgttcttaaaatatagccttcaggaatcttgtagaattaaggttggcatttggggaaggcttgagttagaaatctaaatttccatttcaggattgaatttatttgttcggtgtgaaaaacagtttgtgaaggtcagagatgctttgccagtctcatatataaatgaaaacttacatatgtctatgtttctctgaaattgtgtttggttctatatgcatatttgccttttcttattttactgcatttatttatttaattgtaacatcaaagaaatgtgttccttgatgctgtatttattctcatttgagcaactacacaggcttgctctaccgagagagagacacaggggaggggaaagataaatctcagaatgaaataccctctgccttgggaaaataaaatgtaaagaaccctctgcactcttaagggtcagtggtggaaaggggctggcaccagggcagggagacagctttagagacccacactttcaaatatagtgtccttctacaggtactgtggtatgcttagcattttctaagagagttctgagttatattagtatggtcttttatcttcaaagtatgttaatacttgtacttgtcaaagcacatatccatatttttggtctagaaaatatggtcattgtacttacggaagatatctgagaaaacttttatgaaatgtccatcagcttcttttgaagggggcattttgttgcctggacttgctctcttttcaaactaactattttgcttgggaagtaaagatggtgccacattaaatgctattttgaggtg

SEQ ID NO: 11240 - DNA, 7142 bp, Homo sapiens
  source 1..7142: mol_type = unassigned DNA
aactttaaaaagctgcttcggacaaaccagagccaggatttccactgtcggggacccgggatcggaagggtctagcccgagggaaatgctggaagatcccatcggccagtgaccagcaactttccggcgagattttgacgcggagaactgtgctctgcctcctcttattctcccaaagctcacgttggcgtcctgccttgcgggggaactcggcgcgctctctgcctgagcagcgagtgaattgaaccccagcccgctccggcgcctccgggctgatgagtgtcgctctccgcccgtccatctctttttcccggaggtaaaggcccgcggtcccccaccttcagtgcgcccgggttccaagcgccggagccagcgttttggcggagccgcttcttggatgctgaaggctgggctcctccatcgtgggtgccgaggcggcgatgggtgtcctcaaagtgtggctcgggctggccctagcgttggcggaatttgcagtattgcctcatcattccgaaggtgcttgtgtctatcaggattccttgttggcggatgccacaatttggaagcccgattcatgccagagctgccgttgccatggtgatattgttatctgcaaacctgctgtttgcagaaaccctcaatgtgcctttgagaagggagaagtgcttcaaatagctgccaaccaatgctgtcctgagtgtgttttgaggactccaggatcttgccatcatgaaaagaaaatccatgagcatgggacagaatgggcctcttctccatgtagtgtgtgctcttgcaatcatggggaagtccgatgtaccccccaaccatgcccaccgctgtcatgtggacaccaggagctggcattcatccctgaaggaagctgctgcccagtttgtgtgggccttgggaaaccctgttcctatgaaggccatgtgtttcaggatggggaggactggcggctgagccggtgtgccaaatgtctgtgtagaaatggggttgcccagtgcttcacagctcagtgtcagcctctattttgtaaccaggatgagactgtagtccgagtccctggaaaatgttgcccgcagtgctctgcaagatcctgctctgcagctggccaagtatacgagcatggtgagcagtggagcgaaaatgcctgcaccacgtgtatatgtgaccggggtgaggtcaggtgtcacaagcaggcctgcctgcccctgagatgcggaaagggtcagagcagggctcggcgtcatgggcaatgctgtgaggaatgtgtgtctcctgccgggagctgctcctatgatggagttgtgcggtaccaggacgaaatgtggaagggctcggcctgtgagttctgcatgtgtgatcatggccaagtgacctgccagactggagagtgtgccaaagtggagtgtgcccgggatgaagaattaattcacttagatggaaagtgttgtcctgaatgcatttcaaggaatggttattgtgtttatgaagaaactggagaatttatgtcatcaaatgctagtgaagttaaacgtattccagagggagagaagtgggaagatggcccttgcaaggtgtgtgagtgccgaggggctcaggtaacttgctacgagccctcttgcccaccatgtccagtgggcacactggccttagaggtgaagggacagtgctgtccagactgcacatcagttcattgccatccagattgtttgacatgctctcagtctccagaccactgtgacctctgccaagatcctaccaagttactgcagaatggatggtgtgtgcacagctgtggactgggtttttaccaagctggcagtctctgtttagcctgccagccccagtgctccacgtgtaccagtgggctggagtgctcatcctgccagcctcccctgctgatgcggcacgggcagtgtgtgcctacctgtggggacggcttctaccaagatcgccattcctgtgcagtctgccatgagtcctgtgcaggttgctggggcccaacggagaagcactgcttggcctgcagagatcccctccacgtgctgagagatggcggctgtgagagcagctgtggaaaaggcttctacaacaggcagggcacctgtagcgcttgtgaccaatcctgtgacagttgtggccccagtagccccaggtgtcttacctgtactgagaagacagtgctgcatgatgggaaatgcatgtctgaatgccctggcgggtactatgctgatgccactggcaggtgcaaagtttgtcataactcatgtgccagctgctctgggcccacaccctctcactgtacagcctgcagcccccccaaggctctgcgtcaaggccactgtctgccccgctgtggagagggtttctactctgaccatggagtctgcaaagcctgtcactcctcctgcctggcttgtatgggtcccgcaccctctcactgtactgggtgtaagaagccagaggaaggactgcaagtggagcagctgtctgacgtgggcatcccctctggcgagtgtctagcccagtgtagagcccatttttacttggagagcactggcatatgtgaagcttgccaccagtcctgtttcagatgtgcagggaaaagcccacataactgcacagactgtgggccttcccatgtgctgttggatgggcagtgcctctcccagtgcccagatggctactttcaccaggaaggtagttgcacagagtgtcacccaacctgcaggcagtgtcatgggccgttggagtctgactgcatctcctgttaccctcacatctctcttaccaatggtaactgcaggaccagctgcagggaagagcagttcctcaacctcgtgggatactgtgctgactgccatcacctgtgccagcactgtgcagctgatctccacaacactgggagcatctgcctcaggtgccagaatgcccactacctgctgctcggggaccactgtgttcctgactgcccttcaggatactatgcagagagaggagcttgtaaaaaatgccactcctcctgcagaacctgccagggcagaggacctttctcctgctcctcatgtgacaccaacctcgtgctgtcccacactggcacctgcagcaccacctgcttccctgggcactatcttgatgacaatcatgtttgccagccatgcaacacacactgtggaagctgtgattcacaggccagctgtacctcctgccgagatccaaacaaggttctgctctttggggaatgtcaatacgagagctgcgccccacagtactatcttgacttctccaccaacacgtgcaaagagtgtgattggagctgcagtgcatgcagtgggcccctgaaaacagactgcctgcagtgcatggatggctatgttctccaggatggggcctgcgtggagcagtgcttgtcatcattttaccaggactcgggcctctgcaagaactgtgacagctactgtctccagtgccaaggtccccatgagtgtacccgctgcaaagggccatttctcctcttggaagcccagtgtgtccaggaatgtgggaaggggtactttgcagatcatgcaaagcacaaatgcacagcctgccctcaggggtgcttgcagtgcagccacagggaccgttgtcacctctgtgaccatgggttctttctgaagagtggcctctgtgtttacaactgtgttcctggcttttctgtccacacctctaatgaaacatgttctggcaaaatacacacccctagtcttcatgtgaatggttccctgatcctcccaattggttcaataaagccactggatttttccctcctgaatgtccaagaccaggagggtagggtcgaagatctcctatttcatgttgtgagcactcccaccaatggtcagctagtgctctcaagaaatggaaaagaggttcagctggacaaggctggccgttttagctggaaagatgtgaacgagaagaaagtgcgttttgtgcacagcaaagaaaaactcaggaaaggttaccttttcctgaaaattagtgaccagcagttcttctctgagccacagctgatcaacatacaagcattttcaacacaggccccctatgtgctgagaaatgaagttctccacattagcagaggagagagggcaaccatcaccacccagatgcttgacatccgagatgatgacaacccacaggatgtggtcattgaaataatcgatcctccacttcatggccaattgcttcagacacttcagtccccggcaacccctatctatcaattccagctggatgaactctctagaggccttctccactatgctcatgatggttcagacagcacatccgatgttgcagtcttgcaggccaatgatggacactccttccataatatactgttccaagtgaagaccgtgcctcagaatgacaggggtcttcagcttgtggctaattcgatggtgtgggttccagaaggggggatgctgcagatcaccaacagaatcttacaggccgaggctcctggtgccagtgctgaagaaatcatctacaagattacacaagactacccccagtttggggaggtggtccttctagtgaatatgcctgcagacagccctgcagatgaagggcagcacctgcctgatgggaggacagctacccccaccagcaccttcacccagcaggacatcaatgaaggcatcgtatggtacaggcactcaggagccccagcccagagcgactccttccgcttcgaggtgtccagtgcctccaatgcccagacccgcctggagagccacatgttcaacatcgcgatcttaccacagacacctgaagcacctaaagtgtctctggaagcatctctccatatgactgctagagaagatggcctgactgttattcagcctcattccctctccttcataaactctgagaagccaagtggaaagattgtctacaacatcactctacctctgcatccaaatcaaggtatcatcgagcaccgggaccaccctcactctcctatccggtatttcacgcaagaggatattaaccagggcaaagtcatgtaccgccctcccccggcagcaccccacctccaggagctcatggccttctcgttcgctggtctcccagaatcagtgaaattccacttcacagtttcagatggagaacacacaagtccggagatggtcctcaccattcacttacttcccagtgatcagcaactgccagtgttccaggtcacagctccacggctggcggtcagcccaggaggcagcacttctgtaggacttcaggtggtagtaagagatgctgagacagcgcccaaagaactcttctttgagcttcggagacctccacagcatggtgtgcttcttaagcatacagctgagttccgaaggccgatggccacaggtgacactttcacctatgaggatgttgagaaaaatgctctacagtatatacatgatggttcctctacccgggaagacagcatggagatctcagtcacagatggcctcacagtgacaatgctggaggtgagagtagaggtgtccctgtcagaagaccgagggcctcgactggctgctggctcctctctgagcattactgttgccagtaaaagcacagccataatcactaggtcacaccttgcttacgtggatgattcttcccccgacccagagatctggattcagttaaattatctgccctcatatggtactctcttaagaatctcaggatctgaggtggaagagctctcagaagtttccaatttcacaatggaagacatcaataacaagaaaatcagatactcagctgtgtttgaaactgatggtcatctggttactgatagcttctatttctctgtctctgacatggaccacaaccatctggataatcagatatttaccatcatgatcactcctgctgaaaatccacctccagtcattgcttttgctgaccttatcacggttgatgagggagggagagcaccactctcatttcaccatttttttgctactgatgatgatgacaacctccagagagatgccatcattaaactaagtgctctgcccaaatatggctgcattgagaacacaggaacaggtgatcgttttggccctgaaactgccagtgacctagaggcatcatttcctattcaagacgtcctggaaaactacatttactactttcagagtgttcatgaaagcattgagccaacccatgatatttttagtttttatgtgagtgatggaaccagtcgttcagaaattcacagcatcaatatcaccattgaggtaaagactttggaagttggaaaggttgagcccttgaccacaatatttcacaccattagagagctttctttatagggactcaaaagcaaagaagattggatttgaccttcaaaattgaaggtcgttcttaaaatatagccttcaggaatcttgtagaattaaggttggcatttggggaaggcttgagttagaaatctaaatttccatttcaggattgaatttatttgttcggtgtgaaaaacagtttgtgaaggtcagagatgctttgccagtctcatatataaatgaaaacttacatatgtctatgtttctctgaaattgtgtttggttctatatgcatatttgccttttcttattttactgcatttatttatttaattgtaacatcaaagaaatgtgttccttgatgctgtatttattctcatttgagcaactacacaggcttgctctaccgagagagagacacaggggaggggaaagataaatctcagaatgaaataccctctgccttgggaaaataaaatgtaaagaaccctctgcactcttaagggtcagtggtggaaaggggctggcaccagggcagggagacagctttagagacccacactttcaaatatagtgtccttctacaggtactgtggtatgcttagcattttctaagagagttctgagttatattagtatggtcttttatcttcaaagtatgttaatacttgtacttgtcaaagcacatatccatatttttggtctagaaaatatggtcattgtacttacggaagatatctgagaaaacttttatgaaatgtccatcagcttcttttgaagggggcattttgttgcctggac

SEQ ID NO: 11241 - DNA, 2608 bp, Homo sapiens
  source 1..2608: mol_type = unassigned DNA
tttacagggcttaactcattttatccttaccacaatcctatgaagtaggaacttttataaaacgcattttataaacaaggcacagagaggttaattaacttgccctctggtcacacagctaggaagtgggcagagtacagatttacacaaggcatccgtctcctggccccacatacccaactgctgtaaacccataccggcggccaagcagcctcaatttgtgcatgcacccacttcccagcaagacagcagctcccaagttcctcctgtttagaattttagaagcggcgggccaccaggctgcagtctcccttgggtcaggggtcctggttgcactccgtgctttgcacaaagcaggctctccatttttgttaaatgcacgaatagtgctaagctgggaagttcttcctgaggtctaacctctagctgctcccccacagaagagtgcctgcggccagtggccaccaggggtcgccgcagcacccagcgctggagggcggagcgggcggcagacccggagcagcatgtggactctcgggcgccgcgcagtagccggcctcctggcgtcacccagcccagcccaggcccagaccctcacccgggtcccgcggccggcagagttggccccactctgcggccgccgtggcctgcgcaccgacatcgatgcgacctgcacgccccgccgcgcaagttcgaaccaacgtggcctcaaccagatttggaatgtcaaaaagcagagtgtctatttgatgaatttgaggaaatctggaactttgggccacccaggctctctagatgagaccacctatgaaagactagcagaggaaacgctggactctttagcagagttttttgaagaccttgcagacaagccatacacgtttgaggactatgatgtctcctttgggagtggtgtcttaactgtcaaactgggtggagatctaggaacctatgtgatcaacaagcagacgccaaacaagcaaatctggctatcttctccatccagtggacctaagcgttatgactggactgggaaaaactgggtgtactcccacgacggcgtgtccctccatgagctgctggccgcagagctcactaaagccttaaaaaccaaactggacttgtcttccttggcctattccggaaaagatgcttgatgcccagccccgttttaaggacattaaaagctatcaggccaagaccccagcttcattatgcagctgaggtctgttttttgttgttgttgttgtttattttttttattcctgcttttgaggacagttgggctatgtgtcacagctctgtagaaagaatgtgttgcctcctaccttgcccccaagttctgatttttaatttctatggaagattttttggattgtcggatttcctccctcacatgataccccttatcttttataatgtcttatgcctatacctgaatataacaacctttaaaaaagcaaaataataagaaggaaaaattccaggagggaaaatgaattgtcttcactcttcattctttgaaggatttactgcaagaagtacatgaagagcagctggtcaacctgctcactgttctatctccaaatgagacacattaaagggtagcctacaaatgttttcaggcttctttcaaagtgtaagcacttctgagctctttagcattgaagtgtcgaaagcaactcacacgggaagatcatttcttatttgtgctctgtgactgccaaggtgtggcctgcactgggttgtccagggagacctagtgctgtttctcccacatattcacatacgtgtctgtgtgtatatatattttttcaatttaaaggttagtatggaatcagctgctacaagaatgcaaaaaatcttccaaagacaagaaaagaggaaaaaaagccgttttcatgagctgagtgatgtagcgtaacaaacaaaatcatggagctgaggaggtgccttgtaaacatgaaggggcagataaaggaaggagatactcatgttgataaagagagccctggtcctagacatagttcagccacaaagtagttgtccctttgtggacaagtttcccaaattccctggacctctgcttccccatctgttaaatgagagaatagagtatggttgattcccagcattcagtggtcctgtcaagcaacctaacaggctagttctaattccctattgggtagatgaggggatgacaaagaacagtttttaagctatataggaaacattgttattggtgttgccctatcgtgatttcagttgaattcatgtgaaaataatagccatccttggcctggcgcggtggctcacacctgtaatcccagcacttttggaggccaaggtgggtggatcacctgaggtcaggagttcaagaccagcctggccaacatgatgaaaccccgtctctactaaaaatacaaaaaattagccgggcatgatggcaggtgcctgtaatcccagctacttgggaggctgaagcggaagaatcgcttgaacccagaggtggaggttgcagtgagccgagatcgtgccattgcactgtaacctgggtgactgagcaaaactctgtctcaaaataataataacaatataataataataa

SEQ ID NO: 11242 - DNA, 980 bp, Homo sapiens
  source 1..980: mol_type = unassigned DNA
agtctcccttgggtcaggggtcctggttgcactccgtgctttgcacaaagcaggctctccatttttgttaaatgcacgaatagtgctaagctgggaagttcttcctgaggtctaacctctagctgctcccccacagaagagtgcctgcggccagtggccaccaggggtcgccgcagcacccagcgctggagggcggagcgggcggcagacccggagcagcatgtggactctcgggcgccgcgcagtagccggcctcctggcgtcacccagcccagcccaggcccagaccctcacccgggtcccgcggccggcagagttggccccactctgcggccgccgtggcctgcgcaccgacatcgatgcgacctgcacgccccgccgcgcaagttcgaaccaacgtggcctcaaccagatttggaatgtcaaaaagcagagtgtctatttgatgaatttgaggaaatctggaactttgggccacccaggctctctagatgagaccacctatgaaagactagcagaggaaacgctggactctttagcagagttttttgaagaccttgcagacaagccatacacgtttgaggactatgatgtctcctttgggagtggtgtcttaactgtcaaactgggtggagatctaggaacctatgtgatcaacaagcagacgccaaacaagcaaatctggctatcttctccatccaggttaacgtggctcctgtggctgttccatccctgaggaaaagtgaggaccatgctctccaaacaggccatgtgctggactacctctgtttctgtctcctgggattccaatcagcaagtgagcaacgaagcaacccagacagtgtggttcataggatggctgggtaagtggctgtttgttttttccttactgtggatatgtatcagtgaaggaatctgtagaacattcttgatgggaacatttagtcatatcaagtcaataaattaatgtttaggctggg

SEQ ID NO: 11243 - DNA, 922 bp, Homo sapiens
  source 1..922: mol_type = unassigned DNA
gggcggcagacccggagcagcatgtggactctcgggcgccgcgcagtagccggcctcctggcgtcacccagcccagcccaggcccagaccctcacccgggtcccgcggccggcagagttggccccactctgcggccgccgtggcctgcgcaccgacatcgatgcgacctgcacgccccgccgcgcaagttcgaaccaacgtggcctcaaccagatttggaatgtcaaaaagcagagtgtctatttgatgaatttgaggaaatctggaactttgggccacccaggctctctagatgagaccacctatgaaagactagcagaggaaacgctggactctttagcagagttttttgaagaccttgcagacaagccatacacgtttgaggactatgatgtctcctttgggagtggtgtcttaactgtcaaactgggtggagatctaggaacctatgtgatcaacaagcagacgccaaacaagcaaatctggctatcttctccatccaggtatgtagtggacctaagcgttatgactggactgggaaaaactgggtgtactcccacgacggcgtgtccctccatgagctgctggccgcagagctcactaaagccttaaaaaccaaactggacttgtcttccttggcctattccggaaaagatgcttgatgcccagccccgttttaaggacattaaaagctatcaggccaagaccccagcttcattatgcagctgaggtctgttttttgttgttgttgttgtttattttttttattcctgcttttgaggacagttgggctatgtgtcacagctctgtagaaagaatgtgttgcctcctaccttgcccccaagttctgatttttaatttctatggaagattttttggattgtcggatttcctccctcacatgataccccttatcttttat

SEQ ID NO: 11244 - DNA, 2204 bp, Homo sapiens
  source 1..2204: mol_type = unassigned DNA
ggctcgagtgcctggcgggctccggcttccgcgtccgcccctgctccggcttcgcccgcagctccgcgcccgcgggcaaccaagcccccagcgaagcccgcacagctccgggtgccaggacggggggccatgccgtgccggagggaggaggaagaggaagccggcgaggaggcggagggggaggaagaggaggacgacagcttcctcctgctgcagcagtcggtgacgctgggcagctcgggcgaggtggaccggctggtggcccagatcggcgagacgctgcagctggacgcggcgcaggacagcccggcctcgccgtgcgcgcccccgggggtgccgctgcgggccccggggcccctggctgcggcggtgccggcggacaaggcccggcccccggcggtgccgctgctgctgccgcccgcttcggctgagacggtgggcccggcgccctctggggccctgcgctgcgccctaggggaccgcggccgcgtgcgcggacgcgctgcgccctactgcgtggcggaggtcgccgcaggccccagcgcgctgccggggccgtgccggcgaggatggctcagggacgcggtcacctcccgccgcttgcagcagcgccgatggacccaagccggggcacgcgccggcgacgacgacccgcatcggctcctccagcagctcgtgctctcgggaaacctcatcaaggaagccgtgcggagactccaacgagccgtcgccgcggttgcagccacgggccccgcaagcgcccctgggcccgggggaggccgcagcggacctgaccgcattgccctgcagccctcaggctccttgctctgacgcaggcctcctggaggaggaagtggaggccgctgcgtagacccaacagcgtccagttcctactaactctgagctgaagccgacgtcgccagcctgggagcgaccactttggctgcggggaggcgcgtggggagagatctcaaccagagaagttaccagccgcggcgaggccgtcggagaaaacttaagcgtggagaaatgtatgcgccagggtgcttccgtggggcatgagaatttcccgggccatccaagcccaaggacctgggataaactgggagaactatggcagctacttgcatcgacttgtacctcacttagcccttgggggcgtcgtgagcttggattgtttaaggagggctcaggggtaggaatcgcgatggctttataacaatacttgaaaactaacgacacgcatacattttcttattttctggtggaggagcttagtaagtggtgctacaattgctgtgcaaagaaattccagaggggagaagaatgtaaaagtttggtggtgggtggcttggcattgcccctttttcccaccgattcggtggctggtgaaggtgggagatgtgaactccaattaagggactggagagaggtgaagaattttgcaggtgggagatttggatttgaatgtggacttgtaaatgacttgaccttgccatctgtgttcaaggtcacggtttgctgtggggttcctgggagagcttactcaccccggagtcttttctttctcttgctccaagaagagccctgttggtgctttaccaccgcttggagtctcccgaggacacaaacaggcagagagggacgtgtagggagagttctttcctgttttctgtgctttcctttttacaggactcccggaaggccactcatggccatgccaggagctttctcagaaacagtcataaacgatctcttgagtctctttcttgtcctcccagctgagctttcttattccaccctttctggtgtctataggaatgcatgagagaccctggacgtttttctgctctcttctggccctccatggagtcatgggcctcggcctcggcggctcctcaccctcacaatttatttcctcctcccgtgccagcccttcttttgtgtctgaaaccggttttaaaatgtgactctcccagagaagaagccgctggctgtatgaaacttgacggcgcttttgtaaggtgccacccccaaactttaaggtagctaaaccaatttttaaaagattcaatggcttgttcatcctccagatgtagctattgatgtacacttcgcaacggagtgtctgaaattgtggtggtcctgatttataggatttcataattaaaatgtctgctgaataaatttggcttttgttttgg

SEQ ID NO: 11245 - DNA, 3439 bp, Homo sapiens
  source 1..3439: mol_type = unassigned DNA
atggagggaggactggcaggcgagcgggcgagggagtctccggtggactgcagcgttagcaaatgcagcaagctggtgggcggaggcgagtccaaccccatgaactacaacagctatatggacgagaagaatggcccccctcctcccaacatgaccaccaacgagaggagagtcatcgtccccgcagaccccacactgtggacacaggagcatgtgaggcaatggctggagtgggccataaaggagtacagcttgatggagatcgacacatcctttttccagaacatggatggcaaggaactgtgtaaaatgaacaaggaggacttcctccgcgccaccaccctctacaacacggaagtgctgttgtcacacctcagttacctcagggaaagttcactgctggcctataatacaacctcccacaccgaccaatcctcacgattgagtgtcaaagaagacccttcttatgactcagtcagaagaggagcttggggcaataacatgaattctggcctcaacaaaagtcctccccttggaggggcacaaacgatcagtaagaatacagagcaacggccccagccagatccgtatcagatcctgggcccgaccagcagtcgcctagccaaccctggaagcgggcagatccagctgtggcaattcctcctggagctgctctccgacagcgccaacgccagctgtatcacctgggaggggaccaacggggagttcaaaatgacggaccccgatgaggtggccaggcgctggggcgagcggaaaagcaagcccaacatgaattacgacaagctgagccgggccctccgttattactatgataaaaacattatgaccaaagtgcacggcaaaagatatgcttacaaatttgacttccacggcattgcccaggctctgcagccacatccgaccgagtcgtccatgtacaagtacccttctgacatctcctacatgccttcctaccatgcccaccagcagaaggtgaactttgtccctccccatccatcctccatgcctgtcacttcctccagcttctttggagccgcatcacaatactggacctcccccacggggggaatctaccccaaccccaacgtcccccgccatcctaacacccacgtgccttcacacttaggcagctactactagaagcttactcatcagtggccttctagctgaagcccatcctgcacacttactggatgctttggactcaacaggacatatgtggccttgaagggaagacaaaactggatgttctttcttgttggatagaacctttgtatttgttctttaaaaacattttttttaatgttggtaacttttgcttcctctacctgaacaaagagatgaataattccatgggccagtatgccagtttgaattctcagtctcctagcatcttgtgagttgcatattaagattactggaatggttaagtcatggttctgagaaagaagctgtacgttttctttatgtttttatgaccaaagcagtttcttgtcaatacacggggttcagtatgacacagaatcatggacttaacccgtcatgttctggtttgagatttagtgacaaatagaggtgggaagcttataatctaattttaggaggaccaaattcagtggatggcaactggaacattgattgtaaggccagtgaagttttcacccaactggaatttgatggaaagaaggtttgtgtgtttaagacgccaagggcattgcagaatccctctcagtggacagtatgcactcagctgaccactctctctagaaatagtcaagatatgaactaagaaattttaatgcaaatacatacattcctgaaagacggggaattaaattactaatttttttttttttttaaatgatgacagtggtcccagaacttggaaaagttgtagggatttctaaactcaagcagattcgcaagtgctgtgcgcttgtcagaccatcagaccagggccaaccaatcagaaggcaacttactgtataaattatgcagagttattttcctatatctcacagtattaaaaataaataattaaaaattaagaataaataaacgagttgacctcggtcacaaaagcagttttactatcgaatcaatcgctgttattttttttaatgtaatttgtacatcttttttcaatctgtacatttgggctgtctgtatgtttttatagctggtttttaaaaagcataatatgcctatagctgaaaaggaaacagggctgtttaagtcactgacttatgagaaagcaaagcactggtacagttatttaacaggcatacacaagcagggaaaagataatccatttagatctttaatgctttggaaatgcgtgtaacagtactgcaataatcacagctctgggaaaaacaacgaaactttcccttgtggagaggagggattttcctgctctatataagcaacatatttttagacattaaaatatatataattttgcaggtaattgttgacttttttaactatattaagtgttaagctgacaactgtcaaagaagaccatgttgtaaaataatttgactaaataaatggttccttctctcagtgctgaggacagttttcttatttaccgcccccgttaggtcaaagggttttccctggggaactttcctatttacttcttgcactatcaagaatttttcgaatgtacctactgcagtacagcagaaggtaaaaaatcagtgtggtttttcattgttgttgatgatgtttgtagtgtttttgtgtgtgttatttaaatcttcctccagcctaaaagggttttataaaacagcagctaaggccatggataaacctgtatgtaaggactggagcaaagcgagctggtctatccagactggtctgtgagatttaactctgcagcctcccctgggcacttcagacccagacggccaccttctgccactccagcaaagaataagcgccctgcttccttcaggtctcagaccaggactttatggctcatgcagatttttaaggtcatttttcttcccaaggaagaaacttgcctccagttccttcactgttaggtagcttattttcattttctctattttacaatgaaaagagtgagacctgggaagtccttgatttgcaaggaattagactcacagcattggtaaccctagaaccttcttagggtaacactaagtaccttctagacaacatgtctacctaaatgaaatgggatgtgtttcggaacatttgtctccagtttttttttaatcttgcaccctgccatttaaaaagatgtgtaaagcacatattctcaacatatgcacattgatttataaatcatatatacaaactgttacattattcttcatattagaaaacaaatacaaaatagaacattttaaatggtgatataaaaataaattgaaactgaaattct

SEQ ID NO: 11246 - DNA, 3926 bp, Homo sapiens
  source 1..3926: mol_type = unassigned DNA
gccactccaggtctggtcacgttcagacccgtgtctgtattcgaacccaaaattggagccgaattgatgagactaatttctagagagggagggggagggagggagacgagtgagctctcgggctcaattgctcctgaagaaataaagaattaataagtcaccttttttcgcctctgtggacacccttttgaaattttttcttccaattgacttggatctcctctggattttttttccctctttcccccgtcggactcttaaataaaagtgagcaagtccaaagcgtggtccggagagcgtggacaaggaggctctgtcggtggtgagcgacgaccagtccctctttgactcagcgtacggagcggcagcccatctccccaaggccgacatgactgcctcggggagtcctgactacgggcagccccacaagatcaaccccctcccaccacagcaggagtggatcaatcagccagtgagggtcaacgtcaagcgggagtatgaccacatgaatggatccagggagtctccggtggactgcagcgttagcaaatgcagcaagctggtgggcggaggcgagtccaaccccatgaactacaacagctatatggacgagaagaatggcccccctcctcccaacatgaccaccaacgagaggagagtcatcgtccccgcagaccccacactgtggacacaggagcatgtgaggcaatggctggagtgggccataaaggagtacagcttgatggagatcgacacatcctttttccagaacatggatggcaaggaactgtgtaaaatgaacaaggaggacttcctccgcgccaccaccctctacaacacggaagtgctgttgtcacacctcagttacctcagggaaagttcactgctggcctataatacaacctcccacaccgaccaatcctcacgattgagtgtcaaagaagacccttcttatgactcagtcagaagaggagcttggggcaataacatgaattctggcctcaacaaaagtcctccccttggaggggcacaaacgatcagtaagaatacagagcaacggccccagccagatccgtatcagatcctgggcccgaccagcagtcgcctagccaaccctggaagcgggcagatccagctgtggcaattcctcctggagctgctctccgacagcgccaacgccagctgtatcacctgggaggggaccaacggggagttcaaaatgacggaccccgatgaggtggccaggcgctggggcgagcggaaaagcaagcccaacatgaattacgacaagctgagccgggccctccgttattactatgataaaaacattatgaccaaagtgcacggcaaaagatatgcttacaaatttgacttccacggcattgcccaggctctgcagccacatccgaccgagtcgtccatgtacaagtacccttctgacatctcctacatgccttcctaccatgcccaccagcagaaggtgaactttgtccctccccatccatcctccatgcctgtcacttcctccagcttctttggagccgcatcacaatactggacctcccccacggggggaatctaccccaaccccaacgtcccccgccatcctaacacccacgtgccttcacacttaggcagctactactagaagcttactcatcagtggccttctagctgaagcccatcctgcacacttactggatgctttggactcaacaggacatatgtggccttgaagggaagacaaaactggatgttctttcttgttggatagaacctttgtatttgttctttaaaaacattttttttaatgttggtaacttttgcttcctctacctgaacaaagagatgaataattccatgggccagtatgccagtttgaattctcagtctcctagcatcttgtgagttgcatattaagattactggaatggttaagtcatggttctgagaaagaagctgtacgttttctttatgtttttatgaccaaagcagtttcttgtcaatacacggggttcagtatgacacagaatcatggacttaacccgtcatgttctggtttgagatttagtgacaaatagaggtgggaagcttataatctaattttaggaggaccaaattcagtggatggcaactggaacattgattgtaaggccagtgaagttttcacccaactggaatttgatggaaagaaggtttgtgtgtttaagacgccaagggcattgcagaatccctctcagtggacagtatgcactcagctgaccactctctctagaaatagtcaagatatgaactaagaaattttaatgcaaatacatacattcctgaaagacggggaattaaattactaatttttttttttttttaaatgatgacagtggtcccagaacttggaaaagttgtagggatttctaaactcaagcagattcgcaagtgctgtgcgcttgtcagaccatcagaccagggccaaccaatcagaaggcaacttactgtataaattatgcagagttattttcctatatctcacagtattaaaaataaataattaaaaattaagaataaataaacgagttgacctcggtcacaaaagcagttttactatcgaatcaatcgctgttattttttttaatgtaatttgtacatcttttttcaatctgtacatttgggctgtctgtatgtttttatagctggtttttaaaaagcataatatgcctatagctgaaaaggaaacagggctgtttaagtcactgacttatgagaaagcaaagcactggtacagttatttaacaggcatacacaagcagggaaaagataatccatttagatctttaatgctttggaaatgcgtgtaacagtactgcaataatcacagctctgggaaaaacaacgaaactttcccttgtggagaggagggattttcctgctctatataagcaacatatttttagacattaaaatatatataattttgcaggtaattgttgacttttttaactatattaagtgttaagctgacaactgtcaaagaagaccatgttgtaaaataatttgactaaataaatggttccttctctcagtgctgaggacagttttcttatttaccgcccccgttaggtcaaagggttttccctggggaactttcctatttacttcttgcactatcaagaatttttcgaatgtacctactgcagtacagcagaaggtaaaaaatcagtgtggtttttcattgttgttgatgatgtttgtagtgtttttgtgtgtgttatttaaatcttcctccagcctaaaagggttttataaaacagcagctaaggccatggataaacctgtatgtaaggactggagcaaagcgagctggtctatccagactggtctgtgagatttaactctgcagcctcccctgggcacttcagacccagacggccaccttctgccactccagcaaagaataagcgccctgcttccttcaggtctcagaccaggactttatggctcatgcagatttttaaggtcatttttcttcccaaggaagaaacttgcctccagttccttcactgttaggtagcttattttcattttctctattttacaatgaaaagagtgagacctgggaagtccttgatttgcaaggaattagactcacagcattggtaaccctagaaccttcttagggtaacactaagtaccttctagacaacatgtctacctaaatgaaatgggatgtgtttcggaacatttgtctccagtttttttttaatcttgcaccctgccatttaaaaagatgtgtaaagcacatattctcaacatatgcacattgatttataaatcatatatacaaactgttacattattcttcatattagaaaacaaatacaaaatagaacattttaaatggtgatataaaaataaattgaaactgaaattct

SEQ ID NO: 11247 - DNA, 3051 bp, Homo sapiens
  source 1..3051: mol_type = unassigned DNA
aggacttcctccccgattcgcaaagtgaagtcacttcccaaaattagctgaaaaaaaagtttcatccggttaactgtctctttcgctccgctacaacaacaaacgtgcacaggggagtgagggcagggcgctcgcagggggcacgcagggagggcccagggcgccagggaggccgcgccgggctaatccgaaggggctgcgaggtcaggctgtaaccgggtcaatgtgtggaatattggggggctcggctgcagacttggccaaatggacgggactattaaggaggctctgtcggtggtgagcgacgaccagtccctctttgactcagcgtacggagcggcagcccatctccccaaggccgacatgactgcctcggggagtcctgactacgggcagccccacaagatcaaccccctcccaccacagcaggagtggatcaatcagccagtgagggtcaacgtcaagcgggagtatgaccacatgaatggatccagggagtctccggtggactgcagcgttagcaaatgcagcaagctggtgggcggaggcgagtccaaccccatgaactacaacagctatatggacgagaagaatggcccccctcctcccaacatgaccaccaacgagaggagagtcatcgtccccgcagaccccacactgtggacacaggagcatgtgaggcaatggctggagtgggccataaaggagtacagcttgatggagatcgacacatcctttttccagaacatggatggcaaggaactgtgtaaaatgaacaaggaggacttcctccgcgccaccaccctctacaacacggaagtgctgttgtcacacctcagttacctcagggaaagttcactgctggcctataatacaacctcccacaccgaccaatcctcacgattgagtgtcaaagaagacccttcttatgactcagtcagaagaggagcttggggcaataacatgaattctggcctcaacaaaagtcctccccttggaggggcacaaacgatcagtaagaatacagagcaacggccccagccagatccgtatcagatcctgggcccgaccagcagtcgcctagccaaccctggaagcgggcagatccagctgtggcaattcctcctggagctgctctccgacagcgccaacgccagctgtatcacctgggaggggaccaacggggagttcaaaatgacggaccccgatgaggtggccaggcgctggggcgagcggaaaagcaagcccaacatgaattacgacaagctgagccgggccctccgttattactatgataaaaacattatgaccaaagtgcacggcaaaagatatgcttacaaatttgacttccacggcattgcccaggctctgcagccacatccgaccgagtcgtccatgtacaagtacccttctgacatctcctacatgccttcctaccatgcccaccagcagaaggtgaactttgtccctccccatccatcctccatgcctgtcacttcctccagcttctttggagccgcatcacaatactggacctcccccacggggggaatctaccccaaccccaacgtcccccgccatcctaacacccacgtgccttcacacttaggcagctactactagaagcttactcatcagtggccttctagctgaagcccatcctgcacacttactggatgctttggactcaacaggacatatgtggccttgaagggaagacaaaactggatgttctttcttgttggatagaacctttgtatttgttctttaaaaacattttttttaatgttggtaacttttgcttcctctacctgaacaaagagatgaataattccatgggccagtatgccagtttgaattctcagtctcctagcatcttgtgagttgcatattaagattactggaatggttaagtcatggttctgagaaagaagctgtacgttttctttatgtttttatgaccaaagcagtttcttgtcaatacacggggttcagtatgacacagaatcatggacttaacccgtcatgttctggtttgagatttagtgacaaatagaggtgggaagcttataatctaattttaggaggaccaaattcagtggatggcaactggaacattgattgtaaggccagtgaagttttcacccaactggaatttgatggaaagaaggtttgtgtgtttaagacgccaagggcattgcagaatccctctcagtggacagtatgcactcagctgaccactctctctagaaatagtcaagatatgaactaagaaattttaatgcaaatacatacattcctgaaagacggggaattaaattactaatttttttttttttttaaatgatgacagtggtcccagaacttggaaaagttgtagggatttctaaactcaagcagattcgcaagtgctgtgcgcttgtcagaccatcagaccagggccaaccaatcagaaggcaacttactgtataaattatgcagagttattttcctatatctcacagtattaaaaataaataattaaaaattaagaataaataaacgagttgacctcggtcacaaaagcagttttactatcgaatcaatcgctgttattttttttaatgtaatttgtacatcttttttcaatctgtacatttgggctgtctgtatgtttttatagctggtttttaaaaagcataatatgcctatagctgaaaaggaaacagggctgtttaagtcactgacttatgagaaagcaaagcactggtacagttatttaacaggcatacacaagcagggaaaagataatccatttagatctttaatgctttggaaatgcgtgtaacagtactgcaataatcacagctctgggaaaaacaacgaaactttcccttgtggagaggagggattttcctgctctatataagcaacatatttttagacattaaaatatatataattttgcaggtaattgttgacttttttaactatattaagtgttaagctgacaactgtcaaagaagaccatgttgtaaaataatttgactaaataaatggttccttctctca

SEQ ID NO: 11248 - DNA, 1557 bp, Homo sapiens
  source 1..1557: mol_type = unassigned DNA
acagtctctccatctgcatccccacttcatcaccatcccaccgtctctccctcgctccactcgcgggtaaccgaggcttctccctcccaggctggttcttgggcgttcccgacccttagctacccacgatgtttcagacagtccccgacacgtcgtcttacatcaaggaggctctgtcggtggtgagcgacgaccagtccctctttgactcagcgtacggagcggcagcccatctccccaaggccgacatgactgcctcggggagtcctgactacgggcagccccacaagatcaaccccctcccaccacagcaggagtggatcaatcagccagtgagggtcaacgtcaagcgggagtatgaccacatgaatggatccaggttcactgctggcctataatacaacctcccacaccgaccaatcctcacgattgagtgtcaaagaagacccttcttatgactcagtcagaagaggagcttggggcaataacatgaattctggcctcaacaaaagtcctccccttggaggggcacaaacgatcagtaagaatacagagcaacggccccagccagatccgtatcagatcctgggcccgaccagcagtcgcctagccaaccctggaagcgggcagatccagctgtggcaattcctcctggagctgctctccgacagcgccaacgccagctgtatcacctgggaggggaccaacggggagttcaaaatgacggaccccgatgaggtggccaggcgctggggcgagcggaaaagcaagcccaacatgaattacgacaagctgagccgggccctccgttattactatgataaaaacattatgaccaaagtgcacggcaaaagatatgcttacaaatttgacttccacggcattgcccaggctctgcagccacatccgaccgagtcgtccatgtacaagtacccttctgacatctcctacatgccttcctaccatgcccaccagcagaaggtgaactttgtccctccccatccatcctccatgcctgtcacttcctccagcttctttggagccgcatcacaatactggacctcccccacggggggaatctaccccaaccccaacgtcccccgccatcctaacacccacgtgccttcacacttaggcagctactactagaagcttactcatcagtggccttctagctgaagcccatcctgcacacttactggatgctttggactcaacaggacatatgtggccttgaagggaagacaaaactggatgttctttcttgttggatagaacctttgtatttgttctttaaaaacattttttttaatgttggtaacttttgcttcctctacctgaacaaagagatgaataattccatgggccagtatgccagtttgaattctcagtctcctagcatcttgtgagttgcatattaagattactggaatggttaagtcatggttctgagaaagaagctgtacgttttctttatgtttttatgaccaaagcagtttcttgtcaatacacggggttcagtatgacacagaatcatggacttaacccgtcatgttc

SEQ ID NO: 11249 - DNA, 4341 bp, Homo sapiens
  source 1..4341: mol_type = unassigned DNA
agttgagggattgacacaaatggtcaggcggcggcggcggagaaggaggcggaggcgcaggggggagccgagcccgctgggctgcggagagttgcgctctctacggggccgcggccactagcgcggcgccgccagccgggagccagcgagccgagggccaggaaggcgggacacgaccccggcgcgccctagccacccgggttctccccgccgcccgcgcttcatgaatcgcaagtttccgcggcggcggcggctgcggtacgcagaacaggagccgggggagcgggccgaaagcggcttgggctcgacggagggcacccgcgcagaggtctccctggccgcagggggagccgccgccggccgtgcccctggcagccccagcggagcggcgccaagagaggagccgagaaagtatggctgaggaggaggcgcctaagaagtcccgggccgccggcggtggcgcgagctgggaactttgtgccggggcgctctcggcccggctggcggaggagggcagcggggacgccggtggccgccgccgcccgccagttgacccccggcgattggcgcgccagctgctgctgctgctttggctgctggaggctccgctgctgctgggggtccgggcccaggcggcgggccaggggccaggccaggggcccgggccggggcagcaaccgccgccgccgcctcagcagcaacagagcgggcagcagtacaacggcgagcggggcatctccgtcccggaccacggctattgccagcccatctccatcccgctgtgcacggacatcgcgtacaaccagaccatcatgcccaacctgctgggccacacgaaccaggaggacgcgggcctggaggtgcaccagttctaccctctagtgaaagtgcagtgttccgctgagctcaagttcttcctgtgctccatgtacgcgcccgtgtgcaccgtgctagagcaggcgctgccgccctgccgctccctgtgcgagcgcgcgcgccagggctgcgaggcgctcatgaacaagttcggcttccagtggccagacacgctcaagtgtgagaagttcccggtgcacggcgccggcgagctgtgcgtgggccagaacacgtccgacaagggcaccccgacgccctcgctgcttccagagttctggaccagcaaccctcagcacggcggcggagggcaccgtggcggcttcccggggggcgccggcgcgtcggagcgaggcaagttctcctgcccgcgcgccctcaaggtgccctcctacctcaactaccacttcctgggggagaaggactgcggcgcaccttgtgagccgaccaaggtgtatgggctcatgtacttcgggcccgaggagctgcgcttctcgcgcacctggattggcatttggtcagtgctgtgctgcgcctccacgctcttcacggtgcttacgtacctggtggacatgcggcgcttcagctacccggagcggcccatcatcttcttgtccggctgttacacggccgtggccgtggcctacatcgccggcttcctcctggaagaccgagtggtgtgtaatgacaagttcgccgaggacggggcacgcactgtggcgcagggcaccaagaaggagggctgcaccatcctcttcatgatgctctacttcttcagcatggccagctccatctggtgggtgatcctgtcgctcacctggttcctggcggctggcatgaagtggggccacgaggccatcgaagccaactcacagtattttcacctggccgcctgggctgtgccggccatcaagaccatcaccatcctggcgctgggccaggtggacggcgatgtgctgagcggagtgtgcttcgtggggcttaacaacgtggacgcgctgcgtggcttcgtgctggcgcccctcttcgtgtacctgtttatcggcacgtcctttctgctggccggctttgtgtcgctcttccgcatccgcaccatcatgaagcacgatggcaccaagaccgagaagctggagaagctcatggtgcgcattggcgtcttcagcgtgctgtacactgtgccagccaccatcgtcatcgcctgctacttctacgagcaggccttccgggaccagtgggaacgcagctgggtggcccagagctgcaagagctacgctatcccctgccctcacctccaggcgggcggaggcgccccgccgcacccgcccatgagcccggacttcacggtcttcatgattaagtaccttatgacgctgatcgtgggcatcacgtcgggcttctggatctggtccggcaagaccctcaactcctggaggaagttctacacgaggctcaccaacagcaaacaaggggagactacagtctgagacccggggctcagcccatgcccaggcctcggccggggcgcagcgatcccccaaagccagcgccgtggagttcgtgccaatcctgacatctcgaggtttcctcactagacaactctctttcgcaggctcctttgaacaactcagctcctgcaaaagcttccgtccctgaggcaaaaggacacgagggcccgactgccagagggaggatggacagacctcttgccctcacactctggtaccaggactgttcgcttttatgattgtaaatagcctgtgtaagatttttgtaagtatatttgtatttaaatgacgaccgatcacgcgtttttctttttcaaaagtttttaattatttagggcggtttaaccatttgaggcttttccttcttgcccttttcggagtattgcaaaggagctaaaactggtgtgcaaccgcacagcgctcctggtcgtcctcgcgcgcctctccctaccacgggtgctcgggacggctgggcgccagctccggggcgagttcagcactgcggggtgcgactagggctgcgctgccagggtcacttcccgcctcctccttttgccccctccccctccttctgtcccctccctttctttcctggcttgaggtaggggctcttaaggtacagaactccacaaaccttccaaatctggaggagggcccccatacattacaattcctcccttgctcggcggtggattgcgaaggcccgtcccttcgacttcctgaagctggatttttaactgtccagaactttcctccaacttcatgggggcccacgggtgtgggcgctggcagtctcagcctccctccacggtcaccttcaacgcccagacactcccttctcccaccttagttggttacagggtgagtgagataaccaatgccaaactttttgaagtctaatttttgaggggtgagctcatttcattctctagtgtctaaaacctggtatgggtttggccagcgtcatggaaagatgtggttactgagatttgggaagaagcatgaagctttgtgtgggttggaagagactgaagatatgggttataaaatgttaattctaattgcatacggatgcctggcaaccttgcctttgagaatgagacagcctgcgcttagattttaccggtctgtaaaatggaaatgttgaggtcacctggaaagctttgttaaggagttgatgtttgctttccttaacaagacagcaaaacgtaaacagaaattgaaaacttgaaggatatttcagtgtcatggacttcctcaaaatgaagtgctattttcttatttttaatcaaataactagacatatatcagaaactttaaaatgtaaaagttgtacactttcaacattttattacgattattattcagcagcacattctgaggggggaacaattcacaccaccaataataacctggtaagatttcaggaggtaaagaaggtggaataattgacggggagatagcgcctgaaataaacaaaatatgggcatgcatgctaaagggaaaatgtgtgcaggtctactgcattaaatcctgtgtgctcctcttttggatttacagaaatgtgtcaaatgtaaatctttcaaagccatttaaaaatattcactttagttctctgtgaagaagaggagaaaagcaatcctcctgattgtattgttttaaactttaagaatttatcaaaatgccggtacttaggacctaaatttatctatgtctgtcatacgctaaaatgatattggtctttgaatttggtatacatttattctgttcactatcacaaaatcatctatatttatagaggaatagaagtttatatatatataataccatatttttaatttcacaaataaaaaattcaaagttttgtacaaaattatatggattttgtgcctgaaaataatagagcttgagctgtctgaactattttacattttatggtgtctcatagccaatcccacagtgt

SEQ ID NO: 11250 - DNA, 3281 bp, Homo sapiens
  source 1..3281: mol_type = unassigned DNA
cgagtcttctcatcccgggacgcaaacctcgaaacagctgccggctggtcccggccgaggccggcgcagggagggaggagccgcccgggctgtgggggcgccgcgagctgggccggcctcggtgtgcccgcgccgccagcccgctccagacgcgccacctgggcgctccaagaagaggccgaagtttgccgcggccgtgagttggagctcgcgccgggccgctgcgccgggagctccgggggcttccctcgcttcccggtattgtttgcaaactttgctgctctccgccgcggcccccaactcggcggacgccgggcgcggagagccgagccgggggcgctgtgcgcagcgctcgggccaggccgggcgggcatgggcgggggcccgagcaggggtggagagccggggccagcagcagcccgtgcccgggagcggcggcgctgaggggcgcggagctccccgcgaggacacgtccaacgccagcatgcagcgcccgggcccccgcctgtggctggtcctgcaggtgatgggctcgtgcgccgccatcagctccatggacatggagcgcccgggcgacggcaaatgccagcccatcgagatcccgatgtgcaaggacatcggctacaacatgactcgtatgcccaacctgatgggccacgagaaccagcgcgaggcagccatccagttgcacgagttcgcgccgctggtggagtacggctgccacggccacctccgcttcttcctgtgctcgctgtacgcgccgatgtgcaccgagcaggtctctacccccatccccgcctgccgggtcatgtgcgagcaggcccggctcaagtgctccccgattatggagcagttcaacttcaagtggcccgactccctggactgccggaaactccccaacaagaacgaccccaactacctgtgcatggaggcgcccaacaacggctcggacgagcccacccggggctcgggcctgttcccgccgctgttccggccgcagcggccccacagcgcgcaggagcacccgctgaaggacgggggccccgggcgcggcggctgcgacaacccgggcaagttccaccacgtggagaagagcgcgtcgtgcgcgccgctctgcacgcccggcgtggacgtgtactggagccgcgaggacaagcgcttcgcagtggtctggctggccatctgggcggtgctgtgcttcttctccagcgccttcaccgtgctcaccttcctcatcgacccggcccgcttccgctaccccgagcgccccatcatcttcctctccatgtgctactgcgtctactccgtgggctacctcatccgcctcttcgccggcgccgagagcatcgcctgcgaccgggacagcggccagctctatgtcatccaggagggactggagagcaccggctgcacgctggtcttcctggtcctctactacttcggcatggccagctcgctgtggtgggtggtcctcacgctcacctggttcctggccgccggcaagaagtggggccacgaggccatcgaagccaacagcagctacttccacctggcagcctgggccatcccggcggtgaagaccatcctgatcctggtcatgcgcagggtggcgggggacgagctcaccggggtctgctacgtgggcagcatggacgtcaacgcgctcaccggcttcgtgctcattcccctggcctgctacctggtcatcggcacgtccttcatcctctcgggcttcgtggccctgttccacatccggagggtgatgaagacgggcggcgagaacacggacaagctggagaagctcatggtgcgtatcgggctcttctctgtgctgtacaccgtgccggccacctgtgtgatcgcctgctacttttacgaacgcctcaacatggattactggaagatcctggcggcgcagcacaagtgcaaaatgaacaaccagactaaaacgctggactgcctgatggccgcctccatccccgccgtggagatcttcatggtgaagatctttatgctgctggtggtggggatcaccagcgggatgtggatttggacctccaagactctgcagtcctggcagcaggtgtgcagccgtaggttaaagaagaagagccggagaaaaccggccagcgtgatcaccagcggtgggatttacaaaaaagcccagcatccccagaaaactcaccacgggaaatatgagatccctgcccagtcgcccacctgcgtgtgaacagggctggagggaagggcacaggggcgcccggagctaagatgtggtgcttttcttggttgtgtttttctttcttcttcttctttttttttttttataaaagcaaaagagaaatacataaaaaagtgtttaccctgaaattcaggatgctgtgatacactgaaaggaaaaatgtacttaaagggttttgttttgttttggttttccagcgaagggaagctcctccagtgaagtagcctcttgtgtaactaatttgtggtaaagtagttgattcagccctcagaagaaaacttttgtttagagccctccctaaatatacatctgtgtatttgagttggctttgctacccatttacaaataagaggacagataactgctttgcaaattcaagagcctcccctgggttaacaaatgagccatccccagggcccacccccaggaaggccacagtgctgggcggcatccctgcagaggaaagacaggacccggggcccgcctcacaccccagtggatttggagttgcttaaaatagactccggccttcaccaatagtctctctgcaagacagaaacctccatcaaacctcacatttgtgaactcaaacgatgtgcaatacatttttttctctttccttgaaaataaaaagagaaacaagtattttgctatatataaagacaacaaaagaaatctcctaacaaaagaactaagaggcccagccctcagaaacccttcagtgctacattttgtggctttttaatggaaaccaagccaatgttatagacgtttggactgatttgtggaaaggaggggggaagagggagaaggatcattcaaaagttacccaaagggcttattgactctttctattgttaaacaaatgatttccacaaacagatcaggaagcactaggttggcagagacactttgtctagtgtattctcttcacagtgccaggaaagagtggtttctgcgtgtgtatatttgtaatatatgatatttttcatgctccactattttattaaaaataaaatatgttctttagtttgctgct

SEQ ID NO: 11251 - DNA, 3282 bp, Homo sapiens
  source 1..3282: mol_type = unassigned DNA
cgagtcttctcatcccgggacgcaaacctcgaaacagctgccggctggtcccggccgaggccggcgcagggagggaggagccgcccgggctgtgggggcgccgcgagctgggccggcctcggtgtgcccgcgccgccagcccgctccagacgcgccacctgggcgctccaagaagaggccgaagtttgccgcggccgtgagttggagctcgcgccgggccgctgcgccgggagctccgggggcttccctcgcttcccggtattgtttgcaaactttgctgctctccgccgcggcccccaactcggcggacgccgggcgcggagagccgagccgggggcgctgtgcgcagcgctcgggccaggccgggcgggcatgggcgggggcccgagcaggggtggagagccggggccagcagcagcccgtgcccgggagcggcggcgctgaggggcgcggagctccccgcgaggacacgtccaacgccagcatgcagcgcccgggcccccgcctgtggctggtcctgcaggtgatgggctcgtgcgccgccatcagctccatggacatggagcgcccgggcgacggcaaatgccagcccatcgagatcccgatgtgcaaggacatcggctacaacatgactcgtatgcccaacctgatgggccacgagaaccagcgcgaggcagccatccagttgcacgagttcgcgccgctggtggagtacggctgccacggccacctccgcttcttcctgtgctcgctgtacgcgccgatgtgcaccgagcaggtctctacccccatccccgcctgccgggtcatgtgcgagcaggcccggctcaagtgctccccgattatggagcagttcaacttcaagtggcccgactccctggactgccggaaactccccaacaagaacgaccccaactacctgtgcatggaggcgcccaacaacggctcggacgagcccacccggggctcgggcctgttcccgccgctgttccggccgcagcggccccacagcgcgcaggagcacccgctgaaggacgggggccccgggcgcggcggctgcgacaacccgggcaagttccaccacgtggagaagagcgcgtcgtgcgcgccgctctgcacgcccggcgtggacgtgtactggagccgcgaggacaagcgcttcgcagtggtctggctggccatctgggcggtgctgtgcttcttctccagcgccttcaccgtgctcaccttcctcatcgacccggcccgcttccgctaccccgagcgccccatcatcttcctctccatgtgctactgcgtctactccgtgggctacctcatccgcctcttcgccggcgccgagagcatcgcctgcgaccgggacagcggccagctctatgtcatccaggagggactggagagcaccggctgcacgctggtcttcctggtcctctactacttcggcatggccagctcgctgtggtgggtggtcctcacgctcacctggttcctggccgccggcaagaagtggggccacgaggccatcgaagccaacagcagctacttccacctggcagcctgggccatcccggcggtgaagaccatcctgatcctggtcatgcgcagggtggcgggggacgagctcaccggggtctgctacgtgggcagcatggacgtcaacgcgctcaccggcttcgtgctcattcccctggcctgctacctggtcatcggcacgtccttcatcctctcgggcttcgtggccctgttccacatccggagggtgatgaagacgggcggcgagaacacggacaagctggagaagctcatggtgcgtatcgggctcttctctgtgctgtacaccgtgccggccacctgtgtgatcgcctgctacttttacgaacgcctcaacatggattactggaagatcctggcggcgcagcacaagtgcaaaatgaacaaccagactaaaacgctggactgcctgatggccgcctccatccccgccgtggagatcttcatggtgaagatctttatgctgctggtggtggggatcaccagcgggatgtggatttggacctccaagactctgcagtcctggcagcaggtgtgcagccgtaggttaaagaagaagagccggagaaaaccggccagcgtgatcaccagcggtgggatttacaaaaaagcccagcatccccagaaaactcaccacgggaaatatgagatccctgcccagtcgcccacctgcgtgtgaacagggctggagggaagggcacaggggcgcccggagctaagatgtggtgcttttcttggttgtgtttttctttcttcttcttctttttttttttttataaaagcaaaagagaaatacataaaaaagtgtttaccctgaaattcaggatgctgtgatacactgaaaggaaaaatgtacttaaagggttttgttttgttttggttttccagcgaagggaagctcctccagtgaagtagcctcttgtgtaactaatttgtggtaaagtagttgattcagccctcagaagaaaacttttgtttagagccctccctaaatatacatctgtgtatttgagttggctttgctacccatttacaaataagaggacagataactgctttgcaaattcaagagcctcccctgggttaacaaatgagccatccccagggcccacccccaggaaggccacagtgctgggcggcatccctgcagaggaaagacaggacccggggcccgcctcacaccccagtggatttggagttgcttaaaatagactccggccttcaccaatagtctctctgcaagacagaaacctccatcaaacctcacatttgtgaactcaaacgatgtgcaatacatttttttctctttccttgaaaataaaaagagaaacaagtattttgctatatataaagacaacaaaagaaatctcctaacaaaagaactaagaggcccagccctcagaaacccttcagtgctacattttgtggctttttaatggaaaccaagccaatgttatagacgtttggactgatttgtggaaaggaggggggaagagggagaaggatcattcaaaagttacccaaagggcttattgactctttctattgttaaacaaatgatttccacaaacagatcaggaagcactaggttggcagagacactttgtctagtgtattctcttcacagtgccaggaaagagtggtttctgcgtgtgtatatttgtaatatatgatatttttcatgctccactattttattaaaaataaaatatgttctttagtttgctgcta

SEQ ID NO: 11252 - DNA, 1983 bp, Homo sapiens
  source 1..1983: mol_type = unassigned DNA
cgagtaaagtttgcaaagaggcgcgggaggcggcagccgcagcgaggaggcggcggggaagaagcgcagtctccgggttgggggcgggggcggggggggcgccaaggagccgggtggggggcggcggccagcatgcggccccgcagcgccctgccccgcctgctgctgccgctgctgctgctgcccgccgccgggccggcccagttccacggggagaagggcatctccatcccggaccacggcttctgccagcccatctccatcccgctgtgcacggacatcgcctacaaccagaccatcatgcccaaccttctgggccacacgaaccaggaggacgcaggcctagaggtgcaccagttctatccgctggtgaaggtgcagtgctcgcccgaactgcgcttcttcctgtgctccatgtacgcacccgtgtgcaccgtgctggaacaggccatcccgccgtgccgctctatctgtgagcgcgcgcgccagggctgcgaagccctcatgaacaagttcggttttcagtggcccgagcgcctgcgctgcgagcacttcccgcgccacggcgccgagcagatctgcgtcggccagaaccactccgaggacggagctcccgcgctactcaccaccgcgccgccgccgggactgcagccgggtgccgggggcaccccgggtggcccgggcggcggcggcgctcccccgcgctacgccacgctggagcaccccttccactgcccgcgcgtcctcaaggtgccatcctatctcagctacaagtttctgggcgagcgtgattgtgctgcgccctgcgaacctgcgcggcccgatggttccatgttcttctcacaggaggagacgcgtttcgcgcgcctctggatcctcacctggtcggtgctgtgctgcgcttccaccttcttcactgtcaccacgtacttggtagacatgcagcgcttccgctacccagagcggcctatcatttttctgtcgggctgctacaccatggtgtcggtggcctacatcgcgggcttcgtgctccaggagcgcgtggtgtgcaacgagcgcttctccgaggacggttaccgcacggtggtgcagggcaccaagaaggagggctgcaccatcctcttcatgatgctctacttcttcagcatggccagctccatctggtgggtcatcctgtcgctcacctggttcctggcagccggcatgaagtggggccacgaggccatcgaggccaactctcagtacttccacctggccgcctgggccgtgccggccgtcaagaccatcaccatcctggccatgggccagatcgacggcgacctgctgagcggcgtgtgcttcgtaggcctcaacagcctggacccgctgcggggcttcgtgctagcgccgctcttcgtgtacctgttcatcggcacgtccttcctcctggccggcttcgtgtcgctcttccgcatccgcaccatcatgaagcacgacggcaccaagaccgaaaagctggagcggctcatggtgcgcatcggcgtcttctccgtgctctacacagtgcccgccaccatcgtcatcgcttgctacttctacgagcaggccttccgcgagcactgggagcgctcgtgggtgagccagcactgcaagagcctggccatcccgtgcccggcgcactacacgccgcgcatgtcgcccgacttcacggtctacatgatcaaatacctcatgacgctcatcgtgggcatcacgtcgggcttctggatctggtcgggcaagacgctgcactcgtggaggaagttctacactcgcctcaccaacagccgacacggtgagaccaccgtgtgagggacgcccccaggccggaaccgcgcggcgctttcctccgcccggggtggggcccctacagactccgtattttatttttttaaataaaaaacgatcgaaaccatttcacttttaggttgctttttaaaagagaactctctgcccaacaccccc

SEQ ID NO: 11253 - DNA, 2030 bp, Homo sapiens
  source 1..2030: mol_type = unassigned DNA
cagcgcgcggtgtctccggctgctcagtccgaccgcggcaagcaagcgggcaggcgcaccgccccctcccccgcccggcctccccaactctgcggccgcgagtaaagtttgcaaagaggcgcgggaggcggcagccgcagcgaggaggcggcggggaagaagcgcagtctccgggttgggggcgggggcggggggggcgccaaggagccgggtggggggcggcggccagcatgcggccccgcagcgccctgccccgcctgctgctgccgctgctgctgctgcccgccgccgggccggcccagttccacggggagaagggcatctccatcccggaccacggcttctgccagcccatctccatcccgctgtgcacggacatcgcctacaaccagaccatcatgcccaaccttctgggccacacgaaccaggaggacgcaggcctagaggtgcaccagttctatccgctggtgaaggtgcagtgctcgcccgaactgcgcttcttcctgtgctccatgtacgcacccgtgtgcaccgtgctggaacaggccatcccgccgtgccgctctatctgtgagcgcgcgcgccagggctgcgaagccctcatgaacaagttcggttttcagtggcccgagcgcctgcgctgcgagcacttcccgcgccacggcgccgagcagatctgcgtcggccagaaccactccgaggacggagctcccgcgctactcaccaccgcgccgccgccgggactgcagccgggtgccgggggcaccccgggtggcccgggcggcggcggcgctcccccgcgctacgccacgctggagcaccccttccactgcccgcgcgtcctcaaggtgccatcctatctcagctacaagtttctgggcgagcgtgattgtgctgcgccctgcgaacctgcgcggcccgatggttccatgttcttctcacaggaggagacgcgtttcgcgcgcctctggatcctcacctggtcggtgctgtgctgcgcttccaccttcttcactgtcaccacgtacttggtagacatgcagcgcttccgctacccagagcggcctatcatttttctgtcgggctgctacaccatggtgtcggtggcctacatcgcgggcttcgtgctccaggagcgcgtggtgtgcaacgagcgcttctccgaggacggttaccgcacggtggtgcagggcaccaagaaggagggctgcaccatcctcttcatgatgctctacttcttcagcatggccagctccatctggtgggtcatcctgtcgctcacctggttcctggcagccggcatgaagtggggccacgaggccatcgaggccaactctcagtacttccacctggccgcctgggccgtgccggccgtcaagaccatcaccatcctggccatgggccagatcgacggcgacctgctgagcggcgtgtgcttcgtaggcctcaacagcctggacccgctgcggggcttcgtgctagcgccgctcttcgtgtacctgttcatcggcacgtccttcctcctggccggcttcgtgtcgctcttccgcatccgcaccatcatgaagcacgacggcaccaagaccgaaaagctggagcggctcatggtgcgcatcggcgtcttctccgtgctctacacagtgcccgccaccatcgtcatcgcttgctacttctacgagcaggccttccgcgagcactgggagcgctcgtgggtgagccagcactgcaagagcctggccatcccgtgcccggcgcactacacgccgcgcatgtcgcccgacttcacggtctacatgatcaaatacctcatgacgctcatcgtgggcatcacgtcgggcttctggatctggtcgggcaagacgctgcactcgtggaggaagttctacactcgcctcaccaacagccgacacggtgagaccaccgtgtgagggacgcccccaggccggaaccgcgcggcgctttcctccgcccggggtggggcccctacagactccgtattttatttttttaaataaaaaacgatcgaaacc

SEQ ID NO: 11254 - DNA, 13726 bp, Homo sapiens
  source 1..13726: mol_type = unassigned DNA
gccgctccgggtacctgagggacgcgcggccgcccgcggcaggcggtgcagcccccccaccccttggagccaggcgccggggtctgaggatagcatttctcaagacctgacttatggagcacttgtaacctgagatatttcagttgaaggaagaaatagctcttctcctaagatggaatctgtggtttgggaatgtggttgatcaacttgatatgttggccaaatgtgccccatgtaataaaatgaaaagaagagacaagatgatgtcattttcccatattgtgaaaccaaaaacaaacgccttttgtgagaccaagctaacaaacctctgacggtgcgaagagtatttaactgtttgaagaatttaacagtaagatacagaagaagtaccttcgagctgagacctgcaggtgtataaatatctaaaatacatattgaataggcctgatcatctgaatctccttcagacccaggaaggatggctatgacttggattgtcttctctctttggcccttgactgtgttcatggggcatataggtgggcacagtttgttttcttgtgaacctattaccttgaggatgtgccaagatttgccttataatactaccttcatgcctaatcttctgaatcattatgaccaacagacagcagctttggcaatggagccattccaccctatggtgaatctggattgttctcgggatttccggccttttctttgtgcactctacgctcctatttgtatggaatatggacgtgtcacacttccctgtcgtaggctgtgtcagcgggcttacagtgagtgttcgaagctcatggagatgtttggtgttccttggcctgaagatatggaatgcagtaggttcccagattgtgatgagccatatcctcgacttgtggatctgaatttagctggagaaccaactgaaggagccccagtggcagtgcagagagactatggtttttggtgtccccgagagttaaaaattgatcctgatctgggttattcttttctgcatgtgcgtgattgttcacctccttgtccaaatatgtacttcagaagagaagaactgtcatttgctcgctatttcataggattgatttcaatcatttgcctctcggccacattgtttacttttttaacttttttgattgatgtcacaagattccgttatcctgaaaggcctattatattttatgcagtctgctacatgatggtatccttaattttcttcattggatttttgcttgaagatcgagtagcctgcaatgcatccatccctgcacaatataaggcttccacagtgacacaaggatctcataataaagcctgtaccatgctttttatgatactctatttttttactatggctggcagtgtatggtgggtaattcttaccatcacatggtttttagcagctgtgccaaagtggggtagtgaagctattgagaagaaagcattgctgtttcacgccagtgcatggggcatccccggaactctaaccatcatccttttagcgatgaataaaattgaaggtgacaatattagtggcgtgtgttttgttggcctctacgatgttgatgcattgagatattttgttcttgctcccctctgcctgtatgtggtagttggggtttctctcctcttagctggcattatatccctaaacagagttcgaattgagattccattagaaaaggagaaccaagataaattagtgaagtttatgatccggatcggtgttttcagcattctttatctcgtaccactcttggttgtaattggatgctacttttatgagcaagcttaccggggcatctgggaaacaacgtggatacaagaacgctgcagagaatatcacattccatgtccatatcaggttactcaaatgagtcgtccagacttgattctctttctgatgaaatacctgatggctctcatagttggcattccctctgtattttgggttggaagcaaaaagacatgctttgaatgggccagtttttttcatggtcgtaggaaaaaagagatagtgaatgagagccgacaggtactccaggaacctgattttgctcagtctctcctgagggatccaaatactcctatcataagaaagtcaaggggaacttccactcaaggaacatccacccatgcttcttcaactcagctggctatggtggatgatcaaagaagcaaagcaggaagcatccacagcaaagtgagcagctaccacggcagcctccacagatcacgtgatggcaggtacacgccctgcagttacagaggaatggaggagagactacctcatggcagcatgtcacgactaacagatcactccaggcatagtagttctcatcggctcaatgaacagtcacgacatagcagcatcagagatctcagtaataatcccatgactcatatcacacatggcaccagcatgaatcgggttattgaagaagatggaaccagtgcttaatttgtcttgtctaaggtggaaatcttgtgctgtttaaaaagcagattttattctttgccttttgcatgactgatagctgtaactcacagttaacatgctttcagtcaagtacagattgtgtccactggaaaggtaaatgattgcttttttatattgcatcaaacttggaacatcaaggcatccaaaacactaagaattctatcatcacaaaaataattcgtctttctaggttatgaagagataattatttgtctggtaagcatttttataaacccactcattttatatttagaaaaatcctaaatgtgtggtgactgctttgtagtgaactttcatatactataaactagttgtgagataacattctggtagctcagttaataaaacaatttcagaattaaagaaattttctatgcaaggtttacttctcagatgaacagtaggactttgtagttttatttccactaagtgaaaaaagaactgtgtttttaaactgtaggagaatttaataaatcagcaagggtattttagctaatagaataaaagtgcaacagaagaatttgattagtctatgaaaggttctcttaaaattctatcgaaataatcttcatgcagagatattcagggtttggattagcagtggaataaagagatgggcattgtttcccctataattgtgctgtttttataacttttgtaaatattactttttctggctgtgtttttataacttatccatatgcatgatggaaaaattttaatttgtagccatcttttcccatgtaatagtattgattcatagagaacttaatgttcaaaatttgctttgtggaggcatgtaataagataaacatcatacattataaggtaaccacaattacaaaatggcaaaacattttctctgtattcattgttgtatttttctacagtgagatgtgatcttgccaaagccaccagaccttggcttccaggccctcctgtagtgagttgattgtctgcacttgccttgcccaatagccagtaggctacagcttttgccccacacccttattttcagattctggatcattcttgtttacaactgaaatatatataacctcagtccaaagtggtgattgatttgagtatttgaaaattgttgtagctaaatgaagcatgattagtcttagtatgaatatcatttaatctttaaaaaatcaagtaaaaatgtttatctgataatgtttaaataatttacaatataaactgtaaaacttattaggcatgaaatcaatcagaagagaaagaaaaatgctggaacatgcttgatgtattatgtaaaaagcatatttaaacaagggtcctcaaccctgactgcagataagaatcacttgggttacttcagatgcctaacaccttcctctcatacaaataagaattggtagctttcttaaaaaaaaaaaaaaaaaaaaaaagcgctccaggtgattctaatctgcagcctggcttgaaactcactactttaacttgcccctgatgatctgtcggcatcatatatcacatgaacatccacatggattctgtctttcgcttttatatcattatctaatattcagttgttctgcacctgatgccaaattctgggctgtactcctagagagacttactcagtaaggccaaagtgataggactttaaaatctgtagttataaaaataccgcaggtgattcttacggaggtaatccaagaatcatactttgaagaattattctagactctgaagaggcctggctctgccttatgctattatagtttatgacctttaacaatttaactctccgagcctcagttcccttgtttgtaaatgaagatagaagataaatacgtactctacctacctcacaaagctgtcagattaagatcaagtgaaaaaaattatgtgaaagctctttgaaaactgtaaagcattatgaatgataagggattaggttattgtggatttaagaggtgtgaggactgctatagtacattccttgacgtgtgttgaattcatgtatactttctttcttaccctttaaaacaaactgccaagaaattaggtgttgaaaaagaatattctcatcaggcagcaaagtcagttttctgatagtaataatttgtctattatgttatatatttcaaagtacatgtatgataatatgacttattcttcatgagagatatttgaatatttggcccaaaatgtttttcatttttctctgtgttcattgcctttctccttggagctggagttaatgctcaaagcaggcaggtctgaattccctcataaccgacaattagtaaacattttctctgaaagccaaacatataacaacttatttatcaataattcatgaagcttttgtctgagaatctctcctgcaaacagcatgagagaactaaaacaaacattcacaaacaaaaataagttaaaatagaaggtaccagtttgggctcgaagatgttgtcatccattgccatctgcattatattatcaactgccaaaatgttaattggttttcttttacaagtgggccaagtatagacagttaagtgaacatcactatgaaaatcttaactttgtgcttctagatttttagataatcatttgtattttctctattaaattgtgggtatgtatgggaatactatattgacttttcagttactttcagtaagtatcttaattttgtcccacaaaatttatgtaatattaatccatggttttaaacaacagtattcagtttgggcagcagttttaagtctaactagcttaaaccaatctgaataagtctggacagttttcctaccatatgtttaactttgattggcatatgataatgtttagtgttttcttttttcagttgacaactgagaaaataatagttctctctaacatgttaatatattatcaaaaggttttcaaaaagtactttgatttcagcaactttttttattcaataactagacaaaagatctaagataatattaaactcaaaacagtttgtttcaaagaacaattggttaataactcagctggcacagggattcatacacagtttttcaataaatatttaaatgaacaattcatgtcacacaacttgcttttaccctagtactgagtctcacatcaaagaaatttgaaagatctataacctatgtgaaatgaagtctctgctttaccagaataatatgtggcaggtaataaatatgtaaagtacaccaaatgaaacatattttgcatagataacagtccatatcactattataattaaagaaatatatgtacagacatgtaccaatccttttaattaattttagaagatgaacagtgattcttagaagtgagtaattagactccttttagtcttatgctgttagatctttgtggaccagctgagtaaatgaatcttcaaatcaacctttctttttctgctgctcttagagcagatttataaaaatcctaagaatgtcttcaaattagaaaaatttactacattttaacctacctcatcagtttctttgtgataatagctgaaaataactcaaactgtacccatcttagttaggctatatctctgtgaaatgaaaggaaccacttaattttttttatataaattagtgaatcatttgctggagcttagaaaatattaacataccaaaatttcattatgatgatatttatattgctttttgacatgccaaaggtacatttacatattaccatatttggatgacttacatagtctggtgtaatgaaaattcccctgggattggaattttaagactcatgatgtcaactgggctggtcattttatttctctgagtctttgtttcttcaatgtaaaatgtggataaggtaatttttggttttagcctccctcactggatattgtaaggatcaaatgaaatagtatttattataatgctctgtaacccataaattattctacttaaaaaaattttttatagagacagggtcttgctctgtcacacaggctggagagcagtggcataatcatagttcattataaccttgaactcctaggctcaagcagtcctccagcttcagcctcccaagtagctaagactgtaggcatgcaccactacacctggctaattttaatttttttttctttttttgagacggagtctggctttgttgcccaggctggagtgcagtggcacaatctcagctcactgcaacctccacctcccaggttcaagtgattcttctgtctcagcctcccgagtaactgggactacaggtgcgtgccaccacatccagctagtttttgtatttttagtggagatggagttttgccatgttggtctcaaactcctgacctcaagtgatctgcccacctcagcctcccaaagtgctaggattacaggcatgagtcactgcacctggcttaattttaatttttttaattttttgtagagatgagtctcactatgttgaccaggctggtcttgaactcctggcctcctaaagcactgggattacaagcatgagccaccatgcctgatccataaattgttctactgataccatttggttttgttagaatttgggggggctatagaaaacaaggttacagtcttcattagtatttctttttagcaataacaacaaaataggcaattagaccagtgttcatttggtacagtctttaaatcggtcatccaattaacctttaaaaagtaggttatgctcttaaattgtattggttctttaatatgtgttataccagagtatgcctcaaattttatgtagttgaatttgtagaacaaatttggggatattcattttatttttccttttatatgaaattgtataagtacattagcttgacttaaattataaaaaaaaatatatatgaagaagaatgtagaccctataatgttttttgtctttgactttttggcttttatgtacctcattttttctgattgagaaaaagttttgaaaaagtgattcacttgttggttttcattgtggcaaaactttaaattttaagtcatcacactatgagaattgtttgtacacatttataatttttttaaagtatgtaaagtaaggattttttctccattcttcactcacaaaggatagcatttttatggaacctagatttacaaaggaacttgtgattcttttcaatgcttttgtgtcgttttacagctgattaagaaaaaatgtttacatttaattcagctgtatttcctagtagctgtataatcttacacattattcttatataattttgacctattttatatgaaaataattgtattggcatctcttcataatttaattctcttctctccttcttttgttccgattagatgaatttgggaaaggagtaggaagactaggtatcgcatgccttccgtctgattgtaatcagtctcctgggttttttactaatttaatcttaatcctgtgcttctttagtcatcaaattgatataggattacaattttctctcaggatccaagtcttctaagaatgaaaatgttgaagtctacccagaaccagccatccttgtagacatttctatttggttgatttataaagatttaatatataaagatttaatatgagttaaacatgtttcttattctgtgatctctaattagaaagtaaaattctgttgccataaatataaaagaaagttttcacttatattttagtcaaacaccaaaccactgcattacttacttcctataagacacagtagttcaatctgttgaaaggcattgaaggataatttccttcagattactttttaaatcatcatctgcctcaggaaattctttcttgaatttttttgttggtgtgaaagcgttgcttatactttatgctcattttattggtcactgtcaccagtttttcccgataaagattaaaaatgttttttaccttgaaataattcagattttgaagattcactgtttcattattttgctaattaccattaactagtaaagttagtttttaaagtttttttaaggttgatattttatcatattcctggagtaggatggattactttattattattgtagctttaaggttttttgttgtataagtcagcttgtttgtatatgctaaattgcagatatttctttgtgttgtgcttattggtttttttttttaacttagagcttaataatttctattttctatcctggagtctaaaattaaacaaaaaaatctattttctaaattggcaggatttttttaatgattagtaaaactgtattattttatttttaaaaatacaataggattttgagtcaggaaacttgacttctactcttgcctctcttttgcagttagctgtgtaactttggataaggcattttatctcgtggtgcctccatttttctcattctctagggaacaagagaattagtttaggtagcgtctaaaattccgcccagctctcatttggttctcatttgaccattttataatcattattttggtctcatttttattcttcttattcatcccatgaactagatcaacttgtattattttactagatcaacctgtattattaacgtcatttacatgtaaattgatgggattcagatattttatcaactgtttttccattagtgattttaagtaattttaaagaaggaaaattatattacagataataaaaatgaaagaaagttataaatattggacatggcttttttaaatgggaaagtcttcttaagcaccaatataagcaccttaaattgatacatagaaaagaatgacataacgttttgtggtctttgttctcttaaatatgaatatagctagttagcctaaaatttacacaaaatgtattcaagatcaaattagtgaacaaagcaatggttcgtatggctaatttaaaagcaattcaatttaccaatattaaaataattataaaatgtaaaagaaatttcagaggagttgattgaaaattttttgttcagtaattattcttaaactgcattcttaggtttattacataaatatagttgccagattgccatgggcaagtgaatgtcttcatttgaaatattattagagatcaatgtggcttgttatttttaatttttttctggctatacagaaaatgtttctggaaaaattccttaattgtcatctgatataatgtagagattgaggccagacgcagtggctcacgcctgtaatcccagcactttgggaggccaaggtgggcagatcacctgaggtcaggagttcgagaccagcctgatgaacatggcaaatccccttctgtactaaaaatacaaaaattagccaggcgcagtggctcacgcctgtaatcccaacactttgggaggccgaggcgggcggatcacgaggtcaggagatcaagaccgtcctggctaacatggtgagaccctgtctctactaaaaacaaaaaaattagttgggcatggtggcgggcacctgtagtcccagccactcgggaggctgaggcaggagaatggcgtgaacccgggaggcggagcttgcagtgagctgagatcgcaccgctgcactccagcctgggcaacggagcgagactctatctcaaaaaaaaaaaaagaaaaaaaaaaaagtagagattgcattagttccatatctccgcagagttctctggtagattaaatgttctctgtgcactaggccaaggaagttcctgttacctttgaaaatcattgtgtttgctctgattgtctacattagctcatatcagtcttttgaacactggttcaaatctgggtgttgggttaggatctgatgagtagagaatagtggaaagttgatataggaaggtatactggtttctggtgtgattctttagctacatttattccttgtcttatgtcatttcactggatcatgtaactgtcctggctttcagaaattatattagatgcccagcctttctcattcagagatgcctgtattattatgttatttcgattgcctaccaaaaaaaaaaaaaaaagaaaaggtttgtttttagttctctgcctctgcaagtctttgtgatcacatttgttaaattgaatctgagattcaaatatttcatttaatattttctgggttttgataatgggatattctgtaagataaagcaagtaatcctagagtgatttactttatgtttagccatccaccattttcctatttctctactcctcccattctccatttttaaaaggaaattaacaaatgtcttcctttatccctgcctcagataatttttccctgaactcatcttgtcagcagaaacatttaatgtgaaataattctgtatttctgagacaagatcaacacagtagttctttacattgagctgaggtgaatgtatacttaaaaatactctattttctttttatatgaacttaaaatttttaaaatcatatatgggactccccaatgtgaaaatattagtctggacattctcttgccatcaggtgctatttctaccttagctgtgagttagactaaatccaaatttcgtatcattcatctttttataatatttaacttccctagaatcaccccatttcatgtctttaaccccaacttccaacaacttttctgcttttattttcaaatgtcaaattgtatttttgtgttttattttctcattgaagtgtaaaagtatcacatatatgaaggaatggctggtttagacatttactttggcatagtaaagattgatattgataccacccaccatcctttcctctagccccagaaagaaaagtttgacaactcaaaaacgattaaattatcttatcttgttatttaatagaacaatggaagctgtttcgtcaaaattaaaatactttaccaaaaaaatacttttttgtattttaatctgatagtgaatttggggattatttatgtaaatgtatcataattaatagtaattatgagttatttcactctctgtaatttgtgatacccaagattcatatttatttaatgtgaggtgttttttgaggcttttttgttttatcttgttttcttaactttttacagtgttgttagattatcgcggtcatctcggcatgtggatcgctcctcctgtagatcagctgttctctcttagagtcaggacaaggaggtttttgctacatggtcgtagttggataatacagcattattctgaactatctgaaattgctggttttattggtcaaaaatgatcagatgctagcaatttcataatagatatattcaagaaggaaccaaactttaaaagatcttttagaataggtatgttaacttctcatcctaaccctatcaatatatcagaggctttatgaaggagactctacagataaccacaaatcttatcaagaaaattctccttaaaaaaagttatcctttattttgttgttaaatttcccagtttttaaaagtgttttatcaaaatgacttcataattgaagcaaataccttttggaagtatatatgttacataagactttcactaaatctgtgcgtaaagcttttataatctgagatattgttatgtattaggtttgtgcaaacctaatataaaagggttcatctgtaagtatcatttagaggcaaaataatttccccctcacatctaatgtggactcaaattttggcaactggaatgttatcctcttggtaggcattctaaattaatgaatactgctatgtggtgtagtaaacaaatttgccataaaatgccatttaaggattttctttttacctttatttcattataaaagtatatgagttgaagatcatataaaaaatatgaaactcctacacaggaaatccccaattttgtgatttaataggttgtaaaaagagttgttccaaattcagactacatctcatcatataaataatattatgaataataagggtaaaagattagccaacaaaagctaatctagtacaccccatagaggtactccaggtgtcttggttttggataaatttttatagtggagaaaggttactttgatctctcaataattgcttggtacacttcttcctaggcaatatgctcatgataccctcttcatgtgacctattcctcaaatgctgcattctccaaaacttccttacctgccttctatcccctagtcattcttatcaatacttccaaaatataacctatctcaagtgttagaaatttgctttaactaatttatattaaagtgttagtgactatagcccttttatctctcttaaagagaaatctgcattaaaagcaaacacattgctgttagctcaaattaatgtcagtgagtagaatcttaagctttaaaacaaaagtggaaataatttaaattagtgttgatgggactattttgaggcaagagataccattaagtgacctagcttggaaatctgccccctttgcccaaacccatgtgatgtctgaaactactgtatattttcaatgaccttgagaaagggagctagtcatttgtatttatgggccttatgaagtcagggcctgctgatcctgttttttaagttcaagcgcaatgcctgaagcatcctagatctccttcaccctcattctacctgacagacagctaggtctgtcttccagctctttctcattgatactacctttacatatgaatactatccatgcttgttaaaaaaaaaaaaagtctttccccattttactgttacaatttttcaagagctataaaggtagaaaaagtattccttttcattattctaaaaaatatgtcatttttaaatagctggcacttagcagtttagttttccaaactttattctgaatcaaattgctgaggtgattctaaatgtctaatgttgatttatcatataaacatctaattagaaagtgtttatgctaaagacttgtattttgtggcattagttcttcatgtttcttttttatatgtttattaaaattgttcacttccaaatgagtggaaaagttgctgttgttgggatgtacagggcaagtgcacttggttagagcatgaactgggaatttcacattctctgatgtgctttgcactctgctcttgtagatttattttgtttacagtagactgatgtcagtttttgtaaatgttttttcttagcactttaactgtgagtgtacaaactgattttaaatgtagtggttgtatattttggttataaattggagatttttaataaaattaaataattctc

SEQ ID NO: 11255 - DNA, 580 bp, Homo sapiens
  source 1..580: mol_type = unassigned DNA
gaaagctcgctgtcgctgggaggcgcgcgccggcgttcctcggccgctccgggtacctgagggacgcgcggccgcccgcggcaggcggtgcagcccccccaccccttggagccaggcgccggggtctgagatatttcagttgaaggaagaaatagctcttctcctaagatggaatctgtggtttgggaatgtggttgatcaacttgatatgttggccaaatgtgccccatgtaataaaatgaaaagaagagacaagatgatgtcattttcccatattgtgaaaccaaaaacaaacgccttttgtgagaccaagctaacaaacctctgacggtgcgaagagtatttaactgtttgaagaatttaacagtaagatacagaagaagtaccttcgagctgagacctgcaggtgtataaatatctaaaatacatattgaataggcctgatcatctgaatctccttcagacccaggaaggatggctatgacttggattgtcttctctctttggcccttgactgtgttcatggggcatataggtgggcacagtttgttttcttgtgaacctattaccttgaggatgt

SEQ ID NO: 11256 - DNA, 3101 bp, Homo sapiens
  source 1..3101: mol_type = unassigned DNA
gcgaaagctcgctgtcgctgggaggcgcgcgccggcgttcctcggccgctccgggtacctgagggacgcgcggccgcccgcggcaggcggtgcagcccccccaccccttggagccaggcgccggggtctgagatatttcagttgaaggaagaaatagctcttctcctaagatggaatctgtggtttgggaatgtggttgatcaacttgatatgttggccaaatgtgccccatgtaataaaatgaaaagaagagacaagatgatgtcattttcccatattgtgaaaccaaaaacaaacgccttttgtgagaccaagctaacaaacctctgacggtgcgaagagtatttaactgtttgaagaatttaacagtaagatacagaagaagtaccttcgagctgagacctgcaggtgtataaatatctaaaatacatattgaataggcctgatcatctgaatctccttcagacccaggaaggatggctatgacttggattgtcttctctctttggcccttgactgtgttcatggggcatataggtgggcacagtttgttttcttgtgaacctattaccttgaggatgtgccaagatttgccttataatactaccttcatgcctaatcttctgaatcattatgaccaacagacagcagctttggcaatggagccattccaccctatggtgaatctggattgttctcgggatttccggccttttctttgtgcactctacgctcctatttgtatggaatatggacgtgtcacacttccctgtcgtaggctgtgtcagcgggcttacagtgagtgttcgaagctcatggagatgtttggtgttccttggcctgaagatatggaatgcagtaggttcccagattgtgatgagccatatcctcgacttgtggatctgaatttagctggagaaccaactgaaggagccccagtggcagtgcagagagactatggtttttggtgtccccgagagttaaaaattgatcctgatctgggttattcttttctgcatgtgcgtgattgttcacctccttgtccaaatatgtacttcagaagagaagaactgtcatttgctcgctatttcataggattgatttcaatcatttgcctctcggccacattgtttacttttttaacttttttgattgatgtcacaagattccgttatcctgaaaggcctattatattttatgcagtctgctacatgatggtatccttaattttcttcattggatttttgcttgaagatcgagtagcctgcaatgcatccatccctgcacaatataaggcttccacagtgacacaaggatctcataataaagcctgtaccatgctttttatgatactctatttttttactatggctggcagtgtatggtgggtaattcttaccatcacatggtttttagcagctgtgccaaagtggggtagtgaagctattgagaagaaagcattgctgtttcacgccagtgcatggggcatccccggaactctaaccatcatccttttagcgatgaataaaattgaaggtgacaatattagtggcgtgtgttttgttggcctctacgatgttgatgcattgagatattttgttcttgctcccctctgcctgtatgtggtagttggggtttctctcctcttagctggcattatatccctaaacagagttcgaattgagattccattagaaaaggagaaccaagataaattagtgaagtttatgatccggatcggtgttttcagcattctttatctcgtaccactcttggttgtaattggatgctacttttatgagcaagcttaccggggcatctgggaaacaacgtggatacaagaacgctgcagagaatatcacattccatgtccatatcaggttactcaaatgagtcgtccagacttgattctctttctgatgaaatacctgatggctctcatagttggcattccctctgtattttgggttggaagcaaaaagacatgctttgaatgggccagtttttttcatggtcgtaggaaaaaagagatagtgaatgagagccgacaggtactccaggaacctgattttgctcagtctctcctgagggatccaaatactcctatcataagaaagtcaaggggaacttccactcaaggaacatccacccatgcttcttcaactcagctggctatggtggatgatcaaagaagcaaagcaggaagcatccacagcaaagtgagcagctaccacggcagcctccacagatcacgtgatggcaggtacacgccctgcagttacagaggaatggaggagagactacctcatggcagcatgtcacgactaacagatcactccaggcatagtagttctcatcggctcaatgaacagtcacgacatagcagcatcagagatctcagtaataatcccatgactcatatcacacatggcaccagcatgaatcgggttattgaagaagatggaaccagtgcttaatttgtcttgtctaaggtggaaatcttgtgctgtttaaaaagcagattttattctttgccttttgcatgactgatagctgtaactcacagttaacatgctttcagtcaagtacagattgtgtccactggaaaggtaaatgattgcttttttatattgcatcaaacttggaacatcaaggcatccaaaacactaagaattctatcatcacaaaaataattcgtctttctaggttatgaagagataattatttgtctggtaagcatttttataaacccactcattttatatttagaaaaatcctaaatgtgtggtgactgctttgtagtgaactttcatatactataaactagttgtgagataacattctggtagctcagttaataaaacaatttcagaattaaagaaattttctatgcaaggtttacttctcagatgaacagtaggactttgtagttttatttccactaagtgaaaaaagaactgtgtttttaaactgtaggagaatttaataaatcagcaagggtattttagctaatagaataaaagtgcaacagaagaatttgattagtctatgaaaggttctcttaaaattctatcgaaataatcttcatgcagagatattca

SEQ ID NO: 11257 - DNA, 7383 bp, Homo sapiens
  source 1..7383: mol_type = unassigned DNA
gctgcgcagcgctggctgctggctggcctcgcggagacgccgaacggacgcggccggcgccggcttgtgggctcgccgcctgcagccatgaccctcgcagcctgtccctcggcctcggcccgggacgtctaaaatcccacacagtcgcgcgcagctgctggagagccggccgctgccccctcgtcgccgcatcacactcccgtcccgggagctgggagcagcgcgggcagccggcgcccccgtgcaaactgggggtgtctgccagagcagccccagccgctgccgctgctacccccgatgctggccatggcctggcggggcgcagggccgagcgtcccgggggcgcccgggggcgtcggtctcagtctggggttgctcctgcagttgctgctgctcctggggccggcgcggggcttcggggacgaggaagagcggcgctgcgaccccatccgcatctccatgtgccagaacctcggctacaacgtgaccaagatgcccaacctggttgggcacgagctgcagacggacgccgagctgcagctgacaactttcacaccgctcatccagtacggctgctccagccagctgcagttcttcctttgttctgtttatgtgccaatgtgcacagagaagatcaacatccccattggcccatgcggcggcatgtgtctttcagtcaagagacgctgtgaacccgtcctgaaggaatttggatttgcctggccagagagtctgaactgcagcaaattcccaccacagaacgaccacaaccacatgtgcatggaagggccaggtgatgaagaggtgcccttacctcacaaaacccccatccagcctggggaagagtgtcactctgtgggaaccaattctgatcagtacatctgggtgaaaaggagcctgaactgtgtgctcaagtgtggctatgatgctggcttatacagccgctcagccaaggagttcactgatatctggatggctgtgtgggccagcctgtgtttcatctccactgccttcacagtactgaccttcctgatcgattcttctaggttttcctaccctgagcgccccatcatatttctcagtatgtgctataatatttatagcattgcttatattgtcaggctgactgtaggccgggaaaggatatcctgtgattttgaagaggcagcagaacctgttctcatccaagaaggacttaagaacacaggatgtgcaataattttcttgctgatgtacttttttggaatggccagctccatttggtgggttattctgacactcacttggtttttggcagcaggactcaaatggggtcatgaagccattgaaatgcacagctcttatttccacattgcagcctgggccatccccgcagtgaaaaccattgtcatcttgattatgagactggtggatgcagatgaactgactggcttgtgctatgttggaaaccaaaatctcgatgccctcaccgggttcgtggtggctcccctctttacttatttggtcattggaactttgttcattgctgcaggtttggtggccttgttcaaaattcggtcaaatcttcaaaaggatgggacaaagacagacaagttagaaagactgatggtcaagattggggtgttctcagtactgtacacagttcctgcaacgtgtgtgattgcctgttatttttatgaaatctccaactgggcactttttcggtattctgcagatgattccaacatggctgttgaaatgttgaaaatttttatgtctttgttggtgggcatcacttcaggcatgtggatttggtctgccaaaactcttcacacgtggcagaagtgttccaacagattggtgaattctggaaaggtaaagagagagaagagaggaaatggttgggtgaagcctggaaaaggcagtgagactgtggtataaggctagtcagcctccatgctttcttcattttgaaggggggaatgccagcattttggaggaaattctactaaaagttttatgcagtgaatctcagtttgaacaaactagcaacaattaagtgacccccgtcaacccactgcctcccaccccgaccccagcatcaaaaaaccaatgattttgctgcagactttggaatgatccaaaatggaaaagccagttagaggctttcaaagctgtgaaaaatcaaaacgttgatcactttagcaggttgcagcttggagcgtggaggtcctgcctagattccaggaagtccagggcgatactgttttcccctgcagggtgggatttgagctgtgagttggtaactagcagggagaaatattaacttttttaaccctttaccattttaaatactaactgggtctttcagatagcaaagcaatctataaacactggaaacgctgggttcagaaaagtgttacaagagttttatagtttggctgatgtaacataaacatcttctgtggtgcgctgtctgctgtttagaactttgtggactgcactcccaagaagtggtgttagaatctttcagtgcctttgtcataaaacagttatttgaacaaacaaaagtactgtactcacacacataaggtatccagtggatttttcttctctgtcttcctctcttaaatttcaacatctctcttcttggctgctgctgttttcttcattttatgttaatgactcaaaaaaggtatttttatagaatttttgtactgcagcatgcttaaagaggggaaaaggaagggtgattcactttctgacaatcacttaattcagaggaaaatgagatttactaagttgacttacctgacggaccccagagacctattgcattgagcagtggggacttaatatattttacttgtgtgattgcatctatgcagacgccagtctggaagagctgaaatgttaagtttcttggcaactttgcattcacacagattagctgtgtaatttttgtgtgtcaattacaattaaaagcacattgttggaccatgacatagtatactcaactgactttaaaactatggtcaacttcaacttgcattctcagaatgatagtgcctttaaaaatttttttattttttaaagcataagaatgttatcagaatctggtctacttaggacaatggagactttttcagttttataaagggaactgaggacagctaatccaactacttggtgcgtaattgtttcctagtaattggcaaaggctccttgtaagatttcactggaggcagtgtggcctggagtatttatatggtgcttaatgaatctccagaatgccagccagaagcctgattggttagtagggaataaagtgtagaccatatgaaatgaactgcaaactctaatagcccaggtcttaattgcctttagcagaggtatccaaagcttttaaaatttatgcatacgttcttcacaagggggtacccccagcagcctctcgaaaattgcacttctcttaaaactgtaactggcctttctcttaccttgccttaggcgttctaatcatgagatcttggggacaaattgactatgtcacaggttgctctccttgtaactcatacctgtctgcttcagcaactgctttgcaatgacatttatttattaattcatgccttaaaaaaataggaagggaagcttttttttttctttttttttttttcaatcacactttgtggaaaaacatttccagggactcaaaattccaaaaaggtggtcaaattctggaagtaagcatttcctcttttttaaaaatttggtttgagccttatgcccatagtttgacatttccctttcttctttcctttttgtttttgtgtggttcttgagctctctgacatcaagatgcatgtaaagtcgattgtatgttttggaaggcaaagtcttggcttttgagactgaagttaagtgggcacaggtggcccctgctgctgtgcccagtctgagtaccttggctagactctaggtcaggctccaggagcatgagaattgatccccagaagaaccattttaactccatctgatactccattgcctatgaaatgtaaaatgtgaactccctgtgctgcttgtagacagttcccataactgtccacggccctggagcacgcacccaggggcagagcctgcccttactcacgctctgctctggtgtcttgggagttgtgcagggactctggcccaggcaggggaaggaagaccaggcggtaggggactggtcttgctgttagagtatagaggtttgtaatgcagttttcttcataatgtgtcagtgattgtgtgaccaaggcagcatctagcagaaagccaggcatggagtaggtgatcgatacttgtcaatgactaaataataacaataaaagagcacttgggtgaatctgggcacctgatttctgagttttgagttctggagctagtgttttgacaatgctttgggttttgacatgccttttccacaaatctcttgccttttcagggcaaagtgtatttgatcagaagtggccatttggattagtagccttagcaatgctacagggttataggcctctcctttcacattccagacaatggagagtgtttatggtttcaggaaaagaactttgtggctgaggggtcagttaccagtgaccttcaatcaactccatcacttcttaaatcggtatttgttaaaaaaatcagttattttatttattgagtgccgactgtagtaaagccctgaaatagataatctctgttcttctaactgatctaggatggggacgcacccaggtctgctgaactttactgttcctctgggaaaggagcagggacctctggaattcccatctgtttcactgtctccattccataaatctcttcctgtgtgagccaccacacccagcctgggtctctctacttttaacacatctctcatccctttcccaggattccttccaagtcagttacaggtggttttaacagaaagcatcagctctgcttcgtgacagtctctggagaaatcccttaggaagactatgagagtaggccacaaggacatgggcccacacatctgctttggctttgccggcaattcagggcttggggtattccatgtgacttgtataggtatatttgaggacagcatcttgctagagaaaaggtgagggttgtttttctttctctgaaacctacagtaaatgggtatgattgtagcttcctcagaaatcccttggcctccagagattaaacatggtgcaatggcacctctgtccaacctcctttctggtagattcctttctcctgcttcatataggccaaacctcagggcaagggaacatgggggtagagtggtgctggccagaaccatctgcttgagctacttggttgattcatatcctctttcctttatggagacccatttcctgatctctgagactgttgctgaactggcaacttacttgggcctgaaactggagaaggggtgacatttttttaatttcagagatgctttctgattttcctctcccaggtcactgtctcacctgcactctccaaactcaggttccgggaagcttgtgtgtctagatactgaattgagattctgttcagcaccttttagctctatactctctggctcccctcatcctcatggtcactgaattaaatgcttattgtattgagaaccaagatgggacctgaggacacaaagatgagctcaacagtctcagccctagaggaatagactcagggatttcaccaggtcggtgcagtatttgatttctggtgaggtgaccacagctgcagttagggaagggagccattgagcacagactttggaaggaaccttttttttgttgtttgtttgtttgtttgtttgtttgtttgtttgagacagggtcttgctctgtcacccaggctggggcgcaatggcacgatcttggctcactgcaacctctgcctcctgggttcaagtgattctcctgccacagcctcctgaggagctgggactacaggtgcgtgctaccacgcccagctacttctgtatttttagtagagacggggtttcactgtgttggccaggctggtctcgaactcctgacctcatgatctgcccgcctcagcctcccaaagtgctgggattacaagtgtgagccaccacacctggcctggaaggaacctcttaaaatcagtttacgtcttgtattttgttctgtgatggaggacactggagagagttgctattccagtcaatcatgtcgagtcactggactctgaaaatcctattggttcctttattttatttgagtttagagttcccttctgggtttgtattatgtctggcaaatgacctgggttatcacttttcctccagggttagatcatagatcttggaaactccttagagagcattttgctcctaccaaggatcagatactggagccccacataatagatttcatttcactctagcctacatagagctttctgttgctgtctcttgccatgcacttgtgcggtgattacacacttgacagtaccaggagacaaatgacttacagatcccccgacatgcctcttccccttggcaagctcagttgccctgatagtagcatgtttctgtttctgatgtaccttttttctcttcttctttgcatcagccaattcccagaatttccccaggcaatttgtagaggacctttttggggtcctatatgagccatgtcctcaaagcttttaaacctccttgctctcctacaatattcagtacatgaccactgtcatcctagaaggcttctgaaaagaggggcaagagccactctgcgccacaaaggttgggtccatcttctctccgaggttgtgaaagttttcaaattgtactaataggctggggccctgacttggctgtgggctttgggaggggtaagctgctttctagatctctcccagtgaggcatggaggtgtttctgaattttgtctacctcacagggatgttgtgaggcttgaaaaggtcaaaaaatgatggccccttgagctctttgtaagaaaggtagatgaaatatcggatgtaatctgaaaaaaagataaaatgtgacttcccctgctctgtgcagcagtcgggctggatgctctgtggcctttcttgggtcctcatgccaccccacagctccaggaaccttgaagccaatctgggggactttcagatgtttgacaaagaggtaccaggcaaacttcctgctacacatgccctgaatgaattgctaaatttcaaaggaaatggaccctgcttttaaggatgtacaaaagtatgtctgcatcgatgtctgtactgtaaatttctaatttatcactgtacaaagaaaaccccttgctatttaattttgtattaaaggaaaataaagttttgtttgtta

SEQ ID NO: 11258 - DNA, 3788 bp, Homo sapiens
  source 1..3788: mol_type = unassigned DNA
gacctggcggcgcagtctcgcgggatcgctcagctctcgctccccgtgcggctctcgaggcagctccagtcccggacgcaaccccggagccgtctcaggtccctggggggaacggtgggttagacggggacgggaagggacagcggccttcgaccgccccccgagtaattgacccaggactcattttcaggaaagcctgaaaatgagtaaaatagtgaaatgaggaatttgaacattttatctttggatggggatcttctgaggatgcaaagagtgattcatccaagccatgtggtaaaatcaggaatttgaagaaaatggaaatgtttacatttttgttgacgtgtatttttctacccctcctaagagggcacagtctcttcacctgtgaaccaattactgttcccagatgtatgaaaatggcctacaacatgacgtttttccctaatctgatgggtcattatgaccagagtattgccgcggtggaaatggagcattttcttcctctcgcaaatctggaatgttcaccaaacattgaaactttcctctgcaaagcatttgtaccaacctgcatagaacaaattcatgtggttccaccttgtcgtaaactttgtgagaaagtatattctgattgcaaaaaattaattgacacttttgggatccgatggcctgaggagcttgaatgtgacagattacaatactgtgatgagactgttcctgtaacttttgatccacacacagaatttcttggtcctcagaagaaaacagaacaagtccaaagagacattggattttggtgtccaaggcatcttaagacttctgggggacaaggatataagtttctgggaattgaccagtgtgcgcctccatgccccaacatgtattttaaaagtgatgagctagagtttgcaaaaagttttattggaacagtttcaatattttgtctttgtgcaactctgttcacattccttacttttttaattgatgttagaagattcagatacccagagagaccaattatatattactctgtctgttacagcattgtatctcttatgtacttcattggatttttgctaggcgatagcacagcctgcaataaggcagatgagaagctagaacttggtgacactgttgtcctaggctctcaaaataaggcttgcaccgttttgttcatgcttttgtattttttcacaatggctggcactgtgtggtgggtgattcttaccattacttggttcttagctgcaggaagaaaatggagttgtgaagccatcgagcaaaaagcagtgtggtttcatgctgttgcatggggaacaccaggtttcctgactgttatgcttcttgctatgaacaaagttgaaggagacaacattagtggagtttgctttgttggcctttatgacctggatgcttctcgctactttgtactcttgccactgtgcctttgtgtgtttgttgggctctctcttcttttagctggcattatttccttaaatcatgttcgacaagtcatacaacatgatggccggaaccaagaaaaactaaagaaatttatgattcgaattggagtcttcagcggcttgtatcttgtgccattagtgacacttctcggatgttacgtctatgagcaagtgaacaggattacctgggagataacttgggtctctgatcattgtcgtcagtaccatatcccatgtccttatcaggcaaaagcaaaagctcgaccagaattggctttatttatgataaaatacctgatgacattaattgttggcatctctgctgtcttctgggttggaagcaaaaagacatgcacagaatgggctgggttttttaaacgaaatcgcaagagagatccaatcagtgaaagtcgaagagtactacaggaatcatgtgagtttttcttaaagcacaattctaaagttaaacacaaaaagaagcactataaaccaagttcacacaagctgaaggtcatttccaaatccatgggaaccagcacaggagctacagcaaatcatggcacttctgcagtagcaattactagccatgattacctaggacaagaaactttgacagaaatccaaacctcaccagaaacatcaatgagagaggtgaaagcggacggagctagcacccccaggttaagagaacaggactgtggtgaacctgcctcgccagcagcatccatctccagactctctggggaacaggtcgacgggaagggccaggcaggcagtgtatctgaaagtgcgcggagtgaaggaaggattagtccaaagagtgatattactgacactggcctggcacagagcaacaatttgcaggtccccagttcttcagaaccaagcagcctcaaaggttccacatctctgcttgttcacccggtttcaggagtgagaaaagagcagggaggtggttgtcattcagatacttgaagaacattttctctcgttactcagaagcaaatttgtgttacactggaagtgacctatgcactgttttgtaagaatcactgttacattcttcttttgcacttaaagttgcattgcctactgttatactggaaaaaatagagttcaagaataatatgactcatttcacacaaaggttaatgacaacaatatacctgaaaacagaaaatgtgcaggttaataatatttttttaatagtgtgggaggacagagttagaggaatcttccttttctatttatgaagattctactcttggtaagagtattttaagatgtactatgctattttacttttttgatataaaatcaagatatttctttgctgaagtatttaaatcttatccttgtatctttttatacatatttgaaaataagcttatatgtatttgaacttttttgaaatcctattcaagtatttttatcatgctattgtgatattttagcactttggtagcttttacactgaatttctaagaaaattgtaaaatagtcttcttttatactgtaaaaaaagatataccaaaaagtcttataataggaatttaactttaaaaacccacttattgataccttaccatctaaaatgtgtgatttttatagtctcgttttaggaatttcacagatctaaattatgtaactgaaataaggtgcttactcaaagagtgtccactattgattgtattatgctgctcactgatccttctgcatatttaaaataaaatgtcctaaagggttagtagacaaaatgttagtcttttgtatattaggccaagtgcaattgacttcccttttttaatgtttcatgaccacccattgattgtattataaccacttacagttgcttatattttttgttttaacttttgttttttaacatttagaatattacattttgtattatacagtacctttctcagacattttgtagaattcatttcggcagctcactaggattttgctgaacattaaaaagtgtgatagcgatattagtgccaatcaaatggaaaaaaggtagttttaataaacaagacacaacgtttttatacaacatactttaaaatattaaggagttttcttaattttgtttcctattaagtattattctttgggcaagattttctgatgcttttgattttctctcaatttagcatttgcttttggtttttttctctatttagcattctgttaaggcacaaaaactatgtactgtatgggaaatgttgtaaatattaccttttccacattttaaacagacaactttgaatacaaaaactttgttttgtgtgatcttttcattaataaaattatctttgt

SEQ ID NO: 11259 - DNA, 3719 bp, Homo sapiens
  source 1..3719: mol_type = unassigned DNA
cctttcgaactcaagtcacttgggcaattggctttacaaagcaaattggctccgtttaaggattcttgactcctgaaatccgcaaggaagtgggttcttttagagccagcgccaagagcttcaaaaaatccttctaagtaattgacccaggactcattttcaggaaagcctgaaaatgagtaaaatagtgaaatgaggaatttgaacattttatctttggatggggatcttctgaggatgcaaagagtgattcatccaagccatgtggtaaaatcaggaatttgaagaaaatggaaatgtttacatttttgttgacgtgtatttttctacccctcctaagagggcacagtctcttcacctgtgaaccaattactgttcccagatgtatgaaaatggcctacaacatgacgtttttccctaatctgatgggtcattatgaccagagtattgccgcggtggaaatggagcattttcttcctctcgcaaatctggaatgttcaccaaacattgaaactttcctctgcaaagcatttgtaccaacctgcatagaacaaattcatgtggttccaccttgtcgtaaactttgtgagaaagtatattctgattgcaaaaaattaattgacacttttgggatccgatggcctgaggagcttgaatgtgacagattacaatactgtgatgagactgttcctgtaacttttgatccacacacagaatttcttggtcctcagaagaaaacagaacaagtccaaagagacattggattttggtgtccaaggcatcttaagacttctgggggacaaggatataagtttctgggaattgaccagtgtgcgcctccatgccccaacatgtattttaaaagtgatgagctagagtttgcaaaaagttttattggaacagtttcaatattttgtctttgtgcaactctgttcacattccttacttttttaattgatgttagaagattcagatacccagagagaccaattatatattactctgtctgttacagcattgtatctcttatgtacttcattggatttttgctaggcgatagcacagcctgcaataaggcagatgagaagctagaacttggtgacactgttgtcctaggctctcaaaataaggcttgcaccgttttgttcatgcttttgtattttttcacaatggctggcactgtgtggtgggtgattcttaccattacttggttcttagctgcaggaagaaaatggagttgtgaagccatcgagcaaaaagcagtgtggtttcatgctgttgcatggggaacaccaggtttcctgactgttatgcttcttgctatgaacaaagttgaaggagacaacattagtggagtttgctttgttggcctttatgacctggatgcttctcgctactttgtactcttgccactgtgcctttgtgtgtttgttgggctctctcttcttttagctggcattatttccttaaatcatgttcgacaagtcatacaacatgatggccggaaccaagaaaaactaaagaaatttatgattcgaattggagtcttcagcggcttgtatcttgtgccattagtgacacttctcggatgttacgtctatgagcaagtgaacaggattacctgggagataacttgggtctctgatcattgtcgtcagtaccatatcccatgtccttatcaggcaaaagcaaaagctcgaccagaattggctttatttatgataaaatacctgatgacattaattgttggcatctctgctgtcttctgggttggaagcaaaaagacatgcacagaatgggctgggttttttaaacgaaatcgcaagagagatccaatcagtgaaagtcgaagagtactacaggaatcatgtgagtttttcttaaagcacaattctaaagttaaacacaaaaagaagcactataaaccaagttcacacaagctgaaggtcatttccaaatccatgggaaccagcacaggagctacagcaaatcatggcacttctgcagtagcaattactagccatgattacctaggacaagaaactttgacagaaatccaaacctcaccagaaacatcaatgagagaggtgaaagcggacggagctagcacccccaggttaagagaacaggactgtggtgaacctgcctcgccagcagcatccatctccagactctctggggaacaggtcgacgggaagggccaggcaggcagtgtatctgaaagtgcgcggagtgaaggaaggattagtccaaagagtgatattactgacactggcctggcacagagcaacaatttgcaggtccccagttcttcagaaccaagcagcctcaaaggttccacatctctgcttgttcacccggtttcaggagtgagaaaagagcagggaggtggttgtcattcagatacttgaagaacattttctctcgttactcagaagcaaatttgtgttacactggaagtgacctatgcactgttttgtaagaatcactgttacattcttcttttgcacttaaagttgcattgcctactgttatactggaaaaaatagagttcaagaataatatgactcatttcacacaaaggttaatgacaacaatatacctgaaaacagaaaatgtgcaggttaataatatttttttaatagtgtgggaggacagagttagaggaatcttccttttctatttatgaagattctactcttggtaagagtattttaagatgtactatgctattttacttttttgatataaaatcaagatatttctttgctgaagtatttaaatcttatccttgtatctttttatacatatttgaaaataagcttatatgtatttgaacttttttgaaatcctattcaagtatttttatcatgctattgtgatattttagcactttggtagcttttacactgaatttctaagaaaattgtaaaatagtcttcttttatactgtaaaaaaagatataccaaaaagtcttataataggaatttaactttaaaaacccacttattgataccttaccatctaaaatgtgtgatttttatagtctcgttttaggaatttcacagatctaaattatgtaactgaaataaggtgcttactcaaagagtgtccactattgattgtattatgctgctcactgatccttctgcatatttaaaataaaatgtcctaaagggttagtagacaaaatgttagtcttttgtatattaggccaagtgcaattgacttcccttttttaatgtttcatgaccacccattgattgtattataaccacttacagttgcttatattttttgttttaacttttgttttttaacatttagaatattacattttgtattatacagtacctttctcagacattttgtagaattcatttcggcagctcactaggattttgctgaacattaaaaagtgtgatagcgatattagtgccaatcaaatggaaaaaaggtagttttaataaacaagacacaacgtttttatacaacatactttaaaatattaaggagttttcttaattttgtttcctattaagtattattctttgggcaagattttctgatgcttttgattttctctcaatttagcatttgcttttggtttttttctctatttagcattctgttaaggcacaaaaactatgtactgtatgggaaatgttgtaaatattaccttttccacattttaaacagacaactttgaatacaaaaa

SEQ ID NO: 11260 - DNA, 2774 bp, Homo sapiens
  source 1..2774: mol_type = unassigned DNA
tctcgctccccgtgcggctctcgaggcagctccagtcccggacgcaaccccggagccgtctcaggtccctggggggaacggtgggttagacggggacgggaagggacagcggccttcgaccgccccccgagtaattgacccaggactcattttcaggaaagcctgaaaatgagtaaaatagtgaaatgaggaatttgaacattttatctttggatggggatcttctgaggatgcaaagagtgattcatccaagccatgtgatgtatgaaaatggcctacaacatgacgtttttccctaatctgatgggtcattatgaccagagtattgccgcggtggaaatggagcattttcttcctctcgcaaatctggaatgttcaccaaacattgaaactttcctctgcaaagcatttgtaccaacctgcatagaacaaattcatgtggttccaccttgtcgtaaactttgtgagaaagtatattctgattgcaaaaaattaattgacacttttgggatccgatggcctgaggagcttgaatgtgacagattacaatactgtgatgagactgttcctgtaacttttgatccacacacagaatttcttggtcctcagaagaaaacagaacaagtccaaagagacattggattttggtgtccaaggcatcttaagacttctgggggacaaggatataagtttctgggaattgaccagtgtgcgcctccatgccccaacatgtattttaaaagtgatgagctagagtttgcaaaaagttttattggaacagtttcaatattttgtctttgtgcaactctgttcacattccttacttttttaattgatgttagaagattcagatacccagagagaccaattatatattactctgtctgttacagcattgtatctcttatgtacttcattggatttttgctaggcgatagcacagcctgcaataaggcagatgagaagctagaacttggtgacactgttgtcctaggctctcaaaataaggcttgcaccgttttgttcatgcttttgtattttttcacaatggctggcactgtgtggtgggtgattcttaccattacttggttcttagctgcaggaagaaaatggagttgtgaagccatcgagcaaaaagcagtgtggtttcatgctgttgcatggggaacaccaggtttcctgactgttatgcttcttgctatgaacaaagttgaaggagacaacattagtggagtttgctttgttggcctttatgacctggatgcttctcgctactttgtactcttgccactgtgcctttgtgtgtttgttgggctctctcttcttttagctggcattatttccttaaatcatgttcgacaagtcatacaacatgatggccggaaccaagaaaaactaaagaaatttatgattcgaattggagtcttcagcggcttgtatcttgtgccattagtgacacttctcggatgttacgtctatgagcaagtgaacaggattacctgggagataacttgggtctctgatcattgtcgtcagtaccatatcccatgtccttatcaggcaaaagcaaaagctcgaccagaattggctttatttatgataaaatacctgatgacattaattgttggcatctctgctgtcttctgggttggaagcaaaaagacatgcacagaatgggctgggttttttaaacgaaatcgcaagagagatccaatcagtgaaagtcgaagagtactacaggaatcatgtgagtttttcttaaagcacaattctaaagttaaacacaaaaagaagcactataaaccaagttcacacaagctgaaggtcatttccaaatccatgggaaccagcacaggagctacagcaaatcatggcacttctgcagtagcaattactagccatgattacctaggacaagaaactttgacagaaatccaaacctcaccagaaacatcaatgagagaggtgaaagcggacggagctagcacccccaggttaagagaacaggactgtggtgaacctgcctcgccagcagcatccatctccagactctctggggaacaggtcgacgggaagggccaggcaggcagtgtatctgaaagtgcgcggagtgaaggaaggattagtccaaagagtgatattactgacactggcctggcacagagcaacaatttgcaggtccccagttcttcagaaccaagcagcctcaaaggttccacatctctgcttgttcacccggtttcaggagtgagaaaagagcagggaggtggttgtcattcagatacttgaagaacattttctctcgttactcagaagcaaatttgtgttacactggaagtgacctatgcactgttttgtaagaatcactgttacattcttcttttgcacttaaagttgcattgcctactgttatactggaaaaaatagagttcaagaataatatgactcatttcacacaaaggttaatgacaacaatatacctgaaaacagaaaatgtgcaggttaataatatttttttaatagtgtgggaggacagagttagaggaatcttccttttctatttatgaagattctactcttggtaagagtattttaagatgtactatgctattttacttttttgatataaaatcaagatatttctttgctgaagtatttaaatcttatccttgtatctttttatacatatttgaaaataagcttatatgtatttgaacttttttgaaatcctattcaagtatttttatcatgctattgtgatattttagcacttt

SEQ ID NO: 11261 - DNA, 2721 bp, Homo sapiens
  source 1..2721: mol_type = unassigned DNA
agtcccggacgcaaccccggagccgtctcaggtccctggggtaattgacccaggactcattttcaggaaagcctgaaaatgagtaaaatagtgaaatgaggaatttgaacattttatctttggatggggatcttctgaggatgcaaagagtgattcatccaagccatgtggtaaaatcaggaatttgaagaaaatggaaatgtttacatttttgttgacgtgtatttttctacccctcctaagagggcacagtctcttcacctgtgaaccaattactgttcccagatgtatgaaaatggcctacaacatgacgtttttccctaatctgatgggtcattatgaccagagtattgccgcggtggaaatggagggtacccagactggttaagcagaaaaggaattgattataagagtagcaggtagctcatagaatcgccaggtgggctagaattcaagctcaggctgtaaggaaacatgctacagctaagatgctggcacagcattttcttcctctcgcaaatctggaatgttcaccaaacattgaaactttcctctgcaaagcatttgtaccaacctgcatagaacaaattcatgtggttccaccttgtcgtaaactttgtgagaaagtatattctgattgcaaaaaattaattgacacttttgggatccgatggcctgaggagcttgaatgtgacagattacaatactgtgatgagactgttcctgtaacttttgatccacacacagaatttcttggtcctcagaagaaaacagaacaagtccaaagagacattggattttggtgtccaaggcatcttaagacttctgggggacaaggatataagtttctgggaattgaccagtgtgcgcctccatgccccaacatgtattttaaaagtgatgagctagagtttgcaaaaagttttattggaacagtttcaatattttgtctttgtgcaactctgttcacattccttacttttttaattgatgttagaagattcagatacccagagagaccaattatatattactctgtctgttacagcattgtatctcttatgtacttcattggatttttgctaggcgatagcacagcctgcaataaggcagatgagaagctagaacttggtgacactgttgtcctaggctctcaaaataaggcttgcaccgttttgttcatgcttttgtattttttcacaatggctggcactgtgtggtgggtgattcttaccattacttggttcttagctgcaggaagaaaatggagttgtgaagccatcgagcaaaaagcagtgtggtttcatgctgttgcatggggaacaccaggtttcctgactgttatgcttcttgctatgaacaaagttgaaggagacaacattagtggagtttgctttgttggcctttatgacctggatgcttctcgctactttgtactcttgccactgtgcctttgtgtgtttgttgggctctctcttcttttagctggcattatttccttaaatcatgttcgacaagtcatacaacatgatggccggaaccaagaaaaactaaagaaatttatgattcgaattggagtcttcagcggcttgtatcttgtgccattagtgacacttctcggatgttacgtctatgagcaagtgaacaggattacctgggagataacttgggtctctgatcattgtcgtcagtaccatatcccatgtccttatcaggcaaaagcaaaagctcgaccagaattggctttatttatgataaaatacctgatgacattaattgttggcatctctgctgtcttctgggttggaagcaaaaagacatgcacagaatgggctgggttttttaaacgaaatcgcaagagagatccaatcagtgaaagtcgaagagtactacaggaatcatgtgagtttttcttaaagcacaattctaaagttaaacacaaaaagaagcactataaaccaagttcacacaagctgaaggtcatttccaaatccatgggaaccagcacaggagctacagcaaatcatggcacttctgcagtagcaattactagccatgattacctaggacaagaaactttgacagaaatccaaacctcaccagaaacatcaatgagagaggtgaaagcggacggagctagcacccccaggttaagagaacaggactgtggtgaacctgcctcgccagcagcatccatctccagactctctggggaacaggtcgacgggaagggccaggcaggcagtgtatctgaaagtgcgcggagtgaaggaaggattagtccaaagagtgatattactgacactggcctggcacagagcaacaatttgcaggtccccagttcttcagaaccaagcagcctcaaaggttccacatctctgcttgttcacccggtttcaggagtgagaaaagagcagggaggtggttgtcattcagatacttgaagaacattttctctcgttactcagaagcaaatttgtgttacactggaagtgacctatgcactgttttgtaagaatcactgttacattcttcttttgcacttaaagttgcattgcctactgttatactggaaaaaatagagttcaagaataatatgactcatttcacacaaaggttaatgacaacaatatacctgaaaacagaaaatgtgcaggttaataatatttttttaatagtgtgggaggacagagttagaggaatcttccttttctatttatg

SEQ ID NO: 11262 - DNA, 2006 bp, Homo sapiens
  source 1..2006: mol_type = unassigned DNA
gtgcggctctcgaggcagctccagtcccggacgcaaccccggagccgtctcaggtccctggggggaacggtgggttagacggggacgggaagggacagcggccttcgaccgccccccgagtaattgacccaggactcattttcaggaaagcctgaaaatgagtaaaatagtgaaatgaggaatttgaacattttatctttggatggggatcttctgaggatgcaaagagtgattcatccaagccatgtggtaaaatcaggaatttgaagaaaatggaaatgtttacatttttgttgacgtgtatttttctacccctcctaagagggcacagtctcttcacctgtgaaccaattactgttcccagatgtatgaaaatggcctacaacatgacgtttttccctaatctgatgggtcattatgaccagagtattgccgcggtggaaatggagttgtgaagccatcgagcaaaaagcagtgtggtttcatgctgttgcatggggaacaccaggtttcctgactgttatgcttcttgctatgaacaaagttgaaggagacaacattagtggagtttgctttgttggcctttatgacctggatgcttctcgctactttgtactcttgccactgtgcctttgtgtgtttgttgggctctctcttcttttagctggcattatttccttaaatcatgttcgacaagtcatacaacatgatggccggaaccaagaaaaactaaagaaatttatgattcgaattggagtcttcagcggcttgtatcttgtgccattagtgacacttctcggatgttacgtctatgagcaagtgaacaggattacctgggagataacttgggtctctgatcattgtcgtcagtaccatatcccatgtccttatcaggcaaaagcaaaagctcgaccagaattggctttatttatgataaaatacctgatgacattaattgttggcatctctgctgtcttctgggttggaagcaaaaagacatgcacagaatgggctgggttttttaaacgaaatcgcaagagagatccaatcagtgaaagtcgaagagtactacaggaatcatgtgagtttttcttaaagcacaattctaaagttaaacacaaaaagaagcactataaaccaagttcacacaagctgaaggtcatttccaaatccatgggaaccagcacaggagctacagcaaatcatggcacttctgcagtagcaattactagccatgattacctaggacaagaaactttgacagaaatccaaacctcaccagaaacatcaatgagagaggtgaaagcggacggagctagcacccccaggttaagagaacaggactgtggtgaacctgcctcgccagcagcatccatctccagactctctggggaacaggtcgacgggaagggccaggcaggcagtgtatctgaaagtgcgcggagtgaaggaaggattagtccaaagagtgatattactgacactggcctggcacagagcaacaatttgcaggtccccagttcttcagaaccaagcagcctcaaaggttccacatctctgcttgttcacccggtttcaggagtgagaaaagagcagggaggtggttgtcattcagatacttgaagaacattttctctcgttactcagaagcaaatttgtgttacactggaagtgacctatgcactgttttgtaagaatcactgttacattcttcttttgcacttaaagttgcattgcctactgttatactggaaaaaatagagttcaagaataatatgactcatttcacacaaaggttaatgacaacaatatacctgaaaacagaaaatgtgcaggttaataatatttttttaatagtgtgggaggacagagttagaggaatcttccttttctatttatgaagattctactcttggtaagagtattttaagatgtactatgctattttacttttttgatataaaatcaagatatttctttgctgaagtatttaaatcttatccttg

SEQ ID NO: 11263 - DNA, 3186 bp, Homo sapiens
  source 1..3186: mol_type = unassigned DNA
acagcatggagtggggttacctgttggaagtgacctcgctgctggccgccttggcgctgctgcagcgctctagcggcgctgcggccgcctcggccaaggagctggcatgccaagagatcaccgtgccgctgtgtaagggcatcggctacaactacacctacatgcccaatcagttcaaccacgacacgcaagacgaggcgggcctggaggtgcaccagttctggccgctggtggagatccagtgctcgcccgatctcaagttcttcctgtgcagcatgtacacgcccatctgcctagaggactacaagaagccgctgccgccctgccgctcggtgtgcgagcgcgccaaggccggctgcgcgccgctcatgcgccagtacggcttcgcctggcccgaccgcatgcgctgcgaccggctgcccgagcaaggcaaccctgacacgctgtgcatggactacaaccgcaccgacctaaccaccgccgcgcccagcccgccgcgccgcctgccgccgccgccgcccggcgagcagccgccttcgggcagcggccacggccgcccgccgggggccaggcccccgcaccgcggcggcggcaggggcggtggcggcggggacgcggcggcgcccccagctcgcggcggcggcggtggcgggaaggcgcggccccctggcggcggcgcggctccctgcgagcccgggtgccagtgccgcgcgcctatggtgagcgtgtccagcgagcgccacccgctctacaaccgcgtcaagacaggccagatcgctaactgcgcgctgccctgccacaacccctttttcagccaggacgagcgcgccttcaccgtcttctggatcggcctgtggtcggtgctctgcttcgtgtccaccttcgccaccgtctccaccttccttatcgacatggagcgcttcaagtacccggagcggcccattatcttcctctcggcctgctacctcttcgtgtcggtgggctacctagtgcgcctggtggcgggccacgagaaggtggcgtgcagcggtggcgcgccgggcgcggggggcgctgggggcgcgggcggcgcggcggcgggcgcgggcgcggcgggcgcgggcgcgggcggcccgggcgggcgcggcgagtacgaggagctgggcgcggtggagcagcacgtgcgctacgagaccaccggccccgcgctgtgcaccgtggtcttcttgctggtctacttcttcggcatggccagctccatctggtgggtgatcttgtcgctcacatggttcctggcggccggtatgaagtggggcaacgaagccatcgccggctactcgcagtacttccacctggccgcgtggcttgtgcccagcgtcaagtccatcgcggtgctggcgctcagctcggtggacggcgacccggtggcgggcatctgctacgtgggcaaccagagcctggacaacctgcgcggcttcgtgctggcgccgctggtcatctacctcttcatcggcaccatgttcctgctggccggcttcgtgtccctcttccgcatccgctcggtcatcaagcaacaggacggccccaccaagacgcacaagctggagaagctgatgatccgcctgggcctgttcaccgtgctctacaccgtgcccgccgcggtggtggtcgcctgcctcttctacgagcagcacaaccgcccgcgctgggaggccacgcacaactgcccgtgcctgcgggacctgcagcccgaccaggcacgcaggcccgactacgccgtcttcatgctcaagtacttcatgtgcctagtggtgggcatcacctcgggcgtgtgggtctggtccggcaagacgctggagtcctggcgctccctgtgcacccgctgctgctgggccagcaagggcgccgcggtgggcgggggcgcgggcgccacggccgcggggggtggcggcgggccggggggcggcggcggcgggggacccggcggcggcggggggccgggcggcggcgggggctccctctacagcgacgtcagcactggcctgacgtggcggtcgggcacggcgagctccgtgtcttatccaaagcagatgccattgtcccaggtctgagcggaggggagggggcgcccaggaggggtggggaggggggcgaggagagccaagtgcagcgaagggacacttgatgggctgaggttcccaccccttcacagtgttgattgctattagcatgataatgaactcttaatggtatccattagctgggacttaaatgactcacttagaacaaagtacctggcattgaagcctcccagacccagccccttttcctccattgatgtgcggggagctcctcccgccacgcgttaatttctgttggctgaggagggtggactctgcggcgtttccagaacccgagatttggagccctccctggctgcacttggctgggtttgcagtcagatacacagatttcacctgggagaacctctttttctccctcgactcttcctacgtaaactcccacccctgacttaccctggaggaggggtgaccgccacctgatgggattgcacggtttgggtattcttaatgaccaggcaaatgccttaagtaaacaaacaagaaatgtcttaattatacaccccacgtaaatacgggtttcttacattagaggatgtatttatataattatttgttaaattgtaaaaaaaaaagtgtaaaatatgtatatatccaaagatatagtgtgtacatttttttgtaaaaagtttagaggcttacccctgtaagaacagatataagtattctattttgtcaataaaatgacttttgataaatgatttaaccattgccctctcccccgcctcttctgagctgtcacctttaaagtgcttgctaaggacgcatggggaaaatggacattttctggcttgtcattctgtacactgaccttaggcatggagaaaattacttgttaaactctagttcttaagttgttagccaagtaaatatcattgttgaactgaaatcaaaattgagtttttgcaccttccccaaagacggtgtttttcatgggagctcttttctgatccatggataacaactctcactttagtggatgtaaatggaacttctgcaaggcagtaattccccttaggccttgttatttatcctgcatggtatcactaaaggtttcaaaaccctg

SEQ ID NO: 11264 - DNA, 2342 bp, Homo sapiens
  source 1..2342: mol_type = unassigned DNA
gctctggctcagcggcggctccggtggcagcggcggtggcggctaggcgggctcggcggctcctgtccctcgggcggctgcccgctcgctgcccagggcgcccggacacacgtgggcggctcagcgatggcccgcgccccgcgacgtggcgggcaggcaccggggcgcgggaccgctgagcccgagtgagccggggccgcgctcccgccttcggcccgggcctcccgggatggccgtggcgcctctgcggggggcgctgctgctgtggcagctgctggcggcgggcggcgcggcactggagatcggccgcttcgacccggagcgcgggcgcggggctgcgccgtgccaggcggtggagatccccatgtgccgcggcatcggctacaacctgacccgcatgcccaacctgctgggccacacgtcgcagggcgaggcggctgccgagctagcggagttcgcgccgctggtgcagtacggctgccacagccacctgcgcttcttcctgtgctcgctctacgcgcccatgtgcaccgaccaggtctcgacgcccattcccgcctgccggcccatgtgcgagcaggcgcgcctgcgctgcgcgcccatcatggagcagttcaacttcggctggccggactcgctcgactgcgcccggctgcccacgcgcaacgacccgcacgcgctgtgcatggaggcgcccgagaacgccacggccggccccgcggagccccacaagggcctgggcatgctgcccgtggcgccgcggcccgcgcgccctcccggagacctgggcccgggcgcgggcggcagtggcacctgcgagaaccccgagaagttccagtacgtggagaagagccgctcgtgcgcaccgcgctgcgggcccggcgtcgaggtgttctggtcccggcgcgacaaggacttcgcgctggtctggatggccgtgtggtcggcgctgtgcttcttctccaccgccttcactgtgctcaccttcttgctggagccccaccgcttccagtaccccgagcgccccatcatcttcctctccatgtgctacaacgtctactcgctggccttcctgatccgtgcggtggccggagcgcagagcgtggcctgtgaccaggaggcgggcgcgctctacgtgatccaggagggcctggagaacacgggctgcacgctggtcttcctactgctctactacttcggcatggccagctcgctctggtgggtggtcctgacgctcacctggttcctggctgccgggaagaaatggggccacgaggccatcgaggcccacggcagctatttccacatggctgcctggggcctgcccgcgctcaagaccatcgtcatcctgaccctgcgcaaggtggcgggtgatgagctgactgggctttgctacgtggccagcacggatgcagcagcgctcacgggcttcgtgctggtgcccctctctggctacctggtgctgggcagtagtttcctcctgaccggcttcgtggccctcttccacatccgcaagatcatgaagacgggcggcaccaacacagagaagctggagaagctcatggtcaagatcggggtcttctccatcctctacacggtgcccgccacctgcgtcatcgtttgctatgtctacgaacgcctcaacatggacttctggcgccttcgggccacagagcagccatgcgcagcggccgcggggcccggaggccggagggactgctcgctgccagggggctcggtgcccaccgtggcggtcttcatgctcaaaattttcatgtcactggtggtggggatcaccagcggcgtctgggtgtggagctccaagactttccagacctggcagagcctgtgctaccgcaagatagcagctggccgggcccgggccaaggcctgccgcgcccccgggagctacggacgtggcacgcactgccactataaggctcccaccgtggtcttgcacatgactaagacggacccctctttggagaaccccacacacctctagccacacaggcctggcgcggggtggctgctgccccctccttgccctccacgccctgccccctgcatcccctagagacagctgactagcagctgcccagctgtcaaggtcaggcaagtgagcaccggggactgaggatcagggcgggaccccgtgaggctcattaggggagatgggggtctcccctaatgcgggggctggaccaggctgagtccccacagggtcctagtggaggatgtggaggggcggggcagaggggtccagccggagtttatttaatgatgtaatttattgttgcgttcctctggaagctgtgactggaataaacccccgcgtggca

SEQ ID NO: 11265 - DNA, 3162 bp, Homo sapiens
  source 1..3162: mol_type = unassigned DNA
acagacgtccctgcggggctcctcctgagcgtccctcctgccagccagggtcgcagccgcagcggcggccgcagctcttagcccacacaggacttgtaaactcttactgcacccttctctcccattaggagcttttcctccctccttccccccaacccctctgtcctcctcactttggggaatttaatgctttctttagcatctttttgtgtgcgtgatctaggggaggagacaccccagagctccaactagctctcagctgaattctacttttgtttttatgtcttcctcgcctcctctcgtgtccctcttatctgactgatctgcgaagtctgatgcttctgccagagggagaggaataaatagatgttgctgcttccgaaggcttagacgttgggaaagagcagcctgggcggcaggggcggtggctggagctcggtaaagctcgtgggaccccattgggggaatttgatccaaggaagcggtgattgccgggggaggagaagctcccagatccttgtgtccacttgcagcgggggaggcggagacggcggagcgggccttttggcgtccactgcgcggctgcaccctgccccatcctgccgggatcatggtctgcggcagcccgggagggatgctgctgctgcgggccgggctgcttgccctggctgctctctgcctgctccgggtgcccggggctcgggctgcagcctgtgagcccgtccgcatccccctgtgcaagtccctgccctggaacatgactaagatgcccaaccacctgcaccacagcactcaggccaacgccatcctggccatcgagcagttcgaaggtctgctgggcacccactgcagccccgatctgctcttcttcctctgtgccatgtacgcgcccatctgcaccattgacttccagcacgagcccatcaagccctgtaagtctgtgtgcgagcgggcccggcagggctgtgagcccatactcatcaagtaccgccactcgtggccggagaacctggcctgcgaggagctgccagtgtacgacaggggcgtgtgcatctctcccgaggccatcgttactgcggacggagctgattttcctatggattctagtaacggaaactgtagaggggcaagcagtgaacgctgtaaatgtaagcctattagagctacacagaagacctatttccggaacaattacaactatgtcattcgggctaaagttaaagagataaagactaagtgccatgatgtgactgcagtagtggaggtgaaggagattctaaagtcctctctggtaaacattccacgggacactgtcaacctctataccagctctggctgcctctgccctccacttaatgttaatgaggaatatatcatcatgggctatgaagatgaggaacgttccagattactcttggtggaaggctctatagctgagaagtggaaggatcgactcggtaaaaaagttaagcgctgggatatgaagcttcgtcatcttggactcagtaaaagtgattctagcaatagtgattccactcagagtcagaagtctggcaggaactcgaacccccggcaagcacgcaactaaatcccgaaatacaaaaagtaacacagtggacttcctattaagacttacttgcattgctggactagcaaaggaaaattgcactattgcacatcatattctattgtttactataaaaatcatgtgataactgattattacttctgtttctcttttggtttctgcttctctcttctctcaacccctttgtaatggtttgggggcagactcttaagtatattgtgagttttctatttcactaatcatgagaaaaactgttcttttgcaataataataaattaaacatgctgttaccagagcctctttgctggagtctccagatgttaatttactttctgcaccccaattgggaatgcaatattggatgaaaagagaggtttctggtattcacagaaagctagatatgccttaaaacatactctgccgatctaattacagccttatttttgtatgccttttgggcattctcctcatgcttagaaagttccaaatgtttataaaggtaaaatggcagtttgaagtcaaatgtcacataggcaaagcaatcaagcaccaggaagtgtttatgaggaaacaacacccaagatgaattatttttgagactgtcaggaagtaaaataaataggagcttaagaaagaacattttgcctgattgagaagcacaactgaaaccagtagccgctggggtgttaatggtagcattcttcttttggcaatacatttgatttgttcatgaatatattaatcagcattagagaaatgaattataactagacatctgctgttatcaccatagttttgtttaatttgcttccttttaaataaacccattggtgaaagtctttttttttctcttcttttaaaataaatcagaattgccgtattgaccaggaaaagattatgtatgcacgtgcaccagggttagtttttaaaagtacatggctccataaaaatgctgtagattacagagtgataaaatatgcaggtttttttgtttttgttttttctgttgtgtgtgtgtctgtatttgtgtacatgtgtgtccttgcactcacacccaaggtggattaaaatacaggcctgcaaactggcctgcactttatcatttggatttgtgctgcttaatgctcagcgaaaaatgtctagtaaaatgaattatggttgtcaggagagaggttatttcgacttttgaaccaattgcacatttctcattacccaagctgtggtgagatcccaggggctgtggtgaacaaatgatgcttttatagatggtccctagcttacaatgattcaatttacaatgcttcaatttaacaatttgttgacttacaatgggtttatcaggatgtaacccaatgcatttcaacttacgatattttcagtttcgaatgggtttatccagatgtaaccccatcgtaaatggcggagcatctgtacttccttcctctggcagagttccttagagcctgtgccaattacttgaaagtttcattctctgccatttacatgtgtgctattagtagaaccaaatttctaagctgtggcgtgctgaaaataaaatgcttatgaagcaaaaa

SEQ ID NO: 11266 - DNA, 1825 bp, Homo sapiens
  source 1..1825: mol_type = unassigned DNA
ctctcgagtctccgccagatccggggcgggtccgcggccgcggcgggaacatggaggagctcctgaggcgcgagctgggctgcagctctgtcagggccacgggccactcggggggcgggtgcatcagccagggccggagctacgacacggatcaaggacgagtgttcgtgaaagtgaaccccaaggcggaggccagaagaatgtttgaaggtgagatggcaagtttaactgccatcctgaaaacaaacacggtgaaagtgcccaagcccatcaaggttctggatgccccaggcggcgggagcgtgctggtgatggagcacatggacatgaggcatctgagcagtcatgctgcaaagcttggagcccagctggccgatttacaccttgataacaagaagcttggagagatgcgcctgaaggaggcgggcacagtggggagaggaggtgggcaggaggaacggccctttgtggcccggtttggatttgacgtggtgacgtgctgtggatacctcccccaggtgaatgactggcaggaggactgggtcgtgttctatgcccggcagcgcattcagccccagatggacatggtggagaaggagtctggggacagggaggccctccagctttggtctgctctgcagttaaagatccctgacctgttccgtgacctggagatcatcccagccttactccacggggacctctggggtggaaacgtagcagaggattcctctgggccggtgatttttgacccagcttctttctacggccactcggaatatgagctggcaatagctggcatgtttgggggctttagcagctccttttactccgcctaccacggcaaaatccccaaggccccaggattcgagaagcgccttcagttgtatcagctctttcactacttgaaccactggaatcattttggatcggggtacagaggatcctccctgaacatcatgaggaatctggtcaagtgagcgggccttactctggaaggaggcctcagaggtttctccacagtcctcttctgggcaaattcttgtttcttcacatgctggactagcttaagaccaatgcagtagcttatttccaagccttgcaaagtatataatatctaagaggaaaggttttgtcatcccagcgttgtccactttgtggggctttgtaggtagacggagccacactacaggcagggtatgagcagagggatgtatggagtgtgggtgactctgagcctcactgctgctgcaaggtggggaaactgtaagtgaacccctgtgggtgcgggggagggtatccggtgcgcagggaggtggccagcgcccccgggcactgctgctcataggtacctttccactgcctcctccctgctctcctgtgcaggaatgtctctgagctgttcacgttgatgcttcttggttggcaagacttgggtgtagacatgaaaccatcttactaaaagcgtcttaaaatgaccaattccagaatcaagcgtattccgttttcttcctgcatgatccctgggccctcccgcaggctgagcaagtctgtaaactgattctgggagaaaccaagctgctggccatagggtgtccttgggtacatccaggagtcttcattgcttctgttattaccccgtctcctctgccattttctacagcttgctgagttgtcattcctttgcaacattaaaatacatgctgaactcatatttttccttccttcactgttgtagtaaagagacatatttcatgaatggcattgatgctaataaatcctttgcacaaaaatttgaataaacttccagtggtttcgataacgt

SEQ ID NO: 11267 - DNA, 1422 bp, Homo sapiens
  source 1..1422: mol_type = unassigned DNA
agatccggggcgggtccgcggccgcggcgggaacatggaggagctcctgaggcgcgagctgggctgcagctctgtcagggccacgggccactcggggggcgggtgcatcagccagggccggagctacgacacggatcaaggacgagtgttcgtgaaagtgaaccccaaggcggaggtgaaaagtgaccccaggtcactggcataggcagccagggtgccgcctgcacctgagaggtcgggtgagtctgtgtcctgtaggtggaacaggactgcagttgaggtgtcgtctgaggacactgacaggccagaagaatgtttgaaggtgagatggcaagtttaactgccatcctgaaaacaaacacggtgaaagtgcccaagcccatcaaggttctggatgccccaggcggcgggagcgtgctggtgatggagcacatggacatgaggcatctgagcagtcatgctgcaaagcttggagcccagctggccgatttacaccttgataacaagaagcttggagagatgcgcctgaaggaggcgggcacagtggggagaggaggtgggcaggaggaacggccctttgtggcccggtttggatttgacgtggtgacgtgctgtggatacctcccccaggtgaatgactggcaggaggactgggtcgtgttctatgcccggcagcgcattcagccccagatggacatggtggagaaggagtctggggacagggaggccctccagctttggtctgctctgcagttaaagatccctgacctgttccgtgacctggagatcatcccagccttactccacggggacctctggggtggaaacgtagcagaggattcctctgggccggtgatttttgacccagcttctttctacggccactcggaatatgagctggcaatagctggcatgtttgggggctttagcagctccttttactccgcctaccacggcaaaatccccaaggccccaggattcgagaagcgccttcagttgtatcagctctttcactacttgaaccactggaatcattttggatcggggtacagaggatcctccctgaacatcatgaggaatctggtcaagtgagcgggccttactctggaaggaggcctcagaggtttctccacagtcctcttctgggcaaattcttgtttcttcacatgctggactagcttaagaccaatgcagtagcttatttccaagccttgcaaagtatataatatctaagaggaaaggttttgtcatcccagcgttgtccactttgtggggctttgtaggtagacggagccacactacaggcagggtatgagcagagggatgtatggagtgtgggtgactctgagcctcactgctgctgcaaggtggggaaactgtaagtgaacccctgtgggtgcgggggagggtatccggtgcgca

SEQ ID NO: 11268 - DNA, 1462 bp, Homo sapiens
  source 1..1462: mol_type = unassigned DNA
gcaccacgagcgctgcggacactcggggcggcagtcggtctgtcagtcctcccgccaggtcccgcggcccgcacctgccgcccgcacctgcagctccgcacctgcggccagtgcctactgccctctcttgccgcccgcacctgcagccccgcacctgccgcttgcacctgcagccccgcgctctacccggttcaagcatggctgaccaggcgcccttcgacacggacgtcaacaccctgacccgcttcgtcatggaggagggcaggaaggcccgcggcacgggcgagttgacccagctgctcaactcgctctgcacagcagtcaaagccatctcttcggcggtgcgcaaggcgggcatcgcgcacctctatggcattgctggttctaccaacgtgacaggtgatcaagttaagaagctggacgtcctctccaacgacctggttatgaacatgttaaagtcatcctttgccacgtgtgttctcgtgtcagaagaagataaacacgccatcatagtggaaccggagaaaaggggtaaatatgtggtctgttttgatccccttgatggatcttccaacatcgattgccttgtgtccgttggaaccatttttggcatctatagaaagaaatcaactgatgagccttctgagaaggatgctctgcaaccaggccggaacctggtggcagccggctacgcactgtatggcagtgccaccatgctggtccttgccatggactgtggggtcaactgcttcatgctggacccggccatcggggagttcattttggtggacaaggatgtgaagataaaaaagaaaggtaaaatctacagccttaacgagggctacgccagggactttgaccctgccgtcactgagtacatccagaggaagaagttccccccagataattcagctccttatggggcccggtatgtgggctccatggtggctgatgttcatcgcactctggtctacggagggatatttctgtaccccgctaacaagaagagccccaatggaaagctgagactgctgtacgaatgcaaccccatggcctacgtcatggagaaggctgggggaatggccaccactgggaaggaggccgtgttagacgtcattcccacagacattcaccagagggcgccggtgatcttgggatcccccgacgacgtgctcgagttcctgaaggtgtatgagaagcactctgcccagtgagcacctgccctgcctgcatccggagaattgcctctacctggaccttttgtctcacacagcagtaccctgacctgctgtgcaccttacattcctagagagcagaaataaaaagcatgactatttccaccatcaaatgctgtagaatgcttggcactccctaaccaaatgctgtctccataatgccactggtgttaagatatattttgagtggatggaggagaaataaacttattcctccttaaaaaaaa

SEQ ID NO: 11269 - DNA, 629 bp, Homo sapiens
  source 1..629: mol_type = unassigned DNA
acatcttggaaattcaaatactcaatagctctcgaattctaggaatcttgagaagaggcctggattaaggattcagacgtgggccctcagatggctatggcattgctggttctaccaacgtgacaggtgatcaagttaagaagctggacgtcctctccaacgacctggttatgaacatgttaaagtcatcctttgccacgtgtgttctcgtgtcagaagaagataaacacgccatcatagtggaaccggagaaaaggggtaaatatgtggtctgttttgatccccttgatggatcttccaacatcgattgccttgtgtccgttggaaccatttttggcatctatagaaagaaatcaactgatgagccttctgagaaggatgctctgcaaccaggccggaacctggtggcagccggctacgcactgtatggcagtgccaccatgctggtccttgccatggactgtggggtcaactgcttcatgctggacccggccatcggggagttcattttggtggacaaggatgtgaagataaaaaagaaaggtaaaatctacagccttaacgagggctacgccagggactttgaccctgccgtcactgagtacatccagaggaagaagttcccccca

SEQ ID NO: 11270 - DNA, 1487 bp, Homo sapiens
  source 1..1487: mol_type = unassigned DNA
attgtggctaccagggggtcaggatgcgggcggtggagccctctggcctttgtgtggtagccgaggactctgtgtcagcgaccgttttccgggaaacttccgggcgagactcacatcttggaaattcaaatactcaatagctctcgaattctaggaatcttgagaagaggcctggattaaggattcagacgtgggccctcagatggccccgcgctctacccggttcaagcatggctgaccaggcgcccttcgacacggacgtcaacaccctgacccgcttcgtcatggaggagggcaggaaggcccgcggcacgggcgagttgacccagctgctcaactcgctctgcacagcagtcaaagccatctcttcggcggtgcgcaaggcgggcatcgcgcacctctatggcattgctggttctaccaacgtgacaggtgatcaagttaagaagctggacgtcctctccaacgacctggttatgaacatgttaaagtcatcctttgccacgtgtgttctcgtgtcagaagaagataaacacgccatcatagtggaaccggagaaaaggggtaaatatgtggtctgttttgatccccttgatggatcttccaacatcgattgccttgtgtccgttggaaccatttttggcatctatagaaagaaatcaactgatgagccttctgagaaggatgctctgcaaccaggccggaacctggtggcagccggctacgcactgtatggcagtgccaccatgctggtccttgccatggactgtggggtcaactgcttcatgctggacccggccatcggggagttcattttggtggacaaggatgtgaagataaaaaagaaaggtaaaatctacagccttaacgagggctacgccagggactttgaccctgccgtcactgagtacatccagaggaagaagttccccccagataattcagctccttatggggcccggtatgtgggctccatggtggctgatgttcatcgcactctggtctacggagggatatttctgtaccccgctaacaagaagagccccaatggaaagctgagactgctgtacgaatgcaaccccatggcctacgtcatggagaaggctgggggaatggccaccactgggaaggaggccgtgttagacgtcattcccacagacattcaccagagggcgccggtgatcttgggatcccccgacgacgtgctcgagttcctgaaggtgtatgagaagcactctgcccagtgagcacctgccctgcctgcatccggagaattgcctctacctggaccttttgtctcacacagcagtaccctgacctgctgtgcaccttacattcctagagagcagaaataaaaagcatgactatttccaccatcaaatgctgtagaatgcttggcactccctaaccaaatgctgtctccataatgccactggtgttaagatatattttgagtggatggaggagaaataaacttattcctcctt

SEQ ID NO: 11271 - DNA, 1305 bp, Homo sapiens
  source 1..1305: mol_type = unassigned DNA
gctgcagccctcagaagtaagcaaggtttcctgccgggagaaaaggatttgaagcattccagccaaaatgacggacagaagccccttcgaaaccgacatgctcaccctgacccgctacgttatggaaaaggggcgtcaggccaaagggactggggagctcacccagctgctgaactcaatgctgacggccatcaaagccatctcctcggctgtgcgcaaggccggtctggcccacctgtatggaatcgcaggaagcgttaacgtgacgggagatgaggtgaagaaactggatgtgctatccaattccctggtgatcaacatggtccaatcctcctatagtacctgcgtcctggtctcagaagagaataaggacgccatcatcaccgccaaggagaagcgggggaaatacgtggtctgctttgacccactggatggatcttccaatattgactgcctggcctccatcggaaccatctttgccatctatagaaagacctcagaggatgagccttctgaaaaggatgccctgcagtgtggccgcaatattgtggccgcaggttatgcgctgtacggtagtgcaaccctggtggctctctccacagggcaaggcgtggacctcttcatgcttgacccggctcttggtgaatttgtcctggtggaaaaagatgtcaagattaagaagaaaggaaagatttacagcctgaatgagggctatgccaagtattttgatgcggccaccactgaatatgtgcagaaaaagaaattccctgaggatggcagtgctccctatggggccaggtatgtgggctccatggtggctgacgtgcaccgcaccctggtctatggaggaatcttcctgtacccagccaaccagaagagccctaagggcaagctccggctcctgtatgaatgcaatcccgtggcctacatcattgagcaggcaggaggcttggcgaccacggggacccagcctgtactggacgtgaagcccgaggcaattcaccagcgagtccccctcattctggggtcaccagaggatgtgcaggaatatctcacctgtgtgcagaaaaatcaggcaggcagctagcgagtttgaccccacatgccctcttctgtttgtcttgcaccttgtctaaggaccctaaatgaacgataaacagagatggtagctatgagtatacaaaaggtaaatccacttaatcacatacagaagagcaacaacaaactgcttacgacaggtttggaagccacaggcgattctatggtcaatgtgaaggactagaaataaaaacccacatgtggaaa

SEQ ID NO: 11272 - DNA, 2084 bp, Homo sapiens
  source 1..2084: mol_type = unassigned DNA
cacactctgcctttggacgtgagagagagcgcacctttcacttgagcttcaacatgggaaagggaaatgaagactccgatctccactgctcctccatccagtgctccactgaccagccccctttccaacagatctcctttacagaaaagggctcagatgagaagaaaccattcaaagaaaaaggcaagaccgccttctcccattccagtgagaagcacatacaaaggcaaggatcggagcccaatccaaacaaggagaattctgaggaaaccaagctcaaggccgggaacagcactgctggatcagaaccagagtccagctcatatcgggaaaactgcaggaaaagaaaaatgagttccaaggacagctgccaagacacagcagggaactgtccagaaaaggagtgcagcttgtcattgaataaaaaatcaagatcctccactgctgtgcacaacagtgaaatccaggagacctgtgatgcccaccataggggacattccagggcttgcactgggcacagcaagcggcataggtctcgggccctaggagtccaaacaccgtcaattcgaaaaagcttggtgacttctgtgcgagctatgtcagaggctgtttatcaagacctagcccaggtgtgggcacagcagatccattctccacttacctgtgagcagctgacactgctcactcggctccgggggcctctgtgtgcccaggtgcagaccttgtattccatggccacccaggcagcttatgtcttccctgctgagagctggcttgtcccagccacactgccaggtcctggggaatcagccctggatagagaagcccatcccttccctgggcaggagataactgagactgtcagtggatcagatgaggctaagctgtgagcaccctgaccctattcagcagagatgcagctctgggaatgagaacaaggatctgcttcttctcagattcttccagatgaccagcagtgacaattttagacacactgtgttaataaatgacagaacctgaagaagtcataggaaagaaacttgagcggtatactcagaatggtgagagccctgaattttgcagaccgctaagactatagacaaattttatatttcatgttagacatttgatgccttttggatgtctgatgacagtcatgcatttctatataatcagaaaaacattagaatgtaatcgtgaatttgcatattttagattgtagaaaagtaaatataaaattatgtgctccttttttgtttttttttttttttgagacagtcttgctatgttacccaggctggagtgcagtggcacaatcttagctcactgcaacctctgcttcctgggttcaaacaattctcatgcctcagcctcccaagcagctgggactacaggcatgtactgctatgcctggctaattttttttttcctgtattgttagtagagacagagttttgtcactttggccaggttggcctcgaactcaggtgatctgccagcctccgcctcccaacgtgctgggattacaggcatgagccgccttaccaagaaattgcttctcttttaatccagaaaaggttgtaggctctcactcttccagcctgaacccatggagtactaatatccacaaaccattaatagcactccctgtgggaaaatgtctatatatttttagtttgatataattatagtaaaattactatgcaagctgtttacttttaatatttctacataaaatttaagtcaagatatagtaaatggtaaatgattgtacttatttattgacctgcctcatgtttcatttcattttaaacatcctaaatttatattttattatattttatacatttcaattgattgtactatattgcaggatatggagatttcatcacgtactacaatacagtgtattttgttatatttgacgtatattctacttgtattttgtactgagatcatacactatttcattatctaagtgtattaattgtttggttgctttataattttcattttatgtaatgaaataaacaatgttgtttggaattttaaatttctttcatatggaatttgtatttaataaa

SEQ ID NO: 11273 - DNA, 1986 bp, Homo sapiens
  source 1..1986: mol_type = unassigned DNA
ggatacgtcgacaatagatgacggggctcacgttgtacgttcacatcaggtcccggcccgccggaacctgggcgatccacgatgccgagtttgccacgctgcgacagcccataggcttgcccccccgggcattcgggtggactacgaacacaaactgaagccctaggacttgtcgcccgtttgcgctctcgccgaggcacaggctgctcgcggaccaccctgctccgaaaactaagaaggggaccagtagacggggtggattcgaggtggggacatgggacgcagcggtcggagccgcctggaggggtacccggtggtcccgatggagctatcatctttgagaggtaggtggtagcccattcatctggttactgatactggccggcatcagtggactgtcggcaggtccttgagcaactggtgtgtgaaatgggacggacgtcaaaggacaagcgggatgtctactaccgcctggccaaggagaatggctggcgtgctcgcagcgccttcaaactgctacaactggataaggaattccaactcttccaaggcgtgacacgggcagttgacctgtgtgcagccccaggcagctggagccaggtgctgagccagaagatcgggggccaagggtccggccacgtggtggctgtggacctgcaggctatggctccactaccaggtgtggtacagatccagggggacatcacccagctgtccactgccaaggagatcatccagcactttaagggctgccctgcggacctagtggtgtgtgacggggctcctgatgtaaccggtctccatgatgttgatgagtatatgcaggcccagctcctcctagctgctctgaacattgctacacatgtcctgaagccagggggctgctttgtggccaagatattccgaggccgggatgtgacgctcctctacagccagctgcaggtcttcttctccagcgtgctgtgtgccaagcccaggagcagccggaactctagcatcgaggccttcgctgtctgtcagggctatgaccctcccgagggcttcatcccggacctgagcaaacccctgctggaccattcttacgatttcaaccagctggatggtcccacccgcatcattgtgccttttgtgacctgtggggacctgagctcctatgattcggaccgcagttacccactggacctagagggcggctcagagtacaagtacactccacccacacagccccccatctcgccaccataccaggaggcctgcacgttgaagaggaaggggcagctggccaaggagatccgcccccaggactgccccatcagcagagtggacacgtttccccagcccctggccgcccctcagtgccacaccctgctggcccctgagatggaagacaatgaaatgagttgttcaccttaacccattacgctggcaaactgatacaactcagaaactgctcaatgtcaggaaaaccggaacttgttgatgaacttgttttcaaaatatcatctcatcaacgaggcctggacaaacaagccctgaggagggatctgcaacaaccctgaagacaacaaggaaagaaaccatgaaagtctgtctgtactgcagtgggaattcttgagtgaggtcttacctcttctttaaacctcttcaggagtgtcctgattatgtccagaattttccctaaaggcagggattcttaacctggatagaagccaggggtaaccatgaacttgatggaagaaaatgttacatctttattttcagcaatgaaactgaaatttagccttactcccaagttataaatgctggcaacaaatcacagtagtaaaagcagtacctgggattttcccaccaatacaaaccagttacagcaactgtaatgtaacataaaaagggcatcttgaagtattgttcatatttgtcacctcttggaatgatagcagatcctgtaagttgatgtattaattaaaaagcccatatattactgca

SEQ ID NO: 11274 - DNA, 1892 bp, Homo sapiens
  source 1..1892: mol_type = unassigned DNA
ggatacgtcgacaatagatgacggggctcacgttgtacgttcacatcaggtcccggcccgccggaacctgggcgatccacgatgccgagtttgccacgctgcgacagcccataggcttgcccccccgggcattcgggtggactacgaacacaaactgaagccctaggacttgtcgcccgtttgcgctctcgccgaggcacaggctgctcgcggaccaccctgctccgaaaactaagaggtaggtggtagcccattcatctggttactgatactggccggcatcagtggactgtcggcaggtccttgagcaactggtgtgtgaaatgggacggacgtcaaaggacaagcgggatgtctactaccgcctggccaaggagaatggctggcgtgctcgcagcgccttcaaactgctacaactggataaggaattccaactcttccaaggcgtgacacgggcagttgacctgtgtgcagccccaggcagctggagccaggtgctgagccagaagatcgggggccaagggtccggccacgtggtggctgtggacctgcaggctatggctccactaccaggtgtggtacagatccagggggacatcacccagctgtccactgccaaggagatcatccagcactttaagggctgccctgcggacctagtggtgtgtgacggggctcctgatgtaaccggtctccatgatgttgatgagtatatgcaggcccagctcctcctagctgctctgaacattgctacacatgtcctgaagccagggggctgctttgtggccaagatattccgaggccgggatgtgacgctcctctacagccagctgcaggtcttcttctccagcgtgctgtgtgccaagcccaggagcagccggaactctagcatcgaggccttcgctgtctgtcagggctatgaccctcccgagggcttcatcccggacctgagcaaacccctgctggaccattcttacgacccagatttcaaccagctggatggtcccacccgcatcattgtgccttttgtgacctgtggggacctgagctcctatgattcggaccgcagttacccactggacctagagggcggctcagagtacaagtacactccacccacacagccccccatctcgccaccataccaggaggcctgcacgttgaagaggaaggggcagctggccaaggagatccgcccccaggactgccccatcagcagagtggacacgtttccccagcccctggccgcccctcagtgccacaccctgctggcccctgagatggaagacaatgaaatgagttgttcaccttaacccattacgctggcaaactgatacaactcagaaactgctcaatgtcaggaaaaccggaacttgttgatgaacttgttttcaaaatatcatctcatcaacgaggcctggacaaacaagccctgaggagggatctgcaacaaccctgaagacaacaaggaaagaaaccatgaaagtctgtctgtactgcagtgggaattcttgagtgaggtcttacctcttctttaaacctcttcaggagtgtcctgattatgtccagaattttccctaaaggcagggattcttaacctggatagaagccaggggtaaccatgaacttgatggaagaaaatgttacatctttattttcagcaatgaaactgaaatttagccttactcccaagttataaatgctggcaacaaatcacagtagtaaaagcagtacctgggattttcccaccaatacaaaccagttacagcaactgtaatgtaacataaaaagggcatcttgaagtattgttcatatttgtcacctcttggaatgatagcagatcctgtaagttgatgtattaattaaaaagcccatatattactgcatctcaa

SEQ ID NO: 11275 - DNA, 1427 bp, Homo sapiens
  source 1..1427: mol_type = unassigned DNA
acgttcacatcaggtcccggcccgccggaacctgggcgatccacgatgccgagtttgccacgctgcgacagcccataggcttgcccccccgggcattcgggtggactacgaacacaaactgaagccctaggacttgtcgcccgtttgcgctctcgccgaggcacaggctgctcgcggaccaccctgctccgaaaactaagctgtccactgccaaggagatcatccagcactttaagggctgccctgcggacctagtggtgtgtgacggggctcctgatggctctgaacattgctacacatgtcctgaagccagggggctgctttgtggccaagatattccgaggccgggatgtgacgctcctctacagccagctgcaggtcttcttctccagcgtgctgtgtgccaagcccaggagcagccggaactctagcatcgaggccttcgctgtctgtcagggctatgaccctcccgagggcttcatcccggacctgagcaaacccctgctggaccattcttacgacccagatttcaaccagctggatggtcccacccgcatcattgtgccttttgtgacctgtggggacctgagctcctatgattcggaccgcagttacccactggacctagagggcggctcagagtacaagtacactccacccacacagccccccatctcgccaccataccaggaggcctgcacgttgaagaggaaggggcagctggccaaggagatccgcccccaggactgccccatcagcagagtggacacgtttccccagcccctggccgcccctcagtgccacaccctgctggcccctgagatggaagacaatgaaatgagttgttcaccttaacccattacgctggcaaactgatacaactcagaaactgctcaatgtcaggaaaaccggaacttgttgatgaacttgttttcaaaatatcatctcatcaacgaggcctggacaaacaagccctgaggagggatctgcaacaaccctgaagacaacaaggaaagaaaccatgaaagtctgtctgtactgcagtgggaattcttgagtgaggtcttacctcttctttaaacctcttcaggagtgtcctgattatgtccagaattttccctaaaggcagggattcttaacctggatagaagccaggggtaaccatgaacttgatggaagaaaatgttacatctttattttcagcaatgaaactgaaatttagccttactcccaagttataaatgctggcaacaaatcacagtagtaaaagcagtacctgggattttcccaccaatacaaaccagttacagcaactgtaatgtaacataaaaagggcatcttgaagtattgttcatatttgtcacctcttggaatgatagcagatcctgtaagttgatgtattaattaaaaagcccatatattactgc

SEQ ID NO: 11276 - DNA, 1678 bp, Homo sapiens
  source 1..1678: mol_type = unassigned DNA
gatactggccggcatcagtggactgtcggcaggtccttgagcaactggtgtgtgaaatgggacggacgtcaaaggacaagcgggatgtctactaccgcctggccaaggagaatggctggcgtgctcgcagcgccttcaaactgctacaactggataaggaattccaactcttccaaggcgtgacacgggcagttgacctgtgtgcagccccaggcagctggagccaggtgctgagccagaagatcgggggccaagggtccggccacgtggtggctgtggacctgcaggctatggctccactaccaggtgtggtacagatccagggggacatcacccagctgtccactgccaaggagatcatccagcactttaagggctgccctgcggacctagtggtgtgtgacggggctcctgatgtaaccggtctccatgatgttgatgagtatatgcaggcccagctcctcctagctgctctgaacattgctacacatgtcctgaagccagggggctgctttgtggccaagatattccgaggccgggatgtgacgctcctctacagccagctgcaggtcttcttctccagcgtgctgtgtgccaagcccaggagcagccggaactctagcatcgaggccttcgctgtctgtcagggctatgaccctcccgagggcttcatcccggacctgagcaaacccctgctggaccattcttacgatttcaaccagctggatggtcccacccgcatcattgtgccttttgtgacctgtggggacctgagctcctatgattcggaccgcagttacccactggacctagagggcggctcagagtacaagtacactccacccacacagccccccatctcgccaccataccaggaggcctgcacgttgaagaggaaggggcagctggccaaggagatccgcccccaggactgccccatcagcagagtggacacgtttccccagcccctggccgcccctcagtgccacaccctgctggcccctgagatggaagacaatgaaatgagttgttcaccttaacccattacgctggcaaactgatacaactcagaaactgctcaatgtcaggaaaaccggaacttgttgatgaacttgttttcaaaatatcatctcatcaacgaggcctggacaaacaagccctgaggagggatctgcaacaaccctgaagacaacaaggaaagaaaccatgaaagtctgtctgtactgcagtgggaattcttgagtgaggtcttacctcttctttaaacctcttcaggagtgtcctgattatgtccagaattttccctaaaggcagggattcttaacctggatagaagccaggggtaaccatgaacttgatggaagaaaatgttacatctttattttcagcaatgaaactgaaatttagccttactcccaagttataaatgctggcaacaaatcacagtagtaaaagcagtacctgggattttcccaccaatacaaaccagttacagcaactgtaatgtaacataaaaagggcatcttgaagtattgttcatatttgtcacctcttggaatgatagcagatcctgtaagttgatgtattaattaaaaagcccatatattactgcatctcaattttgtttcaatttaatatatagtaataattgtaattcaatgtaattggcttccattgt

SEQ ID NO: 11277 - DNA, 1601 bp, Homo sapiens
  source 1..1601: mol_type = unassigned DNA
gcggcgcgctgcaggcgcggggaacaccaatggcggggtacttgaagctggtgtgtgtttcctttcagcgtcaagggttccacactgttgggagtcgctgcaagaatcggacaggcgctgagcacctgtggctgacccgacatctcagggacccatttgtgaaggctgcgaaggtggagagttaccggtgtcgaagcgccttcaagctcctggaggtgaacgagaggcaccagattctgcggcccggccttcgggtgttagactgtggggcagctcctggggcctggagtcaggtggcggtgcagaaggtcaacgccgcaggcacagatcccagctctcctgttggcttcgtgcttggggtagatcttcttcacatattccccctggaaggagcaacttttctgtgccctgctgacgtgactgacccgagaacctcacagagaatcctcgaggtgcttcctggcaggagagcagatgtgattctgagcgacatggcgcccaatgccacagggttccgggacctcgatcatgacaggctcatcagcctgtgcctgacccttctcagcgtgaccccagacatcctgcaacctggggggacattcctttgtaaaacctgggctggaagtcaaagccgtcggttacagaggagactgacagaggaattccagaatgtaaggatcatcaaacctgaagccagcaggaaagagtcatcagaagtgtacttcttggccacacagtaccacggaaggaagggcactgtgaagcagtgaggatttcttgtgccattttcataatggtcattagctccttttaagctagaaacgtagcctgagctcctgaagagttcctgggagatttgagctgattttggagatggagcaggacaagtggggagtctctctctctctttctctctctctctttttaaccaaaaagagatgacaaaactaagttcaggggccatggaaaatgaaaaagtccgctatattgtgatttgggaagagaaagttatcaagagaaagaggtgaggatggaaggatggagaaaaacagactgtgggaaggatcagaaggaatccgccgaggcagggatgggtgtgcccatgtgtgccttgacgggacttcatcttatagactgttaaactgtcacacacaaacaggctttccacccctgctctgagagcaccacgcacagatttccagttcttagtgtggctgtttaaagtagaaaatctgggggctgggtgaggccactcatgcctgtaaacccagggctttagaaggctgaggctgggggattgcttgaagtcaggagttcaagaccaacctgggcaacatagcaacaccccccatgtctacaaaaatgaaaaaccaaaaagcaaaccaaaagaaaaatctgaaatttccatctggggattaacttctgtctttctggtgaacaatatagcaattcacgcattcttcaagcagcaaaagttcccggaacaattagggaagacgtatggtctgaatttatccaggcagtgggtctgctttggtttttgctggaaatttatatcagtgtctgggctcccaagaacataaatgtaattgccaaagcaa

SEQ ID NO: 11278 - DNA, 1628 bp, Homo sapiens
  source 1..1628: mol_type = unassigned DNA
acttccggcggcgcgctgcaggcgcggggaacaccaatggcggggtacttgaagctggtgtgtgtttcctttcagcgtcaagggttccacactgttgggagtcgctgcaagaatcggacaggcgctgagcacctgtggctgacccgacatctcagggacccatttgtgaaggctgcgaaggtggagagttaccggtgtcgaagcgccttcaagctcctggaggtgaacgagaggcaccagattctgcggcccggccttcgggtgttagactgtggggcagctcctggggcctggagtcaggtggcggtgcagaaggtcaacgccgcaggcacagatggagtctcactcttgcccaggctgcagtgcaatggtgtgatctcggctcactgcaacctctgcctacctggttcaagcgattctcctgcctcagcctcccaaatcccagctctcctgttggcttcgtgcttggggtagatcttcttcacatattccccctggaaggagcaacttttctgtgccctgctgacgtgactgacccgagaacctcacagagaatcctcgaggtgcttcctggcaggagagcagatgtgattctgagcgacatggcgcccaatgccacagggttccgggacctcgatcatgacaggctcatcagcctgtgcctgacccttctcagcgtgaccccagacatcctgcaacctggggggacattcctttgtaaaacctgggctggaagtcaaagccgtcggttacagaggagactgacagaggaattccagaatgtaaggatcatcaaacctgaagccagcaggaaagagtcatcagaagtgtacttcttggccacacagtaccacggaaggaagggcactgtgaagcagtgaggatttcttgtgccattttcataatggtcattagctccttttaagctagaaacgtagcctgagctcctgaagagttcctgggagatttgagctgattttggagatggagcaggacaagtggggagtctctctctctctttctctctctctctttttaaccaaaaagagatgacaaaactaagttcaggggccatggaaaatgaaaaagtccgctatattgtgatttgggaagagaaagttatcaagagaaagaggtgaggatggaaggatggagaaaaacagactgtgggaaggatcagaaggaatccgccgaggcagggatgggtgtgcccatgtgtgccttgacgggacttcatcttatagactgttaaactgtcacacacaaacaggctttccacccctgctctgagagcaccacgcacagatttccagttcttagtgtggctgtttaaagtagaaaatctgggggctgggtgaggccactcatgcctgtaaacccagggctttagaaggctgaggctgggggattgcttgaagtcaggagttcaagaccaacctgggcaacatagcaacaccccccatgtctacaaaaatgaaaaaccaaaaagcaaaccaaaagaaaaatctgaaatttccatctggggattaacttctgtctttctggtgaacaatatagcaattcacgcattcttcaagcagcaaaagttcccggaacaattagggaagacgtatggtctgaatttatcc

SEQ ID NO: 11279 - DNA, 1541 bp, Homo sapiens
  source 1..1541: mol_type = unassigned DNA
agcgatgcgggctccggggatgaggtcgcggccgagtcggtgcgtcgggcccagcctccgcgccgctacaccccagactggccgagcctggattctcggccgctgccggcctggttcgacgaagccaagttcggggtgttcatccactggggcgtgttctcggtgcccgcctggggcagcgagtggttctggtggcactggcagggcgaggggcggccgcagtaccagcgcttcatgcgcgacaactacccgcccggcttcagctacgccgacttcggaccgcagttcactgcgcgcttcttccacccggaggagtgggccgacctcttccaggccgcgggcgccaagtatgtagttttgacgacaaagcatcacgaaggcttcacaaactggccgagtcctgtgtcttggaactggaactccaaagacgtggggcctcatcgggatttggttggtgaattgggaacagctctccggaagaggtgagtgtccagggatggttactctgttatctctttgataagaaaaatggcttcaaaacacagcattttgtcagtgcaaaaacaatgccagagctgtacgaccttgttaacagctataaacctgatctgatctggtctgatggggagtgggaatgtcctgatacttactggaactccacaaattttctttcatggctctacaatgacagccctgtcaaggatgaggtggtagtaaatgaccgatggggtcagaactgttcctgtcaccatggaggatactataactgtgaagataaattcaagccacagagcttgccagatcacaagtgggagatgtgcaccagcattgacaagttttcctggggctatcgtcgtgacatggcattgtctgatgttacagaagaatctgaaatcatttcggaactggttcagacagtaagtttgggaggcaactatcttctgaacattggaccaactaaagatggactgattgttcccatcttccaagaaaggcttcttgctgttgggaaatggctgagcatcaatggggaggctatctatgcctccaaaccatggcgggtgcaatgggaaaagaacacaacatctgtatggtatacctcaaagggatcggctgtttatgccatttttctgcactggccagaaaatggagtcttaaaccttgaatcccccataactacctcaactacaaagataacaatgctgggaattcaaggagatctgaagtggtccacagatccagataaaggtctcttcatctctctaccccagttgccaccctctgctgtccccgcagagtttgcttggactataaagctgacaggagtgaagtaatcatttgagtgcaagaagaaagaggcgctgctcactgttttcctgcttcagtttttctcttatagtaccatcactataatcaacgaacttctcttctccacccagagatggcttttccaacacattttaattaaaggaactgagtacattaccctgatgtctaaatggaccaaagatctgagatccattgtgattatatctgtatca

SEQ ID NO: 11280 - DNA, 2047 bp, Homo sapiens
  source 1..2047: mol_type = unassigned DNA
gggtagcgatgcgggctccggggatgaggtcgcggccggcgggtcccgcgctgttgctgctgctgctcttcctcggagcggccgagtcggtgcgtcgggcccagcctccgcgccgctacaccccagactggccgagcctggattctcggccgctgccggcctggttcgacgaagccaagttcggggtgttcatccactggggcgtgttctcggtgcccgcctggggcagcgagtggttctggtggcactggcagggcgaggggcggccgcagtaccagcgcttcatgcgcgacaactacccgcccggcttcagctacgccgacttcggaccgcagttcactgcgcgcttcttccacccggaggagtgggccgacctcttccaggccgcgggcgccaagtatgtagttttgacgacaaagcatcacgaaggcttcacaaactggccgagtcctgtgtcttggaactggaactccaaagacgtggggcctcatcgggatttggttggtgaattgggaacagctctccggaagaggaacatccgctatggactataccactcactcttagagtggttccatccactctatctacttgataagaaaaatggcttcaaaacacagcattttgtcagtgcaaaaacaatgccagagctgtacgaccttgttaacagctataaacctgatctgatctggtctgatggggagtgggaatgtcctgatacttactggaactccacaaattttctttcatggctctacaatgacagccctgtcaaggatgaggtggtagtaaatgaccgatggggtcagaactgttcctgtcaccatggaggatactataactgtgaagataaattcaagccacagagcttgccagatcacaagtgggagatgtgcaccagcattgacaagttttcctggggctatcgtcgtgacatggcattgtctgatgttacagaagaatctgaaatcatttcggaactggttcagacagtaagtttgggaggcaactatcttctgaacattggaccaactaaagatggactgattgttcccatcttccaagaaaggcttcttgctgttgggaaatggctgagcatcaatggggaggctatctatgcctccaaaccatggcgggtgcaatgggaaaagaacacaacatctgtatggtatacctcaaagggatcggctgtttatgccatttttctgcactggccagaaaatggagtcttaaaccttgaatcccccataactacctcaactacaaagataacaatgctgggaattcaaggagatctgaagtggtccacagatccagataaaggtctcttcatctctctaccccagttgccaccctctgctgtccccgcagagtttgcttggactataaagctgacaggagtgaagtaatcatttgagtgcaagaagaaagaggcgctgctcactgttttcctgcttcagtttttctcttatagtaccatcactataatcaacgaacttctcttctccacccagagatggcttttccaacacattttaattaaaggaactgagtacattaccctgatgtctaaatggaccaaagatctgagatccattgtgattatatctgtatcaggtcagcagaagaaggaactgagcagttgaactctgagttcatcaattgtaatatttggaaattatctacaatggaatcttccctctgttctctgataacctacttgcttactcaatgcctttaagccaagtcaccctgttgcctatgggaggaggtggaaggatttggcaagctcaaccacatgctatttagttagcatcagttgtcaccaacagtctttctgcaaagggcaggagagctttgggggaaaggaaaaggcttaccaggctgctatggtcaactcttcagaaattttcagagcaatctaaaagcgccaaaattcgctatgtttacagtgatactattaagaaaatgaatgtgattctgctctgtctttttaagtatgatcaaataaaaaatttgtacatcacaatcatttctaccaaaaaaa

SEQ ID NO: 11281 - DNA, 1690 bp, Homo sapiens
  source 1..1690: mol_type = unassigned DNA
cagcgctcccgaggccgcgggagcctgcagagaggacagccggcctgcgccgggacatgcggccccaggagctccccaggctcgcgttcccgttgctgctgttgctgttgctgctgctgccgccgccgccgtgccctgcccacagcgccacgcgcttcgaccccacctgggagtccctggacgcccgccagctgcccgcgtggtttgaccaggccaagttcggcatcttcatccactggggagtgttttccgtgcccagcttcggtagcgagtggttctggtggtattggcaaaaggaaaagataccgaagtatgtggaatttatgaaagataattaccctcctagtttcaaatatgaagattttggaccactatttacagcaaaattttttaatgccaaccagtgggcagatatttttcaggcctctggtgccaaatacattgtcttaacttccaaacatcatgaaggctttaccttgtgggggtcagaatattcgtggaactggaatgccatagatgaggggcccaagagggacattgtcaaggaacttgaggtagccattaggaacagaactgacctgcgttttggactgtactattccctttttgaatggtttcatccgctcttccttgaggatgaatccagttcattccataagcggcaatttccagtttctaagacattgccagagctctatgagttagtgaacaactatcagcctgaggttctgtggtcggatggtgacggaggagcaccggatcaatactggaacagcacaggcttcttggcctggttatataatgaaagcccagttcggggcacagtagtcaccaatgatcgttggggagctggtagcatctgtaagcatggtggcttctatacctgcagtgatcgttataacccaggacatcttttgccacataaatgggaaaactgcatgacaatagacaaactgtcctggggctataggagggaagctggaatctctgactatcttacaattgaagaattggtgaagcaacttgtagagacagtttcatgtggaggaaatcttttgatgaatattgggcccacactagatggcaccatttctgtagtttttgaggagcgactgaggcaaatggggtcctggctaaaagtcaatggagaagctatttatgaaacccatacctggcgatcccagaatgacactgtcaccccagatgtgtggtacacatccaagcctaaagaaaaattagtctatgccatttttcttaaatggcccacatcaggacagctgttccttggccatcccaaagctattctgggggcaacagaggtgaaactactgggccatggacagccacttaactggatttctttggagcaaaatggcattatggtagaactgccacagctaaccattcatcagatgccgtgtaaatggggctgggctctagccctgactaatgtgatctaaagtgcagcagagtggctgatgctgcaagttatgtctaaggctaggaactatcaggtgtctataattgtagcacatggagaaagcaaatgtaaaactggataagaaaattattttggcagttcagccctttccctttttcccactaaattttttcttaaattacccatgtaaccattttaactctccagtgcactttgccattaaagtctcttcacattgatttgtttcca

SEQ ID NO: 11282 - DNA, 646 bp, Homo sapiens
  source 1..646: mol_type = unassigned DNA
cagcgctcccgaggccgcgggagcctgcagagaggacagccggcctgcgccgggacatgcggccccaggagctccccaggctcgcgttcccgttgctgctgttgctgttgctgctgctgccgccgccgccgtgccctgcccacagcgccacgcgcttcgaccccacctgggagtccctggacgcccgccagctgcccgcgtggtttgaccaggccaagttcggcatcttcatccactggggagtgttttccgtgcccagcttcggtagcgagtggttctggtggtattggcaaaaggaaaagataccgaagtatgtggaatttatgaaagataattaccctcctagtttcaaatatgaagattttggaccactatttacagcaaaattttttaatgccaaccagtgggcagatatttttcaggcctctggtgccaaatacattgtcttaacttccaaacatcatgaagcaacttgtagagacagtttcatgtggaggaaatcttttgatgaatattgggcccacactagatggcaccatttctgtagtttttgaggagcgactgaggcaaatggggtcctggctaaaagtcaatggagaagctatttatgaaacccatacctggcgatcccagaatgacactgtca

SEQ ID NO: 11283 - DNA, 1503 bp, Homo sapiens
  source 1..1503: mol_type = unassigned DNA
agagaggacagccggcctgcgccgggacatgcggccccaggagctccccaggctcgcgttcccgttgctgctgttgctgttgctgctgctgccgccgccgccgtgccctgcccacagcgccacgcgcttcgaccccacctgggagtccctggacgcccgccagctgcccgcgtggtttgaccaggccaagttcggcatcttcatccactggggagtgttttccgtgcccagcttcggtagcgagtggttctggtggtattggcaaaaggaaaagataccgaagtatgtggaatttatgaaagataattaccctcctagtttcaaatatgaagattttggaccactatttacagcaaaattttttaatgccaaccagtgggcagatatttttcaggcctctggtgccaaatacattgtcttaacttccaaacatcatgaagcaacttgtagagacagtttcatgtggaggaaatcttttgatgaatattgggcccacactagatggcaccatttctgtagtttttgaggagcgactgaggcaaatggggtcctggctaaaagtcaatggagaagctatttatgaaacccatacctggcgatcccagaatgacactgtcaccccagatgtgtggtacacatccaagcctaaagaaaaattagtctatgccatttttcttaaatggcccacatcaggacagctgttccttggccatcccaaagctattctgggggcaacagaggtaagagggaattttaccttattcctttaaattgctgattagaacatcttgatgcaaacattaacttttaaggggagccttataactgtttcacttatacttcataaaaggaattgtaaatgagctccagccaagcattgtggctcacactgtaattccagcactttgggaggctaaggcaggaggatgtcttgaggccagaagtttgagactagcctgggcaacatagcaagacccctgtctacaaaaattttttttaaagttagctgagcatggtggcacgcacctgtagtcctagttactcaggaggctgaggcaggaggattgcttgagcccagtaggtcaagactacagtaagctatgactgcaccacttcagcctgtctctgaaaaaataaaataaaatataataaaataaaatgaatttcaccaatgacagtgtttggtcaaaatctttgaaactttttgtttcccagaaaactaagctgataaaacagctgcagtatctctatgcatatcactgtaaaatagacattattcttcacagtcattttacgttgttcaagttcactgcatgcatccaaaatgattcttctcataaaactagaattcggatgctttccctgacaccccaccccagaacatatctgaatacaagatgtcatgactctactattttatgtttataaaacattttggagaaagttagagattaatctaactgttgaaaccaccagatctggcattgagttcattctgatata

SEQ ID NO: 11284 - DNA, 737 bp, Homo sapiens
  source 1..737: mol_type = unassigned DNA
caacttgtagagacagtttcatgtggaggaaatcttttgatgaatattgggcccacactagatggcaccatttctgtagtttttgaggagcgactgaggcaaatggggtcctggctaaaagtcaatggagaagctatttatgaaacccatacctggcgatcccagaatgacactgtcaccccagatgtgtggtacacatccaagcctaaagaaaaattagtctatgccatttttcttaaatggcccacatcaggacagctgttccttggccatcccaaagctattctgggggcaacagaggtaagagggaattttaccttattcctttaaattgctgattagaacatcttgatgcaaacattaacttttaaggggagccttataactgtttcacttatacttcataaaaggaattgtaaatgagctccagccaagcattgtggctcacactgtaattccagcactttgggaggctaaggcaggaggatgtcttgaggccagaagtttgagactagcctgggcaacatagcaagacccctgtctacaaaaattttttttaaagttagctgagcatggtggcacgcacctgtagtcctagttactcaggaggctgaggcaggaggattgcttgagcccagtaggtcaagactacagtaagctatgactgcaccacttcagcctgtctctgaaaaaataaaataaaatataataaaataaaatgaatttcaccaatgaca

SEQ ID NO: 11285 - DNA, 4246 bp, Homo sapiens
  source 1..4246: mol_type = unassigned DNA
gaaagtccctgactggagttggcagccaagccaggccctggagtgggcacccagagggaagacaggttggctaatttcctggagcccctaagggtgcaagggggaagaacacccacccgcaaagccccgtagggctggaccctacgttagcctgccctgctcggggttggcgatgctggaggtgggccttggaccagagaaaatgctttaattaggtgacaagcgggcagaggcctttgtctctggcgccggcagccacggcccccgctgacggcgtgggaaacagaccctgttccactccggtctccagccttggaatggttgccttcgtgcagtgcaggaggacgcggcagagggcggacgatcgctccactcgccgggaccaggtgcgggggccctgcccagccgctggggcgtggccaggctcgaagcacccaggtgtcgggggccgactctaagccctggcaccggaagagagagggcggcggattggacctcccggctccagcattgcaactgggcgctccgtctcctggtccacgcaatgatgctgcggctgctcagaagccaggtagcctgccctgggtgaagccttcgcgcaggtcaatgacggggcggaggggcagggcgcggtcccctgcatccccgatctggggagcggtgggcccaggggccatcgccttagcccctggcgctggggctcggcgccaagtgacgggcggggctccaccttccagccatccgcccggcccgggagggcggacgctgcgagactcccggccgcgccctctccttcctctcctccccaagccctcgctgccagtccggacaggctgcgcggaggggagggctgccgggccggatagccggacgcctggcgttccaggggcggccggatgtggcctgcctttgcggagggtgcgctccggccacgaaaagcggactgtggatctgccacctgcaagcagctcggccatgtggctccggagccatcgtcagctctgcctggccttcctgctagtctgtgtcctctctgtaatcttcttcctccatatccatcaagacagctttccacatggcctaggcctgtcgatcctgtgtccagaccgccgcctggtgacacccccagtggccatcttctgcctgccgggtactgcgatgggccccaacgcctcctcttcctgtccccagcaccctgcttccctctccggcacctggactgtctaccccaatggccggtttggtaatcagatgggacagtatgccacgctgctggctctggcccagctcaacggccgccgggcctttatcctgcctgccatgcatgccgccctggccccggtattccgcatcaccctgcccgtgctggccccagaagtggacagccgcacgccgtggcgggagctgcagcttcacgactggatgtcggaggagtacgcggacttgagagatcctttcctgaagctctctggcttcccctgctcttggactttcttccaccatctccgggaacagatccgcagagagttcaccctgcacgaccaccttcgggaagaggcgcagagtgtgctgggtcagctccgcctgggccgcacaggggaccgcccgcgcacctttgtcggcgtccacgtgcgccgtggggactatctgcaggttatgcctcagcgctggaagggtgtggtgggcgacagcgcctacctccggcaggccatggactggttccgggcacggcacgaagcccccgttttcgtggtcaccagcaacggcatggagtggtgtaaagaaaacatcgacacctcccagggcgatgtgacgtttgctggcgatggacaggaggctacaccgtggaaagactttgccctgctcacacagtgcaaccacaccattatgaccattggcaccttcggcttctgggctgcctacctggctggcggagacactgtctacctggccaacttcaccctgccagactctgagttcctgaagatctttaagccggaggcggccttcctgcccgagtgggtgggcattaatgcagacttgtctccactctggacattggctaagccttgagagccagggagactttctgaagtagcctgatctttctagagccagcagtacgtggcttcagaggcctggcatcttctggagaagcttgtggtgttcctgaagcaaatgggtgcccgtatccagagtgattctagttgggagagttggagagaagggggacgtttctggaactgtctgaatattctagaactagcaaaacatcttttcctgatggctggcaggcagttctagaagccacagtgcccacctgctcttcccagcccatatctacagtacttccagatggctgcccccaggaatggggaactctccctctggtctactctagaagaggggttacttctcccctgggtcctccaaagactgaaggagcatatgattgctccagagcaagcattcaccaagtccccttctgtgtttctggagtgattctagagggagacttgttctagagaggaccaggtttgatgcctgtgaagaaccctgcagggcccttatggacaggatggggttctggaaatccagataactaaggtgaagaatctttttagttttttttttttttttttggagacagggtctcgctctgttgcccaggctggagtgcagtggcgtgatcttggctcactgcaacttccgcctcctgtgttcaagcgattctcctgtctcagcctcctgagtagatgggactacaggcacaggccattatgcctggctaatttttgtatttttagtagagacagggtttcaccatgttggccaggatggtctcgatctcctgaccttgtcatccacctgtcttggcctcccaaagtgctgggattactggcatgagccactgtgcccagcccggatattttttttttaattatttatttatttatttatttattgagacggagtcttgctctgtagcccaggccagagtgcagtggcgcgatctcagctcactgcaagctctgcctcccgggttcatgccattctgcctcagcctcctgagtagctgggactacaggcgcccgccaccacgcccggctaattttttttgtatttttagtagagacggggtttcatcgtgttaaccaggatggtctcgatctcctgacctcgtgatctgcccacctcggcctcccacagtgctgggattaccggcgtgagccaccatgcctggcccggataattttttttaatttttgtagagacgaggtcttgtgatattgcccaggctgttcttcaactcctgggctcaagcagtcctcccaccttggcctcccagaatgctgggtttatagatgtgagccagcacaccgggccaagtgaagaatctaatgaatgtgcaacctaattgtagcatctaatgaatgttccaccattgctggaaaaattgagatggaaaacaaaccatctctagttggccagcgtcttgctctgttcacagtctctggaaaagctggggtagttggtgagcagagcgggactctgtccaacaagccccacagcccctcaaagacttttttttgtttgttttgagcagacaggctaaaatgtgaacgtggggtgagggatcactgccaaaatggtacagcttctggagcagaactttccagggatccagggacacttttttttaaagctcataaactgccaagagctccatatattgggtgtgagttcaggttgcctctcacaatgaaggaagttggtctttgtctgcaggtgggctgctgagggtctgggatctgttttctggaagtgtgcaggtataaacacaccctctgtgcttgtgacaaactggcaggtaccgtgctcattgctaaccactgtctgtccctgaactcccagaaccactacatctggctttgggcaggtctgagataaaacgatctaaaggtaggcagaccctggacccagcctcagatccaggcaggagcacgaggtctggccaaggtggacggggttgtcgagatctcaggagccccttgctgttttttggagggtgaaagaagaaaccttaaacatagtcagctctgatcacatcccctgtctactcatccagaccccatgcctgtaggcttatcagggagttacagttacaattgttacagtactgttcccaactcagctgccacgggtgagagagcaggaggtatgaattaaaagtctacagcactaa

SEQ ID NO: 11286 - DNA, 1068 bp, Homo sapiens
  source 1..1068: mol_type = unassigned DNA
atgtggctccggagccatcgtcagctctgcctggccttcctgctagtctgtgtcctctctgtaatcttcttcctccatatccatcaagacagctttccacatggcctaggcctgtcgatcctgtgtccagaccgccgcctggtgacacccccagtggccatcttctgcctgccgggtactgcgatgggccccaacgcctcctcttcctgtccccagcaccctgcttccctctccggcacctggactgtctaccccaatggccggtttggtaatcagatgggacagtatgccacgctgctggctctggcccagctcaacggccgccgggcctttatcctgcctgccatgcatgccgccctggccccgccagaagtggacagccgcacgccgtggcgggagctgcagcttcacgactggatgtcggaggagtacgcggacttgagagatcctttcctgaagctctctggcttcccctgctcttggactttcttccaccatctccgggaacagatccgcagagagttcaccctgcacgaccaccttcgggaagaggcgcagagtgtgctgggtcagctccgcctgggccgcacaggggaccgcccgcgcacctttgtcggcgtccacgtgcgccgtggggactatctgcaggttatgcctcagcgctggaagggtgtggtgggcgacagcgcctacctccggcaggccatggactggttccgggcacggcacgaagcccccgttttcgtggtcaccagcaacggcatggagtggtgtaaagaaaacatcgacacctcccagggcgatgtgacgtttgctggcgatggacaggaggctacaccgtggaaagactttgccctgctcacacagtgcaaccacaccattatgaccattggcaccttcggcttctgggctgcctacctggctggcggagacactgtctacctggccaacttcaccctgccagactctgagttcctgaagatctttaagccggaggcggccttcctgcccgagtgggtgggcattaatgcagacttgtctccactctggacattggctaagccttga

SEQ ID NO: 11287 - DNA, 1468 bp, Homo sapiens
  source 1..1468: mol_type = unassigned DNA
accgatgctggaagggtttctttggccctgagtgaagagagacccagagggaacactgaggtgcctgcccaaccactctgtcccggtttccttcagcaggaccagccatgctggtcgttcagatgcctttctcctttcccatggcccacttcatcctctttgtctttacggtttccactatatttcacgttcagcagcggctagcgaagattcaagccatgtgggagttaccggtgcagataccagtgctagcctcaacatcaaaggcactgggacccagccagctcagggggatgtggacgatcaatgcaataggccgcctggggaaccagatgggcgagtacgccacactgtacgccctggccaagatgaacgggcggcccgccttcatcccggcccagatgcacagcaccctggcccccatcttcagaatcaccctgccggtgctgcacagcgccacggccagcaggatcccctggcagaactaccacctgaacgactggatggaggaggaataccgccacatcccgggggagtacgtccgcttcaccggctacccctgctcctggaccttctaccaccacctccgccaggagatcctccaggagttcaccctgcacgaccacgtgcgggaggaggcccagaagttcctgcggggcctgcaggtgaacgggagccggccgggcacctttgtaggggtccatgttcgccgaggggactatgtccatgtcatgccaaaagtgtggaagggggtggtggccgaccggcgatacctacagcaggccctggactggttccgagctcgctacagctccctcatcttcgtggtcaccagtaatggcatggcctggtgtcgggagaacattgacacctcccacggtgatgtggtgtttgctggcgatggcattgagggctcacctgccaaagattttgctctactcacacagtgtaaccacaccatcatgaccattgggacgttcgggatctgggccgcatacctcacgggcggagacaccatctacctggccaattacaccctccccgactcccctttcctcaaaatctttaagccagaggcagccttcctgccggagtggacagggattgccgcagacctgtcccccttactcaagcactaatgctggcccattctttgagaccttttctccttctctgcctccctcaaggtgctgggattacaggtgttagccactgcgcccggccctagagctcactgttttctagttagtccatctggaagtggagcctttttccagtttgcacaaatgtgccatattggcttgtagctggcatgcatccaagtccataggtcctgcctcttcaatcctggctttctagggcctgggatgatcattgctagaactgagagaccagcctggctcagtgaacttcagggcgttccgttcattctttcagtaaatgtttgcagcacatgtgttacatgtca

SEQ ID NO: 11288 - DNA, 3111 bp, Homo sapiens
  source 1..3111: mol_type = unassigned DNA
accgatgctggaagggtttctttggccctgagtgaagagagacccagagggaacactgaggtgcctgcccaaccactctgtcccggtttccttcagcaggaccaggtgagagaagccatgctggtcgttcagatgcctttctcctttcccatggcccacttcatcctctttgtctttacggtttccactatatttcacgttcagcagcggctagcgaagattcaagccatgtgggagttaccggtgcagataccagtgctagcctcaacatcaaaggcactgggacccagccagctcagggggatgtggacgatcaatgcaataggccgcctggggaaccagatgggcgagtacgccacactgtacgccctggccaagatgaacgggcggcccgccttcatcccggcccagatgcacagcaccctggcccccatcttcagaatcaccctgccggtgctgcacagcgccacggccagcaggatcccctggcagaactaccacctgaacgactggatggaggaggaataccgccacatcccgggggagtacgtccgcttcaccggctacccctgctcctggaccttctaccaccacctccgccaggagatcctccaggagttcaccctgcacgaccacgtgcgggaggaggcccagaagttcctgcggggcctgcaggtgaacgggagccggccgggcacctttgtaggggtccatgttcgccgaggggactatgtccatgtcatgccaaaagtgtggaagggggtggtggccgaccggcgatacctacagcaggccctggactggttccgagctcgctacagctccctcatcttcgtggtcaccagtaatggcatggcctggtgtcgggagaacattgacacctcccacggtgatgtggtgtttgctggcgatggcattgagggctcacctgccaaagattttgctctactcacacagtgtaaccacaccatcatgaccattgggacgttcgggatctgggccgcatacctcacgggcggagacaccatctacctggccaattacaccctccccgactcccctttcctcaaaatctttaagccagaggcagccttcctgccggagtggacagggattgccgcagacctgtcccccttactcaagcactaatgctggcccattctttgagaccttttctccttctctgcctccctcaagatgagtgcccgggcatgagaagcacatggttccatgagcaggacccatctctcttctgtgaagatgcgttgggctgcaagtaacagaaatctcagtgaacagtggcctggcgtggtggctcatgcctgtaatgctcgcactttgtgaggccagggtgggtggatcacttgaggtcaggagttcaagactagcctggccaacatggtgaaaccccatctcgactaaaaatacaaaaattagccaggcgtggtggtgcacacctgtaatcccagctactcgggaggctgaggcaagagaatcacttgaacccaggaggcggaggttgcagtgagccaagatggtgccgctgcactccagtctgggtgacacagcaagactccatctcaaaaaaaaaaaaaaaaaaaagaaaagaaaaagaaatgaatgggttcaaagaccataatcatgcatatcacataagaccagaagtggcccaggtccagggtcagttaatttagcggctccacaaagtcatcagtcacctgagctccatccatcttcacatgctgtgctaccatttcttagctgtatcatcccatggtcccaaaagggctgctacacatccagccatcacatgcagataattcctttcaaaaacagcagaaagaggctcgttcttgtcttggtcccttttgaagaatgaatgaaaccttcctaagccttccagcaatttccccccaactccgatgggtaggaattgtcacatacccatgtgacccgataggaggcaaaagaaatgagacttctgggattagtttagcctcagattctgcagctgagaagttgatcagccacctctgaaggacatgcagcttgcagaaaattagggtggtgttaccaaggtgaaaaggggaaatggctttagagtagacaacagagatgccctgaggggttgtgtaggttgttcactgcaggaagtcccctggttaagaaggcaagtggggtttaaacagacccacagtctactcatcaaaccaggtgtccttggcattgtgtccacccagagagctcactgttttcttttctttttcttttctttttttttttttttttgagatggagtcttgctgcatcccccaggctggagtgcagtggcatgatcttggctcactgcagcctccgcctcccaggttcaagcgattctcctgcctcagcctcccgagtagctaggattacaggtgcgtgccaccacgcccagctaatttttatatgtttagtggaaatggagtttcaccatgttggtcaggctggtctcaaactcctgacctcatgatccgccttcctcggcctcccaaagtgctgggattacaggtgttagccactgcgcccggccctagagctcactgttttctagttagtccatctggaagtggagcctttttccagtttgcacaaatgtgccatattggcttgtagctggcatgcatccaagtccataggtcctgcctcttcaatcctggctttctagggcctgggatgatcattgctagaactgagagaccagcctggctcagtgaacttcagggcgttccgttcattctttcagtaaatgtttgcagcacatgtgttacatgtcaggcagtgaaaccccccacagcagccttccctctcagaggatacatttgtaaccattacacagtcatcaaaggaataattttttttaatcaccagtgtgcatacagtcatggagttgggtattcccagctaccagggaggctgaggtgggaggattgcttgatgccaggagttagggaatatagtgcaccgtgattggacttgcgaatagccactgcactgcggcctggacgacgtagtgataccctgactcttataaataaataaatgaataaacacaattatgactttgcggatggg

SEQ ID NO: 11289 - DNA, 771 bp, Homo sapiens
  source 1..771: mol_type = unassigned DNA
agtcaccgatgctggaagggtttctttggccctgagtgaagagagacccagagggaacactgaggtgcctgcccaaccactctgtcccggtttccttcagcaggaccagccatgctggtcgttcagatgcctttctcctttcccatggcccacttcatcctctttgtctttacggtttccactatatttcacgttcagcagcggctagcgaagattcaagccatgtgggagttaccggtgcagataccagtgctagcctcaacatcaaaggcactgggacccagccagctcagggggatgtggacgatcaatgcaataggccgcctggggaaccagatgggcgagtacgccacactgtacgccctggccaagatgaacgggcggcccgccttcatcccggcccagatgcacagcaccctggcccccatcttcagaatcaccctgccggtgctgcacagcgccacggccagcaggatcccctggcagaactaccacctgaacgactggatggaggaggaataccgccacatcccgggggagtacgtccgcttcaccggctacccctgctcctggaccttctaccaccacctccgccaggagatcctccaggagttcaccctgcacgaccacgtgcgggaggaggcccagaagttcctgcggggcctgcaggtgaacgggagccggccgggcacctttgtaggggtccatgttcgccgaggggactatgtccatgtcatgccaaaagtgtggaagggggtggtggccgaccgg

SEQ ID NO: 11290 - DNA, 2239 bp, Homo sapiens
  source 1..2239: mol_type = unassigned DNA
tctgttcccacttcctccccgccccaggaaacctgccatggcctcctggtgagctgtcctcatccactgctcgctgcctctccagaaccttggtgtgaacttaggtcttggcgtcgggatcccttttcgtcacactcaggtgacctacagggagctccgctcgacactgcaaggcttagaccagttcggtccaacagagaaagcaggcaaccaccatgtcatttgaaaacagtttcatcgggatataattcgcaacccatacagtgaatccatttaagatactctgacccatggatcccctgggtgcagccaagccacaatggccatggcgccgctgtctggccgcactgctatttcagctgctggtggctgtgtgtttcttctcctacctgcgtgtgtcccgagacgatgccactggatcccctagggctcccagtgggtcctcccgacaggacaccactcccacccgccccaccctcctgatcctgctacggacatggcctttccacatccctgtggctctgtcccgctgttcagagatggtgcccggcacagccgactgccacatcactgccgaccgcaaggtgtacccacaggcagacatggtcatcgtgcaccactgggatatcatgtccaaccctaagtcacgcctcccaccttccccgaggccgcaggggcagcgctggatctggttcaacttggagccaccccctaactgccagcacctggaagccctggacagatacttcaatctcaccatgtcctaccgcagcgactccgacatcttcacgccctacggctggctggagccgtggtccggccagcctgcccacccaccgctcaacctctcggccaagaccgagctggtggcctgggcggtgtccaactggaagccggactcagccagggtgcgctactaccagagcctgcaggctcatctcaaggtggacgtgtacggacgctcccacaagcccctgcccaaggggaccatgatggagacgctgtcccggtacaagttctacctggccttcgagaactccttgcaccccgactacatcaccgagaagctgtggaggaacgccctggaggcctgggccgtgcccgtggtgctgggccccagcagaagcaactacgagaggttcctgccacccgacgccttcatccacgtggacgacttccagagccccaaggacctggcccggtacctgcaggagctggacaaggaccacgcccgctacctgagctactttcgctggcgggagacgctgcggcctcgctccttcagctgggcactggatttctgcaaggcctgctggaaactgcagcaggaatccaggtaccagacggtgcgcagcatagcggcttggttcacctgagaggccggcatggtgcctgggctgccgggaacctcatctgcctggggcctcacctgctggagtcctttgtggccaaccctctctcttacctgggacctcacacgctgggcttcacggctgccaggagcctctcccctccagaagacttgcctgctagggacctcgcctgctggggacctcgcctgttggggacctcacctgctggggacctcacctgctggggaccttggctgctggaggctgcacctactgaggatgtcggcggtcggggactttacctgctgggacctgctcccagagaccttgccacactgaatctcacctgctggggacctcaccctggagggccctgggccctggggaactggcttacttggggccccacccgggagtgatggttctggctgatttgtttgtgatgttgttagccgcctgtgaggggtgcagagagatcatcacggcacggtttccagatgtaatactgcaaggaaaaatgatgacgtgtctcctcactctagaggggttggtcccatgggttaagagctcaccccaggttctcacctcaggggttaagagctcagagttcagacaggtccaagttcaagcccaggaccaccacttatagggtacaggtgggatcgactgtaaatgaggacttctggaacattccaaatattctggggttgagggaaattgctgctgtctacaaaatgccaagggtggacaggcgctgtggctcacgcctgtaatcccagcactttgggaggctgaggtaggaggattgattgaggccaagagttaaagaccagcctggtcaatatagcaagaccacgtctctaaataaaaaataataggccggccag

SEQ ID NO: 11291 - DNA, 2182 bp, Homo sapiens
  source 1..2182: mol_type = unassigned DNA
gttcccacttcctccccgccccaggaaacctgccatggcctcctggtgagctgtcctcatccactgctcgctgcctctccaggtgacctacagggagctccgctcgacactgcaaggcttagaccagttcggtccaacagagaaagcaggcaaccaccatgtcatttgaaaacagtttcatcgggatataattcgcaacccatacagtgaatccatttaagatactctgacccatggatcccctgggtgcagccaagccacaatggccatggcgccgctgtctggccgcactgctatttcagctgctggtggctgtgtgtttcttctcctacctgcgtgtgtcccgagacgatgccactggatcccctagggctcccagtgggtcctcccgacaggacaccactcccacccgccccaccctcctgatcctgctacggacatggcctttccacatccctgtggctctgtcccgctgttcagagatggtgcccggcacagccgactgccacatcactgccgaccgcaaggtgtacccacaggcagacatggtcatcgtgcaccactgggatatcatgtccaaccctaagtcacgcctcccaccttccccgaggccgcaggggcagcgctggatctggttcaacttggagccaccccctaactgccagcacctggaagccctggacagatacttcaatctcaccatgtcctaccgcagcgactccgacatcttcacgccctacggctggctggagccgtggtccggccagcctgcccacccaccgctcaacctctcggccaagaccgagctggtggcctgggcggtgtccaactggaagccggactcagccagggtgcgctactaccagagcctgcaggctcatctcaaggtggacgtgtacggacgctcccacaagcccctgcccaaggggaccatgatggagacgctgtcccggtacaagttctacctggccttcgagaactccttgcaccccgactacatcaccgagaagctgtggaggaacgccctggaggcctgggccgtgcccgtggtgctgggccccagcagaagcaactacgagaggttcctgccacccgacgccttcatccacgtggacgacttccagagccccaaggacctggcccggtacctgcaggagctggacaaggaccacgcccgctacctgagctactttcgctggcgggagacgctgcggcctcgctccttcagctgggcactggatttctgcaaggcctgctggaaactgcagcaggaatccaggtaccagacggtgcgcagcatagcggcttggttcacctgagaggccggcatggtgcctgggctgccgggaacctcatctgcctggggcctcacctgctggagtcctttgtggccaaccctctctcttacctgggacctcacacgctgggcttcacggctgccaggagcctctcccctccagaagacttgcctgctagggacctcgcctgctggggacctcgcctgttggggacctcacctgctggggacctcacctgctggggaccttggctgctggaggctgcacctactgaggatgtcggcggtcggggactttacctgctgggacctgctcccagagaccttgccacactgaatctcacctgctggggacctcaccctggagggccctgggccctggggaactggcttacttggggccccacccgggagtgatggttctggctgatttgtttgtgatgttgttagccgcctgtgaggggtgcagagagatcatcacggcacggtttccagatgtaatactgcaaggaaaaatgatgacgtgtctcctcactctagaggggttggtcccatgggttaagagctcaccccaggttctcacctcaggggttaagagctcagagttcagacaggtccaagttcaagcccaggaccaccacttatagggtacaggtgggatcgactgtaaatgaggacttctggaacattccaaatattctggggttgagggaaattgctgctgtctacaaaatgccaagggtggacaggcgctgtggctcacgcctgtaatcccagcactttgggaggctgaggtaggaggattgattgaggccaagagttaaagaccagcctggtcaatatagcaagaccacgtctctaaataaaaaataataggccggccag

SEQ ID NO: 11292 - DNA, 2589 bp, Homo sapiens
  source 1..2589: mol_type = unassigned DNA
tctgttcccacttcctccccgccccaggaaacctgccatggcctcctggtgagctgtcctcatccactgctcgctgcctctccagatcttcagttgcttcaggccatttgaacgtatatgagccggtcgtaggggatatgatggcttagcttgggctcagaggcctgaaaatcgcccccaccaatcacctgtttcccccaatctaccctcctgaaggtcactgacaaagacttcattgtctcctaggagaggctgccatatatccagggctgacgtaattccatcttaatatcagttacattataaaaatttacctcgtgcctgaggccccagagcccaagggtgcaaagcagtaattggtcaaagttcaacttccctcccactctgggctcaggctgtcccctgagggcctgtgttttgagtctctttccagaaccttggtgtgaacttaggtcttggcgtcgggatcccttttcgtcacactcaggtgacctacagggagctccgctcgacactgcaaggcttagaccagttcggtccaacagagaaagcaggcaaccaccatgtcatttgaaaacagtttcatcgggatataattcgcaacccatacagtgaatccatttaagatactctgacccatggatcccctgggtgcagccaagccacaatggccatggcgccgctgtctggccgcactgctatttcagctgctggtggctgtgtgtttcttctcctacctgcgtgtgtcccgagacgatgccactggatcccctagggctcccagtgggtcctcccgacaggacaccactcccacccgccccaccctcctgatcctgctacggacatggcctttccacatccctgtggctctgtcccgctgttcagagatggtgcccggcacagccgactgccacatcactgccgaccgcaaggtgtacccacaggcagacatggtcatcgtgcaccactgggatatcatgtccaaccctaagtcacgcctcccaccttccccgaggccgcaggggcagcgctggatctggttcaacttggagccaccccctaactgccagcacctggaagccctggacagatacttcaatctcaccatgtcctaccgcagcgactccgacatcttcacgccctacggctggctggagccgtggtccggccagcctgcccacccaccgctcaacctctcggccaagaccgagctggtggcctgggcggtgtccaactggaagccggactcagccagggtgcgctactaccagagcctgcaggctcatctcaaggtggacgtgtacggacgctcccacaagcccctgcccaaggggaccatgatggagacgctgtcccggtacaagttctacctggccttcgagaactccttgcaccccgactacatcaccgagaagctgtggaggaacgccctggaggcctgggccgtgcccgtggtgctgggccccagcagaagcaactacgagaggttcctgccacccgacgccttcatccacgtggacgacttccagagccccaaggacctggcccggtacctgcaggagctggacaaggaccacgcccgctacctgagctactttcgctggcgggagacgctgcggcctcgctccttcagctgggcactggatttctgcaaggcctgctggaaactgcagcaggaatccaggtaccagacggtgcgcagcatagcggcttggttcacctgagaggccggcatggtgcctgggctgccgggaacctcatctgcctggggcctcacctgctggagtcctttgtggccaaccctctctcttacctgggacctcacacgctgggcttcacggctgccaggagcctctcccctccagaagacttgcctgctagggacctcgcctgctggggacctcgcctgttggggacctcacctgctggggacctcacctgctggggaccttggctgctggaggctgcacctactgaggatgtcggcggtcggggactttacctgctgggacctgctcccagagaccttgccacactgaatctcacctgctggggacctcaccctggagggccctgggccctggggaactggcttacttggggccccacccgggagtgatggttctggctgatttgtttgtgatgttgttagccgcctgtgaggggtgcagagagatcatcacggcacggtttccagatgtaatactgcaaggaaaaatgatgacgtgtctcctcactctagaggggttggtcccatgggttaagagctcaccccaggttctcacctcaggggttaagagctcagagttcagacaggtccaagttcaagcccaggaccaccacttatagggtacaggtgggatcgactgtaaatgaggacttctggaacattccaaatattctggggttgagggaaattgctgctgtctacaaaatgccaagggtggacaggcgctgtggctcacgcctgtaatcccagcactttgggaggctgaggtaggaggattgattgaggccaagagttaaagaccagcctggtcaatatagcaagaccacgtctctaaataaaaaataataggccggccaggc

SEQ ID NO: 11293 - DNA, 2048 bp, Homo sapiens
  source 1..2048: mol_type = unassigned DNA
tctgttcccacttcctccccgccccaggaaacctgccatggcctcctggtgagctgtcctcatccactgctcgctgcctctccagatactctgacccatggatcccctgggtgcagccaagccacaatggccatggcgccgctgtctggccgcactgctatttcagctgctggtggctgtgtgtttcttctcctacctgcgtgtgtcccgagacgatgccactggatcccctagggctcccagtgggtcctcccgacaggacaccactcccacccgccccaccctcctgatcctgctacggacatggcctttccacatccctgtggctctgtcccgctgttcagagatggtgcccggcacagccgactgccacatcactgccgaccgcaaggtgtacccacaggcagacatggtcatcgtgcaccactgggatatcatgtccaaccctaagtcacgcctcccaccttccccgaggccgcaggggcagcgctggatctggttcaacttggagccaccccctaactgccagcacctggaagccctggacagatacttcaatctcaccatgtcctaccgcagcgactccgacatcttcacgccctacggctggctggagccgtggtccggccagcctgcccacccaccgctcaacctctcggccaagaccgagctggtggcctgggcggtgtccaactggaagccggactcagccagggtgcgctactaccagagcctgcaggctcatctcaaggtggacgtgtacggacgctcccacaagcccctgcccaaggggaccatgatggagacgctgtcccggtacaagttctacctggccttcgagaactccttgcaccccgactacatcaccgagaagctgtggaggaacgccctggaggcctgggccgtgcccgtggtgctgggccccagcagaagcaactacgagaggttcctgccacccgacgccttcatccacgtggacgacttccagagccccaaggacctggcccggtacctgcaggagctggacaaggaccacgcccgctacctgagctactttcgctggcgggagacgctgcggcctcgctccttcagctgggcactggatttctgcaaggcctgctggaaactgcagcaggaatccaggtaccagacggtgcgcagcatagcggcttggttcacctgagaggccggcatggtgcctgggctgccgggaacctcatctgcctggggcctcacctgctggagtcctttgtggccaaccctctctcttacctgggacctcacacgctgggcttcacggctgccaggagcctctcccctccagaagacttgcctgctagggacctcgcctgctggggacctcgcctgttggggacctcacctgctggggacctcacctgctggggaccttggctgctggaggctgcacctactgaggatgtcggcggtcggggactttacctgctgggacctgctcccagagaccttgccacactgaatctcacctgctggggacctcaccctggagggccctgggccctggggaactggcttacttggggccccacccgggagtgatggttctggctgatttgtttgtgatgttgttagccgcctgtgaggggtgcagagagatcatcacggcacggtttccagatgtaatactgcaaggaaaaatgatgacgtgtctcctcactctagaggggttggtcccatgggttaagagctcaccccaggttctcacctcaggggttaagagctcagagttcagacaggtccaagttcaagcccaggaccaccacttatagggtacaggtgggatcgactgtaaatgaggacttctggaacattccaaatattctggggttgagggaaattgctgctgtctacaaaatgccaagggtggacaggcgctgtggctcacgcctgtaatcccagcactttgggaggctgaggtaggaggattgattgaggccaagagttaaagaccagcctggtcaatatagcaagaccacgtctctaaataaaaaataataggccggccaggc

SEQ ID NO: 11294 - DNA, 6047 bp, Homo sapiens
  source 1..6047: mol_type = unassigned DNA
aatccctccctccggcgggcgtcgctggcgggtggctaggcccaacggcaggaagccgacgctatcctccgttccgcggcgccgggtccgccttccgtctgttctagggcctgctcctgcgcggcagctgctttagaaggtctcgagcctcctgtaccttcccagggatgaaccgggccttccctctggaaggcgagggttcgggccacagtgagcgagggccagggcggtgggcgcgcgcagagggaaaccggatcagttgagagagaatcaagagtagcggatgaggcgcttgtggggcgcggcccggaagccctcgggcgcgggctgggagaaggagtgggcggaggcgccgcaggaggctcccggggcctggtcgggccggctgggccccgggcgcagtggaagaaagggacgggcggtgcccggttgggcgtcctggccagctcaccttgccctggcggctcgccccgcccggcacttgggaggagcagggcagggcccgcggcctttgcattctgggaccgcccccttccattcccgggccagcggcgagcggcagcgacggctggagccgcagctacagcatgagagccggtgccgctcctccacgcctgcggacgcgtggcgagcggaggcagcgctgcctgttcgcgccatgggggcaccgtggggctcgccgacggcggcggcgggcgggcggcgcgggtggcgccgaggccgggggctgccatggaccgtctgtgtgctggcggccgccggcttgacgtgtacggcgctgatcacctacgcttgctgggggcagctgccgccgctgccctgggcgtcgccaaccccgtcgcgaccggtgggcgtgctgctgtggtgggagcccttcggggggcgcgatagcgccccgaggccgccccctgactgccggctgcgcttcaacatcagcggctgccgcctgctcaccgaccgcgcgtcctacggagaggctcaggccgtgcttttccaccaccgcgacctcgtgaaggggccccccgactggcccccgccctggggcatccaggcgcacactgccgaggaggtggatctgcgcgtgttggactacgaggaggcagcggcggcggcagaagccctggcgacctccagccccaggcccccgggccagcgctgggtttggatgaacttcgagtcgccctcgcactccccggggctgcgaagcctggcaagtaacctcttcaactggacgctctcctaccgggcggactcggacgtctttgtgccttatggctacctctaccccagaagccaccccggcgacccgccctcaggcctggccccgccactgtccaggaaacaggggctggtggcatgggtggtgagccactgggacgagcgccaggcccgggtccgctactaccaccaactgagccaacatgtgaccgtggacgtgttcggccggggcgggccggggcagccggtgcccgaaattgggctcctgcacacagtggcccgctacaagttctacctggctttcgagaactcgcagcacctggattatatcaccgagaagctctggcgcaacgcgttgctcgctggggcggtgccggtggtgctgggcccagaccgtgccaactacgagcgctttgtgccccgcggcgccttcatccacgtggacgacttcccaagtgcctcctccctggcctcgtacctgcttttcctcgaccgcaaccccgcggtctatcgccgctacttccactggcgccggagctacgctgtccacatcacctccttctgggacgagccttggtgccgggtgtgccaggctgtacagagggctggggaccggcccaagagcatacggaacttggccagctggttcgagcggtgaagccgcgctcccctggaagcgacccaggggaggccaagttgtcagctttttgatcctctactgtgcatctccttgactgccgcatcatgggagtaagttcttcaaacacccatttttgctctatgggaaaaaaacgatttaccaattaatattactcagcacagagatgggggcccggtttccatattttttgcacagctagcaattgggctccctttgctgctgatgggcatcattgtttaggggtgaaggagggggttcttcctcaccttgtaaccagtgcagaaatgaaatagcttagcggcaagaagccgttgaggcggtttcctgaatttccccatctgccacaggccatatttgtggcccgtgcagcttccaaatctcatacacaactgttcccgattcacgtttttctggaccaaggtgaagcaaatttgtggttgtagaaggagccttgttggtggagagtggaaggactgtggctgcaggtgggactttgttgtttggattcctcacagccttggctcctgagaaaggtgaggagggcagtccaagaggggccgctgacttctttcacaagtactatctgttcccctgtcctgtgaatggaagcaaagtgctggattgtccttggaggaaacttaagatgaatacatgcgtgtacctcactttacataagaaatgtattcctgaaaagctgcatttaaatcaagtcccaaattcattgacttaggggagttcagtatttaatgaaaccctatggagaatttatccctttacaatgtgaatagtcatctcctaatttgtttcttctgtctttatgtttttctataacctggattttttaaatcatattaaaattacagatgtgaaaataaagcagaagcaacctttttccctcttcccagaaaaccagtctgtgtttacagacagaagagaaggaagccatagtgtcacttccacacaattatttatttcatgtctttactggacctgaaatttaaactgcaatgccagtcctgcaggagtgctggcattaccctctgcagaacagtgaaaggtattgcactacattatggaatcatgcaaaaggaaaaaaagtttcatgatatctgttgttggcagtttttgtttatctctgacagtttttagttaaatgtttagatcctcagaactacattagtgcctactattaacttactctgtctcttgttaaaggctaaatctgcgcttctccctggtgccagcaggttcccctcacagtcaatgcagtggtatagcatatcctcacatttctagtgcccttgagactgtgctatggaaccaatcttgaacatacatgcattgacttgacaagttactgagtaagcagcatattcagcaggtgccactacatgcctactctgccagacactgagcttggggccctagggaagatagagaattatacaaggcaaagtccttctctttagggctcttacaatctatcacttccaaaaagtaaatggtgactgataaaacaattggcagaacctgtttgattactgtgacagtcttaatgataccataaatcaatattagaaagctagttgacttaaagcctgaaataatgggagttttctcctccacttattagaataaggaccctcagtgactaattattgtgggtagggtcaagattaactagttttatacagagttctgctgtaaatagtcattttgcatttgattagtgcagttctctgaatcataaagcaagttttacctctctgtacatgtttttgcagacatacttgaaaagctcacttaaatctaggtgcttcaattcactttcttgagaggacaaatgaaaagctgtggagaaaatgtcctcattaaagtattaaagtgtgggcagaattacaattacaaagtgccagccaccgaataaagataaaagttcagttcttaaaatgagtttttatgagataacagtcagtgatcttggtgttaccgggattccacatggggcagtgggaaagagttcaggttttgaaggtaacctagtttagatttgaattccagctatgtgacattgggtaaattagtagtagtcctgagcctcagcgtcctcatctataaaatgactggcgaaaatacttcacaagctcattttgagcactttaggaagtaagtgaaagtacctaaaatagcaggcacccaattgatgattttatatcttccttctttgcttgcagtgatttcaggatgtcctcatatctatttataggtctaaaattatatcttaaggtatgttgtagaataaattaaaaggataatctaaatcaccatttagattaagcttgacttgcaaactaggaagaagcacctaggctttctttgaaaatatttttttggttcgttttggtaaagctctataaattggtatctattattttaccaatttttttttagtattaagtccatttagaactaaccatattatttatggaataattagcatgaggaaggtataattgcatttttttttttttgagacggagtcttgcactgtagccccagctggactgcagtggcgtgatcttggctcactgcaacctccgcctcccaggttcaagcgattctcctgcctcagcctcccgagcagctgagactacaggcgcctgccaccacgcctggccaattttttgtatttttagtagagactgcgtttcaccatgttgggcaggctggtcttgaactcctgaccttgtgatccacctgcctcggcctctcagagagctgggattacaggtgtgagccgccgtgcccagccattgcatttttattcacatacacattgttaatgtggaacaatttaacactaatctcatcagagagcgagatgaatgtggcaattgctcattttattttgcatatattaaattgagtaggttcagctctaacataccttaagaaaaatgcatatcggtgcactgtatgtatttcaaaatgcctttcctatgattgtcatgtcctcctttaaggcttttccctcaaatttattacaaatttagtatttttagtacttgatgactctaattacatgaatgcacctggaatgacatttgtaacagaagacggtctgacttgctttcagtattcacaagttctttccagtttccaagtcttttcctagcagtaatttaggggagacagaggagtttcatgtaaagagcatgcagtttggagtcagaacctgggtatgactctgtggccttgatgaagcaagttacttaaactcttgagttttagctttctcctttacaatgcatgaatgcctatccccctacaaaacaaagattaaatgtgatgatgtatgccaaggtgctttgtatattgtaaagtgctatataattataagatgttctaaattttcaaggatctaaaccagggattggcaaacgtttttccagggagtaaatattttacgctttgcatatataatttatggaggtgttgagaggatagattagacacttgaagtactcaggatagtgcctggcatgtaggaagcacctggaaaatattcgctgtgattaccatcagtccattttaccgaggaaggagccaaggtccaggcccactgaaggacttgcataacattacaatagcagtggcagaaccagccatgcttctgcaaatcacaacctctttgagcctctgtcacctgaactgcaaaatgagtgggttagacaaaatcatctgttgggacctcctagttccacgtgctatcattctactaactggcaccctaaggttgaaagtgcttatctgctttccaatgtggcttccttacagtctggaactgacaatatgcaggagcagtaaactggcagaaaaccaggaatcagagaaagaaaatataatttaactttaaagatgtaaattatatatatagtatattatatatatttttaaagctttatatgcctcaaatatcagggaaaggagccaagtccttggtatttagtttggtgaatacttgcattgaatacatgtcaagatgtcaagtcatttttgaatgtgtctcagggatttctatgctacacattcttttaacaaatcaagtatttatgtacacatgttcagattttttgacaaaatgattaaaataatgagatggaaaatg

SEQ ID NO: 11295 - DNA, 1988 bp, Homo sapiens
  source 1..1988: mol_type = unassigned DNA
gattacagacatgagccacctcgcccagccttttcatggctgagtgatattccattgtgtggatggatcacactagctactctgacccatggatcccctgggcccagccaagccacagtggctgtggcgccgctgtctggccgggctgctgtttcagctgctggtggctgtgtgtttcttctcctacctgcgtgtgtcccgagacgatgccactggatcccctaggccagggcttatggcagtggaacctgtcaccggggctcccaatgggtcccgctgccaggacagcatggcgacccctgcccaccccaccctactgatcctgctgtggacgtggccttttaacacacccgtggctctgccccgctgctcagagatggtgcccggcgcggccgactgcaacatcactgccgactccagtgtgtacccacaggcagacgcggtcatcgtgcaccactgggatatcatgtacaaccccagtgccaacctcccgccccccaccaggccgcaggggcagcgctggatctggttcagcatggagtcccccagcaactgccggcacctggaagccctggacggatacttcaatctcaccatgtcctaccgcagcgactccgacatcttcacgccctacggctggctggagccgtggtccggccagcctgcccacccaccgctcaacctctcggccaagaccgagctggtggcctgggcggtgtccaactggaagccggactcggccagggtgcgctactaccagagcctgcaggctcatctcaaggtggacgtgtacggacgctcccacaagcccctgcccaaggggaccatgatggagacgctgtcccggtacaagttctatctggccttcgagaactccttgcaccccgactacatcaccgagaagctgtggaggaacgccctggaggcctgggccgtgcccgtggtgctgggccccagcagaagcaactacgagaggttcctgccacccgacgccttcatccacgtggacgacttccagagccccaaggacctggcccggtacctgcaggagctggacaaggaccacgcccgctacctgagctactttcactggcgggagacgctgcggcctcgctccttcagctgggcactggctttctgcaaggcctgctggaagctgcagcaggaatctaggtaccagacggtgcgcagcatagcggcttggttcacctgagaggccggcatggggcctgggctgccgggacctcactttcccagggcctcacctacctagggtctcactagtcgggggatttacctacctggggcctcggctgcctggggcctcggctgcctggggtctcacctgcctggggcctcacctgctggagtctttggtggccaggcatgtgacttacctgggatttcacttgccgggcttcactgccaggagcctcccctgctggggaccttgccagctggggctggggatggtgcctactggggaccttgctttctggaggctgcacctactgaggatctcggctgttggggactttacctgctgggacctgctcccagagaccttgccacactgaatgtcacctgctaggagcctcacccgctgggaggcacagggcccaagggagctggatgtgttgcccaaggtgtgcagggcaggtcagggaagggcagggtcccctaaggaggagggcgaagggtatgtgtgtgaccatcagcagtggtgtgcacatggctgggggacactcggtttgaccgccagcggatgggtgtcacaaatgcatcactatgggtgtgacctcggcgtgactctgatagtgcctgtggatgtgttgcgatgcctcaccctggagggcactgggccctgagaacgggtgcccttgaggccctgcccccgggcgatggtgcaggctggtttgcttgtggttttattgctgttgttaaccacccatgaggggtgcaaacagataatgctgttaacattttca

SEQ ID NO: 11296 - DNA, 2118 bp, Homo sapiens
  source 1..2118: mol_type = unassigned DNA
tctcgcgatagccagccgcggctgcccttgcgcttcccgagctggcggggtccgtggtgcgggatcgagattgcgggctatggcgccgaaggtttttcgtcagtactgggatatccccgatggcaccgattgccaccgcaaagcctacagcaccaccagtattgccagcgtcgctggcctgaccgccgctgcctacagagtcacactcaatcctccgggcaccttccttgaaggagtggctaaggttggacaatacacgttcactgcagctgctgtcggggccgtgtttggcctcaccacctgcatcagcgcccatgtccgcgagaagcccgacgaccccctgaactacttcctcggtggctgcgccggaggcctgactctgggagcacgcaagactgggtttcaccgtgttagccaggatggtcttgatctcctgacctcgtgatctacctgcctcggcctcccaaagtgctgggattacagacatgagccacctcgcccagccttttcatggctgagtgatattccattgtgtggatggatcacactagctactctgacccatggatcccctgggcccagccaagccacagtggctgtggcgccgctgtctggccgggctgctgtttcagctgctggtggctgtgtgtttcttctcctacctgcgtgtgtcccgagacgatgccactggatcccctaggccagggcttatggcagtggaacctgtcaccggggctcccaatgggtcccgctgccaggacagcatggcgacccctgcccaccccaccctactgatcctgctgtggacgtggccttttaacacacccgtggctctgccccgctgctcagagatggtgcccggcgcggccgactgcaacatcactgccgactccagtgtgtacccacaggcagacgcggtcatcgtgcaccactgggatatcatgtacaaccccagtgccaacctcccgccccccaccaggccgcaggggcagcgctggatctggttcagcatggagtcccccagcaactgccggcacctggaagccctggacggatacttcaatctcaccatgtcctaccgcagcgactccgacatcttcacgccctacggctggctggagccgtggtccggccagcctgcccacccaccgctcaacctctcggccaagaccgagctggtggcctgggcggtgtccaactggaagccggactcggccagggtgcgctactaccagagcctgcaggctcatctcaaggtggacgtgtacggacgctcccacaagcccctgcccaaggggaccatgatggagacgctgtcccggtacaagttctatctggccttcgagaactccttgcaccccgactacatcaccgagaagctgtggaggaacgccctggaggcctgggccgtgcccgtggtgctgggccccagcagaagcaactacgagaggttcctgccacccgacgccttcatccacgtggacgacttccagagccccaaggacctggcccggtacctgcaggagctggacaaggaccacgcccgctacctgagctactttcactggcgggagacgctgcggcctcgctccttcagctgggcactggctttctgcaaggcctgctggaagctgcagcaggaatctaggtaccagacggtgcgcagcatagcggcttggttcacctgagaggccggcatggggcctgggctgccgggacctcactttcccagggcctcacctacctagggtctcactagtcgggggatttacctacctggggcctcggctgcctggggcctcggctgcctggggtctcacctgcctggggcctcacctgctggagtctttggtggccaggcatgtgacttacctgggatttcacttgccgggcttcactgccaggagcctcccctgctggggaccttgccagctggggctggggatggtgcctactggggaccttgctttctggaggctgcacctactgaggatctcggctgttggggactttacctgctgggacctgctcccagagaccttgccacactgaatgtcacctgctaggagcctcacccgctgggaggcacagggcccaagggagctggatgtgttgccc

SEQ ID NO: 11297 - DNA, 2847 bp, Homo sapiens
  source 1..2847: mol_type = unassigned DNA
agatcatttctctccattccaggaagtttgcatagctccctggacttctgctttgcactgccctgcaggagtgggtggggaaaggaagtggctttgaggcacacagaggggcttgttgaggccaccggaggaagcttctgccaccaatatgggacctgtgcccagcctaccagaagagagcatctgaaaacatgtatcgacatggtaacccctctgcttgaagcctcacatggctccctattgccttggtgctgaacaccctatggctgaccgtggcccagcctctgcaacagctctgcctcctctccagtggtgaagacccagcctgctgagactcctcctgcagttcctcaacatgcctgcatttctgctgcctcagggcctttgcgaaggttgttccttgtaactggaatgcccttccatcccttttttattcaaaaggctgcaattttaattgaagaaagttcccttccaaggttcatgagttgcctgacttgcccaccggtttcctgcaagatcccttggcctggcacttagtgctcaggaaatatttggtgatgggccaactgagtgagaaggtgggatctggtgggaaggaaagcggaaaggtagaaattctgctcacttcctcattcccacctcccaaggaacccctggtgtccctgtggaacccgctttgggaaccggtggttcaggtcagccttttcactttgtactcaaagccacatcgcattgaagccacaggtggggcaaggtcatgcatgacctgagtctccaaatcccttcaccctgtttggttctgcaacggggattaggggagccccacgatttgttttcaaaggatgtccgggctccaggacaggatgccctgggtcacctgatgacaggtgtggtggttggaaagggcctggtttcagctccgggtacacttcctccttccttctgctgcgtggtgtggcctcttccacgtcctcagaatccagctgttactccgtccgcggcctctcagctctagggccctctgcacactggcccccccagatactctgacccatggatcccctgggcccggccaagccacagtggtcgtggcgctgctgtctgaccacgctgctgtttcagctgctgatggctgtgtgtttcttctcctatctgcgtgtgtctcaagacgatcccactgtgtaccctaatgggtcccgcttcccagacagcacagggacccccgcccactccatccccctgatcctgctgtggacgtggccttttaacaaacccatagctctgccccgctgctcagagatggtgcctggcacggctgactgcaacatcactgccgaccgcaaggtgtatccacaggcagacgcggtcatcgtgcaccaccgagaggtcatgtacaaccccagtgcccagctcccacgctccccgaggcggcaggggcagcgatggatctggttcagcatggagtccccaagccactgctggcagctgaaagccatggacggatacttcaatctcaccatgtcctaccgcagcgactccgacatcttcacgccctacggctggctggagccgtggtccggccagcctgcccacccaccgctcaacctctcggccaagaccgagctggtggcctgggcagtgtccaactgggggccaaactccgccagggtgcgctactaccagagcctgcaggcccatctcaaggtggacgtgtacggacgctcccacaagcccctgccccagggaaccatgatggagacgctgtcccggtacaagttctatctggccttcgagaactccttgcaccccgactacatcaccgagaagctgtggaggaacgccctggaggcctgggccgtgcccgtggtgctgggccccagcagaagcaactacgagaggttcctgccacccgacgccttcatccacgtggacgacttccagagccccaaggacctggcccggtacctgcaggagctggacaaggaccacgcccgctacctgagctactttcgctggcgggagacgctgcggcctcgctccttcagctgggcactcgctttctgcaaggcctgctggaaactgcaggaggaatccaggtaccagacacgcggcatagcggcttggttcacctgagaggctggtgtggggcctgggctgccaggaacctcattttcctggggcctcacctgagtgggggcctcatctacctaaggactcgtttgcctgaagcttcacctgcctgaggactcacctgcctgggacggtcacctgttgcagcttcacctgcctggggattcacctacctgggtcctcactttcctggggcctcacctgctggagtcttcggtggccaggtatgtcccttacctgggatttcacatgctggcttccaggagcgtcccctgcggaagcctggcctgctggggatgtctcctggggactttgcctactggggacctcggctgttggggactttacctgctgggacctgctcccagagaccttccacactgaatctcacctgctaggagcctcacctgctggggacctcaccctggagggcactgggccctgggaactggcacccatggggccccacccatgagtgatggttctggctgatttgtttgtgatgttgttagccgcctgtgaggggtgcagagagataatcaccgcaccgtttccagatgtaatactgcaaagaaaaccgatgatgaggccgggtgcggtggctcacacctgtaatcccagcactttgggaggccgaggcaggcggatcacaaggtcaggagatcgagaccatcctggccaatatggtgaaacccgtctctactaaaaatacaaaaa

SEQ ID NO: 11298 - DNA, 3137 bp, Homo sapiens
  source 1..3137: mol_type = unassigned DNA
aaaaccagtattccagatcatttctctccattccaggaagtttgcatagctccctggacttctgctttgcactgccctgcaggagtgggtggggaaaggaagtggctttgaggcacacagaggggcttgttgaggccaccggaggaagcttctgccaccaatatgggacctgtgcccagcctaccagaagagagcatctgaaaacatgtatcgacatggtaacccctctgcttgaagcctcacatggctccctattgccttggtgctgaacaccctatggctgaccgtggcccagcctctgcaacagctctgcctcctctccagtggtgaagacccagcctgctgagactcctcctgcagttcctcaacatgcctgcatttctgctgcctcagggcctttgcgaaggttgttccttgtaactggaatgcccttccatcccttttttattcaaaaggctgcaattttaattgaagaaagttcccttccaaggttcatgagttgcctgacttgcccaccggtttcctgcaagatcccttggcctggcacttagtgctcaggaaatatttggtgatgggccaactgagtgagaaggtgggatctggtgggaaggaaagcggaaaggtagaaattctgctcacttcctcattcccacctcccaaggaacccctggtgtccctgtggaacccgctttgggaaccggtggttcaggtcagccttttcactttgtactcaaagccacatcgcattgaagccacaggtggggcaaggtcatgcatgacctgagtctccaaatcccttcaccctgtttggttctgcaacggggattaggggagccccacgatttgttttcaaaggatgtccgggctccaggacaggatgccctgggtcacctgatgacaggtgtggtggttggaaagggcctggtttcagctccgggtacacttcctccttccttctgctgcgtggtgtggcctcttccacgtcctcagaatccagctgttactccgtccgcggcctctcagctctagggccctctgcacactggcccccccagtgtcacgggcatccagacgggatccagtgcatcctcttttagaagaaaggcctgtctccagatccccgagtccctctagcatctcccagaaggtgtcagacgcagcagtgtccagggagcggcagcagatactctgacccatggatcccctgggcccggccaagccacagtggtcgtggcgctgctgtctgaccacgctgctgtttcagctgctgatggctgtgtgtttcttctcctatctgcgtgtgtctcaagacgatcccactgtgtaccctaatgggtcccgcttcccagacagcacagggacccccgcccactccatccccctgatcctgctgtggacgtggccttttaacaaacccatagctctgccccgctgctcagagatggtgcctggcacggctgactgcaacatcactgccgaccgcaaggtgtatccacaggcagacgcggtcatcgtgcaccaccgagaggtcatgtacaaccccagtgcccagctcccacgctccccgaggcggcaggggcagcgatggatctggttcagcatggagtccccaagccactgctggcagctgaaagccatggacggatacttcaatctcaccatgtcctaccgcagcgactccgacatcttcacgccctacggctggctggagccgtggtccggccagcctgcccacccaccgctcaacctctcggccaagaccgagctggtggcctgggcagtgtccaactgggggccaaactccgccagggtgcgctactaccagagcctgcaggcccatctcaaggtggacgtgtacggacgctcccacaagcccctgccccagggaaccatgatggagacgctgtcccggtacaagttctatctggccttcgagaactccttgcaccccgactacatcaccgagaagctgtggaggaacgccctggaggcctgggccgtgcccgtggtgctgggccccagcagaagcaactacgagaggttcctgccacccgacgccttcatccacgtggacgacttccagagccccaaggacctggcccggtacctgcaggagctggacaaggaccacgcccgctacctgagctactttcgctggcgggagacgctgcggcctcgctccttcagctgggcactcgctttctgcaaggcctgctggaaactgcaggaggaatccaggtaccagacacgcggcatagcggcttggttcacctgagaggctggtgtggggcctgggctgccaggaacctcattttcctggggcctcacctgagtgggggcctcatctacctaaggactcgtttgcctgaagcttcacctgcctgaggactcacctgcctgggacggtcacctgttgcagcttcacctgcctggggattcacctacctgggtcctcactttcctggggcctcacctgctggagtcttcggtggccaggtatgtcccttacctgggatttcacatgctggcttccaggagcgtcccctgcggaagcctggcctgctggggatgtctcctggggactttgcctactggggacctcggctgttggggactttacctgctgggacctgctcccagagaccttccacactgaatctcacctgctaggagcctcacctgctggggacctcaccctggagggcactgggccctgggaactggcacccatggggccccacccatgagtgatggttctggctgatttgtttgtgatgttgttagccgcctgtgaggggtgcagagagataatcaccgcaccgtttccagatgtaatactgcaaagaaaaccgatgatgaggccgggtgcggtggctcacacctgtaatcccagcactttgggaggccgaggcaggcggatcacaaggtcaggagatcgagaccatcctggccaatatggtgaaacccgtctctactaaaaatacaaaaatttgccgggcgtggtggtgcatgcctgtaatcccagctacttgggaagctgaggcaggagaatcgcttgaaccagagagtcggaggttgcagtaagccgagatcgcgccactgcactccagcctggcgacagagcgagactctgtctc

SEQ ID NO: 11299 - DNA, 1098 bp, Homo sapiens
  source 1..1098: mol_type = unassigned DNA
atggatcccctgggcccggccaagccacagtggtcgtggcgctgctgtctgaccacgctgctgtttcagctgctgatggctgtgtgtttcttctcctatctgcgtgtgtctcaagacgatcccactgtgtaccctaatgggtcccgcttcccagacagcacagggacccccgcccactccatccccctgatcctgctgtggacgtggccttttaacaaacccatagctctgccccgctgctcagagatggtgcctggcacggctgactgcaacatcactgccgaccgcaaggtgtatccacaggcagacgcggtcatcgtgcaccaccgagaggtcatgtacaaccccagtgcccagctcccacgctccccgaggcggcaggggcagcgatggatctggttcagcatggagtccccaagccactgctggcagctgaaagccatggacggatacttcaatctcaccatgtcctaccgcagcgactccgacatcttcacgccctacggctggctggagccgtggtccggccagcctgcccacccaccgctcaacctctcggccaagaccgagctggtggcctgggcagtgtccaactgggggccaaactccgccagggtgcgctactaccagagcctgcaggcccatctcaaggtggacgtgtacggacgctcccacaagcccctgccccagggaaccatgatggagacgctgtcccggtacaagttctatctggccttcgagaactccttgcaccccgactacatcaccgagaagctgtggaggaacgccctggaggcctgggccgtgcccgtggtgctgggccccagcagaagcaactacgagaggttcctgccacccgacgccttcatccacgtggacgacttccagagccccaaggacctggcccggtacctgcaggagctggacaaggaccacgcccgctacctgagctactttcgctggcgggagacgctgcggcctcgctccttcagctgggcactcgctttctgcaaggcctgctggaaactgcaggaggaatccaggagtgggggcctcatctacctaaggactcgtttgcctgaagcttcacctgcctga

SEQ ID NO: 11300 - DNA, 2598 bp, Homo sapiens
  source 1..2598: mol_type = unassigned DNA
gtttgcatagctccctggacttctgctttgcactgccctgcaggagtgggtggggaaaggaagtggctttgaggcacacagaggggcttgttgaggccaccggaggaagcttctgccaccaatatgggacctgtgcccagcctaccagaagagagcatctgaaaacatgtatcgacatggtaacccctctgcttgaagcctcacatggctccctattgccttggtgctgaacaccctatggctgaccgtggcccagcctctgcaacagctctgcctcctctccagtgccttttcactttgtactcaaagccacatcgcattgaagccacaggtggggcaaggtcatgcatgacctgagtctccaaatcccttcaccctgtttggttctgcaacggggattaggggagccccacgatttgttttcaaaggatgtccgggctccaggacaggatgccctgggtcacctgatgacaggtgtggtggttggaaagggcctggtttcagctccgggtacacttcctccttccttctgctgcgtggtgtggcctcttccacgtcctcagaatccagctgttactccgtccgcggcctctcagctctagggccctctgcacactggcccccccagatactctgacccatggatcccctgggcccggccaagccacagtggtcgtggcgctgctgtctgaccacgctgctgtttcagctgctgatggctgtgtgtttcttctcctatctgcgtgtgtctcaagacgatcccactgtgtaccctaatgggtcccgcttcccagacagcacagggacccccgcccactccatccccctgatcctgctgtggacgtggccttttaacaaacccatagctctgccccgctgctcagagatggtgcctggcacggctgactgcaacatcactgccgaccgcaaggtgtatccacaggcagacgcggtcatcgtgcaccaccgagaggtcatgtacaaccccagtgcccagctcccacgctccccgaggcggcaggggcagcgatggatctggttcagcatggagtccccaagccactgctggcagctgaaagccatggacggatacttcaatctcaccatgtcctaccgcagcgactccgacatcttcacgccctacggctggctggagccgtggtccggccagcctgcccacccaccgctcaacctctcggccaagaccgagctggtggcctgggcagtgtccaactgggggccaaactccgccagggtgcgctactaccagagcctgcaggcccatctcaaggtggacgtgtacggacgctcccacaagcccctgccccagggaaccatgatggagacgctgtcccggtacaagttctatctggccttcgagaactccttgcaccccgactacatcaccgagaagctgtggaggaacgccctggaggcctgggccgtgcccgtggtgctgggccccagcagaagcaactacgagaggttcctgccacccgacgccttcatccacgtggacgacttccagagccccaaggacctggcccggtacctgcaggagctggacaaggaccacgcccgctacctgagctactttcgctggcgggagacgctgcggcctcgctccttcagctgggcactcgctttctgcaaggcctgctggaaactgcaggaggaatccaggtaccagacacgcggcatagcggcttggttcacctgagaggctggtgtggggcctgggctgccaggaacctcattttcctggggcctcacctgagtgggggcctcatctacctaaggactcgtttgcctgaagcttcacctgcctgaggactcacctgcctgggacggtcacctgttgcagcttcacctgcctggggattcacctacctgggtcctcactttcctggggcctcacctgctggagtcttcggtggccaggtatgtcccttacctgggatttcacatgctggcttccaggagcgtcccctgcggaagcctggcctgctggggatgtctcctggggactttgcctactggggacctcggctgttggggactttacctgctgggacctgctcccagagaccttccacactgaatctcacctgctaggagcctcacctgctggggacctcaccctggagggcactgggccctgggaactggcacccatggggccccacccatgagtgatggttctggctgatttgtttgtgatgttgttagccgcctgtgaggggtgcagagagataatcaccgcaccgtttccagatgtaatactgcaaagaaaaccgatgatgaggccgggtgcggtggctcacacctgtaatcccagcactttgggaggccgaggcaggcggatcacaaggtcaggagatcgagaccatcctggccaatatggtgaaacccgtctctactaaaaatacaaaaatttgccgggcgtggtggtgcatgcctgtaatcccagctacttgggaagctgaggcaggagaatcgcttgaaccagagagtcggaggttgcagtaagccgagatcgcgccactgcactccagcctggcgacagagcgagactctgtctcaaaaaaaaaaaaaaaa

SEQ ID NO: 11301 - DNA, 2211 bp, Homo sapiens
  source 1..2211: mol_type = unassigned DNA
gcctcttccacgtcctcagaatccagctgttactccgtccgcggcctctcagctctagggccctctgcacactggcccccccagtgtcacgggcatccagacgggatccagtgcatcctcttttagaagaaaggcctgtctccagatccccgagtccctctagcatctcccagaaggtgtcagacgcagcagtgtccagggagcggcagcagattgaggaagagtctggggacacaccagaaaaggacaggatcaagatactctgacccatggatcccctgggcccggccaagccacagtggtcgtggcgctgctgtctgaccacgctgctgtttcagctgctgatggctgtgtgtttcttctcctatctgcgtgtgtctcaagacgatcccactgtgtaccctaatgggtcccgcttcccagacagcacagggacccccgcccactccatccccctgatcctgctgtggacgtggccttttaacaaacccatagctctgccccgctgctcagagatggtgcctggcacggctgactgcaacatcactgccgaccgcaaggtgtatccacaggcagacgcggtcatcgtgcaccaccgagaggtcatgtacaaccccagtgcccagctcccacgctccccgaggcggcaggggcagcgatggatctggttcagcatggagtccccaagccactgctggcagctgaaagccatggacggatacttcaatctcaccatgtcctaccgcagcgactccgacatcttcacgccctacggctggctggagccgtggtccggccagcctgcccacccaccgctcaacctctcggccaagaccgagctggtggcctgggcagtgtccaactgggggccaaactccgccagggtgcgctactaccagagcctgcaggcccatctcaaggtggacgtgtacggacgctcccacaagcccctgccccagggaaccatgatggagacgctgtcccggtacaagttctatctggccttcgagaactccttgcaccccgactacatcaccgagaagctgtggaggaacgccctggaggcctgggccgtgcccgtggtgctgggccccagcagaagcaactacgagaggttcctgccacccgacgccttcatccacgtggacgacttccagagccccaaggacctggcccggtacctgcaggagctggacaaggaccacgcccgctacctgagctactttcgctggcgggagacgctgcggcctcgctccttcagctgggcactcgctttctgcaaggcctgctggaaactgcaggaggaatccaggtaccagacacgcggcatagcggcttggttcacctgagaggctggtgtggggcctgggctgccaggaacctcattttcctggggcctcacctgagtgggggcctcatctacctaaggactcgtttgcctgaagcttcacctgcctgaggactcacctgcctgggacggtcacctgttgcagcttcacctgcctggggattcacctacctgggtcctcactttcctggggcctcacctgctggagtcttcggtggccaggtatgtcccttacctgggatttcacatgctggcttccaggagcgtcccctgcggaagcctggcctgctggggatgtctcctggggactttgcctactggggacctcggctgttggggactttacctgctgggacctgctcccagagaccttccacactgaatctcacctgctaggagcctcacctgctggggacctcaccctggagggcactgggccctgggaactggcacccatggggccccacccatgagtgatggttctggctgatttgtttgtgatgttgttagccgcctgtgaggggtgcagagagataatcaccgcaccgtttccagatgtaatactgcaaagaaaaccgatgatgaggccgggtgcggtggctcacacctgtaatcccagcactttgggaggccgaggcaggcggatcacaaggtcaggagatcgagaccatcctggccaatatggtgaaacccgtctctactaaaaatacaaaaatttgccgggcgtggtggtgcatgcctgtaatcccagctacttgggaagctgaggcaggagaatcgcttgaaccagagagtcggaggttgcagtaagccgagatcgcgccactgcactccagcctggcgacagagcgagactctgtctc

SEQ ID NO: 11302 - DNA, 527 bp, Homo sapiens
  source 1..527: mol_type = unassigned DNA
ctcagaatccagctgttactccgtccgcggcctctcagctctagggccctctgcacactggcccccccagtgggtgtctgtctgtctctcttgcagagctctgcggtagaatcccgtgccccccgaccccatcagcagcctacaccccttcatccttcctggccccggattttctctgcctctgccactcccggtggtaaaagagggcttagaatgcggtttgctttctggctttgtttttttgcatcctgatctttgtggcgtggatcgatcattttccagggaaagtaccttggtgtcacgggcatccagacgggatccagtgcatcctcttttagaagaaaggcctgtctccagatccccgagtccctctagcatctcccagaaggtgtcagacgcagcagtgtccagggagcggcagcagatactctgacccatggatcccctgggcccggccaagccacagtggtcgtggcgctgctgtctgaccacgctgctgtttcagctgctgatggctgtgtgtttct

SEQ ID NO: 11303 - DNA, 700 bp, Homo sapiens
  source 1..700: mol_type = unassigned DNA
gtggttggaaagggcctggtttcagctccgggtacacttcctccttccttctgctgcgtggtgtggcctcttccacgtcctcagaatccagctgttactccgtccgcggcctctcagctctagggccctctgcacactggcccccccagtgtcacgggcatccagacgggatccagtgcatcctcttttagaagaaaggcctgtctccagatccccgagtccctctagcatctcccagaaggtgtcagacgcagcagtgtccagggagcggcagcagatactctgacccatggatcccctgggcccggccaagccacagtggtcgtggcgctgctgtctgaccacgctgctgtttcagctgctgatggctgtgtgtttcttctcctatctgcgtgtgtctcaagacgatcccactgtgtaccctaatgggtcccgcttcccagacagcacagggacccccgcccactccatccccctgatcctgctgtggacgtggccttttaacaaacccatagctctgccccgctgctcagagatggtgcctggcacggctgactgcaacatcactgccgaccgcaaggtgtatccacaggcagacgcggtcatcgtgcaccaccgagaggtcatgtacaaccccagtgcccagctcccacgctccccgaggcggcaggggcagcgatggatctggttcagcatggag

SEQ ID NO: 11304 - DNA, 682 bp, Homo sapiens
  source 1..682: mol_type = unassigned DNA
tgtcacgggcatccagacgggatccagtgcatcctcttttagaagaaaggcctgtctccagatccccgagtccctctagcatctcccagaaggtgtcagacgcagcagtgtccagggagcggcagcaggtccttatcatggtccaagggtccctcccagcctccaagtctcaccccatacatgaaaaaaggtggccccggtttcccgccacctcctccacagcaccatctctttgaagacccagtgcccacactccgggggatttgggccctcccctgtctccctccagccccctggggccagtccgctgctgggtatctccaggacgggccaggctcagcaagttccaccaaagcctgcttctctcctgggggttccccatgtctctgggtggccccactgccctcctggtcagcatattgaggaagagtctggggacacaccagaaaaggacaggatcaagatactctgacccatggatcccctgggcccggccaagccacagtggtcgtggcgctgctgtctgaccacgctgctgtttcagctgctgatggctgtgtgtttcttctcctatctgcgtgtgtctcaagacgatcccactgtgtaccctaatgggtcccgcttcccagacagcacagggacccccgcccactccatccccctgatcctgctgtggacgtgg

SEQ ID NO: 11305 - DNA, 564 bp, Homo sapiens
  source 1..564: mol_type = unassigned DNA
acttcctccttccttctgctgcgtggtgtggcctcttccacgtcctcagaatccagctgttactccgtccgcggcctctcagctctagggccctctgcacactggcccccccagtgtcacgggcatccagacgggatccagtgcatcctcttttagaagaaaggcctgtctccagatccccgagtccctctagcatctcccagaaggtgtcagacgcagcagtgtccagggagcggcagcaggtccttatcatggtccaagggtccctcccagcctccaagtctcaccccatacatgaaaaaaggtggccccggtttcccgccacctcctccacagcaccatctctttgaagatactctgacccatggatcccctgggcccggccaagccacagtggtcgtggcgctgctgtctgaccacgctgctgtttcagctgctgatggctgtgtgtttcttctcctatctgcgtgtgtctcaagacgatcccactgtgtaccctaatgggtcccgcttcccagacagcacagggacccccgcccactccatccccctgatcctgctgtg

SEQ ID NO: 11306 - DNA, 530 bp, Homo sapiens
  source 1..530: mol_type = unassigned DNA
gttactccgtccgcggcctctcagctctagggccctctgcacactggcccccccagagctctgcggtagaatcccgtgccccccgaccccatcagcagcctacaccccttcatccttcctggccccggattttctctgcctctgccactcccggtggtaaaagagggcttagaatgcggtttgctttctggctttgtttttttgcatcctgatctttgtggcgtggatcgatcattttccagggaaagtaccttggtgtcacgggcatccagacgggatccagtgcatcctcttttagaagaaaggcctgtctccagatccccgagtccctctagcatctcccagaaggtgtcagacgcagcagtgtccagggagcggcagcagatactctgacccatggatcccctgggcccggccaagccacagtggtcgtggcgctgctgtctgaccacgctgctgtttcagctgctgatggctgtgtgtttcttctcctatctgcgtgtgtctcaagacgatcccactgtgtaccc

SEQ ID NO: 11307 - DNA, 2584 bp, Homo sapiens
  source 1..2584: mol_type = unassigned DNA
ccaggctccaggccctggcttagagggagcggggagtctggacttcaggctggatcccttcctcttcctggagcgggtgctggcccccaacccgcttgcgtcagggacaaaaggactccttccctttccagcctggaaagcccctctgctgcaggctggaggaagggaccctgggcccagcctatagtcagcggtgtctatgggcatggatctggacggggaaaaggacaaagcagcctccatccacagttcattccgggaccaggcccttgcaggcacgcgctgggctcctgtgggaagacactaagggccccaggacagacctcctctccgggcatctgggttcctagatggcagaggtggcagagtggggtgggatggcccaattgggagctttagcttccggcaaagagctgagcacagtacatcttcaatgtgtaagattctcctgggagaccagggcccagctggtggtgagctgggggaagtgggtgatactgccgtgggaggagccacctggccctctggggaagtgcactcgctgtctgcagcgcccaggcctgggtagctgggtgggggctggggggccatctgtgctcagggtgcctgcacctgggccttctctgccctgggccaagcctgcccgagcctctctgtcctctgcctgcccagctggacatctctgggcctctctggagaccagtggggtgggctgtgggggcgtcatattgccctggcttggcatccctcttgtggctgtacccctcccagcagccccaggactagcaagtccccgagatgggggtggggacagtggttgatgccaaaggttgtgggggcaggggcggggcaggagcaggaaggtcccctgagttccctcaccttgggcagagataaaaggagcacagttccaggcggggctgagctagggcgtagctgtgatttcaggggcacctctggcggctgccgtgatttgagaatctcgggtctcttggctgactgatcctgggagactgtggatgaataatgctgggcacggccccacccggaggctgcgaggcttgggggtcctggccggggtggctctgctcgctgccctctggctcctgtggctgctggggtcagcccctcggggtaccccggcaccccagcccacgatcaccatccttgtctggcactggcccttcactgaccagcccccagagctgcccagcgacacctgcacccgctacggcatcgcccgctgccacctgagtgccaaccgaagcctgctggccagcgccgacgccgtggtcttccaccaccgcgagctgcagacccggcggtcccacctgcccctggcccagcggccgcgagggcagccctgggtgtgggcctccatggagtctcctagccacacccacggcctcagccacctccgaggcatcttcaactgggtgctgagctaccggcgcgactcggacatctttgtgccctatggccgcctggagccccactgggggccctcgccaccgctgccagccaagagcagggtggccgcctgggtggtcagcaacttccaggagcggcagctgcgtgccaggctgtaccggcagctggcgcctcatctgcgggtggatgtctttggccgtgccaatggacggccactgtgcgccagctgcctggtgcccaccgtggcccagtaccgcttctacctgtcctttgagaactctcagcaccgcgactacattacggagaaattctggcgcaacgcactggtggctggcactgtgccagtggtgctggggcccccacgggccacctatgaggccttcgtgccggctgacgccttcgtgcatgtggatgactttggctcagcccgagagctggcggctttcctcactggcatgaatgagagccgataccaacgcttctttgcctggcgtgacaggctccgcgtgcgactgttcaccgactggcgggaacgtttctgtgccatctgtgaccgctacccacacctaccccgcagccaagtctatgaggaccttgagggttggtttcaggcctgagatccgctggccgggggaggtgggtgtgggtggaagggctgggtgtcgaaatcaaaccaccaggcatccggcccttaccggcaagcagcgggctaacgggaggctgggcacagaggtcaggaagcaggggtggggggtgcaggtgggcactggagcatgcagaggaggtgagagtgggagggaggtaacgggtgcctgctgcggcagacgggaggggaaaggctgccgaggaccctccccaccctgaacaaatcttgggtgggtgaaggcctggctggaagagggtgaaaggcagggcccttggggctggggggcaccccagcctgaagtttgtgggggccaaacctgggaccccgagcttcctcggtagcagaggccctgtggtccccgagacacaggcacgggtccctgccacgtccatagttctgaggtccctgtgtgtaggctggggcggggcccaggagaccacggggagcaaaccagcttgttctgggctcagggagggagggcggtggacaataaacatctgagcagtg

SEQ ID NO: 11308 - DNA, 5166 bp, Homo sapiens
  source 1..5166: mol_type = unassigned DNA
tttcagttggaaggaggtagggaaaataagtgctttaattcctaggattttggaagtaaaaatggaacaccagacaaaaatggaatttttaggcaaatgtaaagctttgtacttgggtatctcaaagtattatacagtgtaaactatcatgattattaaccaactagaagtagttcttttttttaaattttatttttaattttagacatgagggtcttgctatgttgcccaggctgaagtggctactgacaggcacgatgtggcactgcagcctggaactcttgggcttaagtgatccttcctgcttcttctatcttaaaaaaaaaaagttacgcttgcttgttaaaatatttttaaaatgctgtgtttaaactaagaagtaaatatccaccccacctctgacttctaaaaattatctaaagtatgactggtaagatttttacctttaatcccacataagtctaaaatttgtgttcatttccaacaaccaaagtgtgtcacttttataccagaattttgtcctgcttatacgtttagtacagaaatctcatgggagagagcatccatgcatttacaaattgttattgaattattttattgaatgatgacacccaaactgagctagaacataattctggctctgctagtacatcttctgtgtgatcttggacaagtcactctactttcctttcaattttcttttctcacagggagataatcataaaaacgactgtaaagtacagcacttcatagagtgctttttgtttaaagagctgacaataaatacgagtctcaaggtctaggaaagcctccctcacaacctgagctgcttgaggacaagggattttcttttgaatcagcagtaccttatttgtgtatctgtgatagagttcctggtacataagaaggtctcaataaatatgtgaatttatgaatattaggcagattgcaaccttgacaggccactgcctcttaaatctcctttctgtgatcttttaatatttaacatctaaaaggccgccgctacttgctttgggataagtatccccggtatgtactttaaaatgcccaagcctagagaaatgattcttgtcttaagggcaccatttcgctctcccaccgtaaagcgccccaggcttgggatctgggtcccaaggctacagggaagagtttggaacgggaagctcatcttccggccctctgattggccggctcgcactccactcacgcggcgcgcagctctgattggcctcggcggcacccctcgtcccgcgactactttgtgtgctggggcggcgcgctccggtcctcccgctcagctggcggtctgggctgctctggggcagcccttcggtccactgctctgcatcgcgggcgccgggaattttccgagtccgagcgggttgctgcttttgctcagaggacatccatgaccctaatggtctttttgttcaagataaagtgattttttgcctttgttgattaactggacaaattcagcatgtagagcgcatgaagtacaggacaataaagcttcctacacatatcaccaggaggatctctttgaaagattcactgcaggactaccagagagaataatttgtctgaagcatcatgtgttgaaacaacagaagtctattcacctgtgcactaactagaaacagagttacaatgttttcaattctttgagctccaggactccagggaagtgagttgaaaatctgaaaatgcggccatggactggttcctggcgttggattatgctcattctttttgcctgggggaccttgctgttttatataggtggtcacttggtacgagataatgaccatcctgatcactctagccgagaactgtccaagattctggcaaagcttgaacgcttaaaacaacagaatgaagacttgaggcgaatggccgaatctctccggataccagaaggccctattgatcaggggccagctataggaagagtacgcgttttagaagagcagcttgttaaggccaaagaacagattgaaaattacaagaaacagaccagaaatggtctggggaaggatcatgaaatcctgaggaggaggattgaaaatggagctaaagagctctggtttttcctacagagtgaattgaagaaattaaagaacttagaaggaaatgaactccaaagacatgcagatgaatttcttttggatttaggacatcatgaaaggtctataatgacggatctatactacctcagtcagacagatggagcaggtgattggcgggaaaaagaggccaaagatctgacagaactggttcagcggagaataacatatcttcagaatcccaaggactgcagcaaagccaaaaagctggtgtgtaatatcaacaaaggctgtggctatggctgtcagctccatcatgtggtctactgcttcatgattgcatatggcacccagcgaacactcatcttggaatctcagaattggcgctatgctactggtggatgggagactgtatttaggcctgtaagtgagacatgcacagacagatctggcatctccactggacactggtcaggtgaagtgaaggacaaaaatgttcaagtggtcgagcttcccattgtagacagtcttcatccccgtcctccatatttacccttggctgtaccagaagacctcgcagatcgacttgtacgagtgcatggtgaccctgcagtgtggtgggtgtctcagtttgtcaaatacttgatccgcccacagccttggctagaaaaagaaatagaagaagccaccaagaagcttggcttcaaacatccagttattggagtccatgtcagacgcacagacaaagtgggaacagaagctgccttccatcccattgaagagtacatggtgcatgttgaagaacattttcagcttcttgcacgcagaatgcaagtggacaaaaaaagagtgtatttggccacagatgacccttctttattaaaggaggcaaaaacaaagtaccccaattatgaatttattagtgataactctatttcctggtcagctggactgcacaatcgatacacagaaaattcacttcgtggagtgatcctggatatacattttctctctcaggcagacttcctagtgtgtactttttcatcccaggtctgtcgagttgcttatgaaattatgcaaacactacatcctgatgcctctgcaaacttccattctttagatgacatctactattttgggggccagaatgcccacaatcaaattgccatttatgctcaccaaccccgaactgcagatgaaattcccatggaacctggagatatcattggtgtggctggaaatcattgggatggctattctaaaggtgtcaacaggaaattgggaaggacgggcctatatccctcctacaaagttcgagagaagatagaaacggtcaagtaccccacatatcctgaggctgagaaataaagctcagatggaagagataaacgaccaaactcagttcgaccaaactcagttcaaaccatttcagccaaactgtagatgaagagggctctgatctaacaaaataaggttatatgagtagatactctcagcaccaagagcagctgggaactgacataggcttcaattggtggaattcctctttaacaagggctgcaatgccctcatacccatgcacagtacaataatgtactcacatataacatgcaaacaggttgttttctactttgcccctttcagtatgtccccataagacaaacactgccatattgtgtaatttaagtgacacagacattttgtgtgagacttaaaacatggtgcctatatctgagagacctgtgtgaactattgagaagatcggaacagctccttactctgaggaagttgattcttatttgatggtggtattgtgaccactgaattcactccagtcaacagattcagaatgagaatggacgtttggtttttttttgtttttgtttttgttttttcctttataaggttgtctgtttttttttttttaaataattgcatcagttcattgacctcatcattaataagtgaagaatacatcagaaaataaaatattcactctccattagaaaattttgtaaaacaatgccatgaacaaattctttagtactcaatgtttctggacattctctttgataacaaaaaataaattttaaaaaggaattttgtaaagtttctagaattttatatcattggatgatatgttgatcagccttatgtggaagaactgtgataaaaagaggagctttttagtttttcagcttatttactttgttttttttcctgtttctgatatagtaactaattcttaactcagagacattggtccattttaatactgaaaaccaattttcattggtacacattacaaaattgctaagaacactgtttgggagctttcattctcatattttggacattgttttaattgagtgaaataatcataactccttgctcccagagaagctatcacctccatttctaaaaccatttcaggtttgtttggtagtctttcttaatgtatttattatcgctttttgtgagtagggtcctgttttatccaggaaccaatttctgccctagcctatcatgccctgcttttgagagtaccaggtatctttgggattgggaagctggctgtttcagaagtatatgtctcatagtgtgcagaacttggtgaccaagtgagaagcgggaccaatgggagactcacaatggactgagtcttgggattatcttttccaaattcttccatgttagaatcacttcagaaaataagactttgatgctttgtctctgagcatcatttttctcctcataaaaacacttccttattgtatgtagcctgcctcctacagaggcctggtaggtgttactgcattctaaaagaaaaatgtcatctctgtaggagcgactatcaggcctagtgtgaaatattagggatcctaggcagaagagctattagtcctggccttcatatcttcaccaaatgaaaatactgtatataaaatttcaccaccaaacttaactaaattctttttctcaagtcaagcctcccaaagaaaaaagaaattaacttcctacagtgtcagcaagcaattttccatttagttttggtacaaataaaagtcatttgaaacaa

SEQ ID NO: 11309 - DNA, 3284 bp, Homo sapiens
  source 1..3284: mol_type = unassigned DNA
ggccgacccgagcagccggttccctcctctccaggccccctccccatcccacccccgccgcctggccccagccgacccgtcccttcgtctccccgcggaatggggccggcactgctcagggtcgcgcgccctggacccagctcgctctcggtctcgcgctgtcagcgactgcccggctcgcgccgcctcgcgctctgcctcagtcagtggcgccgaaggctccgttaagcggcggcggcggttcctgtttccgtttcttcctctccgttcggtcgggagtagcatcctccactcagccacccttcccactcccccatcgtggggcagctgcggctgagggctgtggctttggcagctgcgacggggagcggcggagaccgcctctgctcccgcctggggttgctgcttttgctcagaggacatccatgaccctaatggtctttttgttcaagataaagtgattttttgcctttgttgattaactggacaaattcagcatgtagagcgcatgaagtacaggacaataaagcttcctacacatatcaccaggaggatctctttgaaagattcactgcaggactaccagagagaataatttgtctgaagcatcatgtgttgaaacaacagaagtctattcacctgtgcactaactagaaacagagttacaatgttttcaattctttgagctccaggactccagggaagtgagttgaaaatctgaaaatgcggccatggactggttcctggcgttggattatgctcattctttttgcctgggggaccttgctgttttatataggtggtcacttggtacgagataatgaccatcctgatcactctagccgagaactgtccaagattctggcaaagcttgaacgcttaaaacaacagaatgaagacttgaggcgaatggccgaatctctccggataccagaaggccctattgatcaggggccagctataggaagagtacgcgttttagaagagcagcttgttaaggccaaagaacagattgaaaattacaagaaacagaccagaaatggtctggggaaggatcatgaaatcctgaggaggaggattgaaaatggagctaaagagctctggtttttcctacagagtgaattgaagaaattaaagaacttagaaggaaatgaactccaaagacatgcagatgaatttcttttggatttaggacatcatgaaaggtctataatgacggatctatactacctcagtcagacagatggagcaggtgattggcgggaaaaagaggccaaagatctgacagaactggttcagcggagaataacatatcttcagaatcccaaggactgcagcaaagccaaaaagctggtgtgtaatatcaacaaaggctgtggctatggctgtcagctccatcatgtggtctactgcttcatgattgcatatggcacccagcgaacactcatcttggaatctcagaattggcgctatgctactggtggatgggagactgtatttaggcctgtaagtgagacatgcacagacagatctggcatctccactggacactggtcaggtgaagtgaaggacaaaaatgttcaagtggtcgagcttcccattgtagacagtcttcatccccgtcctccatatttacccttggctgtaccagaagacctcgcagatcgacttgtacgagtgcatggtgaccctgcagtgtggtgggtgtctcagtttgtcaaatacttgatccgcccacagccttggctagaaaaagaaatagaagaagccaccaagaagcttggcttcaaacatccagttattggagtccatgtcagacgcacagacaaagtgggaacagaagctgccttccatcccattgaagagtacatggtgcatgttgaagaacattttcagcttcttgcacgcagaatgcaagtggacaaaaaaagagtgtatttggccacagatgacccttctttattaaaggaggcaaaaacaaagtaccccaattatgaatttattagtgataactctatttcctggtcagctggactgcacaatcgatacacagaaaattcacttcgtggagtgatcctggatatacattttctctctcaggcagacttcctagtgtgtactttttcatcccaggtctgtcgagttgcttatgaaattatgcaaacactacatcctgatgcctctgcaaacttccattctttagatgacatctactattttgggggccagaatgcccacaatcaaattgccatttatgctcaccaaccccgaactgcagatgaaattcccatggaacctggagatatcattggtgtggctggaaatcattgggatggctattctaaaggtgtcaacaggaaattgggaaggacgggcctatatccctcctacaaagttcgagagaagatagaaacggtcaagtaccccacatatcctgaggctgagaaataaagctcagatggaagagataaacgaccaaactcagttcgaccaaactcagttcaaaccatttcagccaaactgtagatgaagagggctctgatctaacaaaataaggttatatgagtagatactctcagcaccaagagcagctgggaactgacataggcttcaattggtggaattcctctttaacaagggctgcaatgccctcatacccatgcacagtacaataatgtactcacatataacatgcaaacaggttgttttctactttgcccctttcagtatgtccccataagacaaacactgccatattgtgtaatttaagtgacacagacattttgtgtgagacttaaaacatggtgcctatatctgagagacctgtgtgaactattgagaagatcggaacagctccttactctgaggaagttgattcttatttgatggtggtattgtgaccactgaattcactccagtcaacagattcagaatgagaatggacgtttggtttttttttgtttttgtttttgttttttcctttataaggttgtctgtttttttttttttaaataattgcatcagttcattgacctcatcattaataagtgaagaatacatcagaaaataaaatattcactctccattagaaaattttgtaaaacaatgccatgaacaaattctttagtactcaatgtttctggacattctctttgataacaaaaaataaattttaaaaaggaattttgtaaagtttctagaattttatatcattggatgatatgttgatcagccttatgtggaagaactgtgataaaaagaggagctttttagtttttcagctt

SEQ ID NO: 11310 - DNA, 3559 bp, Homo sapiens
  source 1..3559: mol_type = unassigned DNA
cgtttagtacagaaatctcatgggagagagcatccatgcatttacaaattgttattgaattattttattgaatgatgacacccaaactgagctagaacataattctggctctgctagtacatcttctgtgtgatcttggacaagtcactctactttcctttcaattttcttttctcacagggagataatcataaaaacgactgtaaagtacagcacttcatagagtgctttttgtttaaagagctgacaataaatacgagtctcaaggtctaggaaagcctccctcacaacctgagctgcttgaggacaagggattttcttttgaatcagcagtaccttatttgtgtatctgtgatagagttcctggtacataagaaggtctcaataaatatgtgaatttatgaatattaggcagattgcaaccttgacaggccactgcctcttaaatctcctttctgtgatcttttaatatttaacatctaaaaggccgccgctacttgctttgggataagtatccccggtatgtactttaaaatgcccaagcctagagaaatgattcttgtcttaagggcaccatttcgctctcccaccgtaaagcgccccaggcttgggatctgggtcccaaggctacagggaagagtttggaacgggaagctcatcttccggccctctgattggccggctcgcactccactcacgcggcgcgcagctctgattggcctcggcggcacccctcgtcccgcgactactttgtgtgctggggcggcgcgctccggtcctcccgctcagctggcggtctgggctgctctggggcagcccttcggtccactgctctgcatcgcgggcgccgggaattttccgagtccgagcggcatgtagagcgcatgaagtacaggacaataaagcttcctacacatatcaccaggaggatctctttgaaagattcactgcaggactaccagagagaataatttgtctgaagcatcatgtgttgaaacaacagaagtctattcacctgtgcactaactagaaacagagttacaatgttttcaattctttgagctccaggactccagggaagtgagttgaaaatctgaaaatgcggccatggactggttcctggcgttggattatgctcattctttttgcctgggggaccttgctgttttatataggtggtcacttggtacgagataatgaccatcctgatcactctagccgagaactgtccaagattctggcaaagcttgaacgcttaaaacaacagaatgaagacttgaggcgaatggccgaatctctccggataccagaaggccctattgatcaggggccagctataggaagagtacgcgttttagaagagcagcttgttaaggccaaagaacagattgaaaattacaagaaacagaccagaaatggtctggggaaggatcatgaaatcctgaggaggaggattgaaaatggagctaaagagctctggtttttcctacagagtgaattgaagaaattaaagaacttagaaggaaatgaactccaaagacatgcagatgaatttcttttggatttaggacatcatgaaaggtctataatgacggatctatactacctcagtcagacagatggagcaggtgattggcgggaaaaagaggccaaagatctgacagaactggttcagcggagaataacatatcttcagaatcccaaggactgcagcaaagccaaaaagctggtgtgtaatatcaacaaaggctgtggctatggctgtcagctccatcatgtggtctactgcttcatgattgcatatggcacccagcgaacactcatcttggaatctcagaattggcgctatgctactggtggatgggagactgtatttaggcctgtaagtgagacatgcacagacagatctggcatctccactggacactggtcaggtgaagtgaaggacaaaaatgttcaagtggtcgagcttcccattgtagacagtcttcatccccgtcctccatatttacccttggctgtaccagaagacctcgcagatcgacttgtacgagtgcatggtgaccctgcagtgtggtgggtgtctcagtttgtcaaatacttgatccgcccacagccttggctagaaaaagaaatagaagaagccaccaagaagcttggcttcaaacatccagttattggagtccatgtcagacgcacagacaaagtgggaacagaagctgccttccatcccattgaagagtacatggtgcatgttgaagaacattttcagcttcttgcacgcagaatgcaagtggacaaaaaaagagtgtatttggccacagatgacccttctttattaaaggaggcaaaaacaaagtaccccaattatgaatttattagtgataactctatttcctggtcagctggactgcacaatcgatacacagaaaattcacttcgtggagtgatcctggatatacattttctctctcaggcagacttcctagtgtgtactttttcatcccaggtctgtcgagttgcttatgaaattatgcaaacactacatcctgatgcctctgcaaacttccattctttagatgacatctactattttgggggccagaatgcccacaatcaaattgccatttatgctcaccaaccccgaactgcagatgaaattcccatggaacctggagatatcattggtgtggctggaaatcattgggatggctattctaaaggtgtcaacaggaaattgggaaggacgggcctatatccctcctacaaagttcgagagaagatagaaacggtcaagtaccccacatatcctgaggctgagaaataaagctcagatggaagagataaacgaccaaactcagttcgaccaaactcagttcaaaccatttcagccaaactgtagatgaagagggctctgatctaacaaaataaggttatatgagtagatactctcagcaccaagagcagctgggaactgacataggcttcaattggtggaattcctctttaacaagggctgcaatgccctcatacccatgcacagtacaataatgtactcacatataacatgcaaacaggttgttttctactttgcccctttcagtatgtccccataagacaaacactgccatattgtgtaatttaagtgacacagacattttgtgtgagacttaaaacatggtgcctatatctgagagacctgtgtgaactattgagaagatcggaacagctccttactctgaggaagttgattcttatttgatggtggtattgtgaccactgaattcactccagtcaacagattcagaatgagaatggacgtttggtttttttttgtttttgtttttgttttttcctttataaggttgtctgtttttttttttttaaataattgcatcagttcattgacctcatcattaataagtgaagaatacatcagaaaataaaatattcactctccattagaaaattttgtaaaacaatgccatgaacaaattctttagtactcaatgtttctggacattctctttgataacaaaaaataaattttaaaaaggaa

SEQ ID NO: 11311 - DNA, 1368 bp, Homo sapiens
  source 1..1368: mol_type = unassigned DNA
ctgtatttaggcctgtaagtgagacatgcacagacagatctggcatctccactggacactggtcaggtaccccaattatgaatttattagtgataactctatttcctggtcagctggactgcacaatcgatacacagaaaattcacttcgtggagtgatcctggatatacattttctctctcaggcagacttcctagtgtgtactttttcatcccaggtctgtcgagttgcttatgaaattatgcaaacactacatcctgatgcctctgcaaacttccattctttagatgacatctactattttgggggccagaatgcccacaatcaaattgccatttatgctcaccaaccccgaactgcagatgaaattcccatggaacctggagatatcattggtgtggctggaaatcattgggatggctattctaaaggtgtcaacaggaaattgggaaggacgggcctatatccctcctacaaagttcgagagaagatagaaacggtcaagtaccccacatatcctgaggctgagaaataaagctcagatggaagagataaacgaccaaactcagttcgaccaaactcagttcaaaccatttcagccaaactgtagatgaagagggctctgatctaacaaaataaggttatatgagtagatactctcagcaccaagagcagctgggaactgacataggcttcaattggtggaattcctctttaacaagggctgcaatgccctcatacccatgcacagtacaataatgtactcacatataacatgcaaacaggttgttttctactttgcccctttcagtatgtccccataagacaaacactgccatattgtgtaatttaagtgacacagacattttgtgtgagacttaaaacatggtgcctatatctgagagacctgtgtgaactattgagaagatcggaacagctccttactctgaggaagttgattcttatttgatggtggtattgtgaccactgaattcactccagtcaacagattcagaatgagaatggacgtttggtttttttttgtttttgtttttgttttttcctttataaggttgtctgtttttttttttttaaataattgcatcagttcattgacctcatcattaataagtgaagaatacatcagaaaataaaatattcactctccattagaaaattttgtaaaacaatgccatgaacaaattctttagtactcaatgtttctggacattctctttgataacaaaaaataaattttaaaaaggaattttgtaaagtttctagaattttatatcattggatgatatgttgatcagccttatgtggaagaactgtgataaaaagaggagctttttagtttttcagctt

SEQ ID NO: 11312 - DNA, 727 bp, Homo sapiens
  source 1..727: mol_type = unassigned DNA
gcgctctgcctcagtcagtggcgccgaaggctccgttaagcggcggcggcggttcctgtttccgtttcttcctctccgttcggtcgggagtagcatcctccactcagccacccttcccactcccccatcgtggggcagctgcggctgagggctgtggctttggcagctgcgacggggagcggcggagaccgcctctgctcccgcctggggttgctgcttttgctcagaggacatccatgaccctaatggtctttttgttcaagataaagtgattttttgcctttgttgattaactggacaaattcagctccttatttgaccctgaaaatgttgcagtgagaatagcctttgcatgcatagtccttaaccctgaagaaaaggataaaagaaaataaaatcaaaacttagttgaaaatcaggaagtgcggacaagcttctgtcgagaaaatggagcatgtagagcgcatgaagtacaggacaataaagcttcctacacatatcaccaggaggatctctttgaaagattcactgcaggactaccagagagaataatttgtctgaagcatcatgtgttgaaacaacagaagtctattcacctgtgcactaactagaaacagagttacaatgttttcaattctttgagctccaggactccagggaagtgagttgaaaatctgaaaatgcggccatggactggttcctggcgttggattatgctcattctttt

SEQ ID NO: 11313 - DNA, 554 bp, Homo sapiens
  source 1..554: mol_type = unassigned DNA
agtggcgccgaaggctccgttaagcggcggcggcggttcctgtttccgtttcttcctctccgttcggtcgggagtagcatcctccactcagccacccttcccactcccccatcgtggggcagctgcggctgagggctgtggctttggcagctgcgacggggagcggcggagaccgcctctgctcccgcctgggcatgtagagcgcatgaagtacaggacaataaagcttcctacacatatcaccaggaggatctctttgaaagattcactgcaggactaccagagagaataatttgtctgaagcatcatgtgttgaaacaacagaagtctattcacctgtgcactaactagaaacagagttacaatgttttcaattctttgagctccaggactccagggaagtgagttgaaaatctgaaaatgcggccatggactggttcctggcgttggattatgctcattctttttgcctgggggaccttgctgttttatataggtggtcacttggtacgagataatgaccatcctgatcactctagccgagaactgtccaa

SEQ ID NO: 11314 - DNA, 632 bp, Homo sapiens
  source 1..632: mol_type = unassigned DNA
gatgatcctagtagaagtcaaatgagatcatttttgatagttggtttgcaggcttcggtgtatgcacccaacctttcaaagactgcctgtgcttttcagggagctcagttttgtgactgaaaggatcagctattctcttctacctttttaatgcactactggtttctagcagctgctgcttaacgctgttcattcttgagtttggtgaattgttttctgtgctccatgtgatttctttgtctttatgaggtacattttgactacagcatgtagagcgcatgaagtacaggacaataaagcttcctacacatatcaccaggaggatctctttgaaagattcactgcaggactaccagagagaataatttgtctgaagcatcatgtgttgaaacaacagaagtctattcacctgtgcactaactagaaacagagttacaatgttttcaattctttgagctccaggactccagggaagtgagttgaaaatctgaaaatgcggccatggactggttcctggcgttggattatgctcattctttttgcctgggggaccttgctgttttatataggtggtcacttggtacgagataatgaccatcctgatcactctagccgagaactgtccaagattc

SEQ ID NO: 11315 - DNA, 583 bp, Homo sapiens
  source 1..583: mol_type = unassigned DNA
agcccttcggtccactgctctgcatcgcgggcgccgggaattttccgagtccgagcgggttgctgcttttgctcagaggacatccatgaccctaatggtctttttgttcaagataaagtgattttttgcctttgttgattaactggacaaattcagattctattttgaccagcaataagttgaattatggggctagaagataaggactaaaaacaagaattggtgtccagaaagcatgtagagcgcatgaagtacaggacaataaagcttcctacacatatcaccaggaggatctctttgaaagattcactgcaggactaccagagagaataatttgtctgaagcatcatgtgttgaaacaacagaagtctattcacctgtgcactaactagaaacagagttacaatgttttcaattctttgagctccaggactccagggaagtgagttgaaaatctgaaaatgcggccatggactggttcctggcgttggattatgctcattctttttgcctgggggaccttgctgttttatataggtggtcacttggtacgagataatgaccatcctgatcactctagccg

SEQ ID NO: 11316 - DNA, 639 bp, Homo sapiens
  source 1..639: mol_type = unassigned DNA
gcgactactttgtgtgctggggcggcgcgctccggtcctcccgctcagctggcggtctgggctgctctggggcagcccttcggtccactgctctgcatcgcgggcgccgggaattttccgagtccgagcggagacagggtttctctgtgttgcccaggctggtctcgaactctgagctcaagcgacctgcccacctcggccacccaaaatgttgggattacaggggttgctgcttttgctcagaggacatccatgaccctaatggtctttttgttcaagataaagtgattttttgcctttgttgattaactggacaaattcagcatgtagagcgcatgaagtacaggacaataaagcttcctacacatatcaccaggaggatctctttgaaagattcactgcaggactaccagagagaataatttgtctgaagcatcatgtgttgaaacaacagaagtctattcacctgtgcactaactagaaacagagttacaatgttttcaattctttgagctccaggactccagggaagtgagttgaaaatctgaaaatgcggccatggactggttcctggcgttggattatgctcattctttttgcctgggggaccttgctgttttatataggtggtcacttggt

SEQ ID NO: 11317 - DNA, 2269 bp, Homo sapiens
  source 1..2269: mol_type = unassigned DNA
gtgtgctggggcggcgcgctccggtcctcccgctcagctggcggtctgggctgctctggggcagcccttcggtccactgctctgcatcgcgggcgccgggaattttccgagtccgagcgggttgctgcttttgctcagaggacatccatgaccctaatggtctttttgttcaagataaagtgattttttgcctttgttgattaactggacaaattcaggataccagaaggccctattgatcaggggccagctataggaagagtacgcgttttagaagagcagcttgttaaggccaaagaacagattgaaaattacaagaaacagaccagaaatggtctggggaaggatcatgaaatcctgaggaggaggattgaaaatggagctaaagagctctggtttttcctacagagtgaattgaagaaattaaagaacttagaaggaaatgaactccaaagacatgcagatgaatttcttttggatttaggacatcatgaaaggtctataatgacggatctatactacctcagtcagacagatggagcaggtgattggcgggaaaaagaggccaaagatctgacagaactggttcagcggagaataacatatcttcagaatcccaaggactgcagcaaagccaaaaagctggtgtgtaatatcaacaaaggctgtggctatggctgtcagctccatcatgtggtctactgcttcatgattgcatatggcacccagcgaacactcatcttggaatctcagaattggcgctatgctactggtggatgggagactgtatttaggcctgtaagtgagacatgcacagacagatctggcatctccactggacactggtcaggtgaagtgaaggacaaaaatgttcaagtggtcgagcttcccattgtagacagtcttcatccccgtcctccatatttacccttggctgtaccagaagacctcgcagatcgacttgtacgagtgcatggtgaccctgcagtgtggtgggtgtctcagtttgtcaaatacttgatccgcccacagccttggctagaaaaagaaatagaagaagccaccaagaagcttggcttcaaacatccagttattggagtccatgtcagacgcacagacaaagtgggaacagaagctgccttccatcccattgaagagtacatggtgcatgttgaagaacattttcagcttcttgcacgcagaatgcaagtggacaaaaaaagagtgtatttggccacagatgacccttctttattaaaggaggcaaaaacaaagtaccccaattatgaatttattagtgataactctatttcctggtcagctggactgcacaatcgatacacagaaaattcacttcgtggagtgatcctggatatacattttctctctcaggcagacttcctagtgtgtactttttcatcccaggtctgtcgagttgcttatgaaattatgcaaacactacatcctgatgcctctgcaaacttccattctttagatgacatctactattttgggggccagaatgcccacaatcaaattgccatttatgctcaccaaccccgaactgcagatgaaattcccatggaacctggagatatcattggtgtggctggaaatcattgggatggctattctaaaggtgtcaacaggaaattgggaaggacgggcctatatccctcctacaaagttcgagagaagatagaaacggtcaagtaccccacatatcctgaggctgagaaataaagctcagatggaagagataaacgaccaaactcagttcgaccaaactcagttcaaaccatttcagccaaactgtagatgaagagggctctgatctaacaaaataaggttatatgagtagatactctcagcaccaagagcagctgggaactgacataggcttcaattggtggaattcctctttaacaagggctgcaatgccctcatacccatgcacagtacaataatgtactcacatataacatgcaaacaggttgttttctactttgcccctttcagtatgtccccataagacaaacactgccatattgtgtaatttaagtgacacagacattttgtgtgagacttaaaacatggtgcctatatctgagagacctgtgtgaactattgagaagatcggaacagctccttactctgaggaagttgattcttatttgatggtggtattgtgaccactgaattcactccagtcaacagattcagaatgagaatggacgtttggtttttttttgtttttgtttttgttttt

SEQ ID NO: 11318 - DNA, 751 bp, Homo sapiens
  source 1..751: mol_type = unassigned DNA
gtcagtggcgccgaaggctccgttaagcggcggcggcggttcctgtttccgtttcttcctctccgttcggtcgggagtagcatcctccactcagccacccttcccactcccccatcgtggggcagctgcggctgagggctgtggctttggcagctgcgacggggagcggcggagaccgcctctgctcccgcctggggttgctgcttttgctcagaggacatccatgaccctaatggtctttttgttcaagataaagtgattttttgcctttgttgattaactggacaaattcagattctattttgaccagcaataagttgaattatggggctagaagataaggactaaaaacaagaattggtgtccagaaagcatgtagagcgcatgaagtacaggacaataaagcttcctacacatatcaccaggaggatctctttgaaagattcactgcaggactaccagagagaataatttgtctgaagcatcatgtgttgaaacaacagaagtctattcacctgtgcactaactagaaacagagttacaatgttttcaattctttgagctccaggactccagggaagtgagttgaaaatctgaaaatgcggccatggactggttcctggcgttggattatgctcattctttttgcctgggggaccttgctgttttatataggtggtcacttggtacgagataatgaccatcctgatcactctagccgagaactgtccaagattctggcaaagcttga

SEQ ID NO: 11319 - DNA, 2715 bp, Homo sapiens
  source 1..2715: mol_type = unassigned DNA
gcagcttcagcgaagccggagatgggcagagagcgcgcgcggcgcagcagctccagattcactgctctcccctgcagctccccgcgcccccgccgctgtcgctgcctcggtgtcccccagccccagtcgcgctcttaggacagcgccgccaccgccgcctggccctgcctgcctcctgcgccgcgcagccctcgcgagcgccccggatggcgctttacccctaggaccgatttagaatgtaataactcaaggatttgataatacagtgaagtagtataacaactgtctacgtgcttcccatgatatgttctctatattgaaaaattatgacatcaacatccaaaggaattcttcgcccatttttaattgtctgcattatcctgggctgtttcatggcatgtcttctcatttacatcaaacctaccaacagctggatcttcagtccaatggaatcagccagctctgtgctgaaaatgaaaaacttcttttccaccaaaactgattattttaatgaaactactattctggtgtgggtgtggccatttgggcagacctttgaccttacatcctgccaagcaatgttcaacatccaaggatgccatctcacaacggaccgttcactgtacaacaaatcccatgcagttctgatccatcaccgagacatcagttgggatctgacaaatttacctcagcaagctaggccacccttccagaaatggatttggatgaatttggaatcaccaactcacactccccaaaagagtggcattgagcacttgtttaacctgactctgacttaccgccgtgattcagatatccaagtgccttatggcttcttgacggtaagcacaaatcccttcgtgtttgaagtgccaagcaaagagaaattggtgtgctgggttgtgagtaactggaaccctgagcatgccagagtcaagtattacaatgagctaagcaaaagcattgaaatccatacctacgggcaagcatttggagaatatgtcaatgataaaaatttgattcctaccatatctacttgtaaattttatctttcctttgaaaattcaatccacaaggattacatcacggaaaagctatacaatgcttttctggctggctctgtacctgttgttctgggaccatctagggaaaactatgagaattatattccagcagattcattcattcatgtggaagattataactctcccagtgagctagcaaagtatctgaaggaagtcgacaaaaacaataagttataccttagttactttaactggaggaaggatttcactgtaaatcttccacgattttgggaatcacatgcatgtttggcttgcgatcatgtgaaaaggcatcaagaatataagtctgttggtaatttagagaaatggttttggaattaaaatttttcatcacttgcacacttgataaatattttgatgagatatcatccaagtattgaggataagaagagatgcaacatactacttttgtgtcacaatttatttttatcaccctctctagggtaacgtgtatattttggtggagatttttaaaagctcagcatgagcaatcattccattcggttttaaattatcctgtatatacctaattatgtgcactggagagtaatttattcttcattatcatttgtaaacattgttttttcacatttttgtagttgtccataatgtaagcttgtggtttgattattgtttccacactgatcagctgtttaatctatttgggaaatgaagatgcacatcttaaagtatgaaaaattttcactaagtattacaatgtctagttccaactttgcatactataacagaggaagaacatgttgcgattgaattctaacctctttgactccgaagatgaatgaagtgtataactgtctctatttgatctattttttttacctgtttatcacatttgtgaaggtgaaattattcatggagtgaataagaaagatatgaagcagaactgttctattcgggaagctattagacttctcatttattttcattaagctgatttgcagctacttattctcatggtcttaaattaaattattcaagtatttttaaatatccaatttgttgtgattttcagcacctgggaagtaatcccaataatactttagaaaatctaagacagttctttctgctactgatgacactcattgtcataataaaacaaataatttcctcaaataacaaagaaaaatgatacctataaatatatttataaatggtgtcatttatgaacaatgtttaattatgtatcaatttaagatttttttctgaagccctaatatttaaaatggtcttattttaccatatggatataagatttggctcataatgatgagccctatcatttgatttgagttctatcatttaagagagcctaaataaaattatcatcaaggtattaaatataagacgttaaatataataaagtggggatatatagaaaacacacagtgttagcacacagtaagatctcaatgcacatttgttggatgaataaataaatgcaattgaattcccagaaaaatgattgtttcaaggaagtgacagttctactttagaagtactaattggagatgacttttatatcccattttggtaattattcatacatagcacatatgaccatgatgttcagggctttatagaaccaaataaacctaccattacatgaaaa

SEQ ID NO: 11320 - DNA, 7364 bp, Homo sapiens
  source 1..7364: mol_type = unassigned DNA
gtaaagcggagcggctgcagcctgctgttgagtgagaaaacaaaattatcttcctttccaaatccaaaaagatgaaaacgactgagatactttcaaaagacaaccaagtgagcagcacagactaatgagtagaatcaataagaacgtggttttggcccttttaacgctgacaagttctgcatttctgctgtttcagttgtactactacaagcactatttatcaacaaagaatggagctggtttgtcaaaatccaaaggaagccgaattggatttgatagcacacagtggcgtgcagttaaaaaatttattatgttaacatccaaccaaaatgtaccagtgtttcttattgatcctttgatactggaattgattaataagaactttgaacaagtcaaaaatacttctcatggctctacttcacaatgcaagtttttctgtgttccaagagactttactgcatttgcactgcagtatcacctatggaagaatgaggaaggctggtttcggatagctgagaatatgggatttcagtgcctaaagattgagagtaaagatccccggctagacgggatagactcactctctggaactgaaatccccctgcactatatctgcaaactggccactcatgcgatccacttggtagtctttcatgagaggagtggcaactacctctggcacggccacttgagacttaaagaacacattgacaggaaatttgttcccttccgaaagttacagtttggtcgttatccaggagcttttgacaggccagagttacagcaagttactgttgatggactggaagttctcattccaaaggatccaatgcactttgtagaagaagtaccacactctaggtttattgagtgtaggtataaagaagctcgagcattctttcagcagtaccttgatgataacactgtggaagctgtggcctttcggaagagtgcaaaggaattactgcaactagcagcgaaaacattaaacaaattgggagtaccattctggctgagcagtggaacttgtctaggatggtatcgacaatgcaacattattccttatagcaaagatgttgacctaggaatttttatacaagattacaaatctgatattattttagcatttcaggatgcaggacttccgctcaaacacaaatttgggaaggtagaagacagcttggaactatccttccagggaaaagatgatgtaaaacttgatgtttttttcttctatgaagaaactgatcacatgtggaatggaggcactcaggccaaaacaggaaaaaaattcaaatacctgtttccgaagtttacactgtgctggactgagtttgtagacatgaaggtccatgtaccctgtgaaaccctcgaatacattgaagccaactatggtaagacctggaagattcctgtaaagacgtgggactggaagcgctctcctcccaatgtgcaacccaatggaatctggcctatttctgagtgggatgaggttatccagttatattgagatagtaggttgaaatgggagaatttctcttttggaaaaaaaggtagataactgtttaaaaaatacatgtctatttgtcaaacataagtgggaaccaaagaaaaaatgtgacaagtttgaagacacagaaagagtcatctgatgtaattctctcacttagtactgaggaattttcatgtgccacatacaatgctaggttacagtggagaagcctagatgaatgagacaaatacctacttcttttattcctccttttggtaaacaactcaattttcctttgagggaaccctcccccaccctttgaagagttcaagttctgtacaggtttttaaaacgtgaagtaatgtttgaactggaagatgagctcaccaggcaaagctaaggaaggatatactagttgaaaagaataacccactcctcttctgggcatttaagctggtatgttagtgctacttttaagattgtggagtctgagttaatattcaagtgatcagactttgagtgacatcaagaaaagatgatatcaggttcatttttcaactaatcttatgtggaattgaattagagaacaaggcattattcttttagggaaggtgagagcttatttgtatcagagcttattacttgtcaggataagtaaatttctgtacatgtactgttttcatatgtgaagtgagaagaaactttatgcttgtttaatgcttaaatttccatccattgtgagaatattttcactgacctctgatggcacttgttgacaaatcattcaagtgagaccatgttactagacatgatcttgaaagaggccatgatttcacaaaactcatttttattttattctcagacagtctgttaggtaaaaatatgagaaattcatgtacattttatattttctgaatttataatctgtgcactcccaattttaatgacactaaaatattaatagaattttttaaatatactctaatttttaaaacatactctttattatcttcatttatcaattacagcttcgtatctctaatttatggtctatataccaatttaaatggcatgtaaacctgcctgtttcttctcctcttctaatatatcagatctccaaaatggaagctaaatggtggacttgacaactattcaccctacctcagatcatagagtttgtaaagtttgtgtccctccccagtttttcagtctgttgaatgtcgatggggcaagaactcagacttctactttaccaagtaccacacactctggaatgctttagtttccttttcccctcaagatgtctgagtcagctaggatgctgtttaccccatctctctcttatatcacttgaatgatatattgtaagtgagaggtaaaggaaaatgtaggcacaataagcactgctatttttctctttgtctaggaaaggaagctgaatcttatatcttatctatgctatttaggactactttctggagcttggcagattttcctctgacaccagagaacaatagtagtctcaagaatggaaacctgaatgtctgagggaatgggctggtagactttttcgaaaacaaattagagaaagtaacttacaaccacccattccggatttgtaaagcaacatgaaaacctttgataaatgataaccaacagtcttctgtcctaatttgcattctcaatgcagaattattgggtctttcataaataacatgagtggtttctggagacatttaagattgtcagcaaacttgtcccaaaatggcacatcatcataatccattttctctttgctagaaaatcagcccatagagtgcattcccaaattctaaatagctgaccctaaattcatttttcatgcttaaaaataatagaacaaataataatactatttttgggcaaaatccaccctacttgatgaggaccatttgcttgtgctcagtatttagaaatgcatacactccacatttctccccatttccaattgggactcccattctttgccaggagatcttacccatcccttttcagattaatcttttatcctttcctgaagtacaaagtcttaagagtgtctgaaatccaagacatcttggcccaattgacacaggttctatattcttccctacatagaccactggctgctgaaatacttttcttgtcttctggtttcacaggcttcagctcatgggttccaccctaacttggggaaacaaaagccttctctagaatctgaaggccaggcttacctctgattctgattcatccatacttcatcttatgtattttaacagttgggttctgtggagtgtccagagaccttgggttaggtatatccatcttcagtacctcattggatcacttttctttcatcacttgagtattctagcagtcattctcctaatctgaccactttcaggtttagtttacctggcttacctggggaagttgacaacttgttggtagttaggcacccatgaatgtctccagagacatcctgagaggcaagattcctcttaattgataaccaggacaaccaggtagtcacccagtcctctctaagcagggagcacttgtccttctctcctctgctgcagctactgatatctggcccctggaataaaaccatagttcctaaaattgagcatccctaagagtagctgcttggtgggacagctgatttctttgattccctagctgcaaaacctgaaattgaccactaggtgacagaatgtttgccagtatccccacaaaacaagttaaaacttaagtgaaaatcattctgcttttgaatcttaaaagctagaaaaaccataatgtaatattctttttaaaccctcttattttataactaaataaataatcacagaaaagaatgatctgaacaagaacagctgaggctaaaacccaagactgccgtgactcctagtccaatgtctgtttcgcatcacaacacagtatctttaacagtgcttgagatgcttaacagagaaggcatccagtgcttcattgaggctaagtctcagggtgtttctgccgcttagtatctttttgttcagattgagaacctaaggcgacagagaggtcaaggggaagtattttctagttcagaattcagaattcttaggcaaccttcatacctttatctggaaaatgccttctctccagacaataagacagttcacatctggagacatcagcctttggtacctaattctctaagctcaagatgcatcccattgccactttaccattctatttcccaagggaaccatcagcaccaacctgctaaatgcctgtatttgaagtctctccccttcctgaagtgaccttttatgaggctctttccttcctaagggacctttccctggtagtagtggtctcattcacaaaaaagaataatagatgtaactggagtcactttgcagttttcaagattttttttttatctgcttggctggaaaggagactagagtatctagtttttagtatttaaactacttttaattatttatattgatactctctgataaatgcaggtagttaagaatagattgtactcattcctttttgagtttgtgacctcaaaccattgtttttattcttacacgactacagtacttcaaatggcacatagataggcaggatattacataggtaagcaggaatttatacattgggtaccagagctaaatctggaaaacacatttggaatgagcttccacacttcagtctaaaatctcacccaaacttatggctacatatttttctaagtttcccccctagtttcactttctggaaagtgaacagttttttaaatcctaaatgttataaatccttaggagaaatattccctcaaaacctagtcaagaaagtgccacattcccaccttctaacaggtaattattagttgtaatagctttaatgcatggaaaaacttcagttactgaccagtcaagagaatttctcaagaaaaatcccagcaacgttccctctttcctccttgtcttccactatcattaagacctgggctagatcacctctaacatctcactcagggaaggcaatgtgttgccataaaaagaccacaagcttttgagttaggcctgaatttgaatttcagcttaatcatgtgggatttatggtgggggccctttcagtctcaatttccacattagtgaactggggaaatgatacatacttctaagggtttttagggggattaaatgaagtatacagttcttagcctcaggcctaggattaagtaagtactcaagaaatgtgcaattttctagttccatgtttcttttctaatcttcaaatggaattatagaaaccatgggtcagaacatattcctttactcaaaagattgcatgactgaatttgcttaagaaaaaaaaaattgtatcaagtcattaatacaattatacattaattatattacattaatacaatatatggtttgtgaattcagagacattaccagtttgcctccttctctcaatagaacttgtattttcattttcttggttaagcagttgtctcctaatattatcccatatgctacctagtttgctggtcccaagcagtttactgtacttcactagatttggtacctgctctcccctggacttctttttcaatattctagcctttcctagatgtaaatctttacctccttgttagtgaaattagatataagccatgatttggagagggaagaaatctggaatacttaatttcatttaattatctatgctgatgaatgcctgtatcattgttaataaaggagaattgaaaatactcatttctactttctgccctcaaatttctgtttctatctcaactaggcaagaatcagcagggtgcatgatgccattttaagctgcttcacatcagactgaaatcctaattacagttcataagtgaaacagactaattcaatggcaataccttttgtataggtcctgtgcttaaaggaggcaagtataaattttctaataagaaatccctgcttcttttgggtgcagtggctcacacctgtaataccagcagtttgagaagctaaggcaggtggatcacttgaggccaggagttcgagaccagcctggccaacatagtgaaaccccgtctcttctaaaaatacaaaaaaattagctgggcatggtggtgcacgcctatagtcccagctacacaggaggctgaggcaggagaatcacttgaacccgggaagcagagtctgcagtgagccaagatcgcggcattgcacttcagcctgggcgatagagcaagactctgtctcagaaaaaaaaaaaaaggaaagaaagaaatctctgcttccgtactatcaaaacttctaccctagaataccccctggcaccttctaacccaacctaatacagagattttgtagggacccattaacaagctcctatataattataagcagctctcacagtagggttgaaagagaatataaggaaaattagaagtactgtatttttgctattggaaatgaaatattgtttcatgcacctttgaaaaaaataacaggattttacagccttctgatgattcattcaaagcatggggaatagttcatatgtttgttaaatgaaaatcttatgtagctatttgtgtgtccctcccacttcataactacaaaaacatatatatgaatttctaaacaaagtgatattttaaagatgaattgattcaatgtgtacttaccagtttactgtgtggttttatcttcaggtacagatagtttgtggtactacttgaaaatacctttaatattattttcatcagaatttgtaatatataatccagtttgggatgatgaataaaatttttctaatctcttga

SEQ ID NO: 11321 - DNA, 1602 bp, Homo sapiens
  source 1..1602: mol_type = unassigned DNA
tctttaaaaatatcttttttgttcacagaaaacaaaattatcttcctttccaaatccaaaaagatgaaaacgactgagatactttcaaaagacaaccaagtgagcagcacagactaatgagtagaatcaataagaacgtggttttggcccttttaacgctgacaagttctgcatttctgctgtttcagttgtactactacaagcactatttatcaacaaagaatggagctggtttgtcaaaatccaaaggaagccgaattggatttgatagcacacagtggcgtgcagttaaaaaatttattatgttaacatccaaccaaaatgtaccagtgtttcttattgatcctttgatactggaattgattaataagaactttgaacaagtcaaaaatacttctcatggctctacttcacaatgcaagtttttctgtgttccaagagactttactgcatttgcactgcagtatcacctatggaagaatgaggaaggctggtttcggatagctgagaatatgggatttcagtgcctaaagattgagagtaaagatccccggctagacgggatagactcactctctggaactgaaatccccctgcactatatctgcaaactggccactcatgcgatccacttggtagtctttcatgagaggagtggcaactacctctggcacggccacttgagacttaaagaacacattgacaggaaatttgttcccttccgaaagttacagtttggtcgttatccaggagcttttgacaggccagagttacagcaagttactgttgatggactggaagttctcattccaaaggatccaatgcactttgtagaagaagtaccacactctaggtttattgagtgtaggtataaagaagctcgagcattctttcagcagtaccttgatgataacactgtggaagctgtggcctttcggaagagtgcaaaggaattactgcaactagcagcgaaaacattaaacaaattgggagtaccattctggctgagcagtggaacttgtctaggatggtatcgacaatgcaacattattccttatagcaaagatgttgacctaggaatttttatacaagattacaaatctgatattattttagcatttcaggatgcaggacttccgctcaaacacaaatttgggaaggtagaagacagcttggaactatccttccagggaaaagatgatgtaaaacttgatgtttttttcttctatgaagaaactgatcacatgtggaatggaggcactcaggccaaaacaggaaaaaaattcaaatacctgtttccgaagtttacactgtgctggactgagtttgtagacatgaaggtccatgtaccctgtgaaaccctcgaatacattgaagccaactatggcaagaatcagcagggtgcatgatgccattttaagctgcttcacatcagactgaaatcctaattacagttcataagtgaaacagactaattcaatggcaataccttttgtataggtcctgtgcttaaaggaggcaagtataaattttctaataagaaatccctgcttcttttgggtgcagtggctcacacctgtaataccagcagtttgagaagct

SEQ ID NO: 11322 - DNA, 786 bp, Homo sapiens
  source 1..786: mol_type = unassigned DNA
cactatttatcaacaaagaatggagctggtttgtcaaaatccaaaggaagccgaattggatttgatagcacacagtggaaatgatccttgaggtgggagaaaataatggatttttttcaaagtctttacttccacggtacgcaagcaaaaagttgaagagcagcttaccacattcacgtgcagttaaaaaatttattatgttaacatccaaccaaaatgtaccagtgtttcttattgatcctttgatactggaattgattaataagaactttgaacaagtcaaaaatacttctcatggctctacttcacaatgcaagtttttctgtgttccaagagactttactgcatttgcactgcagtatcacctatggaagaatgaggaaggctggtttcggatagctgagaatatgggatttcagtgcctaaagattgagagtaaagatccccggctagacgggatagactcactctctggaactgaaatccccctgcactatatctgcaaactggccactcatgcgatccacttggtagtctttcatgagaggagtggcaactacctctggcacggccacttgagacttaaagaacacattgacaggaaatttgttcccttccgaaagttacagtttggtcgttatccaggagcttttgacaggccagagttacagcaagttactgttgatggactggaagttctcattccaaaggatccaatgcactttgtagaagaagtaccacactctaggtttattgagtgtaggtataaagaagctcgagcattct

SEQ ID NO: 11323 - DNA, 764 bp, Homo sapiens
  source 1..764: mol_type = unassigned DNA
aaagcggagcggctgcagcctgctgttgagtgagattgaaaggaaacacactgaatgaggaaaaactaacatacggtcatcaacatccttgtataacctagtttttaaaaaaattggatttcaaagaaaacaaaattatcttcctttccaaatccaaaaagatgaaaacgactgagatactttcaaaagacaaccaagtgagcagcacagactaatgagtagaatcaataagaacgtggttttggcccttttaacgctgacaagttctgcatttctgctgtttcagttgtactactacaagcactatttatcaacaaagaatggagctggtttgtcaaaatccaaaggaagccgaattggatttgatagcacacagtggcgtgcagttaaaaaatttattatgttaacatccaaccaaaatgtaccagtgtttcttattgatcctttgatactggaattgattaataagaactttgaacaagtcaaaaatacttctcatggctctacttcacaatgcaagtttttctgtgttccaagagactttactgcatttgcactgcagtatcacctatggaagaatgaggaaggctggtttcggatagctgagaatatgggatttcagtgcctaaagattgagagtaaagatccccggctagacgggatagactcactctctggaactgaaatccccctgcactatatctgcaaactggccactcatgcgatccacttggtagtctttcatgagaggagtggcaactacc

SEQ ID NO: 11324 - DNA, 606 bp, Homo sapiens
  source 1..606: mol_type = unassigned DNA
gatggtatcgacaatgcaacattattccttatagcaaagatgttgacctaggaatttttatacaagattacaaatctgatattattttagcatttcaggatgcaggacttccgctcaaacacaaatttgggaaggtagaagacagcttggaactatccttccagggaaaagatgatgtaaaacttgatgtttttttcttctatgaagaaactgatcacatgtggaatggaggcactcaggccaaaacaggaaaaaaattcaaatacctgtttccgaagtttacactgtgctggactgagtttgtagacatgaaggtccatgtaccctgtgaaaccctcgaatacattgaagccaactatggaaaggaagctgaatcttatatcttatctatgctatttaggactactttctggagcttggcagattttcctctgacaccagagaacaatagtagtctcaagaatggaaacctgaatgtctgagggaatgggctggtagactttttcgaaaacaaattagagaaagtaacttacaaccacccattccggatttgtaaagcaacatgaaaacctttgataaatgataaccaacagtcttctgtcctaa

SEQ ID NO: 11325 - DNA, 1152 bp, Homo sapiens
  source 1..1152: mol_type = unassigned DNA
aaagcggagcggctgcagcctgctgttgagtgagaaaacaaaattatcttcctttccaaatccaaaaagatgaaaacgactgagatactttcaaaagacaaccaagtgagcagcacagactaatgagtagaatcaataagaacgtggttttggcccttttaacgctgacaagttctgcatttctgctgtttcagttgtactactacaagcactatttatcaacaaagaatggagctggtttgtcaaaatccaaaggaagccgaattggatttgatagcacacagtggcgtgcagttaaaaaatttattatgttaacatccaaccaaaatgtaccagtgtttcttattgatcctttgatactggaattgattaataagaactttgaacaagtcaaaaatacttctcatggctctacttcacaatgcaagtttttctgtgttccaagagactttactgcatttgcactgcagtatcacctatggaagaatgaggaaggctggtttcggatagctgagaatatgggatttcagtgcctaaagattgagagtaaagatccccggctagacgggatagactcactctctggaactgaaatccccctgcactatatctgcaaactggccactcatgcgatccacttggtagtctttcatgagaggagtggcaactacctctggcacggccacttgagacttaaagaacacattgacaggaaatttgttcccttccgaaagttacagtttggtcgttatccaggagcttttgacaggccagagttacagcaagttactgttgatggactggaagttctcattccaaaggatccaatgcactttgtagaagaagtaccacactctaggtttattgagtgtaggtataaagaagctcgagcattctttcagatacctgtttccgaagtttacactgtgctggactgagtttgtagacatgaaggtccatgtaccctgtgaaaccctcgaatacattgaagccaactatggtaagacctggaagattcctgtaaagacgtgggactggaagcgctctcctcccaatgtgcaacccaatggaatctggcctatttctgagtgggatgaggttatccagttatattgagatagtaggttgaaatgggagaatttctcttttgga

SEQ ID NO: 11326 - DNA, 3422 bp, Homo sapiens
  source 1..3422: mol_type = unassigned DNA
gtcccggcggccattgctccaagatggcggcggcggcggcagcgggagcgcagctcagctgggctggaactgccctcctggaactcccccagcctacaacctaggaggtgcagggactgaggctcaggccaaatcgcaactcagacccagtgaacccaaggcctgaagagaatttggattcatttaccttgttttgtggggactggagagacaagtaaactctcagagtaactgtcccctctgactaccatttctaaggatgccccggaggcccagctagccccagacttcggccccatgcggctcacccgctgccaggctgccctggcggccgccatcaccctcaaccttctggtcctcttctatgtctcgtggctgcagcaccagcctaggaattcccgggcccgggggccccgtcgtgcctctgctgccggcccccgtgtcaccgtcctggtgcgggagttcgaggcatttgacaacgcggtgcccgagctggtagactccttcctgcagcaagacccagcccagcccgtggtggtggcagccgacacgctcccctacccgcccctggccctgccccgcatccccaacgtgcgtctggcgctgctccagcccgccctggaccggccagccgcagcctcgcgcccggagacctacgtggccaccgagtttgtggccctagtacctgatggggcgcgggctgaggcacctggcctgctggagcgcatggtggaggcgctccgcgcaggaagcgcacgtctggtggccgccccggttgccacggccaaccctgccaggtgcctggccctgaacgtcagcctgcgagagtggaccgcccgctatggcgcagcccccgccgcgccccgctgcgacgccctggacggagatgctgtggtgctcctgcgcgcccgcgacctcttcaacctctcggcgcccctggcccggccggtgggcaccagcctctttctgcagaccgcccttcgcggctgggcggtgcagctgctggacttgaccttcgccgcggcgcgccagcccccgctggccacggcccacgcgcgctggaaggctgagcgcgagggacgcgctcggcgggcggcgctgctccgcgcgctgggcatccgcctagtgagctgggaaggcgggcggctggagtggttcggctgcaacaaggagaccacgcgctgcttcggaaccgtggtgggcgacacgcccgcctacctctacgaggagcgctggacgcccccctgctgcctgcgcgcgctgcgcgagaccgcccgctatgtggtgggcgtgctggaggctgcgggcgtgcgctactggctcgagggcggctcactgctgggggccgcccgccacggggacatcatcccatgggactacgacgtggacctgggcatctacttggaggacgtgggcaactgcgagcagctgcggggggcagaggccggctcggtggtggatgagcgcggcttcgtatgggagaaggcggtcgagggcgactttttccgcgtgcagtacagcgaaagcaaccacttgcacgtggacctgtggcccttctacccccgcaatggcgtcatgaccaaggacacgtggctggaccaccggcaggatgtggagtttcccgagcacttcctgcagccgctggtgcccctgccctttgccggcttcgtggcgcaggcgcctaacaactaccgccgcttcctggagctcaagttcgggcccggggtcatcgagaacccccagtaccccaacccggcactgctgagtctgacgggaagcggctgaagccctgataacctcgcctttgtttttcgggggtctgtctggatgtggagaagctctgtgtgagcggtgaggggtggagggatgtcgcggagaggggaagggggaaactgaccaagaaagaaattctaaggagagcatgagagaaggctggcattggcaggaggagagcaccaggacgaggatgggaagcgacctccagatttatcaaatggtcatgcccactgggagccgtggatatgcgtggggacatcctgggtcatctcagtcatggagggagacggggatgtcacgccgtcccgcagggcccagcacagccccagacccgaaaaaagtgttctgcccaagattccgagagccctgcgctctagggcaggggcagagttttggaaacagtgcaggctctggagccagactggcgagattcaaatcctggctctatcgcttcggagccaggtgggcctgggggggcgtcgcagtctctctgtgcctcagttgcttccaggatgcgggacccttggctgcaggggttgcttccgccactagagggcgcgccggtcccgctcctggtggcccactgtggctgcccgggcgacagtacgcccagggcctgtgttccatagccatctactctcttgagcctttggacttctctccaagcccctgtgggaggcggacagcagtgaccacctccccttcttttggactgcgacctccttccctcctgggagagccctgtgacctgcatgctactcttaactgttctattcaagactgaatagaagtatttcagtcttgcagaggaggaaatgctcagagctccgaggtgcggctgtggtcgagaaccgggtgctgggccgggcgcgggggctcacgcctgtaatcccagcactttgggaggccgaggtgggaggatcgcttgagcccaggagtctgagaccagcctcggcaacatgccaagaccccgtctctatttttaaaaaagaaaaagaaccgacttctgaatcgcagctccactcatgactaatacctcattatttcagctgtctgcacctaattccccacttgcacggcagtgtagacaataaccatagctcacactcactgagcacctactgggtaccaggcaccattctcagtgtttcacctggatcaactaatgcgtccctcacctcagccctctgaagtgacagctgctattattttcattacacagatgaaaaagctgaggccagaatcgtgaagtcacttgctcaaggtcaggcagcttaggaaggggcagatcgggggcttgaacccaggtggtcaggctctggagcccacaattgtcttacccactatgcccctctctagtcatggtccccaagaggggcttggagacccacttagcaggtgaaagcaatggcagccttccttatttgattatgcacctaagaataaatggtatttgggcatgtattcccaatatgtgtatatttatttataaatatatacagatactattatctgtatgttagtaataaagcttaaattattccattttaaaattatgaatatgaatagggttttttttatgtttcttgcctcatcccaatgacttttgcacacccaggtgtgagcacccagcattcaagaccacg

SEQ ID NO: 11327 - DNA, 3474 bp, Homo sapiens
  source 1..3474: mol_type = unassigned DNA
gtcccggcggccattgctccaagatggcggcggcggcggcagcgggagcgcagctcagctgggctggaactgccctcctggaactcccccagcctacaacctaggaggtgcagggactgaggctcaggccaaatcgcaactcagacccagtgaacccaaggcctgaagagaatttggattcatttaccttgttttgtggggactggagagacaagtaaactctcagagtaactgtcccctctgactaccatttctaaggcaagccccctgtttctactcttgcgccccctgctggtttcctgccctgtctgatgccccggaggcccagctagccccagacttcggccccatgcggctcacccgctgccaggctgccctggcggccgccatcaccctcaaccttctggtcctcttctatgtctcgtggctgcagcaccagcctaggaattcccgggcccgggggccccgtcgtgcctctgctgccggcccccgtgtcaccgtcctggtgcgggagttcgaggcatttgacaacgcggtgcccgagctggtagactccttcctgcagcaagacccagcccagcccgtggtggtggcagccgacacgctcccctacccgcccctggccctgccccgcatccccaacgtgcgtctggcgctgctccagcccgccctggaccggccagccgcagcctcgcgcccggagacctacgtggccaccgagtttgtggccctagtacctgatggggcgcgggctgaggcacctggcctgctggagcgcatggtggaggcgctccgcgcaggaagcgcacgtctggtggccgccccggttgccacggccaaccctgccaggtgcctggccctgaacgtcagcctgcgagagtggaccgcccgctatggcgcagcccccgccgcgccccgctgcgacgccctggacggagatgctgtggtgctcctgcgcgcccgcgacctcttcaacctctcggcgcccctggcccggccggtgggcaccagcctctttctgcagaccgcccttcgcggctgggcggtgcagctgctggacttgaccttcgccgcggcgcgccagcccccgctggccacggcccacgcgcgctggaaggctgagcgcgagggacgcgctcggcgggcggcgctgctccgcgcgctgggcatccgcctagtgagctgggaaggcgggcggctggagtggttcggctgcaacaaggagaccacgcgctgcttcggaaccgtggtgggcgacacgcccgcctacctctacgaggagcgctggacgcccccctgctgcctgcgcgcgctgcgcgagaccgcccgctatgtggtgggcgtgctggaggctgcgggcgtgcgctactggctcgagggcggctcactgctgggggccgcccgccacggggacatcatcccatgggactacgacgtggacctgggcatctacttggaggacgtgggcaactgcgagcagctgcggggggcagaggccggctcggtggtggatgagcgcggcttcgtatgggagaaggcggtcgagggcgactttttccgcgtgcagtacagcgaaagcaaccacttgcacgtggacctgtggcccttctacccccgcaatggcgtcatgaccaaggacacgtggctggaccaccggcaggatgtggagtttcccgagcacttcctgcagccgctggtgcccctgccctttgccggcttcgtggcgcaggcgcctaacaactaccgccgcttcctggagctcaagttcgggcccggggtcatcgagaacccccagtaccccaacccggcactgctgagtctgacgggaagcggctgaagccctgataacctcgcctttgtttttcgggggtctgtctggatgtggagaagctctgtgtgagcggtgaggggtggagggatgtcgcggagaggggaagggggaaactgaccaagaaagaaattctaaggagagcatgagagaaggctggcattggcaggaggagagcaccaggacgaggatgggaagcgacctccagatttatcaaatggtcatgcccactgggagccgtggatatgcgtggggacatcctgggtcatctcagtcatggagggagacggggatgtcacgccgtcccgcagggcccagcacagccccagacccgaaaaaagtgttctgcccaagattccgagagccctgcgctctagggcaggggcagagttttggaaacagtgcaggctctggagccagactggcgagattcaaatcctggctctatcgcttcggagccaggtgggcctgggggggcgtcgcagtctctctgtgcctcagttgcttccaggatgcgggacccttggctgcaggggttgcttccgccactagagggcgcgccggtcccgctcctggtggcccactgtggctgcccgggcgacagtacgcccagggcctgtgttccatagccatctactctcttgagcctttggacttctctccaagcccctgtgggaggcggacagcagtgaccacctccccttcttttggactgcgacctccttccctcctgggagagccctgtgacctgcatgctactcttaactgttctattcaagactgaatagaagtatttcagtcttgcagaggaggaaatgctcagagctccgaggtgcggctgtggtcgagaaccgggtgctgggccgggcgcgggggctcacgcctgtaatcccagcactttgggaggccgaggtgggaggatcgcttgagcccaggagtctgagaccagcctcggcaacatgccaagaccccgtctctatttttaaaaaagaaaaagaaccgacttctgaatcgcagctccactcatgactaatacctcattatttcagctgtctgcacctaattccccacttgcacggcagtgtagacaataaccatagctcacactcactgagcacctactgggtaccaggcaccattctcagtgtttcacctggatcaactaatgcgtccctcacctcagccctctgaagtgacagctgctattattttcattacacagatgaaaaagctgaggccagaatcgtgaagtcacttgctcaaggtcaggcagcttaggaaggggcagatcgggggcttgaacccaggtggtcaggctctggagcccacaattgtcttacccactatgcccctctctagtcatggtccccaagaggggcttggagacccacttagcaggtgaaagcaatggcagccttccttatttgattatgcacctaagaataaatggtatttgggcatgtattcccaatatgtgtatatttatttataaatatatacagatactattatctgtatgttagtaataaagcttaaattattccattttaaaattatgaatatgaatagggttttttttatgtttcttgcctcatcccaatgacttttgcacacccaggtgtgagcacccagcattcaagaccacg

SEQ ID NO: 11328 - DNA, 4244 bp, Homo sapiens
  source 1..4244: mol_type = unassigned DNA
agaactggaagggccccgccctgtgaagggataggagcctgactgttgcagctgcagtgagtggcggggaagcagcagcggccaggatgaatcccaggtgctctggagctggatggtgaaggtcggcactcttcaccctcccgagccctgcccgtctcggccccatgcccccaccagtcagccccgggccacaggcagtgagcaggcacctgggagccgaggccctgtgaccaggccaaggagacgggcgctccagggtcccagccacctgtcccccccatggagctgaggccctggttgctatgggtggtagcagcaacaggaaccttggtcctgctagcagctgatgctcagggccagaaggtcttcaccaacacgtgggctgtgcgcatccctggaggcccagcggtggccaacagtgtggcacggaagcatgggttcctcaacctgggccagatcttcggggactattaccacttctggcatcgaggagtgacgaagcggtccctgtcgcctcaccgcccgcggcacagccggctgcagagggagcctcaagtacagtggctggaacagcaggtggcaaagcgacggactaaacgggacgtgtaccaggagcccacagaccccaagtttcctcagcagtggtacctgtctggtgtcactcagcgggacctgaatgtgaaggcggcctgggcgcagggctacacagggcacggcattgtggtctccattctggacgatggcatcgagaagaaccacccggacttggcaggcaattatgatcctggggccagttttgatgtcaatgaccaggaccctgacccccagcctcggtacacacagatgaatgacaacaggcacggcacacggtgtgcgggggaagtggctgcggtggccaacaacggtgtctgtggtgtaggtgtggcctacaacgcccgcattggaggggtgcgcatgctggatggcgaggtgacagatgcagtggaggcacgctcgctgggcctgaaccccaaccacatccacatctacagtgccagctggggccccgaggatgacggcaagacagtggatgggccagcccgcctcgccgaggaggccttcttccgtggggttagccagggccgaggggggctgggctccatctttgtctgggcctcggggaacgggggccgggaacatgacagctgcaactgcgacggctacaccaacagtatctacacgctgtccatcagcagcgccacgcagtttggcaacgtgccgtggtacagcgaggcctgctcgtccacactggccacgacctacagcagtggcaaccagaatgagaagcagatcgtgacgactgacttgcggcagaagtgcacggagtctcacacgggcacctcagcctctgcccccttagcagccggcatcattgctctcaccctggaggccaataagaacctcacatggcgggacatgcaacacctggtggtacagacctcgaagccagcccacctcaatgccaacgactgggccaccaatggtgtgggccggaaagtgagccactcatatggctacgggcttttggacgcaggcgccatggtggccctggcccagaattggaccacagtggccccccagcggaagtgcatcatcgacatcctcaccgagcccaaagacatcgggaaacggctcgaggtgcggaagaccgtgaccgcgtgcctgggcgagcccaaccacatcactcggctggagcacgctcaggcgcggctcaccctgtcctataatcgccgtggcgacctggccatccacctggtcagccccatgggcacccgctccaccctgctggcagccaggccacatgactactccgcagatgggtttaatgactgggccttcatgacaactcattcctgggatgaggatccctctggcgagtgggtcctagagattgaaaacaccagcgaagccaacaactatgggacgctgaccaagttcaccctcgtactctatggcaccgcccctgaggggctgcccgtacctccagaaagcagtggctgcaagaccctcacgtccagtcaggcctgtgtggtgtgcgaggaaggcttctccctgcaccagaagagctgtgtccagcactgccctccagggttcgccccccaagtcctcgatacgcactatagcaccgagaatgacgtggagaccatccgggccagcgtctgcgccccctgccacgcctcatgtgccacatgccaggggccggccctgacagactgcctcagctgccccagccacgcctccttggaccctgtggagcagacttgctcccggcaaagccagagcagccgagagtccccgccacagcagcagccacctcggctgcccccggaggtggaggcggggcaacggctgcgggcagggctgctgccctcacacctgcctgaggtggtggccggcctcagctgcgccttcatcgtgctggtcttcgtcactgtcttcctggtcctgcagctgcgctctggctttagttttcggggggtgaaggtgtacaccatggaccgtggcctcatctcctacaaggggctgccccctgaagcctggcaggaggagtgcccgtctgactcagaagaggacgagggccggggcgagaggaccgcctttatcaaagaccagagcgccctctgatgagcccactgcccaccccctcaagccaatcccctccttgggcactttttaattcaccaaagtatttttttatcttgggactgggtttggaccccagctgggaggcaagaggggtggagactgcttcccatcctaccctcgggcccacctggccacctgaggtgggcccaggaccagctggggcgtggggagggccgtaccccaccctcagcaccccttccatgtggagaaaggagtgaaacctttagggcagcttgccccggccccggccccagccagagttcctgcggagtgaagaggggcagcccttgcttgttgggattcctgacccaggccgcagctcttgcccttccctgtccctctaaagcaataatggtcccatccaggcagtcgggggctggcctaggagatatctgagggaggaggccacctctccaagggcttctgcaccctccaccctgtcccccagctctggtgagtcttggcggcagcagccatcataggaagggaccaaggcaaggcaggtgcctccaggtgtgcacgtggcatgtggcctgtggcctgtgtcccatgacccacccctgtgctccgtgcctccaccaccactggccaccaggctggcgcagccaaggccgaagctctggctgaaccctgtgctggtgtcctgaccaccctcccctctcttgcacccgcctctcccgtcagggcccaagtccctgttttctgagcccgggctgcctgggctgttggcactcacagacctggagcccctgggtgggtggtggggaggggcgctggcccagccggcctctctggcctcccacccgatgctgctttcccctgtggggatctcaggggctgtttgaggatatattttcactttgtgattatttcactttagatgctgatgatttgtttttgtatttttaatgggggtagcagctggactacccacgttctcacacccaccgtccgccctgctcctccctggctgccctggccctgaggtgtgggggctgcagcatgttgctgaggagtgaggaatagttgagccccaagtcctgaagaggcgggccagccaggcgggctcaaggaaagggggtcccagtgggaggggcaggctgacatctgtgtttcaagtggggctcgccatgccgggggttcataggtcactggctctccaagtgccagaggtgggcaggtggtggcactgagcccccccaacactgtgccctggtggagaaagcactgacctgtcatgcccccctcaaacctcctcttctgacgtgccttttgcacccctcccattaggacaatcagtcccctcccatctgggagtccccttttcttttctaccctagccattcctggtacccagccatctgcccaggggtgccccctcctctcccatccccctgccctcgtggccagcccggctggttttgtaagatgctgggttggtgcacagtgatttttttcttgtaatttaaacaggcccagcattgctggttctatttaatggacatgagataatgttagaggttttaaagtgattaaacgtgcagactatgcaaaccagg

SEQ ID NO: 11329 - DNA, 224 bp, Homo sapiens
  source 1..224: mol_type = unassigned DNA
aagccagcccacctcaatgccaacgactgggccaccaatggtgtgggccggaaagtgagccactcatatggctacgggctttggacgcaggcgccatggtggccctggcccagaattggaccacagtggccccccagcggaagtgcatcatcgacatcctcaccgagcccaaagacatcgggaaacggctcgaggtgcggaagaccgtgaccgcgtgcctgggc

SEQ ID NO: 11330 - DNA, 587 bp, Homo sapiens
  source 1..587: mol_type = unassigned DNA
aaacagcagtcggtcctggggtgaggcgcaatttgagtggcccagagtggctctctgtgtcaggaggttctggtgctggagaaaagggctttgcccaagaacacagccaggaagagcacccacagctctctctggccacagcctggaacagagtcccatgtgaaacaagaccatgagaaatacagcaagcctccaggtttgagacaaactgggactagaggggtcggcactcttcaccctcccgagccctgcccgtctcggccccatgcccccaccagtcagccccgggccacaggcagtgagcaggcacctgggagccgaggccctgtgaccaggccaaggagacgggcgctccagggtcccagccacctgtcccccccatggagctgaggccctggttgctatgggtggtagcagcaacaggaaccttggtcctgctagcagctgatgctcagggccagaaggtcttcaccaacacgtgggctgtgcgcatccctggaggcccagcggtggccaacagtgtggcacggaagcatgggttcctcaacctgggccagatcttcggggactattaccacttctggcat

SEQ ID NO: 11331 - DNA, 2040 bp, Homo sapiens
  source 1..2040: mol_type = unassigned DNA
gcaggaggcggggctgctcagtcctccaggcgtcggtactcagcggtgttggaacttcgttgcttgcttgcctgtgcgcgcgtgcgcggacatggcctcaaacgattatacccaacaagcaacccaaagctatggggcctaccccacccagcccgggcagggctattcccagcagagcagtcagccctacggacagcagagttacagtggttatagccagtccacggacacttcaggctatggccagagcagctattcttcttatggccagagccagaacacaggctatggaactcagtcaactccccagggatatggctcgactggcggctatggcagtagccagagctcccaatcgtcttacgggcagcagtcctcctaccctggctatggccagcagccagctcccagcagcacctcgggaagttacggtagcagttctcagagcagcagctatgggcagccccagagtgggagctacagccagcagcctagctatggtggacagcagcaaagctatggacagcagcaaagctataatccccctcagggctatggacagcagaaccagtacaacagcagcagtggtggtggaggtggaggtggaggtggaggtaactatggccaagatcaatcctccatgagtagtggtggtggcagtggtggcggttatggcaatcaagaccagagtggtggaggtggcagcggtggctatggacagcaggaccgtggaggccgcggcaggggtggcagtggtggcggcggcggcggcggcggtggtggttacaaccgcagcagtggtggctatgaacccagaggtcgtggaggtggccgtggaggcagaggtggcatgggcggaagtgaccgtggtggcttcaataaatttggtggccctcgggaccaaggatcacgtcatgactccgaacaggataattcagacaacaacaccatctttgtgcaaggcctgggtgagaatgttacaattgagtctgtggctgattacttcaagcagattggtattattaagacaaacaagaaaacgggacagcccatgattaatttgtacacagacagggaaactggcaagctgaagggagaggcaacggtctcttttgatgacccaccttcagctaaagcagctattgactggtttgatggtaaagaattctccggaaatcctatcaaggtctcatttgctactcgccgggcagactttaatcggggtggtggcaatggtcgtggaggccgagggcgaggaggacccatgggccgtggaggctatggaggtggtggcagtggtggtggtggccgaggaggatttcccagtggaggtggtggcggtggaggacagcagcgagctggtgactggaagtgtcctaatcccacctgtgagaatatgaacttctcttggaggaatgaatgcaaccagtgtaaggcccctaaaccagatggcccaggagggggaccaggtggctctcacatggggggtaactacggggatgatcgtcgtggtggcagaggaggctatgatcgaggcggctaccggggccgcggcggggaccgtggaggcttccgagggggccggggtggtggggacagaggtggctttggccctggcaagatggattccaggggtgagcacagacaggatcgcagggagaggccgtattaattagcctggctccccaggttctggaacagctttttgtcctgtacccagtgttaccctcgttattttgtaaccttccaattcctgatcacccaagggtttttttgtgtcggactatgtaattgtaactatacctctggttcccattaaaagtgaccattttagttaaattttgttcctcttcccccttttcactttcctggaagatcgatgtcccgatcaggaaggtagagagttttcctgttcagattaccctgcccagcaggaactggaatacagtgttcggggagaaggccaaatgatatccttgagagcagagattaaacttttctgtcatggggaaagttggtgtataaatgagaaatgaagaa

SEQ ID NO: 11332 - DNA, 1717 bp, Homo sapiens
  source 1..1717: mol_type = unassigned DNA
gctcagtcctccaggcgtcggtactcagcggtgttggaacttcgttgcttgcttgcctgtgcgcgcgtgcgcggacatggcctcaaacgattatacccaacaagcaacccaaagctatggggcctaccccacccagcccgggcagggctattcccagcagagcagtcagccctacggacagcagagttacagtggttatagccagtccacggacacttcaggctatggccagagcagctattcttcttatggccagagccagaacacaggctatggaactcagtcaactccccagggatatggctcgactggcggctatggcagtagccagagctcccaatcgtcttacgggcagcagtcctcctaccctggctatggccagcagccagctcccagcagcacctcgggaagttacggtagcagttctcagagcagcagctatgggcagccccagagtgggagctacagccagcagcctagctatggtggacagcagcaaagctatggacagcagcaaagctataatccccctcagggctatggacagcagaaccagtacaacagcagcagtggtggtggaggtggaggtggaggtggaggtaactatggccaagatcaatcctccatgagtagtggtggtggcagtggtggcggttatggcaatcaagaccagagtggtggaggtggcagcggtggctatggacagcaggaccgtggaggccgcggcaggggtggcagtggtggcggcggcggcggcggcggtggtggttacaaccgcagcagtggtggctatgaacccagaggtcgtggaggtggccgtggaggcagaggtggcatgggcggaagtgaccgtggtggcttcaataaatttggtggccctcgggaccaaggatcacgtcatgactccgacaaacaagaaaacgggacagcccatgattaatttgtacacagacagggaaactggcaagctgaagggagaggcaacggtctcttttgatgacccaccttcagctaaagcagctattgactggtttgatggtaaagaattctccggaaatcctatcaaggtctcatttgctactcgccgggcagactttaatcggggtggtggcaatggtcgtggaggccgagggcgaggaggacccatgggccgtggaggctatggaggtggtggcagtggtggtggtggccgaggaggatttcccagtggaggtggtggcggtggaggacagcagcgagctggtgactggaagtgtcctaatcccacctgtgagaatatgaacttctcttggaggaatgaatgcaaccagtgtaaggcccctaaaccagatggcccaggagggggaccaggtggctctcacatggggggtaactacggggatgatcgtcgtggtggcagaggaggctatgatcgaggcggctaccggggccgcggcggggaccgtggaggcttccgagggggccggggtggtggggacagaggtggctttggccctggcaagatggattccaggggtgagcacagacaggatcgcagggagaggccgtattaattagcctggctccccaggttctggaacagctttttgtcctgtacccagtgttaccctcgttattttgtaaccttccaattcctgatcacccaagggtttttttgtgtcggactatgtaattgtaactatacctctggttcccattaaaagtgaccattttagtt

SEQ ID NO: 11333 - DNA, 1528 bp, Homo sapiens
  source 1..1528: mol_type = unassigned DNA
tcagtcctccaggcgtcggtactcagcggtgttggaacttcgttgcttgcttgcctgtgcgcgcgtgcgcggacatggcctcaaacgattatacccaacaagcaacccaaagctatggggcctaccccacccagcccgggcagggctattcccagcagagcagtcagccctacggacagcagagttacagtggttatagccagtccacggacacttcaggctatggccagagcagctattcttcttatggccagagccagaacacaggctatggaactcagtcaactccccagggatatggctcgactggcggctatggcagtagccagagctcccaatcgtcttacgggcagcagtcctcctaccctggctatggccagcagccagctcccagcagcacctcgggaagttacggtagcagttctcagagcagcagctatgggcagccccagagtgggagctacagccagcagcctagctatggtggacagcagcaaagctatggacagcagcaaagctataatccccctcagggctatggacagcagaaccagtacaacagcagcagtggtggctatgaacccagaggtcgtggaggtggccgtggaggcagaggtggcatgggcggaagtgaccgtggtggcttcaataaatttggtggccctcgggaccaaggatcacgtcatgactccgaacaggataattcagacaacaacaccatctttgtgcaaggcctgggtgagaatgttacaattgagtctgtggctgattacttcaagcagattggtattattaagacaaacaagaaaacgggacagcccatgattaatttgtacacagacagggaaactggcaagctgaagggagaggcaacggtctcttttgatgacccaccttcagctaaagcagctattgactggtttgatggtaaagaattctccggaaatcctatcaaggtctcatttgctactcgccgggcagactttaatcggggtggtggcaatggtcgtggaggccgagggcgaggaggacccatgggccgtggaggctatggaggtggtggcagtggtggtggtggccgaggaggatttcccagtggaggtggtggcggtggaggacagcagcgagctggtgactggaagtgtcctaatcccacctgtgagaatatgaacttctcttggaggaatgaatgcaaccagtgtaaggcccctaaaccagatggcccaggagggggaccaggtggctctcacatggggggtaactacggggatgatcgtcgtggtggggacagaggtggctttggccctggcaagatggattccaggggtgagcacagacaggatcgcagggagaggccgtattaattagcctggctccccaggttctggaacagctttttgtcctgtacccagtgttaccctcgttattttgtaaccttccaattcctgatcacccaagggtttttttgtgtcggactatgtaattgtaactatacctctggttcccattaaaagtgaccattttagtt

SEQ ID NO: 11334 - DNA, 1675 bp, Homo sapiens
  source 1..1675: mol_type = unassigned DNA
tgtttgagttgggtgaagaaggcgggaagttaatcctcttccaatcagctccccatctcgccctctggcggctccggaccacaggccgagttactctgattaccgccatgctccaagacccgcactgacagtccccacgtgagggaccgcggtgggagtcctaaatgggggaggaggggacgggcggcactgtgcatctgctgtgcctcgcggcctccagcggggtccccctattctgcaggagcagtcgcggcggcgcccccgcccgtcagcagctcccgttctctgtcatcggttccctcaatggagtccacatgtttgggcagaatctggaggtgcagctgagctctgcgaggaccgagaacacgactgtggtgtggaaaagcttccatgacagcatcaccctcattgttctgtcatctgaggtgggcatctctgagctgaggctggagagactactccaaatggtgtttggagccatggtccttcttgtgggacttgaagaactgaccaatatccgcaacgtggagagactgaagaaggacttgagggccagttattgcctcatcgacagcttcctgggggactcggagctcatcggggacctgacccagtgtgtggactgcgtgattcctccagaggggtccctcttgcaggaagccctctccgggttcgctgaggccgcgggcacgaccttcgtcagtctggtggtgtccggccgggtggtggcagcaacagagggttggtggcggctggggacgcccgaggccgtgctgctcccctggctggtggggtccctgccgccgcagaccgctcgcgactacccggtgtacctgccgcacgggagccccacggtcccacaccggctcctgaccctgactctgctgccgagcctggagctgtgtctactctgcgggccgagcccacccctcagccagttgtatccacagcttctggagcgctggtggcagccactgctggacccgttgcgggcctgtctgccgttgggaccccgggcgctgcccagtggcttcccccttcacacagacatcctcgggctgctgctcctccacctggaactgaagcgctgcctcttcaccgtggagcccttgggggataaagagccttcaccagaacagcgccggcgcctcctccgaaacttctataccctggtcacctccacgcacttcccaccagagccagggccaccagagaagacagaagatgaggtctaccaggcccagctgcccagagcttgctacctggtgttggggactgaggaaccaggcacaggagtgcgtctggtggccttgcagctggggcttcggcggctgctgctgctgctgtctccccagagtcccacccatgggctgcgaagcctggccacccacactctgcatgccctcaccccacttctttgactacctagcagtgggtgatggacacagacatggggctgttagcgtctctctgtttattcgctcacaataatacacagcccctggatggggagggggtaggaggggctacaacagggtggggtgggaggggaggagacatccacttccctggcccctctcccctctgtgcttgggggggaaagggagggagggggactccccctaaccccccagaatgtaaacagcagcagatgaacaaaaataaaaatacaaaa

SEQ ID NO: 11335 - DNA, 1021 bp, Homo sapiens
  source 1..1021: mol_type = unassigned DNA
atgggtttgggggaggtgcctgaatagggtttgagggtctgtttgagttgggtgaagaaggcgggaagttaatcctcttccaatcagctccccatctcgccctctggcggctccggaccacaggccgagttactctgattaccgccatgctccaagacccgcactgacagtccccacgtgagggaccgcggtgggagtcctaaatgggggaggaggggacgggcggcactgtgcatctgctgtgcctcgcggcctccagcggggtccccctattctgcaggagcagtcgcggcggcgcccccgcccgtcagcagctcccgttctctgtcatcggttccctcaatggagtccacatgtttgggcagaatctggaggtgcagctgagctctgcgaggaccgagaacacgactgtggtgtggaaaagcttccatgacagcatcaccctcattgttctgtcatctgaggtgggcatctctgagctgaggctggagagactactccaaatggtgtttggagccatggtccttcttgtgggacttgaagaactgaccaatatccgcaacgtggagagactgaagaaggacttgagggccagttattgcctcatcgacagcttcctgggggactcggagctcatcggggacctgacccagtgtgtggactgcgtgattcctccagaggggtccctcttgcaggtactggggatgctatggaaactcttacacctgttctgctggccctggctcagtcctcatcctctttcttctggaccattgtcccaacctcctcctatcctctcagcttccagtcctatccccacctggtcccagaagaatcttttttctttttttttttcttttctttctctttcttttcttttttcttttctttctctctttttatttgagacgtagtttcactcttgttgcccaggctggagtacaatggcaccatctcggctcactgcagcctgcgcctcccgggttcaagtaattctcctgcctcagcttcccgagcagct

SEQ ID NO: 11336 - DNA, 1368 bp, Homo sapiens
  source 1..1368: mol_type = unassigned DNA
aatgggtttgggggaggtgcctgaatagggtttgagggtctgtttgagttgggtgaagaaggcgggaagttaatcctcttccaatcagctccccatctcgccctctggcggctccggaccacaggccgagttactctgattaccgccatgctccaagacccgcactgacagtccccacgtgagggaccgcggtgggagtcctaaatgggggaggaggggacgggcggcactgtgcatctgctgtgcctcgcggcctccagcggggtccccctattctgcaggagcagtcgcggcggcgcccccgcccgtcagcagctcccgttctctgtcatcggttccctcaatggagtccacatgtttgggcagaatctggaggtgcagctgagctctgcgaggaccgagaacacgactgtggtgtggaaaagcttccatgacagcatcaccctcattgttctgtcatctgaggtgggcatctctgagctgaggctggagagactactccaaatggtgtttggagccatggtccttcttgtgggacttgaagaactgaccaatatccgcaacgtggagagactgaagaaggacttgagggccagttattgcctcatcgacagcttcctgggggactcggagctcatcggggacctgacccagtgtgtggactgcgtgattcctccagaggggtccctcttgcaggaagccctctccgggttcgctgaggccgcgggcacgaccttcgtcagtctggtggtgtccggccgggtggtggcagcaacagagggttggtggcggctggggacgcccgaggccgtgctgctcccctggctggtggggtccctgccgccgcagaccgctcgcgactacccggtgtacctgccgcacgggagccccacggtcccacaccggctcctgaccctgactctgctgccgagcctggagctgtgtctactctgcgggccgagcccacccctcagccagttgtatccacagcttctggagcgctggtggcagccactgctggacccgttgcgggcctgtctgccgttgggaccccgggcgctgcccagtggcttcccccttcacacagacatcctcgggctgctgctcctccacctggaactgaagcgctgcctcttcaccgtggagcccttgggggataaagagccttcaccagaacagcgccggcgcctcctccgaaacttctataccctggtcacctccacgcacttcccaccagagccagggccaccagagaagacagaagatgaggtctaccaggcccagctgcccagagcttgctacctggtgatgggtgatggacacagacatggggctgttagcgtctctctgtttattcgctcacaataa

SEQ ID NO: 11337 - DNA, 1479 bp, Homo sapiens
  source 1..1479: mol_type = unassigned DNA
ctgattaccgccatgctccaagacccgcactgacagtccccacgtgagggaccgcggtgggagtcctaaatgggggaggaggggacgggcggcactgtgcatctgctgtgcctcgcggcctccagcggggtccccctattctgcaggagcagtcgcggcggcgcccccgcccgtcagcagctcccgttctctgtcatcggttccctcaatggagtccacatgtttgggcagaatctggaggtgcagctgagctctgcgaggaccgagaacacgactgtggtccttcttgtgggacttgaagaactgaccaatatccgcaacgtggagagactgaagaaggacttgagggccagttattgcctcatcgacagcttcctgggggactcggagctcatcggggacctgacccagtgtgtggactgcgtgattcctccagaggggtccctcttgcaggaagccctctccgggttcgctgaggccgcgggcacgaccttcgtcagtctggtggtgtccggccgggtggtggcagcaacagagggttggtggcggctggggacgcccgaggccgtgctgctcccctggctggtggggtccctgccgccgcagaccgctcgcgactacccggtgtacctgccgcacgggagccccacggtcccacaccggctcctgaccctgactctgctgccgagcctggagctgtgtctactctgcgggccgagcccacccctcagccagttgtatccacagcttctggagcgctggtggcagccactgctggacccgttgcgggcctgtctgccgttgggaccccgggcgctgcccagtggcttcccccttcacacagacatcctcgggctgctgctcctccacctggaactgaagcgctgcctcttcaccgtggagcccttgggggataaagagccttcaccagaacagcgccggcgcctcctccgaaacttctataccctggtcacctccacgcacttcccaccagagccagggccaccagagaagacagaagatgaggtctaccaggcccagctgcccagagcttgctacctggtgttggggactgaggaaccaggcacaggagtgcgtctggtggccttgcagctggggcttcggcggctgctgctgctgctgtctccccagagtcccacccatgggctgcgaagcctggccacccacactctgcatgccctcaccccacttctttgactacctagcagtgggtgatggacacagacatggggctgttagcgtctctctgtttattcgctcacaataatacacagcccctggatggggagggggtaggaggggctacaacagggtggggtgggaggggaggagacatccacttccctggcccctctcccctctgtgcttgggggggaaagggagggagggggactccccctaaccccccagaatgtaaacagcagcagatgaacaaaaataaaaatacaaaaggccgga

SEQ ID NO: 11338 - DNA, 576 bp, Homo sapiens
  source 1..576: mol_type = unassigned DNA
aaagtgctcagcccccggggcacagcaggacgtttgggggccttctttcagcaggggacagcccgattggggacaatggcgtctcttggccacatcttggttttctgtgtgggtctcctcaccatggccaaggcagaaagtccaaaggaacacgacccgttcacttacgactaccagtccctgcagatcggaggcctcgtcatcgccgggatcctcttcatcctgggcatcctcatcgtgctgagcagaagatgccggtgcaagttcaaccagcagcagaggactggggaacccgatgaagaggagggaactttccgcagctccatccgccgtctgtccacccgcaggcggtagaaacacctggagcgatggaatccggccaggactcccctggcacctgacatctcccacgctccacctgcgcgcccaccgccccctccgccgccccttccccagccctgcccccgcagactccccctgccgccaagacttccaataaaacgtgcgttcctctcgacagcactttgtcggtctcggtccctcagcgcgaaacgccagcgccactgggccccagca

SEQ ID NO: 11339 - DNA, 547 bp, Homo sapiens
  source 1..547: mol_type = unassigned DNA
gtggcagctgggcctcaccccggcagggctgtgcgtgaccccctgagtgggggaaggcaggctgttgccatggtggcctgagcgagcagaattcctccagggacaatggcgtctcttggccacatcttggttttctgtgtgggtctcctcaccatggccaaggcagaaagtccaaaggaacacgacccgttcacttacgactaccagtccctgcagatcggaggcctcgtcatcgccgggatcctcttcatcctgggcatcctcatcgtgctgagcagaagatgccggtgcaagttcaaccagcagcagaggactggggaacccgatgaagaggagggaactttccgcagctccatccgccgtctgtccacccgcaggcggtagaaacacctggagcgatggaatccggccaggactcccctggcacctgacatctcccacgctccacctgcgcgcccaccgccccctccgccgccccttccccagccctgcccccgcagactccccctgccgccaagacttccaataaaacgtgcgttcctctcga

SEQ ID NO: 11340 - DNA, 513 bp, Homo sapiens
  source 1..513: mol_type = unassigned DNA
gccactctccatccaggccccaggcaagcagcacctccctgctctcctgcactcctggacacaaccagcagctcctgccatggacaggtggtacctgggcggcagccccaagggggacgtggacccgttctactatgactatgagaccgttcgcaatgggggcctgatcttcgctggactggccttcatcgtggggctcctcatcctcctcagcagaagattccgctgtgggggcaataagaagcgcaggcaaatcaatgaagatgagccgtaacagcagcctcggcggtgccacccactgcactggggccagctgggaagccaagcatggccctgcctctggcgcctccccttcttccctgggctttagacctttgtccccgtcactgccagcgcttgggctgaaggaagctccagactcaatgtgacccccaggtggcatcgccaactcctgcctcgtgccacctcatgcttataataaagccggcgtcagagaccgctgcttccctcacc

SEQ ID NO: 11341 - DNA, 571 bp, Homo sapiens
  source 1..571: mol_type = unassigned DNA
agacactctccaaaaagcagagacagcaggaagaggggagtggaggcagcccattcacctggggaaatgactgggttgtcgatggacggtggcggcagccccaagggggacgtggacccgttctactatgactatgagaccgttcgcaatgggggcctgatcttcgctggactggccttcatcgtggggctcctcatcctcctcagcagaagattccgctgtgggggcaataagaagcgcaggcaaatcaatgaagatgagccgtaacagcagcctcggcggtgccacccactgcactggggccagctgggaagccaagcatggccctgcctctggcgcctccccttcttccctgggctttagacctttgtccccgtcactgccagcgcttgggctgaaggaagctccagactcaatgtgacccccaggtggcatcgccaactcctgcctcgtgccacctcatgcttataataaagccggcgtcagagaccgctgcttccctcacctgcctgcctgtctccctcctctgtcaccaccagcctctccaagctcaagtacaaatacagccggg

SEQ ID NO: 11342 - DNA, 672 bp, Homo sapiens
  source 1..672: mol_type = unassigned DNA
ccagccccgcagctgctccccatctctctgccaactgccagaacgacacaggaagctggggccggtgcctcagtgtgaagagggggagtgccactctccatccaggccccaggcaagcagcacctccctgctctcctgcactcctggacacaaccagcagctcctgccatggacaggtggtacctgggcggcagccccaagggggacgtggacccgttctactatgactatgagaccgttcgcaatgggggcctgatcttcgctggactggccttcatcgtggggctcctcatcctcctcagcagaagattccgctgtgggggcaataagaagcgcaggcaaatcaatgaagatgagccgtaacagcagcctcggcggtgccacccactgcactggggccagctgggaagccaagcatggccctgcctctggcgcctccccttcttccctgggctttagacctttgtccccgtcactgccagcgcttgggctgaaggaagctccagactcaatgtgacccccaggtggcatcgccaactcctgcctcgtgccacctcatgcttataataaagccggcgtcagagaccgctgcttccctcacctgcctgcctgtctccctcctctgtcaccaccagcctctccaagctcaagtacaaatacagccgggtctca

SEQ ID NO: 11343 - DNA, 1326 bp, Homo sapiens
  source 1..1326: mol_type = unassigned DNA
aggtttgcttagggcgtggcagcttcggataaacgcaggactccgcctggcagcccgatttctcccggaacctctgctcagcctggtgaaccacacaggcccgagtttcacccagtccccactccacggtgcagctgcggcttatctctcagcccagcgagatgccagccttcctgtcccgggccagcgctctgacatgcagaaggtgaccctgggcctgcttgtgttcctggcaggctttcctgtcctggacgccaatgacctagaagataaaaacagtcctttctactatgactggcacagcctccaggttggcgggctcatctgcgctggggttctgtgcgccatgggcatcatcatcgtcatgagtgcaaaatgcaaatgcaagtttggccagaagtccggtcaccatccaggggagactccacctctcatcaccccaggctcagcccaaagctgatgaggacagaccagctgaaattgggtggaggaccgttctctgtccccaggtcctgtctctgcacagaaacttgaactccaggatggaattcttcctcctctgctgggactcctttgcatggcagggcctcatctcacctctcgcaagagggtctctttgttcaattttttttaatctaaaatgattgtgcctctgcccaagcagcctggagacttcctatgtgtgcattggggtggggcttggggcaccatgagaaggttggcgtgccctggaggctgacacagaggctggcactgagcctgcttgttgggaaaagcccacaggcctgttcccttgtggcttgggacatggcacaggcccgccctctgcctcctcagccatgggaacctcatatgcaatttgggatttactagtagccaaaaggaatgaaagagagctctaaccagatggaacactggaacattccagtggaccctggaccattccaggaaaactgggacataggatcgtcccgctatgatggaagtgttcagacagtttataatagtaagcccctgtgaccctctcacttaccccgagacctcactttattacaagatctttccaaatacccaaatgtccctgcaagcccgttaaataattccctatgctacccttaataacatacaatgaccacatagtgtgagaacttccaacaagcctcaaagtcccttgagactccccaatacctaataaggcatgcgaaatgttctcatgaactaccccacaacacgcctaaaactcaaaacacccaaaaatatctcctccaatgtcctgaaacatgaacccaaaaagagacccacaataaactcgtgacttgtcccctc

SEQ ID NO: 11344 - DNA, 1320 bp, Homo sapiens
  source 1..1320: mol_type = unassigned DNA
aggtttgcttagggcgtggcagcttcggataaacgcaggactccgcctggcagcccgatttctcccggaacctctgctcagcctggtgaaccacacaggccagcgctctgacatgcagaaggtgaccctgggcctgcttgtgttcctggcaggctttcctgtcctggacgccaatgacctagaagataaaaacagtcctttctactatgactggcacagcctccaggttggcgggctcatctgcgctggggttctgtgcgccatgggcatcatcatcgtcatgagtgagtggaggagctcgggggagcaggcgggccggggctggggctcccctcccctgaccactcagctctccccaacaggtgcaaaatgcaaatgcaagtttggccagaagtccggtcaccatccaggggagactccacctctcatcaccccaggctcagcccaaagctgatgaggacagaccagctgaaattgggtggaggaccgttctctgtccccaggtcctgtctctgcacagaaacttgaactccaggatggaattcttcctcctctgctgggactcctttgcatggcagggcctcatctcacctctcgcaagagggtctctttgttcaattttttttaatctaaaatgattgtgcctctgcccaagcagcctggagacttcctatgtgtgcattggggtggggcttggggcaccatgagaaggttggcgtgccctggaggctgacacagaggctggcactgagcctgcttgttgggaaaagcccacaggcctgttcccttgtggcttgggacatggcacaggcccgccctctgcctcctcagccatgggaacctcatatgcaatttgggatttactagtagccaaaaggaatgaaagagagctctaaccagatggaacactggaacattccagtggaccctggaccattccaggaaaactgggacataggatcgtcccgctatgatggaagtgttcagacagtttataatagtaagcccctgtgaccctctcacttaccccgagacctcactttattacaagatctttccaaatacccaaatgtccctgcaagcccgttaaataattccctatgctacccttaataacatacaatgaccacatagtgtgagaacttccaacaagcctcaaagtcccttgagactccccaatacctaataaggcatgcgaaatgttctcatgaactaccccacaacacgcctaaaactcaaaacacccaaaaatatctcctccaatgtcctgaaacatgaacccaaaaagagacccacaataaactcgtgacttgtcccctc

SEQ ID NO: 11345 - DNA, 778 bp, Homo sapiens
  source 1..778: mol_type = unassigned DNA
cgctagcatcttctgctgatcctgaaattgtaccagcggcaagatgtggcctggaaggggactttaagttctccacaactgccagcaatccttccaccaggcaaaacacatcatctaaggaaaagaagtgaggtttgcttagggcgtggcagcttcggataaacgcaggactccgcctggcagcccgatttctcccggaacctctgctcagcctggtgaaccacacaggccagcgctctgacatgcagaaggtgaccctgggcctgcttgtgttcctggcaggctttcctgtcctggacgccaatgacctagaagataaaaacagtcctttctactatgactggcacagcctccaggttggcgggctcatctgcgctggggttctgtgcgccatgggcatcatcatcgtcatgagtgagtggaggagctcgggggagcaggcgggccggggctggggctcccctcccctgaccactcagctctccccaacaggtgcaaaatgcaaatgcaagtttggccagaagtccgggtaagatactgttccggcatgcccgcctcaggctgactggacgcttttcagggtgaaagggctaactctcccagcaggagaggcctcggggctctgccctttagagttcctgccgctaagatttccaggtttattgtttctagctggtaatccccagggggccccaaatcctgaaatgctttggcccctgggattgcacaaccccccaaatggaaaggcagccaggaagacatgtctgggcaggctaag

SEQ ID NO: 11346 - DNA, 516 bp, Homo sapiens
  source 1..516: mol_type = unassigned DNA
gatttctcccggaacctctgctcagcctggtgaaccacacaggccagcgctctgacatgcagaaggtgaccctgggcctgcttgtgttcctggcaggctttcctgtcctggacgccaatgacctagaagataaaaacagtcctttctactatgactggcacagcctccaggttggcgggctcatctgcgctggggttctgtgcgccatgggcatcatcatcgtcatgagtgcaaaatgcaaatgcaagtttggccagaagtccggtcaccatccaggggagactccacctctcatcaccccaggctcagcccaaagctgatgaggacagaccagctgaaattgggtggaggaccgttctctgtccccaggtcctgtctctgcacagaaacttgaactccaggatggaattcttcctcctctgctgggactcctttgcatggcagggcctcatctcacctctcgcaagagggtctctttgttcaattttttttaatctaaaatgattgtgcctctgc

SEQ ID NO: 11347 - DNA, 1448 bp, Homo sapiens
  source 1..1448: mol_type = unassigned DNA
aggtttgcttagggcgtggcagcttcggataaacgcaggactccgcctggcagcccgatttctcccggaacctctgctcagcctggtgaaccacacagaggctggggcgaggaggataccatctgtcagtcttggctggatgacatcatgggaagggggtatagtggggccttgcaggccagaggtggcttggaggagcccctggaaagaggcttaagaggcccgagtttcacccagtccccactccacggtgcagctgcggcttatctctcagcccagcgagatgccagccttcctgtcccgggccagcgctctgacatgcagaaggtgaccctgggcctgcttgtgttcctggcaggctttcctgtcctggacgccaatgacctagaagataaaaacagtcctttctactatgactggcacagcctccaggttggcgggctcatctgcgctggggttctgtgcgccatgggcatcatcatcgtcatgagtgcaaaatgcaaatgcaagtttggccagaagtccggtcaccatccaggggagactccacctctcatcaccccaggctcagcccaaagctgatgaggacagaccagctgaaattgggtggaggaccgttctctgtccccaggtcctgtctctgcacagaaacttgaactccaggatggaattcttcctcctctgctgggactcctttgcatggcagggcctcatctcacctctcgcaagagggtctctttgttcaattttttttaatctaaaatgattgtgcctctgcccaagcagcctggagacttcctatgtgtgcattggggtggggcttggggcaccatgagaaggttggcgtgccctggaggctgacacagaggctggcactgagcctgcttgttgggaaaagcccacaggcctgttcccttgtggcttgggacatggcacaggcccgccctctgcctcctcagccatgggaacctcatatgcaatttgggatttactagtagccaaaaggaatgaaagagagctctaaccagatggaacactggaacattccagtggaccctggaccattccaggaaaactgggacataggatcgtcccgctatgatggaagtgttcagacagtttataatagtaagcccctgtgaccctctcacttaccccgagacctcactttattacaagatctttccaaatacccaaatgtccctgcaagcccgttaaataattccctatgctacccttaataacatacaatgaccacatagtgtgagaacttccaacaagcctcaaagtcccttgagactccccaatacctaataaggcatgcgaaatgttctcatgaactaccccacaacacgcctaaaactcaaaacacccaaaaatatctcctccaatgtcctgaaacatgaacccaaaaagagacccacaataaactcgtgacttgtcccctc

SEQ ID NO: 11348 - DNA, 759 bp, Homo sapiens
  source 1..759: mol_type = unassigned DNA
cgctagcatcttctgctgatcctgaaattgtaccagcggcaagatgtggcctggaaggggactttaagttctccacaactgccagcaatccttccaccaggcaaaacacatcatctaaggaaaagaagtgaggtttgcttagggcgtggcagcttcggataaacgcaggactccgcctggcagcccgatttctcccggaacctctgctcagcctggtgaaccacacaggccagcgctctgacatgcagaaggtgaccctgggcctgcttgtgttcctggcaggctttcctgtcctggacgccaatgacctagaagataaaaacagtcctttctactatggtgagagcccgtgccccctttcccctccccacaaccccacatactgcttggtgccaagggttcccatacagggttggggcctgacgtgagcatcacaggacaaagatacgaagggactaggatggggttactgaatatgccacacagtggattaaaggaactagaggcagcaacctggcctttgggaaggttctattccagcaagatagacacacgcaggaggtgaggacagtttgcaagaagccattggttggttcagatcaactgctgggagaagtgttgacttgagaaaacttcctggaggtggtgagctattggatcaaaaccctcatctggcctccaggttccaatgacctgctccctactccccgctctgccctcacctctccacgctcctcattccttctgctccaagcctct

SEQ ID NO: 11349 - DNA, 631 bp, Homo sapiens
  source 1..631: mol_type = unassigned DNA
atgggaagggggtatagtggggccttgcaggccagaggtggcttggaggagcccctggaaagaggcttaagaggcccgagtttcacccagtccccactccacggtgcagctgcggcttatctctcagcccagcgagatgccagccttcctgtcccgggccagcgctctgacatgcagaaggtgaccctgggcctgcttgtgttcctggcaggctttcctgtcctggacgccaatgacctagaagataaaaacagtcctttctactatgactggcacagcctccaggttggcgggctcatctgcgctggggttctgtgcgccatgggcatcatcatcgtcatgagtgcaaaatgcaaatgcaagtttggccagaagtccggtcaccatccaggggagactccacctctcatcaccccaggctcagcccaaagctgatgaggacagaccagctgaaattgggtggaggaccgttctctgtccccaggtcctgtctctgcacagaaacttgaactccaggatggaattcttcctcctctgctgggactcctttgcatggcagggcctcatctcacctctcgcaagagggtctctttgttcaattttttttaatctaaaatgattgtgcctctgc

SEQ ID NO: 11350 - DNA, 1926 bp, Homo sapiens
  source 1..1926: mol_type = unassigned DNA
agccagcccgactcctaggaggaggggaggcgggaaagcagctcaagcctcacccaccgccctgcccccagccccgccactcccaggctcctcgggactcggcgggtcctcctgggagtctcggaggggaccggctgtgcagagaacttcagccaaagcatctgagacgggaagcagaaaaaggagggacagtttggagaagaaaaacgcagctgtgtgtttgggccttgacgtggctgtggatgcagtcgttctgacccctggtggccgagaggtgaagtgcagtggcggctgcttgctcaaggccggaggaagacgccatggagttggtgctggtcttcctctgcagcctgctggcccccatggtcctggccagtgcagctgaaaaggagaaggaaatggacccttttcattatgattaccagaccctgaggattgggggactggtgttcgctgtggtcctcttctcggttgggatcctccttatcctaagtcgcaggtgcaagtgcagtttcaatcagaagccccgggccccaggagatgaggaagcccaggtggagaacctcatcaccgccaatgcaacagagccccagaaagcagagaactgaagtgcagccatcaggtggaagcctctggaacctgaggcggctgcttgaacctttggatgcaaatgtcgatgcttaagaaaaccggccacttcagcaacagccctttccccaggagaagccaagaacttgtgtgtcccccaccctatcccctctaacaccattcctccacctgatgatgcaactaacacttgcctccccactgcagcctgcggtcctgcccacctcccgtgatgtgtgtgtgtgtgtgtgtgtgtgtgactgtgtgtgtttgctaactgtggtctttgtggctacttgtttgtggatggtattgtgtttgttagtgaactgtggactcgctttcccaggcaggggctgagccacatggccatctgctcctccctgcccccgtggccctccatcaccttctgctcctaggaggctgcttgttgcccgagaccagccccctcccctgatttagggatgcgtagggtaagagcacgggcagtggtcttcagtcgtcttgggacctgggaaggtttgcagcactttgtcatcattcttcatggactcctttcactcctttaacaaaaaccttgcttccttatcccacctgatcccagtctgaaggtctcttagcaactggagatacaaagcaaggagctggtgagcccagcgttgacgtcaggcaggctatgcccttccgtggttaatttcttcccaggggcttccacgaggagtccccatctgccccgccccttcacagagcgcccggggattccaggcccagggcttctactctgcccctggggaatgtgtcccctgcatatcttctcagcaataactccatgggctctgggaccctaccccttccaaccttccctgcttctgagacttcaatctacagcccagctcatccagatgcagactacagtccctgcaattgggtctctggcaggcaatagttgaaggactcctgttccgttggggccagcacaccgggatggatggagggagagcagaggcctttgcttctctgcctacgtccccttagatgggcagcagaggcaactcccgcatcctttgctctgcctgtcagtggtcagagcggtgagcgaggtgggttggagactcagcaggctccgtgcagcccttgggaacagtgagaggttgaaggtcataacgagagtgggaactcaacccagatcccgcccctcctgtcctctgtgttcccgcggaaaccaaccaaaccgtgcgctgtgacccattgctgttctctgtatcgtgatctatcctcaacaacaacagaaaaaaggaataaaatatcctttgtttccta

SEQ ID NO: 11351 - DNA, 1033 bp, Homo sapiens
  source 1..1033: mol_type = unassigned DNA
agtctcctcctcgactcctctctggaacattgctggctgggcggggcgggcaatcatttcaagttaggtgatttaacaataattgatgcttaattgtttatttgatgggcatttaaaatgcaaattgagggaactggttgcattttccactgatggatctgtggcctctggtcgacccaaagcacttgttttaaaaggcagctttaaaagcccttgatggttgtttgtttgctctgaggctctgaaccagagaagcccagctcctgttacagattcatcaaatgccggaaagacgccatggagttggtgctggtcttcctctgcagcctgctggcccccatggtcctggccagtgcagctgaaaaggagaaggaaatggacccttttcattatgattaccagaccctgaggattgggggactggtgttcgctgtggtcctcttctcggttgggatcctccttatcctaagtcgcaggtgcaagtgcagtttcaatcagaagccccgggccccaggagatgaggaagcccaggtggagaacctcatcaccgccaatgcaacagagccccagaaagcagagaactgaagtgcagccatcaggtggaagcctctggaacctgaggcggctgcttgaacctttggatgcaaatgtcgatgcttaagaaaaccggccacttcagcaacagccctttccccaggagaagccaagaacttgtgtgtcccccaccctatcccctctaacaccattcctccacctgatgatgcaactaacacttgcctccccactgcagcctgcggtcctgcccacctcccgtgatgtgtgtgtgtgtgtgtgtgtgtgtgactgtgtgtgtttgctaactgtggtctttgtggctacttgtttgtggatggtattgtgtttgttagtgaactgtggactcgctttcccaggcaggggctgagccacatggccatctgctcctccctgcccccgtggccctccatcaccttctgctcctaggaggctgcttgttgcccgagaccagccccct

SEQ ID NO: 11352 - DNA, 2171 bp, Homo sapiens
  source 1..2171: mol_type = unassigned DNA
aattaccaaggctcccaattaacgtgggctgctgtgtctggtgctgggttattttctcctatttttccgttcctcggggtttactattgcagagagacaccaggtctgtcattgtgcctgtcttgctcccttcccaccctaaccagagggaaaccgaaaagcaacagctgatggcaaatccgctccggcgcttgcacgcctcctcggcggcagtctcctgttgcttctcggagcttgactgccctttggaaaaatctctccgcccctcgagaggagagaggagcagaggacgcgcgcgagcacagagcgggaggacggacagggagaggaggagagggggtctgcgcgcggccgctacccagaagccagcggacggcagcacggagtgggctgtccccgagcccagccccgagcgagccccccccccgcccccgcaggacgcgcctcccagccagcccgactcctaggaggaggggaggcgggaaagcagctcaagcctcacccaccgccctgcccccagccccgccactcccaggctcctcgggactcggcgggtcctcctgggagtctcggaggggaccggctgtgcagacgccatggagttggtgctggtcttcctctgcagcctgctggcccccatggtcctggccagtgcagctgaaaaggagaaggaaatggacccttttcattatgattaccagaccctgaggattgggggactggtgttcgctgtggtcctcttctcggttgggatcctccttatcctaagtcgcaggtgcaagtgcagtttcaatcagaagccccgggccccaggagatgaggaagcccaggtggagaacctcatcaccgccaatgcaacagagccccagaaagcagagaactgaagtgcagccatcaggtggaagcctctggaacctgaggcggctgcttgaacctttggatgcaaatgtcgatgcttaagaaaaccggccacttcagcaacagccctttccccaggagaagccaagaacttgtgtgtcccccaccctatcccctctaacaccattcctccacctgatgatgcaactaacacttgcctccccactgcagcctgcggtcctgcccacctcccgtgatgtgtgtgtgtgtgtgtgtgtgtgtgactgtgtgtgtttgctaactgtggtctttgtggctacttgtttgtggatggtattgtgtttgttagtgaactgtggactcgctttcccaggcaggggctgagccacatggccatctgctcctccctgcccccgtggccctccatcaccttctgctcctaggaggctgcttgttgcccgagaccagccccctcccctgatttagggatgcgtagggtaagagcacgggcagtggtcttcagtcgtcttgggacctgggaaggtttgcagcactttgtcatcattcttcatggactcctttcactcctttaacaaaaaccttgcttccttatcccacctgatcccagtctgaaggtctcttagcaactggagatacaaagcaaggagctggtgagcccagcgttgacgtcaggcaggctatgcccttccgtggttaatttcttcccaggggcttccacgaggagtccccatctgccccgccccttcacagagcgcccggggattccaggcccagggcttctactctgcccctggggaatgtgtcccctgcatatcttctcagcaataactccatgggctctgggaccctaccccttccaaccttccctgcttctgagacttcaatctacagcccagctcatccagatgcagactacagtccctgcaattgggtctctggcaggcaatagttgaaggactcctgttccgttggggccagcacaccgggatggatggagggagagcagaggcctttgcttctctgcctacgtccccttagatgggcagcagaggcaactcccgcatcctttgctctgcctgtcagtggtcagagcggtgagcgaggtgggttggagactcagcaggctccgtgcagcccttgggaacagtgagaggttgaaggtcataacgagagtgggaactcaacccagatcccgcccctcctgtcctctgtgttcccgcggaaaccaaccaaaccgtgcgctgtgacccattgctgttctctgtatcgtgatctatcctcaacaacaacag

SEQ ID NO: 11353 - DNA, 1799 bp, Homo sapiens
  source 1..1799: mol_type = unassigned DNA
atgctccaagtcgcgtcacaggcagggttgccgagccaggatttatttacatcttcacattcaaagttcgtcatcatgaattttgactcttggggactgggctgaggacggggtggtactgctcctggcagggccagaggtggatggggcttgaaaagggggttcaaggcagcagatctatggttcagacgccatggagttggtgctggtcttcctctgcagcctgctggcccccatggtcctggccagtgcagctgaaaaggagaaggaaatggacccttttcattatgattaccagaccctgaggattgggggactggtgttcgctgtggtcctcttctcggttgggatcctccttatcctaagtcgcaggtgcaagtgcagtttcaatcagaagccccgggccccaggagatgaggaagcccaggtggagaacctcatcaccgccaatgcaacagagccccagaaagcagagaactgaagtgcagccatcaggtggaagcctctggaacctgaggcggctgcttgaacctttggatgcaaatgtcgatgcttaagaaaaccggccacttcagcaacagccctttccccaggagaagccaagaacttgtgtgtcccccaccctatcccctctaacaccattcctccacctgatgatgcaactaacacttgcctccccactgcagcctgcggtcctgcccacctcccgtgatgtgtgtgtgtgtgtgtgtgtgtgtgactgtgtgtgtttgctaactgtggtctttgtggctacttgtttgtggatggtattgtgtttgttagtgaactgtggactcgctttcccaggcaggggctgagccacatggccatctgctcctccctgcccccgtggccctccatcaccttctgctcctaggaggctgcttgttgcccgagaccagccccctcccctgatttagggatgcgtagggtaagagcacgggcagtggtcttcagtcgtcttgggacctgggaaggtttgcagcactttgtcatcattcttcatggactcctttcactcctttaacaaaaaccttgcttccttatcccacctgatcccagtctgaaggtctcttagcaactggagatacaaagcaaggagctggtgagcccagcgttgacgtcaggcaggctatgcccttccgtggttaatttcttcccaggggcttccacgaggagtccccatctgccccgccccttcacagagcgcccggggattccaggcccagggcttctactctgcccctggggaatgtgtcccctgcatatcttctcagcaataactccatgggctctgggaccctaccccttccaaccttccctgcttctgagacttcaatctacagcccagctcatccagatgcagactacagtccctgcaattgggtctctggcaggcaatagttgaaggactcctgttccgttggggccagcacaccgggatggatggagggagagcagaggcctttgcttctctgcctacgtccccttagatgggcagcagaggcaactcccgcatcctttgctctgcctgtcagtggtcagagcggtgagcgaggtgggttggagactcagcaggctccgtgcagcccttgggaacagtgagaggttgaaggtcataacgagagtgggaactcaacccagatcccgcccctcctgtcctctgtgttcccgcggaaaccaaccaaaccgtgcgctgtgacccattgctgttctctgtatcgtgatctatcctcaacaacaacagaaaaaaggaataaaatatcctttgtttccta

SEQ ID NO: 11354 - DNA, 2130 bp, Homo sapiens
  source 1..2130: mol_type = unassigned DNA
aaccgaaaagcaacagctgatggcaaatccgctccggcgcttgcacgcctcctcggcggcagtctcctgttgcttctcggagcttgactgccctttggaaaaatctctccgcccctcgagaggagagaggagcagaggacgcgcgcgagcacagagcgggaggacggacagggagaggaggagagggggtctgcgcgcggccgctacccagaagccagcggacggcagcacggagtgggctgtccccgagcccagccccgagcgagccccccccccgcccccgcaggacgcgcctcccagccagcccgactcctaggaggaggggaggcgggaaagcagctcaagcctcacccaccgccctgcccccagccccgccactcccaggctcctcgggactcggcgggtcctcctgggagtctcggaggggaccggctgtgcagagaacttcagccaaagcatctgagacgggaagcagaaaaaggagggacagtttggagaagaaaaacgcagctgtgtacgccatggagttggtgctggtcttcctctgcagcctgctggcccccatggtcctggccagtgcagctgaaaaggagaaggaaatggacccttttcattatgattaccagaccctgaggattgggggactggtgttcgctgtggtcctcttctcggttgggatcctccttatcctaagtcgcaggtgcaagtgcagtttcaatcagaagccccgggccccaggagatgaggaagcccaggtggagaacctcatcaccgccaatgcaacagagccccagaaagcagagaactgaagtgcagccatcaggtggaagcctctggaacctgaggcggctgcttgaacctttggatgcaaatgtcgatgcttaagaaaaccggccacttcagcaacagccctttccccaggagaagccaagaacttgtgtgtcccccaccctatcccctctaacaccattcctccacctgatgatgcaactaacacttgcctccccactgcagcctgcggtcctgcccacctcccgtgatgtgtgtgtgtgtgtgtgtgtgtgtgactgtgtgtgtttgctaactgtggtctttgtggctacttgtttgtggatggtattgtgtttgttagtgaactgtggactcgctttcccaggcaggggctgagccacatggccatctgctcctccctgcccccgtggccctccatcaccttctgctcctaggaggctgcttgttgcccgagaccagccccctcccctgatttagggatgcgtagggtaagagcacgggcagtggtcttcagtcgtcttgggacctgggaaggtttgcagcactttgtcatcattcttcatggactcctttcactcctttaacaaaaaccttgcttccttatcccacctgatcccagtctgaaggtctcttagcaactggagatacaaagcaaggagctggtgagcccagcgttgacgtcaggcaggctatgcccttccgtggttaatttcttcccaggggcttccacgaggagtccccatctgccccgccccttcacagagcgcccggggattccaggcccagggcttctactctgcccctggggaatgtgtcccctgcatatcttctcagcaataactccatgggctctgggaccctaccccttccaaccttccctgcttctgagacttcaatctacagcccagctcatccagatgcagactacagtccctgcaattgggtctctggcaggcaatagttgaaggactcctgttccgttggggccagcacaccgggatggatggagggagagcagaggcctttgcttctctgcctacgtccccttagatgggcagcagaggcaactcccgcatcctttgctctgcctgtcagtggtcagagcggtgagcgaggtgggttggagactcagcaggctccgtgcagcccttgggaacagtgagaggttgaaggtcataacgagagtgggaactcaacccagatcccgcccctcctgtcctctgtgttcccgcggaaaccaaccaaaccgtgcgctgtgacccattgctgttctctgtatcgtgatctatcctcaacaacaacagaaaaaaggaataaaatatcctttgtttcctagtg

SEQ ID NO: 11355 - DNA, 2151 bp, Homo sapiens
  source 1..2151: mol_type = unassigned DNA
aaccgaaaagcaacagctgatggcaaatccgctccggcgcttgcacgcctcctcggcggcagtctcctgttgcttctcggagcttgactgccctttggaaaaatctctccgcccctcgagaggagagaggagcagaggacgcgcgcgagcacagagcgggaggacggacagggagaggaggagagggggtctgcgcgcggccgctacccagaagccagcggacggcagcacggagtgggctgtccccgagcccagccccgagcgagccccccccccgcccccgcaggacgcgcctcccagccagcccgactcctaggaggaggggaggcgggaaagcagctcaagcctcacccaccgccctgcccccagccccgccactcccaggctcctcgggactcggcgggtcctcctgggagtctcggaggggaccggctgtgcaggtttgggccttgacgtggctgtggatgcagtcgttctgacccctggtggccgagaggtgaagtgcagtggcggctgcttgctcaaggccggaggaagacgccatggagttggtgctggtcttcctctgcagcctgctggcccccatggtcctggccagtgcagctgaaaaggagaaggaaatggacccttttcattatgattaccagaccctgaggattgggggactggtgttcgctgtggtcctcttctcggttgggatcctccttatcctaagtcgcaggtgcaagtgcagtttcaatcagaagccccgggccccaggagatgaggaagcccaggtggagaacctcatcaccgccaatgcaacagagccccagaaagcagagaactgaagtgcagccatcaggtggaagcctctggaacctgaggcggctgcttgaacctttggatgcaaatgtcgatgcttaagaaaaccggccacttcagcaacagccctttccccaggagaagccaagaacttgtgtgtcccccaccctatcccctctaacaccattcctccacctgatgatgcaactaacacttgcctccccactgcagcctgcggtcctgcccacctcccgtgatgtgtgtgtgtgtgtgtgtgtgtgtgactgtgtgtgtttgctaactgtggtctttgtggctacttgtttgtggatggtattgtgtttgttagtgaactgtggactcgctttcccaggcaggggctgagccacatggccatctgctcctccctgcccccgtggccctccatcaccttctgctcctaggaggctgcttgttgcccgagaccagccccctcccctgatttagggatgcgtagggtaagagcacgggcagtggtcttcagtcgtcttgggacctgggaaggtttgcagcactttgtcatcattcttcatggactcctttcactcctttaacaaaaaccttgcttccttatcccacctgatcccagtctgaaggtctcttagcaactggagatacaaagcaaggagctggtgagcccagcgttgacgtcaggcaggctatgcccttccgtggttaatttcttcccaggggcttccacgaggagtccccatctgccccgccccttcacagagcgcccggggattccaggcccagggcttctactctgcccctggggaatgtgtcccctgcatatcttctcagcaataactccatgggctctgggaccctaccccttccaaccttccctgcttctgagacttcaatctacagcccagctcatccagatgcagactacagtccctgcaattgggtctctggcaggcaatagttgaaggactcctgttccgttggggccagcacaccgggatggatggagggagagcagaggcctttgcttctctgcctacgtccccttagatgggcagcagaggcaactcccgcatcctttgctctgcctgtcagtggtcagagcggtgagcgaggtgggttggagactcagcaggctccgtgcagcccttgggaacagtgagaggttgaaggtcataacgagagtgggaactcaacccagatcccgcccctcctgtcctctgtgttcccgcggaaaccaaccaaaccgtgcgctgtgacccattgctgttctctgtatcgtgatctatcctcaacaacaacagaaaaaaggaataaaatatcctttgtttcctagtg

SEQ ID NO: 11356 - DNA, 713 bp, Homo sapiens
  source 1..713: mol_type = unassigned DNA
ccccacatcggtccgtcctgcttccagctgctgcagcgcgccttcgccgccaaagcatccagcagccccctgctccggcccagcatggcgaccccgacccagacccccacaaaggctcctgaggaacctgacccattttactatgactacaacacggtgcagactgtgggcatgactctggcaaccatcttgttcctgctgggtatcctcatcgtcatcagcaagaaggtgaagtgcaggaaggcggactccaggtctgagagcccaacctgcaaatcctgtaagtctgagcttccctcttcagcccctggtggcggcggcgtgtaacaccttcccgaggaaactccgctgccgaccctgcctgagcgcgggagcctgaggaccgggtggaggcggtggggacccagccgcgcgccgggagcgctccccggaatgagccgccccacccaccccaaggctggagccgctgcaccctgctgtccctctccaggccttggcaatgacgatcccccaaagagcccgtctgcaccccagacccagggcctcaggcctccagctcctgggatccgggagtccatcccggcccagcacccccagcatccccgtgtatggcccccctgcacctccttgtctcatccccgaagatccgtccccctggcccctcagtgtccatgtcttgagcttaataaatgtgcatttggttttttcctctg

SEQ ID NO: 11357 - DNA, 1111 bp, Homo sapiens
  source 1..1111: mol_type = unassigned DNA
atcggtccgtcctgcttccagctgctgcagcgcgccttcgccgccaaagcatccagcagccccctgctccggcccagcatggcgaccccgacccagacccccacaaaggctcctgaggaacctgacccattttactatggtgagtgttggatttggggatagggctggactggggagtagctgcaggtgctcacagatcactccggacatggcttcagctgtggccacacgatacgtgctgggccactggccacgggaccatatatgtgggtgtggttcacatcagctgagttcatggagggcagaaccagatgggggagtggggatgcctcacactctctctgagcccccttcaggtctcaccgggatctgggctggtgccttggtgtcgccagagaagcagatgaaggaaaaccttagaagcaatgactctgagcccaggctgcctggatttgaatcctgccttatccactcactagctgtatggccttgggcaagcaactttgcctctctgggcccttctgtaaacaagggatagtaatagttcccacctatgaggactgtgggaaagatacctgactggtggcattaaatctcctccatggcactgaagctcaaataagctaccccaggcctggtagatcgggctccagtttcccctctgaacaccctcctcttgcccccaccccacccctttgctcattcatactttttccctaggtgtcaatttctctcccatctcaggacctttgcgtgtgctatgattctgcagtaatgcttctcctttgtacacgaccggctaaggctcccccttattcaggcctcagatcaaacatagactactctactgggataggccctcctgactccctggcaaggaagagccacaccatactcagctggtgtcgcatgacttgtttttgagggggattgtttctttaatgttttatcacaatacgaaagtcaactccttgctggtagaggcctggaccactactggtacagagtgagtgctccataaattcatatctcaacaaatacttagcgggcacaggctctatttctggcaatgttccaagcagctggagacactgcaatgaaccacacagac

SEQ ID NO: 11358 - DNA, 2482 bp, Homo sapiens
  source 1..2482: mol_type = unassigned DNA
gccgcgctggtggcggcggcgcgtcgttgcagttgcgccatctgtcaggagcggagccggcgaggagggggctgccgcgggcgaggaggaggggtcgccgcgagccgaaggccttcgagacccgcccgccgcccggcggcgagagtagaggcgaggttgttgtgcgagcggcgcgtcctctcccgcccgggcgcgccgcgcttctcccagcgcaccgaggaccgcccgggcgcacacaaagccgccgcccgcgccgcaccgcccggcggccgccgcccgcgccagggagggattcggccgccgggccggggacaccccggcgccgccccctcggtgctctcggaaggcccaccggctcccgggcccgccggggaccccccggagccgcctcggccgcgccggaggagggcggggagaggaccatgtgagtgggctccggagcctcagcgccgcgcagtttttttgaagaagcaggatgctgatctaaacgtggaaaaagaccagtcctgcctctgttgtagaagacatgtggtgtatataaagtttgtgatcgttggcggacattttggaatttagataatgggctgtgtgcaatgtaaggataaagaagcaacaaaactgacggaggagagggacggcagcctgaaccagagctctgggtaccgctatggcacagaccccacccctcagcactaccccagcttcggtgtgacctccatccccaactacaacaacttccacgcagccgggggccaaggactcaccgtctttggaggtgtgaactcttcgtctcatacggggaccttgcgtacgagaggaggaacaggagtgacactctttgtggccctttatgactatgaagcacggacagaagagtggtactttggaaaacttggccgaaaagatgctgagcgacagctattgtcctttggaaacccaagaggtacctttcttatccgcgagagtgaaaccaccaaaggtgcctattcactttctatccgtgattgggatgatatgaaaggagaccatgtcaaacattataaaattcgcaaacttgacaatggtggatactacattaccacccgggcccagtttgaaacacttcagcagcttgtacaacattactcagagaaagctgatggtttgtgttttaacttaactgtgattgcatcgagttgtaccccacaaacttctggattggctaaagatgcttgggaagttgcacgtcgttcgttgtgtctggagaagaagctgggtcaggggtgtttcgctgaagtgtggcttggtacctggaatggaaacacaaaagtagccataaagactcttaaaccaggcacaatgtcccccgaatcattccttgaggaagcgcagatcatgaagaagctgaagcacgacaagctggtccagctctatgcagtggtgtctgaggagcccatctacatcgtcaccgagtatatgaacaaaggaagtttactggatttcttaaaagatggagaaggaagagctctgaaattaccaaatcttgtggacatggcagcacaggtggctgcaggaatggcttacatcgagcgcatgaattatatccatagagatctgcgatcagcaaacattctagtggggaatggactcatatgcaagattgctgacttcggattggcccgattgatagaagacaatgagtacacagcaagacaaggtgcaaagttccccatcaagtggacggcccccgaggcagccctgtacgggaggttcacaatcaagtctgacgtgtggtcttttggaatcttactcacagagctggtcaccaaaggaagagtgccatacccaggcatgaacaaccgggaggtgctggagcaggtggagcgaggctacaggatgccctgcccgcaggactgccccatctctctgcatgagctcatgatccactgctggaaaaaggaccctgaagaacgccccacttttgagtacttgcagagcttcctggaagactactttaccgcgacagagccccagtaccaacctggtgaaaacctgtaaggcccgggtctgcggagagaggccttgtcccagaggctgccccacccctccccattagctttcaattccgtagccagctgctccccagcagcggaaccgcccaggatcagattgcatgtgactctgaagctgacgaacttccatggccctcattaatgacacttgtccccaaatccgaacctcctctgtgaagcattcgagacagaaccttgttatttctcagactttggaaaatgcattgtatcgatgttatgtaaaaggccaaacctctgttcagtgtaaatagttactccagtgccaacaatcctagtgctttccttttttaaaaatgcaaatcctatgtgattttaactctgtcttcacctgattcaactaaaaaaaaaaaagtattattttccaaaagtggcctctttgtctaaaacaataaaattttttttcatgtttt

SEQ ID NO: 11359 - DNA, 2009 bp, Homo sapiens
  source 1..2009: mol_type = unassigned DNA
aaatgatcaagtgttgggtataagccaaggagctgagagagggggagaccagcgcaggtctgaggagctgagaagggaggcttacgtgaagggaatttagataatgggctgtgtgcaatgtaaggataaagaagcaacaaaactgacggaggagagggacggcagcctgaaccagagctctgggtaccgctatggcacagaccccacccctcagcactaccccagcttcggtgtgacctccatccccaactacaacaacttccacgcagccgggggccaaggactcaccgtctttggaggtgtgaactcttcgtctcatacggggaccttgcgtacgagaggaggaacaggagtgacactctttgtggccctttatgactatgaagcacggacagaagatgacctgagttttcacaaaggagaaaaatttcaaatattgaacagctcggaaggagattggtgggaagcccgctccttgacaactggagagacaggttacattcccagcaattatgtggctccagttgactctatccaggcagaagagtggtactttggaaaacttggccgaaaagatgctgagcgacagctattgtcctttggaaacccaagaggtacctttcttatccgcgagagtgaaaccaccaaaggtgcctattcactttctatccgtgattgggatgatatgaaaggagaccatgtcaaacattataaaattcgcaaacttgacaatggtggatactacattaccacccgggcccagtttgaaacacttcagcagcttgtacaacattactcaggtacctggaatggaaacacaaaagtagccataaagactcttaaaccaggcacaatgtcccccgaatcattccttgaggaagcgcagatcatgaagaagctgaagcacgacaagctggtccagctctatgcagtggtgtctgaggagcccatctacatcgtcaccgagtatatgaacaaaggaagtttactggatttcttaaaagatggagaaggaagagctctgaaattaccaaatcttgtggacatggcagcacaggtggctgcaggaatggcttacatcgagcgcatgaattatatccatagagatctgcgatcagcaaacattctagtggggaatggactcatatgcaagattgctgacttcggattggcccgattgatagaagacaatgagtacacagcaagacaaggtgcaaagttccccatcaagtggacggcccccgaggcagccctgtacgggaggttcacaatcaagtctgacgtgtggtcttttggaatcttactcacagagctggtcaccaaaggaagagtgccatacccaggcatgaacaaccgggaggtgctggagcaggtggagcgaggctacaggatgccctgcccgcaggactgccccatctctctgcatgagctcatgatccactgctggaaaaaggaccctgaagaacgccccacttttgagtacttgcagagcttcctggaagactactttaccgcgacagagccccagtaccaacctggtgaaaacctgtaaggcccgggtctgcggagagaggccttgtcccagaggctgccccacccctccccattagctttcaattccgtagccagctgctccccagcagcggaaccgcccaggatcagattgcatgtgactctgaagctgacgaacttccatggccctcattaatgacacttgtccccaaatccgaacctcctctgtgaagcattcgagacagaaccttgttatttctcagactttggaaaatgcattgtatcgatgttatgtaaaaggccaaacctctgttcagtgtaaatagttactccagtgccaacaatcctagtgctttccttttttaaaaatgcaaatcctatgtgattttaactctgtcttcacctgattcaactaaaaaaaaaaaagtattattttccaaaagtggcctctttgtctaaaacaataaaattttttttcatgttttaacaaaaaccaa

SEQ ID NO: 11360 - DNA, 3628 bp, Homo sapiens
  source 1..3628: mol_type = unassigned DNA
agagcatcagcaagagtagcagcgagcagccgcgctggtggcggcggcgcgtcgttgcagttgcgccatctgtcaggagcggagccggcgaggagggggctgccgcgggcgaggaggaggggtcgccgcgagccgaaggccttcgagacccgcccgccgcccggcggcgagagtagaggcgaggttgttgtgcgagcggcgcgtcctctcccgcccgggcgcgccgcgcttctcccagcgcaccgaggaccgcccgggcgcacacaaagccgccgcccgcgccgcaccgcccggcggccgccgcccgcgccagggagggattcggccgccgggccggggacaccccggcgccgccccctcggtgctctcggaaggcccaccggctcccgggcccgccggggaccccccggagccgcctcggccgcgccggaggagggcggggagaggaccatgtgagtgggctccggagcctcagcgccgcgcagtttttttgaagaagcaggatgctgatctaaacgtggaaaaagaccagtcctgcctctgttgtagaagacatgtggtgtatataaagtttgtgatcgttggcggacattttggaatttagataatgggctgtgtgcaatgtaaggataaagaagcaacaaaactgacggaggagagggacggcagcctgaaccagagctctgggtaccgctatggcacagaccccacccctcagcactaccccagcttcggtgtgacctccatccccaactacaacaacttccacgcagccgggggccaaggactcaccgtctttggaggtgtgaactcttcgtctcatacggggaccttgcgtacgagaggaggaacaggagtgacactctttgtggccctttatgactatgaagcacggacagaagatgacctgagttttcacaaaggagaaaaatttcaaatattgaacagctcggaaggagattggtgggaagcccgctccttgacaactggagagacaggttacattcccagcaattatgtggctccagttgactctatccaggcagaagagtggtactttggaaaacttggccgaaaagatgctgagcgacagctattgtcctttggaaacccaagaggtacctttcttatccgcgagagtgaaaccaccaaaggtgcctattcactttctatccgtgattgggatgatatgaaaggagaccatgtcaaacattataaaattcgcaaacttgacaatggtggatactacattaccacccgggcccagtttgaaacacttcagcagcttgtacaacattactcagagagagctgcaggtctctgctgccgcctagtagttccctgtcacaaagggatgccaaggcttaccgatctgtctgtcaaaaccaaagatgtctgggaaatccctcgagaatccctgcagttgatcaagagactgggaaatgggcagtttggggaagtatggatgggtacctggaatggaaacacaaaagtagccataaagactcttaaaccaggcacaatgtcccccgaatcattccttgaggaagcgcagatcatgaagaagctgaagcacgacaagctggtccagctctatgcagtggtgtctgaggagcccatctacatcgtcaccgagtatatgaacaaaggaagtttactggatttcttaaaagatggagaaggaagagctctgaaattaccaaatcttgtggacatggcagcacaggtggctgcaggaatggcttacatcgagcgcatgaattatatccatagagatctgcgatcagcaaacattctagtggggaatggactcatatgcaagattgctgacttcggattggcccgattgatagaagacaatgagtacacagcaagacaaggtgcaaagttccccatcaagtggacggcccccgaggcagccctgtacgggaggttcacaatcaagtctgacgtgtggtcttttggaatcttactcacagagctggtcaccaaaggaagagtgccatacccaggcatgaacaaccgggaggtgctggagcaggtggagcgaggctacaggatgccctgcccgcaggactgccccatctctctgcatgagctcatgatccactgctggaaaaaggaccctgaagaacgccccacttttgagtacttgcagagcttcctggaagactactttaccgcgacagagccccagtaccaacctggtgaaaacctgtaaggcccgggtctgcggagagaggccttgtcccagaggctgccccacccctccccattagctttcaattccgtagccagctgctccccagcagcggaaccgcccaggatcagattgcatgtgactctgaagctgacgaacttccatggccctcattaatgacacttgtccccaaatccgaacctcctctgtgaagcattcgagacagaaccttgttatttctcagactttggaaaatgcattgtatcgatgttatgtaaaaggccaaacctctgttcagtgtaaatagttactccagtgccaacaatcctagtgctttccttttttaaaaatgcaaatcctatgtgattttaactctgtcttcacctgattcaactaaaaaaaaaaaagtattattttccaaaagtggcctctttgtctaaaacaataaaattttttttcatgttttaacaaaaaccaatcaggacaggtgtttgtttttgttttcttttttataaatatgaatatatataatatatatgtccctgtacatatacaatgtgggtgctaatgtggagactgtggccggcctgagccaccaagctgcgggacccagagggaggattttactgcaagtcagcatcaaagcaccggtgttattctgaaaacaccagtggcctcatttttggcttttgcaaagcatgaattttttcatttggattgcactttcctggttcatgactgtacctgtaggtggttgttactttgactcttttcaggaaccaccccccaagctgaatttacaagttctgttagcactatttgcttcaacttactgcgatttgttctcaaaacttaaaaataagcaagcaaatggctgatactaccaagagaactggaagatggataccacacaaacttcttgtataaaaatatgaatgctgaaatgtttcagacatttttaatttaataaacctgtaaccacatttaagtgatctaaaacccatagcattgtagtcatggcaacccgctaaactttctcatgcaactaaaatttctgggggaaatgagggtgggggttgtacatttcccattgtaaaataagtgttttaaatgtcctgtactgctaacgaatgactttctatatgtccaggagttctccagtggaataactatgcactactttacatttcatggggatgcacaaaaacaaaaaagtattacatttttagttgctgtttgtaccaaccttaaattacatatgtttaacaacaacaaatcaaaaatcctatttctattgagtttttaatactgactagcaactctgaagtcttaattccttttttgttatgatttatttgtgagtttacatttttaaattgtttaactttcttaatttagtaattaaaaagagagcattttacatttgaa

SEQ ID NO: 11361 - DNA, 2473 bp, Homo sapiens
  source 1..2473: mol_type = unassigned DNA
gccgcgctggtggcggcggcgcgtcgttgcagttgcgccatctgtcaggagcggagccggcgaggagggggctgccgcgggcgaggaggaggggtcgccgcgagccgaaggccttcgagacccgcccgccgcccggcggcgagagtagaggcgaggttgttgtgcgagcggcgcgtcctctcccgcccgggcgcgccgcgcttctcccagcgcaccgaggaccgcccgggcgcacacaaagccgccgcccgcgccgcaccgcccggcggccgccgcccgcgccagggagggattcggccgccgggccggggacaccccggcgccgccccctcggtgctctcggaaggcccaccggctcccgggcccgccggggaccccccggagccgcctcggccgcgccggaggagggcggggagaggaccatgtgagtgggctccggagcctcagcgccgcgcagtttttttgaagaagcaggatgctgatctaaacgtggaaaaagaccagtcctgcctctgttgtagaagacatgtggtgtatataaagtttgtgatcgttggcggacattttggaatttagataatgggctgtgtgcaatgtaaggataaagaagcaacaaaactgacggaggagagggacggcagcctgaaccagagctctgggtaccgctatggcacagaccccacccctcagcactaccccagcttcggtgtgacctccatccccaactacaacaacttccacgcagccgggggccaaggactcaccgtctttggaggtgtgaactcttcgtctcatacggggaccttgcgtacgagaggaggaacaggagtgacactctttgtggccctttatgactatgaagcacggacagaagatgacctgagttttcacaaaggagaaaaatttcaaatattgaacagctcggaaggagattggtgggaagcccgctccttgacaactggagagacaggttacattcccagcaattatgtggctccagttgactctatccaggcagaagagtggtactttggaaaacttggccgaaaagatgctgagcgacagctattgtcctttggaaacccaagaggtacctttcttatccgcgagagtgaaaccaccaaaggtgcctattcactttctatccgtgattgggatgatatgaaaggagaccatgtcaaacattataaaattcgcaaacttgacaatggtggatactacattaccacccgggcccagtttgaaacacttcagcagcttgtacaacattactcaggtacctggaatggaaacacaaaagtagccataaagactcttaaaccaggcacaatgtcccccgaatcattccttgaggaagcgcagatcatgaagaagctgaagcacgacaagctggtccagctctatgcagtggtgtctgaggagcccatctacatcgtcaccgagtatatgaacaaaggaagtttactggatttcttaaaagatggagaaggaagagctctgaaattaccaaatcttgtggacatggcagcacaggtggctgcaggaatggcttacatcgagcgcatgaattatatccatagagatctgcgatcagcaaacattctagtggggaatggactcatatgcaagattgctgacttcggattggcccgattgatagaagacaatgagtacacagcaagacaaggtgcaaagttccccatcaagtggacggcccccgaggcagccctgtacgggaggttcacaatcaagtctgacgtgtggtcttttggaatcttactcacagagctggtcaccaaaggaagagtgccatacccaggcatgaacaaccgggaggtgctggagcaggtggagcgaggctacaggatgccctgcccgcaggactgccccatctctctgcatgagctcatgatccactgctggaaaaaggaccctgaagaacgccccacttttgagtacttgcagagcttcctggaagactactttaccgcgacagagccccagtaccaacctggtgaaaacctgtaaggcccgggtctgcggagagaggccttgtcccagaggctgccccacccctccccattagctttcaattccgtagccagctgctccccagcagcggaaccgcccaggatcagattgcatgtgactctgaagctgacgaacttccatggccctcattaatgacacttgtccccaaatccgaacctcctctgtgaagcattcgagacagaaccttgttatttctcagactttggaaaatgcattgtatcgatgttatgtaaaaggccaaacctctgttcagtgtaaatagttactccagtgccaacaatcctagtgctttccttttttaaaaatgcaaatcctatgtgattttaactctgtcttcacctgattcaactaaaaaaaaaaaagtattattttccaaaagtggcctctttgtctaaaacaataaaattttttttcatgtttt

SEQ ID NO: 11362 - DNA, 2416 bp, Homo sapiens
  source 1..2416: mol_type = unassigned DNA
aagagaacaaaagtgtctgagaaagccagagtgtgaccacgcggtttctatgctccaagggatttatttcagtggtaggtggagcagctctgtggagcacatggctaatgataatggattgactgaccagaagcaggagaggacctagcagaagccggaggtcaagctgccccaagactgggggacagcctgggtgaagactctggacctcatgaccatgtatattccagagggggatctaaagagccccagaaattcacaaaggaccagtcctgcctctgttgtagaagacatgtggtgtatataaagtttgtgatcgttggcggacattttggaatttagataatgggctgtgtgcaatgtaaggataaagaagcaacaaaactgacggaggagagggacggcagcctgaaccagagctctgggtaccgctatggcacagaccccacccctcagcactaccccagcttcggtgtgacctccatccccaactacaacaacttccacgcagccgggggccaaggactcaccgtctttggaggtgtgaactcttcgtctcatacggggaccttgcgtacgagaggaggaacaggagtgacactctttgtggccctttatgactatgaagcacggacagaagatgacctgagttttcacaaaggagaaaaatttcaaatattgaacagctcggaaggagattggtgggaagcccgctccttgacaactggagagacaggttacattcccagcaattatgtggctccagttgactctatccaggcagaagagtggtactttggaaaacttggccgaaaagatgctgagcgacagctattgtcctttggaaacccaagaggtacctttcttatccgcgagagtgaaaccaccaaaggtgcctattcactttctatccgtgattgggatgatatgaaaggagaccatgtcaaacattataaaattcgcaaacttgacaatggtggatactacattaccacccgggcccagtttgaaacacttcagcagcttgtacaacattactcagagagagctgcaggtctctgctgccgcctagtagttccctgtcacaaagggatgccaaggcttaccgatctgtctgtcaaaaccaaagatgtctgggaaatccctcgagaatccctgcagttgatcaagagactgggaaatgggcagtttggggaagtatggatgggtacctggaatggaaacacaaaagtagccataaagactcttaaaccaggcacaatgtcccccgaatcattccttgaggaagcgcagatcatgaagaagctgaagcacgacaagctggtccagctctatgcagtggtgtctgaggagcccatctacatcgtcaccgagtatatgaacaaaggaagtttactggatttcttaaaagatggagaaggaagagctctgaaattaccaaatcttgtggacatggcagcacaggtggctgcaggaatggcttacatcgagcgcatgaattatatccatagagatctgcgatcagcaaacattctagtggggaatggactcatatgcaagattgctgacttcggattggcccgattgatagaagacaatgagtacacagcaagacaaggtgcaaagttccccatcaagtggacggcccccgaggcagccctgtacgggaggttcacaatcaagtctgacgtgtggtcttttggaatcttactcacagagctggtcaccaaaggaagagtgccatacccaggcatgaacaaccgggaggtgctggagcaggtggagcgaggctacaggatgccctgcccgcaggactgccccatctctctgcatgagctcatgatccactgctggaaaaaggaccctgaagaacgccccacttttgagtacttgcagagcttcctggaagactactttaccgcgacagagccccagtaccaacctggtgaaaacctgtaaggcccgggtctgcggagagaggccttgtcccagaggctgccccacccctccccattagctttcaattccgtagccagctgctccccagcagcggaaccgcccaggatcagattgcatgtgactctgaagctgacgaacttccatggccctcattaatgacacttgtccccaaatccgaacctcctctgtgaagcattcgagacagaaccttgttatttctcagactttggaaaatgcattgtatcgatgttatgtaaaaggccaaacctctgttcagtgtaaatagttactccagtgccaacaatcctagtgctttccttttttaaaaatgcaaatcctatgtgattttaactctgtcttcacctgattcaactaaaaaaaaaaaagtattattttccaaaagtggcctctttgtctaaaacaataaaattttttttcatgttttaacaaaaaccaa

SEQ ID NO: 11363 - DNA, 2573 bp, Homo sapiens
  source 1..2573: mol_type = unassigned DNA
cgagcagccgcgctggtggcggcggcgcgtcgttgcagttgcgccatctgtcaggagcggagccggcgaggagggggctgccgcgggcgaggaggaggggtcgccgcgagccgaaggccttcgagacccgcccgccgcccggcggcgagagtagaggcgaggttgttgtgcgagcggcgcgtcctctcccgcccgggcgcgccgcgcttctcccagcgcaccgaggaccgcccgggcgcacacaaagccgccgcccgcgccgcaccgcccggcggccgccgcccgcgccagggagggattcggccgccgggccggggacaccccggcgccgccccctcggtgctctcggaaggcccaccggctcccgggcccgccggggaccccccggagccgcctcggccgcgccggaggagggcggggagaggaccatgtgagtgggctccggagcctcagcgccgcgcagtttttttgaagaagcaggatgctgatctaaacgtggaaaaagaatttagataatgggctgtgtgcaatgtaaggataaagaagcaacaaaactgacggaggagagggacggcagcctgaaccagagctctgggtaccgctatggcacagaccccacccctcagcactaccccagcttcggtgtgacctccatccccaactacaacaacttccacgcagccgggggccaaggactcaccgtctttggaggtgtgaactcttcgtctcatacggggaccttgcgtacgagaggaggaacaggagtgacactctttgtggccctttatgactatgaagcacggacagaagatgacctgagttttcacaaaggagaaaaatttcaaatattgaacagctcggaaggagattggtgggaagcccgctccttgacaactggagagacaggttacattcccagcaattatgtggctccagttgactctatccaggcagaagagtggtactttggaaaacttggccgaaaagatgctgagcgacagctattgtcctttggaaacccaagaggtacctttcttatccgcgagagtgaaaccaccaaaggtgcctattcactttctatccgtgattgggatgatatgaaaggagaccatgtcaaacattataaaattcgcaaacttgacaatggtggatactacattaccacccgggcccagtttgaaacacttcagcagcttgtacaacattactcagagaaagctgatggtttgtgttttaacttaactgtgattgcatcgagttgtaccccacaaacttctggattggctaaagatgcttgggaagttgcacgtcgttcgttgtgtctggagaagaagctgggtcaggggtgtttcgctgaagtgtggcttggtacctggaatggaaacacaaaagtagccataaagactcttaaaccaggcacaatgtcccccgaatcattccttgaggaagcgcagatcatgaagaagctgaagcacgacaagctggtccagctctatgcagtggtgtctgaggagcccatctacatcgtcaccgagtatatgaacaaaggaagtttactggatttcttaaaagatggagaaggaagagctctgaaattaccaaatcttgtggacatggcagcacaggtggctgcaggaatggcttacatcgagcgcatgaattatatccatagagatctgcgatcagcaaacattctagtggggaatggactcatatgcaagattgctgacttcggattggcccgattgatagaagacaatgagtacacagcaagacaaggtgcaaagttccccatcaagtggacggcccccgaggcagccctgtacgggaggttcacaatcaagtctgacgtgtggtcttttggaatcttactcacagagctggtcaccaaaggaagagtgccatacccaggcatgaacaaccgggaggtgctggagcaggtggagcgaggctacaggatgccctgcccgcaggactgccccatctctctgcatgagctcatgatccactgctggaaaaaggaccctgaagaacgccccacttttgagtacttgcagagcttcctggaagactactttaccgcgacagagccccagtaccaacctggtgaaaacctgtaaggcccgggtctgcggagagaggccttgtcccagaggctgccccacccctccccattagctttcaattccgtagccagctgctccccagcagcggaaccgcccaggatcagattgcatgtgactctgaagctgacgaacttccatggccctcattaatgacacttgtccccaaatccgaacctcctctgtgaagcattcgagacagaaccttgttatttctcagactttggaaaatgcattgtatcgatgttatgtaaaaggccaaacctctgttcagtgtaaatagttactccagtgccaacaatcctagtgctttccttttttaaaaatgcaaatcctatgtgattttaactctgtcttcacctgattcaactaaaaaaaaaaaagtattattttccaaaagtggcctctttgtctaaaacaataaaattttttttcatgttttaacaaaaa

SEQ ID NO: 11364 - DNA, 3234 bp, Homo sapiens
  source 1..3234: mol_type = unassigned DNA
cccgggcccgccggggaccccccggagccgcctcggccgcgccggaggagggcggggagaggaccatgtgagtgggctccggagcctcagcgccgcgcagtttttttgaagaagcaggatgctgatctaaacgtggaaaaagaccagtcctgcctctgttgtagaagacatgtggtgtatataaagtttgtgatcgttggcggacattttggaatttagataatgggctgtgtgcaatgtaaggataaagaagcaacaaaactgacggaggagagggacggcagcctgaaccagagctctgggtaccgctatggcacagaccccacccctcagcactaccccagcttcggtgtgacctccatccccaactacaacaacttccacgcagccgggggccaaggactcaccgtctttggaggtgtgaactcttcgtctcatacggggaccttgcgtacgagaggaggaacaggagtgacactctttgtggccctttatgactatgaagcacggacagaagatgacctgagttttcacaaaggagaaaaatttcaaatattgaacagctcggaaggagattggtgggaagcccgctccttgacaactggagagacaggttacattcccagcaattatgtggctccagttgactctatccaggcagaagagtggtactttggaaaacttggccgaaaagatgctgagcgacagctattgtcctttggaaacccaagaggtacctttcttatccgcgagagtgaaaccaccaaaggtgcctattcactttctatccgtgattgggatgatatgaaaggagaccatgtcaaacattataaaattcgcaaacttgacaatggtggatactacattaccacccgggcccagtttgaaacacttcagcagcttgtacaacattactcagagaaagctgatggtttgtgttttaacttaactgtgattgcatcgagttgtaccccacaaacttctggattggctaaagatgcttgggaagttgcacgtcgttcgttgtgtctggagaagaagctgggtcaggggtgtttcgctgaagtgtggcttggtacctggaatggaaacacaaaagtagccataaagactcttaaaccaggcacaatgtcccccgaatcattccttgaggaagcgcagatcatgaagaagctgaagcacgacaagctggtccagctctatgcagtggtgtctgaggagcccatctacatcgtcaccgagtatatgaacaaaggaagtttactggatttcttaaaagatggagaaggaagagctctgaaattaccaaatcttgtggacatggcagcacaggtggctgcaggaatggcttacatcgagcgcatgaattatatccatagagatctgcgatcagcaaacattctagtggggaatggactcatatgcaagattgctgacttcggattggcccgattgatagaagacaatgagtacacagcaagacaaggtgcaaagttccccatcaagtggacggcccccgaggcagccctgtacgggaggttcacaatcaagtctgacgtgtggtcttttggaatcttactcacagagctggtcaccaaaggaagagtgccatacccaggcatgaacaaccgggaggtgctggagcaggtggagcgaggctacaggatgccctgcccgcaggactgccccatctctctgcatgagctcatgatccactgctggaaaaaggaccctgaagaacgccccacttttgagtacttgcagagcttcctggaagactactttaccgcgacagagccccagtaccaacctggtgaaaacctgtaaggcccgggtctgcggagagaggccttgtcccagaggctgccccacccctccccattagctttcaattccgtagccagctgctccccagcagcggaaccgcccaggatcagattgcatgtgactctgaagctgacgaacttccatggccctcattaatgacacttgtccccaaatccgaacctcctctgtgaagcattcgagacagaaccttgttatttctcagactttggaaaatgcattgtatcgatgttatgtaaaaggccaaacctctgttcagtgtaaatagttactccagtgccaacaatcctagtgctttccttttttaaaaatgcaaatcctatgtgattttaactctgtcttcacctgattcaactaaaaaaaaaaaagtattattttccaaaagtggcctctttgtctaaaacaataaaattttttttcatgttttaacaaaaaccaatcaggacaggtgtttgtttttgttttcttttttataaatatgaatatatataatatatatgtccctgtacatatacaatgtgggtgctaatgtggagactgtggccggcctgagccaccaagctgcgggacccagagggaggattttactgcaagtcagcatcaaagcaccggtgttattctgaaaacaccagtggcctcatttttggcttttgcaaagcatgaattttttcatttggattgcactttcctggttcatgactgtacctgtaggtggttgttactttgactcttttcaggaaccaccccccaagctgaatttacaagttctgttagcactatttgcttcaacttactgcgatttgttctcaaaacttaaaaataagcaagcaaatggctgatactaccaagagaactggaagatggataccacacaaacttcttgtataaaaatatgaatgctgaaatgtttcagacatttttaatttaataaacctgtaaccacatttaagtgatctaaaacccatagcattgtagtcatggcaacccgctaaactttctcatgcaactaaaatttctgggggaaatgagggtgggggttgtacatttcccattgtaaaataagtgttttaaatgtcctgtactgctaacgaatgactttctatatgtccaggagttctccagtggaataactatgcactactttacatttcatggggatgcacaaaaacaaaaaagtattacatttttagttgctgtttgtaccaaccttaaattacatatgtttaacaacaacaaatcaaaaatcctatttctattgagtttttaatactgactagcaactctgaagtcttaattccttttttgttatgatttatttgtgagtttacatttttaaattgtttaactttcttaatttagtaattaaaaagagagcattttacatttgaa

SEQ ID NO: 11365 - DNA, 975 bp, Homo sapiens
  source 1..975: mol_type = unassigned DNA
agatctcctcccctcccagagggtccaagagaacaaaagtgtctgagaaagccagagtgtgaccacgcggtttctatgctccaagggatttatttcagtggtaggtggagcagctctgtggagcacatggctaatgataatggattgactgaccagaagcaggagaggacctagcagaagccggaggtcaagctgccccaagactgggggacagcctgggtgaagactctggacctcatgaccatgtatattccagagggggatctaaagagccccagaaattcacaaaggaccagtcctgcctctgttgtagaagacatgtggtgtatataaagtttgtgatcgttggcggacattttggaaagcaaatgagaatgagcgactgtaacccttgcctgttgttcataagcatgtacaccaggatctgtgtgatccttttcctgaagataaacagcatactgctcaaggaaggaaaacaacgcatagcaacaaatttcctgttttttaaagaaagatccaacttggtttagaaattatgctggcttgctttctatgtttctaatagagaataaggagaaacttgcttctcatttgccgacatgaggaatttagataatgggctgtgtgcaatgtaaggataaagaagcaacaaaactgacggaggagagggacggcagcctgaaccagagctctgggtaccgctatggcacagaccccacccctcagcactaccccagcttcggtgtgacctccatccccaactacaacaacttccacgcagccgggggccaaggactcaccgtctttggaggtgtgaactcttcgtctcatacggggaccttgcgtacgagaggaggaacaggagtgacactctttgtggccctttatgactatgaagcacggacagaagatgacctgagttttcacaaaggagaaaaatttcaaatattgaacagctcggaaggagattggtgg

SEQ ID NO: 11366 - DNA, 989 bp, Homo sapiens
  source 1..989: mol_type = unassigned DNA
gtataagccaaggagctgagagagggggagaccagcgcaggtctgaggagctgagaagggaggcttacgtgaagggtaagactcgcatgggcctggccggtggacaagatgtgggaactgcatggacagttatgtggaggtgcattccatcctggctggagagtgtgtgaggggcagtgggagattggtggaaaagatataggccactggtgtggaaggctgggaagccacgcttcagatcggagaaagttgctaatcagagaagcggcgttctggaggtggaatttagataatgggctgtgtgcaatgtaaggataaagaagcaacaaaactgacggaggagagggacggcagcctgaaccagagctctgggtaccgctatggcacagaccccacccctcagcactaccccagcttcggtgtgacctccatccccaactacaacaacttccacgcagccgggggccaaggactcaccgtctttggaggtgtgaactcttcgtctcatacggggaccttgcgtacgagaggaggaacaggagtgacactctttgtggccctttatgactatgaagcacggacagaagatgacctgagttttcacaaaggagaaaaatttcaaatattgaacagctcggaaggagattggtgggaagcccgctccttgacaactggagagacaggttacattcccagcaattatgtggctccagttgactctatccaggcagaagagtggtactttggaaaacttggccgaaaagatgctgagcgacagctattgtcctttggaaacccaagaggtacctttcttatccgcgagagtgaaaccaccaaaggtgcctattcactttctatccgtgattgggatgatatgaaaggagaccatgtcaaacattataaaattcgcaaacttgacaatggtggatactacattaccacccgggcccagtttgaaacacttcagcagcttgtacaacattactcag

SEQ ID NO: 11367 - DNA, 712 bp, Homo sapiens
  source 1..712: mol_type = unassigned DNA
gcccgccgcccggcggcgagagtagaggcgaggaccgcccgggcgcacacaaagccgccgcccgcgccgcaccgcccggcggccgccgcccgcgccagggagggattcggccgccgggccggggacaccccggcgccgccccctcggtgctctcggaaggcccaccggctcccgggcccgccggggaccccccggagccgcctcggccgcgccggaggagggcggggagaggaccatgtgagtgggctccggagcctcagcgccgcgcagtttttttgaagaagcaggatgctgatctaaacgtggaaaaagaccagtcctgcctctgttgtagaagacatgtggtgtatataaagtttgtgatcgttggcggacattttggaatttagataatgggctgtgtgcaatgtaaggataaagaagcaacaaaactgacggaggagagggacggcagcctgaaccagagctctgggtaccgctatggcacagaccccacccctcagcactaccccagcttcggtgtgacctccatccccaactacaacaacttccacgcagccgggggccaaggactcaccgtctttggaggtgtgaactcttcgtctcatacggggaccttgcgtacgagaggaggaacaggagtgacactctttgtggccctttatgactatgaagcacggacagaagatgacctgagttttcacaaaggaga

SEQ ID NO: 11368 - DNA, 518 bp, Homo sapiens
  source 1..518: mol_type = unassigned DNA
caggatgctgatctaaacgtggaaaaaagtgaacataagtcaagacagcagtgaggcactctggcgctgggacacagtgagaaattaagatttgctagtgctggttccagggcggcctgaactcttgtacttcagctcatgtcatgctgggacagatctgaaggaagatccatctccctcgggtttcttgatacttctgtgccttctgtctggcaagggcgtcagagccacgggaacttagaggaccagtcctgcctctgttgtagaagacatgtggtgtatataaagtttgtgatcgttggcggacattttggaatttagataatgggctgtgtgcaatgtaaggataaagaagcaacaaaactgacggaggagagggacggcagcctgaaccagagctctgggtaccgctatggcacagaccccacccctcagcactaccccagcttcggtgtgacctccatccccaactacaacaacttccacgcagccgggggccaaggactcaccgtctttgg

SEQ ID NO: 11369 - DNA, 610 bp, Homo sapiens
  source 1..610: mol_type = unassigned DNA
acagcggagagaataatcgaatgaaaactgaagctttctgctttattccttttctccttctcctttcagtcaggaatttagataatgggctgtgtgcaatgtaaggataaagaagcaacaaaactgacggaggagagggacggcagcctgaaccagagctctgggtaccgctatggcacagaccccacccctcagcactaccccagcttcggtgtgacctccatccccaactacaacaacttccacgcagccgggggccaaggactcaccgtctttggaggtgtgaactcttcgtctcatacggggaccttgcgtacgagaggaggaacaggagtgacactctttgtggccctttatgactatgaagcacggacagaagatgacctgagttttcacaaaggagaaaaatttcaaatattgaacagctcggaaggagattggtgggaagcccgctccttgacaactggagagacaggttacattcccagcaattatgtggctccagttgactctatccaggcagaagagtggtactttggaaaacttggccgaaaagatgctgagcgacagctattgtcctttggaaacccaagaggtacctttcttatcc

SEQ ID NO: 11370 - DNA, 1012 bp, Homo sapiens
  source 1..1012: mol_type = unassigned DNA
agtagaggcgaggttgttgtgcgagcggcgcgtcctctcccgcccgggcgcgccgcgcttctcccagcgcaccgaggaccgcccgggcgcacacaaagccgccgcccgcgccgcaccgcccggcggccgccgcccgcgccagggagggattcggccgccgggccggggacaccccggcgccgccccctcggtgctctcggaaggcccaccggctcccgggcccgccggggaccccccggagccgcctcggccgcgccggaggagggcggggagaggaccatgtgagtgggctccggagcctcagcgccgcgcagtttttttgaagaagcaggatgctgatctaaacgtggaaaaagaccagtcctgcctctgttgtagaagacatgtggtgtatataaagtttgtgatcgttggcggacattttgacagggtctcactctgtcacccaggctgacacgatcatggctcactacaatctctgccttcctgcctcaagggttcttccttgagcacctcagcctcccaagtagctgggaccacaggaatttagataatgggctgtgtgcaatgtaaggataaagaagcaacaaaactgacggaggagagggacggcagcctgaaccagagctctgggtaccgctatggcacagaccccacccctcagcactaccccagcttcggtgtgacctccatccccaactacaacaacttccacgcagccgggggccaaggactcaccgtctttggaggtgtgaactcttcgtctcatacggggaccttgcgtacgagaggaggaacaggagtgacactctttgtggccctttatgactatgaagcacggacagaagatgacctgagttttcacaaaggagaaaaatttcaaatattgaacagctcggaaggagattggtgggaagcccgctccttgacaactggagagacaggttacattcccagcaattatgtggctccagttgactctatccaggcagaagagtggtactttggaaaa

SEQ ID NO: 11371 - DNA, 571 bp, Homo sapiens
  source 1..571: mol_type = unassigned DNA
attccagggttaagaaatggatgggtcactgagatctagcacccagttgtcctgggcttctgcttacggggttattgagatgatagaaggcccagtttttttgaagaagcaggatgctgatctaaacgtggaaaaagaccagtcctgcctctgttgtagaagacatgtggtgtatataaagtttgtgatcgttggcggacattttggaatttagataatgggctgtgtgcaatgtaaggataaagaagcaacaaaactgacggaggagagggacggcagcctgaaccagagctctgggtaccgctatggcacagaccccacccctcagcactaccccagcttcggtgtgacctccatccccaactacaacaacttccacgcagccgggggccaaggactcaccgtctttggaggtgtgaactcttcgtctcatacggggaccttgcgtacgagaggaggaacaggagtgacactctttgtggccctttatgactatgaagcacggacagaagatgacctgagttttcacaaaggagaaaaatttcaaatattgaacagctcggaaggagat

SEQ ID NO: 11372 - DNA, 864 bp, Homo sapiens
  source 1..864: mol_type = unassigned DNA
cctcggccgcgccggaggagggcggggagaggaccatgtgagtgggctccggagcctcagcgccgcgcagtttttttgaagaagcaggatgctgatctaaacgtggaaaaagaccagtcctgcctctgttgtagaagacatgtggtgtatataaagtttgtgatcgttggcggacattttgggtctcactctgtcacccaggctgacacgatcatggctcactacaatctctgccttcctgcctcaagggttcttccttgagcacctcagcctcccaagtagctgggaccacaggaatttagataatgggctgtgtgcaatgtaaggataaagaagcaacaaaactgacggaggagagggacggcagcctgaaccagagctctgggtaccgctatggcacagaccccacccctcagcactaccccagcttcggtgtgacctccatccccaactacaacaacttccacgcagccgggggccaaggactcaccgtctttggaggtgtgaactcttcgtctcatacggggaccttgcgtacgagaggaggaacaggagtgacactctttgtggccctttatgactatgaagcacggacagaagatgacctgagttttcacaaaggagaaaaatttcaaatattgaacagctcggaaggagattggtgggaagcccgctccttgacaactggagagacaggttacattcccagcaattatgtggctccagttgactctatccaggcagaagagtggtactttggaaaacttggccgaaaagatgctgagcgacagctattgtcctttggaaacccaagaggtacctttcttatccgcgagagtgaaaccaccaaaggtgcctattcac

SEQ ID NO: 11373 - DNA, 609 bp, Homo sapiens
  source 1..609: mol_type = unassigned DNA
atcatctgatagccataggatgtcatccaaacttgtgtcatggtcctgtaatgttcccgggtttgtggagtgaagaaaataacacttgggtatttggaatttattcttaagctgtttttgtcagggatggatgagtttctcattcttgagttgaaatgaaacttttaaatattcttaataactgtcttatcgccagaccctctgcatgagacaccaagggaccagtcctgcctctgttgtagaagacatgtggtgtatataaagtttgtgatcgttggcggacattttggaatttagataatgggctgtgtgcaatgtaaggataaagaagcaacaaaactgacggaggagagggacggcagcctgaaccagagctctgggtaccgctatggcacagaccccacccctcagcactaccccagcttcggtgtgacctccatccccaactacaacaacttccacgcagccgggggccaaggactcaccgtctttggaggtgtgaactcttcgtctcatacggggaccttgcgtacgagaggaggaacaggagtgacactctttgtggccctttatgactatgaagcacggacagaagatgacctgagtttt

SEQ ID NO: 11374 - DNA, 1012 bp, Homo sapiens
  source 1..1012: mol_type = unassigned DNA
agagtagcagcgagcagccgcgctggtggcggcggcgcgtcgttgcagttgcgccatctgtcaggagcggagccggcgaggagggggctgccgcgggcgaggaggaggggtcgccgcgagccgaaggccttcgagacccgcccgccgcccggcggcgagagtagaggcgaggttgttgtgcgagcggcgcgtcctctcccgcccgggcgcgccgcgcttctcccagcgcaccgaggaccgcccgggcgcacacaaagccgccgcccgcgccgcaccgcccggcggccgccgcccgcgccagggagggattcggccgccgggccggggacaccccggcgccgccccctcggtgctctcggaaggcccaccggctcccgggcccgccggggaccccccggagccgcctcggccgcgccggaggagggcggggagaggaccatgtgagtgggctccggagcctcagcgccgcgcaggaccagtcctgcctctgttgtagaagacatgtggtgtatataaagtttgtgatcgttggcggacattttggaatttagataatgggctgtgtgcaatgtaaggataaagaagcaacaaaactgacggaggagagggacggcagcctgaaccagagctctgggtaccgctatggcacagaccccacccctcagcactaccccagcttcggtgtgacctccatccccaactacaacaacttccacgcagccgggggccaaggactcaccgtctttggaggtgtgaactcttcgtctcatacggggaccttgcgtacgagaggaggaacaggagtgacactctttgtggccctttatgactatgaagcacggacagaagatgacctgagttttcacaaaggagaaaaatttcaaatattgaacagctcggaaggagattggtgggaagcccgctccttgacaactggagagacaggttacattcccagcaattatgtggctccagttgactctatccaggcagaagagtggtactttggaaa

SEQ ID NO: 11375 - DNA, 597 bp, Homo sapiens
  source 1..597: mol_type = unassigned DNA
atttttcttatcagtaaagtggtccctttcacaggaccaagtaaaattactcgcttttaaattgaaaaacacaaaccaaatacattttgtttttgtttttgttttctgacttgggtcttgaattaaaatggaaaaagggctgttggccaccagtctaaagaatgccaggaccagtcctgcctctgttgtagaagacatgtggtgtatataaagtttgtgatcgttggcggacattttggaatttagataatgggctgtgtgcaatgtaaggataaagaagcaacaaaactgacggaggagagggacggcagcctgaaccagagctctgggtaccgctatggcacagaccccacccctcagcactaccccagcttcggtgtgacctccatccccaactacaacaacttccacgcagccgggggccaaggactcaccgtctttggaggtgtgaactcttcgtctcatacggggaccttgcgtacgagaggaggaacaggagtgacactctttgtggccctttatgactatgaagcacggacagaagatgacctgagttttcacaaaggagaaaaatttcaaatattgaacagctcggaa

SEQ ID NO: 11376 - DNA, 569 bp, Homo sapiens
  source 1..569: mol_type = unassigned DNA
aaaatgtgtcatctcatcctggggactgcccttggccactgctgaatctgttttgaaacctctttgcaggaccagtcctgcctctgttgtagaagacatgtggtgtatataaagtttgtgatcgttggcggacattttggaatttagataatgggctgtgtgcaatgtaaggataaagaagcaacaaaactgacggaggagagggacggcagcctgaaccagagctctgggtaccgctatggcacagaccccacccctcagcactaccccagcttcggtgtgacctccatccccaactacaacaacttccacgcagccgggggccaaggactcaccgtctttggaggtgtgaactcttcgtctcatacggggaccttgcgtacgagaggaggaacaggagtgacactctttgtggccctttatgactatgaagcacggacagaagatgacctgagttttcacaaaggagaaaaatttcaaatattgaacagctcggaaggagattggtgggaagcccgctccttgacaactggagagacaggttacattcccagcaattatgtggctcc

SEQ ID NO: 11377 - DNA, 541 bp, Homo sapiens
  source 1..541: mol_type = unassigned DNA
acataataaagcctagaaaagaaaggaccagtcctgcctctgttgtagaagacatgtggtgtatataaagtttgtgatcgttggcggacattttggaatttagataatgggctgtgtgcaatgtaaggataaagaagcaacaaaactgacggaggagagggacggcagcctgaaccagagctctgggtaccgctatggcacagaccccacccctcagcactaccccagcttcggtgtgacctccatccccaactacaacaacttccacgcagccgggggccaaggactcaccgtctttggaggtgtgaactcttcgtctcatacggggaccttgcgtacgagaggaggaacaggagtgacactctttgtggccctttatgactatgaagcacggacagaagatgacctgagttttcacaaaggagaaaaatttcaaatattgaacagctcggaaggagattggtgggaagcccgctccttgacaactggagagacaggttacattcccagcaattatgtggctccagttgactctatccag

SEQ ID NO: 11378 - DNA, 2061 bp, Homo sapiens
  source 1..2061: mol_type = unassigned DNA
gaatttagataatgggctgtgtgcaatgtaaggataaagaagcaacaaaactgacggaggagagggacggcagcctgaaccagagctctgggtaccgctatggcacagaccccacccctcagcactaccccagcttcggtgtgacctccatccccaactacaacaacttccacgcagccgggggccaaggactcaccgtctttggaggtgtgaactcttcgtctcatacggggaccttgcgtacgagaggaggaacaggagtgacactctttgtggccctttatgactatgaagcacggacagaagatgacctgagttttcacaaaggagaaaaatttcaaatattgaacagctcggaaggagattggtgggaagcccgctccttgacaactggagagacaggttacattcccagcaattatgtggctccagttgactctatccaggcagaagagtggtactttggaaaacttggccgaaaagatgctgagcgacagctattgtcctttggaaacccaagaggtacctttcttatccgcgagagtgaaaccaccaaaggtgcctattcactttctatccgtgattgggatgatatgaaaggagaccatgtcaaacattataaaattcgcaaacttgacaatggtggatactacattaccacccgggcccagtttgaaacacttcagcagcttgtacaacattactcagagaaagctgatggtttgtgttttaacttaactgtgattgcatcgagttgtaccccacaaacttctggattggctaaagatgcttgggaagttgcacgtcgttcgttgtgtctggagaagaagctgggtcaggggtgtttcgctgaagtgtggcttggtacctggaatggaaacacaaaagtagccataaagactcttaaaccaggcacaatgtcccccgaatcattccttgaggaagcgcagatcatgaagaagctgaagcacgacaagctggtccagctctatgcagtggtgtctgaggagcccatctacatcgtcaccgagtatatgaacaaaggaagtttactggatttcttaaaagatggagaaggaagagctctgaaattaccaaatcttgtggacatggcagcacaggtggctgcaggaatggcttacatcgagcgcatgaattatatccatagagatctgcgatcagcaaacattctagtggggaatggactcatatgcaagattgctgacttcggattggcccgattgatagaagacaatgagtacacagcaagacaaggtgcaaagttccccatcaagtggacggcccccgaggcagccctgtacgggaggttcacaatcaagtctgacgtgtggtcttttggaatcttactcacagagctggtcaccaaaggaagagtgccatacccaggcatgaacaaccgggaggtgctggagcaggtggagcgaggctacaggatgccctgcccgcaggactgccccatctctctgcatgagctcatgatccactgctggaaaaaggaccctgaagaacgccccacttttgagtacttgcagagcttcctggaagactactttaccgcgacagagccccagtaccaacctggtgaaaacctgtaaggcccgggtctgcggagagaggccttgtcccagaggctgccccacccctccccattagctttcaattccgtagccagctgctccccagcagcggaaccgcccaggatcagattgcatgtgactctgaagctgacgaacttccatggccctcattaatgacacttgtccccaaatccgaacctcctctgtgaagcattcgagacagaaccttgttatttctcagactttggaaaatgcattgtatcgatgttatgtaaaaggccaaacctctgttcagtgtaaatagttactccagtgccaacaatcctagtgctttccttttttaaaaatgcaaatcctatgtgattttaactctgtcttcacctgattcaactaaaaaaaaaaaagtattattttccaaaagtggcctctttgtctaaaacaataaaattttttttcatgtttt

SEQ ID NO: 11379 - DNA, 2172 bp, Homo sapiens
  source 1..2172: mol_type = unassigned DNA
aacaaaagtgtctgagaaagccagagtgtgaccacgcggtttctatgctccaagggatttatttcagtggtaggtggagcagctctgtggagcacatggctaatgataatggattgactgaccagaagcaggagaggacctagcagaagccggaggtcaagctgccccaagactgggggacagcctgggtgaagactctggacctcatgaccatgtatattccagagggggatctaaagagccccagaaattcacaaaggaccagtcctgcctctgttgtagaagacatgtggtgtatataaagtttgtgatcgttggcggacattttggaatttagataatgggctgtgtgcaatgtaaggataaagaagcaacaaaactgacggaggagagggacggcagcctgaaccagagctctgggtaccgctatggcacagaccccacccctcagcactaccccagcttcggtgtgacctccatccccaactacaacaacttccacgcagccgggggccaaggactcaccgtctttggaggtgtgaactcttcgtctcatacggggaccttgcgtacgagaggaggaacaggagtgacactctttgtggccctttatgactatgaagcacaggcagaagagtggtactttggaaaacttggccgaaaagatgctgagcgacagctattgtcctttggaaacccaagaggtacctttcttatccgcgagagtgaaaccaccaaaggtgcctattcactttctatccgtgattgggatgatatgaaaggagaccatgtcaaacattataaaattcgcaaacttgacaatggtggatactacattaccacccgggcccagtttgaaacacttcagcagcttgtacaacattactcagagaaagctgatggtttgtgttttaacttaactgtgattgcatcgagttgtaccccacaaacttctggattggctaaagatgcttgggaagttgcacgtcgttcgttgtgtctggagaagaagctgggtcaggggtgtttcgctgaagtgtggcttggtacctggaatggaaacacaaaagtagccataaagactcttaaaccaggcacaatgtcccccgaatcattccttgaggaagcgcagatcatgaagaagctgaagcacgacaagctggtccagctctatgcagtggtgtctgaggagcccatctacatcgtcaccgagtatatgaacaaaggaagtttactggatttcttaaaagatggagaaggaagagctctgaaattaccaaatcttgtggacatggcagcacaggtggctgcaggaatggcttacatcgagcgcatgaattatatccatagagatctgcgatcagcaaacattctagtggggaatggactcatatgcaagattgctgacttcggattggcccgattgatagaagacaatgagtacacagcaagacaaggtgcaaagttccccatcaagtggacggcccccgaggcagccctgtacgggaggttcacaatcaagtctgacgtgtggtcttttggaatcttactcacagagctggtcaccaaaggaagagtgccatacccaggcatgaacaaccgggaggtgctggagcaggtggagcgaggctacaggatgccctgcccgcaggactgccccatctctctgcatgagctcatgatccactgctggaaaaaggaccctgaagaacgccccacttttgagtacttgcagagcttcctggaagactactttaccgcgacagagccccagtaccaacctggtgaaaacctgtaaggcccgggtctgcggagagaggccttgtcccagaggctgccccacccctccccattagctttcaattccgtagccagctgctccccagcagcggaaccgcccaggatcagattgcatgtgactctgaagctgacgaacttccatggccctcattaatgacacttgtccccaaatccgaacctcctctgtgaagcattcgagacagaaccttgttatttctcagactttggaaaatgcattgtatcgatgttatgtaaaaggccaaacctctgttcagtgtaaatagttactccagtgccaacaatcctagtgctttccttttttaaaaatgcaaatcctatgtgattttaactctgtcttcacctgattcaact

SEQ ID NO: 11380 - DNA, 8504 bp, Homo sapiens
  source 1..8504: mol_type = unassigned DNA
gtgtgcgcgtcatggccgtcagcaccgcgttcccgtcctcttccgcttggccccagaaagtttcggttctgcccggcggtggacccacgagcgcgtgccaccatggagtctgaccactgctgagcagacagccaccgagggccgaaattctgagccttcctctggacccaggcaggagacatacagacaagaaaggcaaactcaccatggcctccaccaatgcagagagccagctccagagaatcatccgagacttgcaagatgctgtgacagaactaagcaaagaatttcaggaagcaggggaacccatcacggatgacagcaccagcttgcataaattttcttataaacttgagtatctcctgcaatttgatcagaaagagaaggccaccctcctgggcaacaagaaggactactgggattacttctgtgcctgcctggccaaggtgaaaggagccaatgatgggatccgctttgtcaagtctatctcagagctccgaacatccttggggaaaggaagagcatttattcgctactccttggtgcaccagaggttggcagacaccttacagcagtgcttcatgaacaccaaagtgaccagtgactggtactatgcaagaagcccctttctgcagccaaagctgagctcggacattgtgggccaactctatgagctgactgaggttcagtttgacctggcgtcgaggggctttgacttggatgctgcctggccaacatttgccaggaggacgctgaccactggctcttctgcttacctgtggaaaccccctagccgcagctccagcatgagcagcttggtgagcagctacctgcagactcaagagatggtgtccaactttgacctgaacagccccctaaacaacgaggcattggagggctttgatgagatgcgactagagctggaccagttggaggtgcgggagaagcagctacgggagcgcatgcagcagctggacagagagaaccaggagctgagggcagctgtcagccagcaaggggagcaactgcagacagagagggagagggggcgcactgcagcggaggacaacgttcgcctcacttgcttggtagctgagctccagaagcagtgggaggtcacccaggccacccagaacactgtgaaggagctgcagacatgcctgcagggcctggagctaggagcagcagagaaggaggaggactaccacacagccctgcggcggctggagtccatgctgcagcccttggcacaggagcttgaggccacacgggactcactggacaagaaaaaccagcatttagccagcttcccaggctggctagccatggctcagcagaaggcagatacggcatcagacacaaagggccggcaagaacctattcccagtgatgcggcccaggagatgcaggagctaggggagaagcttcaagccctagaaagggagagaaccaaggtcgaggaggtcaacagacagcagagtgcccaactggaacagctggtcaaggagcttcagctgaaagaggatgcccgggccagcctggagcgcctggtgaaggagatggccccactccaggaggagttgtctgggaagggacaggaggcagaccagctctggcgacggctgcaggagttgctggcccacacgagctcctgggaggaggagctagcagagttgaggcgggagaaaaaacagcaacaggaggagaaggagctgctggagcaggaggtcaggtctctgacccggcagctgcagttcctggagacccagctggcacaggtgagccaacatgtgagtgacctggaggagcagaagaagcagctcattcaggacaaagaccacctcagccagcaggtgggtatgctcgagcggcttgctgggccgcctggcccagaactgccagtggcaggtgagaagaatgaggccctggtccctgtgaactccagtctgcaagaggcctgggggaagccagaggaggagcagaggggcctgcaggaggcacagttagacgataccaaggtgcaagagggcagccaggaggaagagctccggcaggccaacagggagctggagaaggagctacagaatgtggtcgggcgtaaccagctcctggagggcaagctgcaagccctgcaggccgattaccaggctttgcagcagcgggaatcagccatccagggctccttggcctccctggaggccgagcaggccagcatccggcacttgggtgaccagatggaggcgagcttgctggctgtaaggaaggccaaggaggccatgaaagcccagatggcagagaaggaggccattctacagagcaaggagggcgagtgtcagcagctgcgggaggaggtggagcagtgccagcaactggcagaagcccggcacagagagcttagggctctcgagagccagtgccagcagcagacccagctgattgaggtcctcacagcagagaaaggccaacagggagttggcccacccactgacaatgaagcccgtgagctggctgcccagctagccctgtctcaggcgcagctggaagtccatcagggggaggtccaacggctgcaggctcaggtggtggacctccaggccaagatgcgggcagccctggatgaccaggacaaggtgcagagccagctaagcatggctgaggccgtcctgagggagcacaaaacccttgtgcagcagctgaaggagcagaatgaagcccttaacagagcccatgtccaggagctgctgcaatgctcggagcgtgaaggggcactgcaggaggagagggccgatgaggcccagcagagggaggaggagctgcgggccctgcaggaggagctgtcccaggccaaatgcagctccgaggaagcacagctggagcacgctgagctgcaagagcagctgcaccgggccaacacagacacagctgagctgggcatccaggtttgcgcactgaccgtggaaaaggagcgagtggaggaggcactggcctgtgctgtccaggagctccaggacgccaaagaggcagcctcaagggagcgagagggcctggagcgccaagtagctgggctgcagcaagagaaggagagcttgcaggagaagctgaaggcggccaaggcagcagccggctcactgcctggcctgcaggcccagctcgcccaggcagagcagcgggcccagagcctccaagaggctgcacaccaggagctcaacaccctcaagttccagctgagtgctgaaatcatggactaccagagcagacttaagaatgctggtgaagagtgcaagagcctcaggggccagcttgaggagcaaggccggcagctgcaggctgctgaggaagctgtggagaagctgaaggccacccaagcagacatgggagagaagctgagctgcactagcaaccatcttgcagagtgccaggcggccatgctgaggaaggacaaggagggggctgccctgcgtgaagacctagaaaggacccagaaggaactcgaaaaagccacaacaaaaatccaagagtattacaacaaactctgccaggaggtgacaaatcgtgagaggaatgaccagaagatgcttgctgacctggatgacctcaacagaaccaagaagtatctcgaggagcggctgatagagctgctcagggacaaggatgctctctggcagaagtcagatgccctggaattccagcagaagctcagtgctgaggagagatggctcggagacacagaggcaaaccactgcctcgactgtaagcgggagttcagctggatggtgcggcggcaccactgcaggatatgtggccgcatcttctgttactactgctgcaacaactacgtcctgagcaagcacggtggcaaaaaggagcgctgctgccgagcctgtttccagaagctcagtgaaggccctggctcccctgatagcagtggctcaggcactagccagggagagcccagccctgcactgtcaccagcctcacctgggccccaggccacaggaggccaaggagcaaatacagactacaggccaccggacgacgctgtgtttgatatcatcacagatgaggaattgtgccagatacaggagtccggctcctctttgcctgaaacacccactgaaactgattctctcgacccaaatgcggctgaacaggatactacatcaacctcgctaacgcctgaggacactgaagacatgcccgtggggcaggattcggaaatctgcctgctgaagtctggagaactgatgatcaaagtacccctcacagtggatgagatcgccagcttcggggagggtagcagggagctgtttgtgaggtccagcacctacagcctgatccccatcactgtggccgaggcaggcctcaccatcagctgggtcttctcctctgaccccaagagcatctccttcagtgtggtcttccaggaggccgaggacacaccgctggatcagtgtaaggtcctcattcccacgacccgatgcaactcccacaaggagaacatccagggccagctcaaggttcgcacacccggcatctacatgctcatcttcgacaataccttctcaaggtttgtctctaaaaaggtattttatcacttgacggttgatcggcctgtgatctacgatggaagtgatttcctgtagcttcagcacctcagtaacttcacttcatccacaggaaacactgctcttcctcacctgtcacataaagcatttttttaaaaagtcagctgctccaaaatcatcaactcagcccctgggctgcccctcagaggcggtgtctggggaggactttgtgctcagcactctgcaccggccactcttagcccccgaggcgttgaagggctcaggcaatgtttccattaagtagagactcagctgttgtcacacccaaagggatgctctgccaaaggtttaaacacccaggagaccatcagcctctcctgggagcacagttggctacaggcctcttgtggagagtttcacgggcaggggtgattccaacttctgcctgtggagagattttctgccctgccccaccagggccctgcatgttggagactgagctgggtgcactggccatgccctgtgaatcctcaggctgtgacgccctcaggtactcctgggaaaaggaggtacacagccatcatgcgagtcggtgccaggggaccccccggagatcctgaccagctcctccagtcatgctcttgtccctcactgccccagtaagctggaggctgctccagaactcagcagtgttggaggggcctctaagctgcactctctttctggcccttttgtctgggtgattctgtcctcaaataaagcccttcactcagccagacctctccacagctcaaagcattgccctaagaatcagaagtaaagataatccaagagcaaaacccactgtacttggggcctgcaatggctgtgtgtacactacatctaatgcccaaatgccagccagtgtggatgttgtgaccacagagcaggattgtgcattggctttagagctactcctcagctgatggcccacttttgtttatataaataagagcttctgccccacctgcagacatgtttactaatgatcatagccaggattagaaccactttcaaacattggggccttcttaacaaaagtctttgataacttaagaaccaaagtaacagagtaaacagaggcatgatggatccctgggccccactcccctcctgacaggttccccaacagcccatttgcccacttcccactgctcagcccacaccagacctccaggagacatccccccttgaggcagagagatcctgttccctattcccagacaagaattatttaatcttccctgttctctgtggtccttttcttccccaacaacagatagctcaccttggacagctcttcgtcccttgttcatggaaccagctgcctgcagtcaggccccaggttcttccatgggtgaacagagcatctgacaaaaggtcccagtttggccaggggtgagggagagagcaccagacaggctatccgagaatctgagagctgggcccggcagttcctccagctacccttgtgacctaagtccagtcacacatttcccaaagtttctctttgtcataaccctggtctggctggttttgagggcttgagaatgggtcagggactccaggccaagtccaacagagaccccaaacccaccacacaccagcagccacaacctcaccaccaacaaagaggacttttgtggggccacaagtaagaggtcatttctggaatggactcagacctttaaacaggagagttgagcacttccagtcagtttttaagcaaggcatggggaacagggaatagaacctttcaaagaggttgcccagagaaaagctgggcctcttgcattcggcttccttggagcagcctcttctggcagaaagccatcaggtgctcaatcatcttctcctggccaaggctctgaccatgcttagtactggaatagaggtggccaggcccccagcgactcttcttggcctgatgtttgtcctcacaggcatgccacgtggcctgagatgattcagaacaaatcatgctaactttgaatccatccagccacttgcaaatgataatcagaagtcagcttgttcactgttagaaagaaactaacaaaagagaacccagagcaatctagaatctttgagtgcttggctttccaaggatactgcggagactctggccaagctgatgaccttctgaagtgtcactggcaccatatgcaacaagaaccaccattcactgagtagctaatgggtttggggcctgggacattccatctgaggtccttcctgaacatgtcactccacagcagaggaccggttgcagcttacccagaaccactcctccaggagagctggatgttttgcgtgcaacaccttgagcactgactgctattgttcaaaaaaagcctttgctgcattcggaggactgccccgtgccctgaggtgacttcctaactatgtggtttcattagcgaatttattttttgtgctgggtggacatttgtattttgttaggttgctgtttaagctcaagtttgctgtgctctctgcagctacaaaacatcttggcatatttaagagtggcttttataaatagctttattctgatattaatcagattcccaactttactgagaattaaggactggggtactttaaagaaatgcaaatagcaattgaagaaccactgctgcaggtggtagccctggctagactgaattacactagaaatcagccagaaggaagcgtccttgggatcccagatcactctttttttttttttttaaaaggggcagccccttgatggctcatctctctgaataacagttacgtcttcatatcgataccagatgccttcttcatcatgccactgaagccactcaccaccttcaagaacatgccaacctctgtcagattcacttacccacaaacaaggaggcacgtttggcacaaagtgttgtcctccaggtccaagtggactctacagagtgcttgacctcaacacactggattccaggtggactggaccaagagcaggcaaagacacgggaactgaaaaactccacagggtttggagaatagaaatgaaaagccacgtcatataactcaagaataaatggtgttttggaaattttaaaattatcatcgaaggtggtgaaactatttcaggcccaaatgaaaggaaatcgccagttggggatgaaatcacagagcctgtgttttatgatatggttggatgtccactgatgaaattttaaaggagtttcagttttaaaagtgcgcatgattctacatatgagaattctttaggccaagaaactgtccttggctcagaggtgttgggaattaaagcagagagaagccattcgtgatgcttagaaccaaggatggtcatgtacacaaagaccatcgagacggccattcttgtttacaaaacacttaccaagaaagcactttgtaggggaactttagtaagttcttctcatttcattatgtttcttccaaggaaacaggagagactgaattaataattctctctttcctcttaagcacttttaaaataataaagtacatcttgaaatttggggaggcatctctgatttaaaaaaagaaaaaggctgcttgatgtatgttatgcagagacactctgcctctggtggctgcagagcaatacccaagcctcatttggaaggctcaacatttggaattgcactttaattgattaatcctcaattcatgtggccttacgggatggtgggtctgggaccccaattcattcttatctgccaaagaattatctagaagcacatcaaataccagcaccccacctgctcaatgggggtggaaaacttttgtatccctaagcatattattttatagtgtctgccatgccatgtggaaatactttatttttaacctcaggatttaaataaagtaaacactatgacattt

SEQ ID NO: 11381 - DNA, 4317 bp, Homo sapiens
  source 1..4317: mol_type = unassigned DNA
tgagcaagcacggtggcaaaaaggagcgctgctgccgagcctgtttccagaagctcagtgaaggccctggctcccctgatagcagtggctcaggcactagccagggagagcccagccctgcactgtcaccagcctcacctgggccccaggccacaggaggccaaggagcaaatacagactacaggccaccggacgacgctgtgtttgatatcatcacagatgaggaattgtgccagatacaggagtccggctcctctttgcctgaaacacccactgaaactgattctctcgacccaaatgcggctgaacaggatactacatcaacctcgctaacgcctgaggacactgaagacatgcccgtggggcaggattcggaaatctgcctgctgaagtctggagaactgatgatcaaagtacccctcacagtggatgagatcgccagcttcggggagggtagcagggagctgtttgtgaggtccagcacctacagcctgatccccatcactgtggccgaggcaggcctcaccatcagctgggtcttctcctctgaccccaagagcatctccttcagtgtggtcttccaggaggccgaggacacaccgctggatcagtgtaaggtcctcattcccacgacccgatgcaactcccacaaggagaacatccagggccagctcaaggttcgcacacccggcatctacatgctcatcttcgacaataccttctcaaggtttgtctctaaaaaggtattttatcacttgacggttgatcggcctgtgatctacgatggaagtgatttcctgtagcttcagcacctcagtaacttcacttcatccacaggaaacactgctcttcctcacctgtcacataaagcatttttttaaaaagtcagctgctccaaaatcatcaactcagcccctgggctgcccctcagaggcggtgtctggggaggactttgtgctcagcactctgcaccggccactcttagcccccgaggcgttgaagggctcaggcaatgtttccattaagtagagactcagctgttgtcacacccaaagggatgctctgccaaaggtttaaacacccaggagaccatcagcctctcctgggagcacagttggctacaggcctcttgtggagagtttcacgggcaggggtgattccaacttctgcctgtggagagattttctgccctgccccaccagggccctgcatgttggagactgagctgggtgcactggccatgccctgtgaatcctcaggctgtgacgccctcaggtactcctgggaaaaggaggtacacagccatcatgcgagtcggtgccaggggaccccccggagatcctgaccagctcctccagtcatgctcttgtccctcactgccccagtaagctggaggctgctccagaactcagcagtgttggaggggcctctaagctgcactctctttctggcccttttgtctgggtgattctgtcctcaaataaagcccttcactcagccagacctctccacagctcaaagcattgccctaagaatcagaagtaaagataatccaagagcaaaacccactgtacttggggcctgcaatggctgtgtgtacactacatctaatgcccaaatgccagccagtgtggatgttgtgaccacagagcaggattgtgcattggctttagagctactcctcagctgatggcccacttttgtttatataaataagagcttctgccccacctgcagacatgtttactaatgatcatagccaggattagaaccactttcaaacattggggccttcttaacaaaagtctttgataacttaagaaccaaagtaacagagtaaacagaggcatgatggatccctgggccccactcccctcctgacaggttccccaacagcccatttgcccacttcccactgctcagcccacaccagacctccaggagacatccccccttgaggcagagagatcctgttccctattcccagacaagaattatttaatcttccctgttctctgtggtccttttcttccccaacaacagatagctcaccttggacagctcttcgtcccttgttcatggaaccagctgcctgcagtcaggccccaggttcttccatgggtgaacagagcatctgacaaaaggtcccagtttggccaggggtgagggagagagcaccagacaggctatccgagaatctgagagctgggcccggcagttcctccagctacccttgtgacctaagtccagtcacacatttcccaaagtttctctttgtcataaccctggtctggctggttttgagggcttgagaatgggtcagggactccaggccaagtccaacagagaccccaaacccaccacacaccagcagccacaacctcaccaccaacaaagaggacttttgtggggccacaagtaagaggtcatttctggaatggactcagacctttaaacaggagagttgagcacttccagtcagtttttaagcaaggcatggggaacagggaatagaacctttcaaagaggttgcccagagaaaagctgggcctcttgcattcggcttccttggagcagcctcttctggcagaaagccatcaggtgctcaatcatcttctcctggccaaggctctgaccatgcttagtactggaatagaggtggccaggcccccagcgactcttcttggcctgatgtttgtcctcacaggcatgccacgtggcctgagatgattcagaacaaatcatgctaactttgaatccatccagccacttgcaaatgataatcagaagtcagcttgttcactgttagaaagaaactaacaaaagagaacccagagcaatctagaatctttgagtgcttggctttccaaggatactgcggagactctggccaagctgatgaccttctgaagtgtcactggcaccatatgcaacaagaaccaccattcactgagtagctaatgggtttggggcctgggacattccatctgaggtccttcctgaacatgtcactccacagcagaggaccggttgcagcttacccagaaccactcctccaggagagctggatgttttgcgtgcaacaccttgagcactgactgctattgttcaaaaaaagcctttgctgcattcggaggactgccccgtgccctgaggggcagccccttgatggctcatctctctgaataacagttacgtcttcatatcgataccagatgccttcttcatcatgccactgaagccactcaccaccttcaagaacatgccaacctctgtcagattcacttacccacaaacaaggaggcacgtttggcacaaagtgttgtcctccaggtccaagtggactctacagagtgcttgacctcaacacactggattccaggtggactggaccaagagcaggcaaagacacgggaactgaaaaactccacagggtttggagaatagaaatgaaaagccacgtcatataactcaagaataaatggtgttttggaaattttaaaattatcatcgaaggtggtgaaactatttcaggcccaaatgaaaggaaatcgccagttggggatgaaatcacagagcctgtgttttatgatatggttggatgtccactgatgaaattttaaaggagtttcagttttaaaagtgcgcatgattctacatatgagaattctttaggccaagaaactgtccttggctcagaggtgttgggaattaaagcagagagaagccattcgtgatgcttagaaccaaggatggtcatgtacacaaagaccatcgagacggccattcttgtttacaaaacacttaccaagaaagcactttgtaggggaactttagtaagttcttctcatttcattatgtttcttccaaggaaacaggagagactgaattaataattctctctttcctcttaagcacttttaaaataataaagtacatcttgaaatttggggaggcatctctgatttaaaaaaagaaaaaggctgcttgatgtatgttatgcagagacactctgcctctggtggctgcagagcaatacccaagcctcatttggaaggctcaacatttggaattgcactttaattgattaatcctcaattcatgtggccttacgggatggtgggtctgggaccccaattcattcttatctgccaaagaattatctagaagcacatcaaataccagcaccccacctgctcaatgggggtggaaaacttttgtatccctaagcatattattttatagtgtctgccatgccatgtggaaatactttatttttaacctcaggatttaaataaagtaaacactatgacattt

SEQ ID NO: 11382 - DNA, 4635 bp, Homo sapiens
  source 1..4635: mol_type = unassigned DNA
gagcagacagccaccgagggccgaaattctgagccttcctctggacccaggcaggagacatacagacaagaaaggcaaactcaccatggcctccaccaatgcagagagccagctccagagaatcatccgagacttgcaagatgctgtgacagaactaagcaaagaatttcaggaagcaggggaacccatcacggatgacagcaccagcttgcataaattttcttataaacttgagtatctcctgcaatttgatcagaaagagaaggccaccctcctgggcaacaagaaggactactgggattacttctgtgcctgcctggccaaggtgaaaggagccaatgatgggatccgctttgtcaagtctatctcagagctccgaacatccttggggaaaggaagagcatttattcgctactccttggtgcaccagaggttggcagacaccttacagcagtgcttcatgaacaccaaagtgaccagtgactggtactatgcaagaagcccctttctgcagccaaagctgagctcggacattgtgggccaactctatgagctgactgaggttcagtttgacctggcgtcgaggggctttgacttggatgctgcctggccaacatttgccaggaggacgctgaccactggctcttctgcttacctgtggaaaccccctagccgcagctccagcatgagcagcttggtgagcagctacctgcagactcaagagatggtgtccaactttgacctgaacagccccctaaacaacgaggcattggagggctttgatgagatgcgactagagctggaccagttggaggtgcgggagaagcagctacgggagcgcatgcagcagctggacagagagaaccaggagctgagggcagctgtcagccagcaaggggagcaactgcagacagagagggagagggggcgcactgcagcggaggacaacgttcgcctcacttgcttggtagctgagctccagaagcagtgggaggtcacccaggccacccagaacactgtgaaggagctgcagacatgcctgcagggcctggagctaggagcagcagagaaggaggaggactaccacacagccctgcggcggctggagtccatgctgcagcccttggcacaggagcttgaggccacacgggactcactggacaagaaaaaccagcatttagccagcttcccaggctggctagccatggctcagcagaaggcagatacggcatcagacacaaagggccggcaagaacctattcccagtgatgcggcccaggagatgcaggagctaggggagaagcttcaagccctagaaagggagagaaccaaggtcgaggaggtcaacagacagcagagtgcccaactggaacagctggtcaaggagcttcagctgaaagaggatgcccgggccagcctggagcgcctggtgaaggagatggccccactccaggaggagttgtctgggaagggacaggaggcagaccagctctggcgacggctgcaggagttgctggcccacacgagctcctgggaggaggagctagcagagttgaggcgggagaaaaaacagcaacaggaggagaaggagctgctggagcaggaggtcaggtctctgacccggcagctgcagttcctggagacccagctggcacaggtgagccaacatgtgagtgacctggaggagcagaagaagcagctcattcaggacaaagaccacctcagccagcaggtgggtatgctcgagcggcttgctgggccgcctggcccagaactgccagtggcaggtgagaagaatgaggccctggtccctgtgaactccagtctgcaagaggcctgggggaagccagaggaggagcagaggggcctgcaggaggcacagttagacgataccaaggtgcaagagggcagccaggaggaagagctccggcaggccaacagggagctggagaaggagctacagaatgtggtcgggcgtaaccagctcctggagggcaagctgcaagccctgcaggccgattaccaggctttgcagcagcgggaatcagccatccagggctccttggcctccctggaggccgagcaggccagcatccggcacttgggtgaccagatggaggcgagcttgctggctgtaaggaaggccaaggaggccatgaaagcccagatggcagagaaggaggccattctacagagcaaggagggcgagtgtcagcagctgcgggaggaggtggagcagtgccagcaactggcagaagcccggcacagagagcttagggctctcgagagccagtgccagcagcagacccagctgattgaggtcctcacagcagagaaaggccaacagggagttggcccacccactgacaatgaagcccgtgagctggctgcccagctagccctgtctcaggcgcagctggaagtccatcagggggaggtccaacggctgcaggctcaggtggtggacctccaggccaagatgcgggcagccctggatgaccaggacaaggtgcagagccagctaagcatggctgaggccgtcctgagggagcacaaaacccttgtgcagcagctgaaggagcagaatgaagcccttaacagagcccatgtccaggagctgctgcaatgctcggagcgtgaaggggcactgcaggaggagagggccgatgaggcccagcagagggaggaggagctgcgggccctgcaggaggagctgtcccaggccaaatgcagctccgaggaagcacagctggagcacgctgagctgcaagagcagctgcaccgggccaacacagacacagctgagctgggcatccaggtttgcgcactgaccgtggaaaaggagcgagtggaggaggcactggcctgtgctgtccaggagctccaggacgccaaagaggcagcctcaagggagcgagagggcctggagcgccaagtagctgggctgcagcaagagaaggagagcttgcaggagaagctgaaggcggccaaggcagcagccggctcactgcctggcctgcaggcccagctcgcccaggcagagcagcgggcccagagcctccaagaggctgcacaccaggagctcaacaccctcaagttccagctgagtgctgaaatcatggactaccagagcagacttaagaatgctggtgaagagtgcaagagcctcaggggccagcttgaggagcaaggccggcagctgcaggctgctgaggaagctgtggagaagctgaaggccacccaagcagacatgggagagaagctgagctgcactagcaaccatcttgcagagtgccaggcggccatgctgaggaaggacaaggagggggctgccctgcgtgaagacctagaaaggacccagaaggaactcgaaaaagccacaacaaaaatccaagagtattacaacaaactctgccaggaggtgacaaatcgtgagaggaatgaccagaagatgcttgctgacctggatgacctcaacagaaccaagaagtatctcgaggagcggctgatagagctgctcagggacaaggatgctctctggcagaagtcagatgccctggaattccagcagaagctcagtgctgaggagagatggctcggagacacagaggcaaaccactgcctcgactgtaagcgggagttcagctggatggtgcggcggcaccactgcaggatatgtggccgcatcttctgttactactgctgcaacaactacgtcctgagcaagcacggtggcaaaaaggagcgctgctgccgagcctgtttccagaagctcagtgaaggccctggctcccctgatagcagtggctcaggcactagccagggagagcccagccctgcactgtcaccagcctcacctgggccccaggccacaggaggccaaggagcaaatacagactacaggccaccggacgacgctgtgtttgatatcatcacagatgaggaattgtgccagatacaggagtccggctcctctttgcctgaaacacccactgaaactgattctctcgacccaaatgcggctgaacaggcgtctgtcggggccagcaagggtctgggaaacctgctctgtgaatcatctgcttgcagggatactacatcaacctcgctaacgcctgaggacactgaagacatgcccgtggggcaggattcggaaatctgcctgctgaagtctggagaactgatgatcaaagtacccctcacagtggatgagatcgccagcttcggggagggtagcagggagctgtttgtgaggtccagcacctacagcctgatccccatcactgtggccgaggcaggcctcaccatcagctgggtcttctcctctgaccccaagagcatctccttcagtgtggtcttccaggaggccgaggacacaccgctggatcagtgtaaggtcctcattcccacgacccgatgcaactcccacaaggagaacatccagggccagctcaaggttcgcacacccggcatctacatgctcatcttcgacaataccttctcaaggtttgtctctaaaaaggtattttatcacttgacggttgatcggcctgtgatctacgatggaagtgatttcctgtagcttcagcacctcagtaacttcacttcatccacaggaaacactgctcttcctca

SEQ ID NO: 11383 - DNA, 4275 bp, Homo sapiens
  source 1..4275: mol_type = unassigned DNA
cagggctccttcccgcccgccgccgccgagacccaggctgaagctggggaggacggtggagcccggcccaggccgttctcctgcccccgcggctggagcatcgtctgggactactggctgaaggcgagccccgcagcccaagcgcagcgcacacgcgcgcccccggccaccgccgttctctcttccctcccctcctctcccctcccctctcctccgcccccggcctcggctgcggcgggaggaagaacgcttcccaaccagccaggagagcccagatctattcccattcggggagaaagaagagaccccgcacttggatccgaccgacttctcgccccggggccacggaagtggctcgccgtccaccggagagtccccgccgagcgtagccctccaaccctcgcccaaccgcagccgcatagacagcgctccccagcgggcccccggccccgccgagcccactccccgcgcggggccggggccggggccggcgatgcctggcacggcagcggcggtggccgcggctgctgctgctgctactgccaccgctgccacggctgctggcccgggcccgggctgggggcttgagtctctgcagtggggctgagcccgcagtcccgccccccgatcctgaggccgctgctccgccgggcgccgggcctcctccgcccgcgcctccgccccaggagctggagccaagcggggagctcgggccccgcgcccaggcccggaccatgcatggccaccgagccccggggggcgccgggccttcggagcccgaacacccggccacgaacccgccgggcgccgctccgccggcctgtgccgactcggaccctggagcctcggaacccggactgctggcgcgcaggggctcaggttcggctcttggcggcccactggatccccagtttgtcggaccctcggacaccagcctgggcgctgctccaggccaccgggtcttgccctgcggtcccagtccacagcaccaccgggccctgcgcttctcttaccacctggagggctcgcagcctcggcctgggctgcaccagggaaaccggatcctggttaaaagtttgtcccttgaccctggccaaagcctagagcctcatccagaaggtccccagcggcttcgctcagacccaggtcccccgactgaaacccctagccagcgtccttcaccactgaagcgggcaccgggcccgaagccacaggtgcccccaaagcccagctacctgcagatgccccggatgccccccccactggagcccatcccccctccaccatcacgcccactgcctgccgacccccgagtggccaagggcctggctcccagggcagaggccagccccagttctgcagcagtatcctcactgattgagaagtttgaaagagagcctgtgattgtcgcctcggatagaccagtccctggccccagcccaggtcccccagagccagtcatgttgccacagccaacctcgcagccaccagtgccccagctccccgagggtgaggcctcccgctgcctgtttctgctggctcctgggccccgggacggtgagaaggtgcccaaccgggacagcggcattgatagcatcagctcgccatccaacagcgaggagacctgcttcgtcagtgatgacgggccccccagccacagcctctgccctgggccccctgccctggctagtgtgcctgttgccttggccgacccccaccggcctggctcccaagaggttgacagtgacctggaggaggaggacgacgaggaggaggaggaagagaaggacagagaaatcccagtgcccctgatggagagacaggagtctgtggagttgactgtgcagcaaaaggtgtttcacattgccaatgagctcctgcaaactgagaaggcctacgtttccaggctccatctcctggatcaggtgttctgtgcccggctgctggaagaagctcggaaccgcagttccttcccggccgacgttgtccacggcatcttctctaacatctgctccatctattgcttccaccagcagttcctgctgcctgagctagagaagcgcatggaggaatgggaccgctatccacgcattggagacatcctgcagaaactggcccccttcctcaagatgtatggtgagtatgtgaagaactttgaccgggccgtggagctggtcaacacctggacagagcgctccacccagtttaaagtcatcatccatgaggtgcagaaggaggaagcctgtggcaacctgacattgcagcaccacatgctggagcctgtgcagcgcatcccccgctatgagcttcttctcaaggactatctgttaaagctgccccatggctccccggacagcaaggatgcccaaaagtctctggagctgatcgccacagcagcagagcactcgaatgctgccatccgcaaaatggagcgaatgcataagctgctgaaggtatatgagctgttagggggcgaggaggacattgtcagccccaccaaagagctcataaaagaaggccacatccttaagctgtcagcaaagaatgggaccactcaagaccgatacctcatactattcaacgaccgcctcctttactgcgtgcccaggctgcggctccttggccagaagtttagcgtgcgggcacgcattgatgtagatggcatggagctaaaggagagctccaacctcaatctgcctcgaaccttcctggtgtcaggaaagcagcgctccctcgagctccaggccaggactgaggaggagaagaaagactgggtccaggccatcaactccaccctcctgaagcatgaacagacgctggagactttcaaactgttgaactcaacaaacagggaagatgaagacaccccacccaactctccaaacgtggatcttgggaagcgggcacctacgcccatccgggaaaaggaagtcaccatgtgcatgcgctgccaggagcccttcaattctatcaccaaacgcaggcaccactgcaaggcctgcgggcatgtggtttgtgggaagtgctccgagttccgggcccgcctcgtctatgacaacaaccgctccaaccgtgtgtgcactgattgctatgtggccttgcacggggtgcctgggagcagtccagcctgcagccagcatacaccccagcgccggaggtccatcctggagaaacaggcctcagtggctgcagagaacagcgtcatctgcagcttcctgcactacatggagaagggtggcaaaggatggcacaaggcatggttcgtggtccctgaaaatgaacccttggtgctgtatatctacggagcccctcaggatgtgaaagcccagcgcagcctgcccctcattggcttcgaggtgggaccgcccgaggcaggggagcggcctgacagaaggcatgtcttcaagatcacccagagccacctcagctggtacttcagccctgagacagaggaactacagcgacgctggatggctgtgcttggccgggcgggccgaggggacacgttctgcccggggcccacactgtctgaggacagggagatggaggaggcaccggtggctgctttaggagccactgctgaaccccccgaatccccccagacccgagacaagacctagagggtttgggacaaactgggagcccccaccccacactctagttgcccatgtctgattgggggctctagccccttccctcccagctcagtcaatacttgaactcccatcacgggcactttcaatcccgaatgctgggtcttgggttttttaattcatcttttcacaaaacgtgggcttttaaaaaatatattcctacagtgatgtcaatttttattaatccctgtccccagggagggtgggagccgttgccagtcctacctgaattaggtcgtttttctccctcatccctcaataccctaccacagatcctgcctccacccagttccccacaaagcaccagaggtaggagacctggattcaagtgccagctctgccactgaccctggggccccgacccagccctgcctcctcagccagtgtcttcacacgtacaactccacgtggggtggcaactagacctctcctgcctctcccatggcttacagcttctacccggccccaaggctacccagtattttatcgtccagacccatggcagggccagcgggcaggacagggaaacaggggggaggacaatggatactcagttttttgtgtttttttgtgtgtttttttttttttaagaaaaatacagtttatttcaggcttacagtaa

SEQ ID NO: 11384 - DNA, 3046 bp, Homo sapiens
  source 1..3046: mol_type = unassigned DNA
ctttcttcactctgaagccaagagccgaccttctgagccctcaagaaagatcagaacagattcatgggtgatttagcctatctgtcccaggccagcgtggctgagtgtgctggctggaggcctctctctctgcttcgagggtagctgagatccaccccggaaaccggcaggatgaagggggcaagtgaggagaagctggcatctgtgtccaacctggtcactgtgtttgagaatagcaggaccccagaagcagcacccagaggccagaggctagaggacgtgcatcaccgccctgagtgcaggcctcccgagtccccaggaccacgggagaagacgaatgtcggggaggccgtggggtctgagcccaggacagtcagcaggaggtacctgaactccctgaagaacaagctgtccagcgaagcctggaggaaatcttgccagcctgtgaccctctcaggatcggggacgcaggagccagagaagaagatcgtccaggagctgctggagacagagcaggcctatgtggcgcgcctccacctgctagaccaggtgtttttccaggagctgctgaagacagcccgcagcagcaaggccttcccagaggatgtggtcagggtcatcttctccaacatctcctccatctatcagttccattctcagttcttcctcccagagctgcagcggcgcctggacgactggacagctaacccccgcatcggtgacgtgatccagaagctggcccccttcctgaagatgtacagtgagtatgtcaagaactttgagcgagcggctgagctgctggccacctggaccgacaagtctccactcttccaggaggttctcactcgcatccagagcagcgaggcttcgggcagcctgaccctgcagcaccacatgctggaaccagtgcagagaattccacgttacgagctgctgctcaaggagtacatccagaagctgccagcccaggccccagaccaggccgatgcccagaaagccctggacatgatcttctcagctgcccagcactccaatgcagccatcactgagatggagcggctgcaggacctgtgggaggtgtaccagcgcctgggcctcgaggacgacatagtagacccctctaacaccctgctccgtgagggcccggtcctcaagatctccttccgccgcaacgaccccatggagcgctaccttttcttgttcaacaacatgctgctctactgtgtgcccagggtgatccaggtgggcgcccagttccaggtgaggacccgcatcgatgtggccgggatgaaggtgcgggagctgatggatgctgagtttccccactccttcctggtgtccgggaagcagcgcaccctggagctgcaagcccggtcccaggaggaaatgatttcctggatgcaggccttccaagcagccattgaccaaatcgagaagcggaatgaaaccttcaaggctgcggcccaggggcctgagggagacatccaggagcaggagctgcagtctgaggagctgggcctccgggcaccgcagtgggtccgggacaagatggtgaccatgtgcatgcgctgccaggagcccttcaacgctctgacgcgccgtcgccaccactgccgggcctgcggctatgtggtgtgtgccaggtgctccgactaccgggccgaactgaaatacgacgacaacaggcccaaccgagtctgcctccactgctacgcattcctcactggaaatgtgctgcctgaggccaaggaggacaagaggcggggcatcctggagaaagggtcctcagccacgcctgaccagagcctgatgtgcagcttcctgcagctcatcggggacaagtggggcaagagcggcccccggggctggtgtgtgatccctcgggatgaccccctcgtgctctatgtctatgctgcccctcaggacatgagggctcacacctccatccccctgctgggctaccaggtgactgttgggccccagggggaccctcgggtcttccagctacagcagtcaggccagctctacaccttcaaggccgagacggaggagctgaagggccgctgggtgaaggccatggagcgggcggccagtggctggagccccagctggcccaacgatggggacctgtccgactgagccactgccagccgctctcctgcccacctctccccaccctgaacccagctcctgccacagactgaccctgtggcctcagtgacccactgccccaagtggtgctttcagagaattgattcagccatctgcgcccaggccacgtgtcccgatctgggattagaaaatatgggtccattcctttctagaaaggggacaaccaagtgtctcagtttgccttgcggggagggggctcctgggccatgggacttccagtgctaaaactgggaaagccccaggtaaccccggactggtggtcaccatagtatggtttttcatttgtatctcctggggagcttttaaagagtactggtgaaaaacacatagtaaattaattttaaaaatgtaaaaaacaatgcctgtactgaagtaccaccaccgatttaaatgggctgagttgggggaggcatggggtctttttttttttttttttgagacagagtcttactctgtttcccaggctggagtgcacaaacatggctcactacagcctcgctctcccgggctccagtgatcctcccgcctcagcctcccaagtagctgggattataggtgtgtgccactgtgccaagctaatttttttattttttgtagagatgggatttcaccatgttactcaggctggtctcaaactcccagcctcaagcgatgctcccacctccacctcccaaagtgctgggattacaggcgtgagccaccatacctggcgcatgcatattttttaagagtacccactggagtctaatatatagcctgggttacctgggatgaagaataaagagagcaaactaccacaaccaatggttgagcccctgtcaagtgccagtcatgatagtagtaataataataataaacatctattggaccaggc

SEQ ID NO: 11385 - DNA, 2280 bp, Homo sapiens
  source 1..2280: mol_type = unassigned DNA
actctgaagccaagagccgaccttctgagccctcaagaaagatcagaacagattcatgggtgatttagcctatctgtcccaggccagcgtggctgagtgtgctggctggaggcctctctctctgcttcgagggtagctgagatccaccccggaaaccggcaggatgaagggggcaagtgaggagaagctggcatctgtgtccaacctggtcactgtgtttgagaatagcaggaccccagaagcagcacccagaggccagaggctagaggacgtgcatcaccgccctgagtgcaggcctcccgagtccccaggaccacgggagaagacgaatgtcggggaggccgtggggtctgagcccaggacagtcagcaggaggtacctgaactccctgaagaacaagctgtccagcgaagcctggaggaaatcttgccagcctgtgaccctctcaggatcggggacgcaggacagctaacccccgcatcggtgacgtgatccagaagctggcccccttcctgaagatgtacagtgagtatgtcaagaactttgagcgagcggctgagctgctggccacctggaccgacaagtctccactcttccaggaggttctcactcgcatccagagcagcgaggcttcgggcagcctgaccctgcagcaccacatgctggaaccagtgcagagaattccacgttacgagctgctgctcaaggagtacatccagaagctgccagcccaggccccagaccaggccgatgcccagaaagccctggacatgatcttctcagctgcccagcactccaatgcagccatcactgagatggagcggctgcaggacctgtgggaggtgtaccagcgcctgggcctcgaggacgacatagtagacccctctaacaccctgctccgtgagggcccggtcctcaagatctccttccgccgcaacgaccccatggagcgctaccttttcttgggtgatccaggtgggcgcccagttccaggtgaggacccgcatcgatgtggccgggatgaaggtgcgggagctgatggatgctgagtttccccactccttcctggtgtccgggaagcagcgcaccctggagctgcaagcccggtcccaggaggaaatgatttcctggatgcaggccttccaagcagccattgaccaaatcgagaagcggaatgaaaccttcaaggctgcggcccaggggcctgagggagacatccaggagcaggagctgcagtctgaggagctgggcctccgggcaccgcagtgggtccgggacaagatggtgaccatgtgcatgcgctgccaggagcccttcaacgctctgacgcgccgtcgccaccactgccgggcctgcggctatgtggtgtgtgccaggtgctccgactaccgggccgaactgaaatacgacgacaacaggcccaaccgagtctgcctccactgctacgcattcctcactggaaatgtgctgcctgaggccaaggaggacaagaggcggggcatcctggagaaagggtcctcagccacgcctgaccagagcctgatgtgcagcttcctgcagctcatcggggacaagtggggcaagagcggcccccggggctggtgtgtgatccctcgggatgaccccctcgtgctctatgtctatgctgcccctcaggacatgagggctcacacctccatccccctgctgggctaccaggtgactgttgggccccagggggaccctcgggtcttccagctacagcagtcaggccagctctacaccttcaaggccgagacggaggagctgaagggccgctgggtgaaggccatggagcgggcggccagtggctggagccccagctggcccaacgatggggacctgtccgactgagccactgccagccgctctcctgcccacctctccccaccctgaacccagctcctgccacagactgaccctgtggcctcagtgacccactgccccaagtggtgctttcagagaattgattcagccatctgcgcccaggccacgtgtcccgatctgggattagaaaatatgggtccattcctttctagaaaggggacaaccaagtgtctcagtttgccttgcggggagggggctcctgggccatgggacttccagtgctaaaactgggaaagccccaggtaaccccggactggtggtcaccatagtatggtttttcatttgtatctcccaagtagctgggattataggtgtgtgccactgtgccaagctaatttttttattttttgtagagatgggatttcaccatgttac

SEQ ID NO: 11386 - DNA, 3303 bp, Homo sapiens
  source 1..3303: mol_type = unassigned DNA
gagcactcaggagactgtgtgtggtgggggtgctccaccatagagctggtcggcatccacagccaccaggacgctgccagagcccaggcctgcgccacgccctgcccagaggcacacctgcctgctcaaggcaaccagggcaggctcaaggcagccagggccagctcactgtgtgcctgtcactgtgtgaagcctgcttcttctttatttcgcttagcaagtgaggcaggagcatgtaaagctgctggcagaggaatatctaatttacctcctaaatggctctactttgaacctgctgggcaaggaagagattttcaaggaaaccatctaccgtgtgcaagctcctgccggccaaccccagaccccagcacggagccaggcgcctgtgcccgccgaccctcagcatcctcctcagaaaggctggtggcatcaggaagcccctggccagcctccacctgagcccagtgagctcagctttaaggatggagtcaggcagggggtcctcaacccctccaggacccattgctgccctagggatgccagacactgggcctggcagttcctccctagggaagcttcaggcgctccctgttgggcccagagcccactgtggggaccctgtcagcctggctgcagcaggggacggctctccagacataggccccacgggagagctgagtggtagcttaaagatccccaaccgggacagcgggatcgacagtccctcctccagtgtggctggagagaactttccctgcgaggagggcttggaggctggcccaagccccactgtactgggggcgcacgcagagatggccctggacagccaggtcccgaaggtcaccccccaggaggaggcggacagcgacgtgggtgaggaacctgactctgagaacaccccccagaaggctgacaaggatgccggcctggcccagcactctggcccccagaagcttctccacattgcccaggagctcctgcacaccgaggagacctatgtgaagcggctgcacctgctggaccaggttttctgcaccaggctgacggatgcggggatccctccagaagtcatcatgggcatattctctaacatctcctccatccaccgcttccacgggcagttcctgctgccggagctgaagacgcggatcacggaggagtgggacacaaacccacggctcggggacatcctgcagaagctggccccattcctgaagatgtacggcgagtatgtcaagaactttgaccgagccgtagggctggtgagcacgtggacccagcgctccccactgtttaaagacgtcgtccacagcatccagaagcaggaggtatgcgggaacctgacgctgcagcaccacatgctggagcccgtgcagagggtcccccggtacgagctgctgctcaaggactatctgaagaggctcccgcaggacgccccagaccggaaggatgcggagaggtccttggagctcatctccacagccgccaaccactccaatgctgccattcggaaagtggagaaaatgcacaagctcttggaggtgtacgagcagctgggtggggaagaagacattgtcaacccggccaatgaactgatcaaggagggccaaatccagaaactgtcagccaagaacggcaccccccaggaccgccacctcttcctgttcaacagcatgatcctttactgtgtgcccaagctgcggctcatgggccagaagttcagcgtccgggagaagatggacatctcaggcctccaggtgcaggatatcgtcaagccaaacacagcacatacattcatcataacaggaagaaaaaggtccctggagctgcagacgcggacagaggaagagaagaaagaatggattcagatcatccaggccaccatcgagaagcacaaacagaacagcgaaaccttcaaggcttttggtggcgccttcagccaggatgaggaccccagcctctctccagacatgcctatcacgagcaccagccctgtggagcctgtggtgaccaccgaaggcagttcgggtgcagcagggctcgagcccagaaaactatcctctaagaccagacgtgacaaggagaagcagagctgtaagagctgtggtgagaccttcaactccatcaccaagaggaggcatcactgcaagctgtgtggggcggtcatctgtgggaagtgctccgagttcaaggccgagaacagccggcagagccgtgtctgcagagattgtttcctgacacagccagtggcccctgagagcacagagaagacacccactgcagacccccagcccagcctgctctgcggccccctgcggctgtcagagagcggtgagacctggagcgaggtgtgggccgccatccccatgtcagatccccaggtgctgcacctgcagggaggcagccaggacggccggctgccccgcaccatccctctccccagctgcaaactgagtgtgccggaccctgaggagaggctggactcggggcatgtgtggaagctgcagtgggccaagcagtcctggtacctgagcgcctcctccgcagagctgcagcagcagtggctggaaaccctaagcactgctgcccatggggacacggcccaggacagcccgggggccctgcagcttcaggtccctatgggcgcagctgctccgtgagctgagtctcccactgccctgcacaccaccacattggacctgtgctgtcctgggaggtggtgttggaggccccatgaagagcgccctggactgctgagggtgggccaacagcccagagctcaggacacttggctttggggggaaggaaactgaggcccagagaggggcaaccactggccaagggtcacccagcaagttttggctaagagcctggcctccagccccagcagtgtggcccagagcaggggccgactgccaaagtaaccatcatccatatgggccgtgtggtgatgctggcccggaaggcagaaagaggcagcatgggcactgccagggacagccacatcctgctggtctgcagcgtggtccaccccgcctctgcccagcctgtctacaccgtgtgagctgaatcgtgacttgcttcccacctcctttctctgtcctctcctgaggttctgcctgcagcccccaggaggtgggcctgccccatcctagctggactcatggttcctaaataaccacgctcagaagctctgctaggacttaccccagccactgagtggcaggcgcatgagatttgtggctgttcctgatgctagtggcacacagtgcttatctgcataaataaacactggccaccagc

SEQ ID NO: 11387 - DNA, 3321 bp, Homo sapiens
  source 1..3321: mol_type = unassigned DNA
tgcctgtgggtgccgcggaccttcggggcgggccagggaggcgggaccgctcctcagaaccccaggggcttcagtcctgggctgattggcgcgggaagcacagcccggccctccaggtccccaaggagaccccagcctcctgctgcccactgtgagcgacctccccggggctcctctggaagcggctccggcaagtatcgagtttgcctgtgcggagctgggggagcctccggctttcctgtttgctttgttaattattttcgtccccagaggaaggcgtacctcctaaatggctctactttgaacctgctgggcaaggaagagattttcaaggaaaccatctaccgtgtgcaagctcctgccggccaaccccagaccccagcacggagccaggcgcctgtgcccgccgaccctcagcatcctcctcagaaaggctggtggcatcaggaagcccctggccagcctccacctgagcccagtgagctcagctttaaggatggagtcaggcagggggtcctcaacccctccaggacccattgctgccctagggatgccagacactgggcctggcagttcctccctagggaagcttcaggcgctccctgttgggcccagagcccactgtggggaccctgtcagcctggctgcagcaggggacggctctccagacataggccccacgggagagctgagtggtagcttaaagatccccaaccgggacagcgggatcgacagtccctcctccagtgtggctggagagaactttccctgcgaggagggcttggaggctggcccaagccccactgtactgggggcgcacgcagagatggccctggacagccaggtcccgaaggtcaccccccaggaggaggcggacagcgacgtgggtgaggaacctgactctgagaacaccccccagaaggctgacaaggatgccggcctggcccagcactctggcccccagaagcttctccacattgcccaggagctcctgcacaccgaggagacctatgtgaagcggctgcacctgctggaccaggttttctgcaccaggctgacggatgcggggatccctccagaagtcatcatgggcatattctctaacatctcctccatccaccgcttccacgggcagttcctgctgccggagctgaagacgcggatcacggaggagtgggacacaaacccacggctcggggacatcctgcagaagctggccccattcctgaagatgtacggcgagtatgtcaagaactttgaccgagccgtagggctggtgagcacgtggacccagcgctccccactgtttaaagacgtcgtccacagcatccagaagcaggaggtatgcgggaacctgacgctgcagcaccacatgctggagcccgtgcagagggtcccccggtacgagctgctgctcaaggactatctgaagaggctcccgcaggacgccccagaccggaaggatgcggagaggtccttggagctcatctccacagccgccaaccactccaatgctgccattcggaaagtggagaaaatgcacaagctcttggaggtgtacgagcagctgggtggggaagaagacattgtcaacccggccaatgaactgatcaaggagggccaaatccagaaactgtcagccaagaacggcaccccccaggaccgccacctcttcctgttcaacagcatgatcctttactgtgtgcccaagctgcggctcatgggccagaagttcagcgtccgggagaagatggacatctcaggcctccaggtgcaggatatcgtcaagccaaacacagcacatacattcatcataacaggaagaaaaaggtccctggagctgcagacgcggacagaggaagagaagaaagaatggattcagatcatccaggccaccatcgagaagcacaaacagaacagcgaaaccttcaaggcttttggtggcgccttcagccaggatgaggaccccagcctctctccagacatgcctatcacgagcaccagccctgtggagcctgtggtgaccaccgaaggcagttcgggtgcagcagggctcgagcccagaaaactatcctctaagaccagacgtgacaaggagaagcagagctgtaagagctgtggtgagaccttcaactccatcaccaagaggaggcatcactgcaagctgtgtggggcggtcatctgtgggaagtgctccgagttcaaggccgagaacagccggcagagccgtgtctgcagagattgtttcctgacacagccagtggcccctgagagcacagagaagacacccactgcagacccccagcccagcctgctctgcggccccctgcggctgtcagagagcggtgagacctggagcgaggtgtgggccgccatccccatgtcagatccccaggtgctgcacctgcagggaggcagccaggacggccggctgccccgcaccatccctctccccagctgcaaactgagtgtgccggaccctgaggagaggctggactcggggcatgtgtggaagctgcagtgggccaagcagtcctggtacctgagcgcctcctccgcagagctgcagcagcagtggctggaaaccctaagcactgctgcccatggggacacggcccaggacagcccgggggccctgcagcttcaggtccctatgggcgcagctgctccgtgagctgagtctcccactgccctgcacaccaccacattggacctgtgctgtcctgggaggtggtgttggaggccccatgaagagcgccctggactgctgagggtgggccaacagcccagagctcaggacacttggctttggggggaaggaaactgaggcccagagaggggcaaccactggccaagggtcacccagcaagttttggctaagagcctggcctccagccccagcagtgtggcccagagcaggggccgactgccaaagtaaccatcatccatatgggccgtgtggtgatgctggcccggaaggcagaaagaggcagcatgggcactgccagggacagccacatcctgctggtctgcagcgtggtccaccccgcctctgcccagcctgtctacaccgtgtgagctgaatcgtgacttgcttcccacctcctttctctgtcctctcctgaggttctgcctgcagcccccaggaggtgggcctgccccatcctagctggactcatggttcctaaataaccacgctcagaagctctgctaggacttaccccagccactgagtggcaggcgcatgagatttgtggctgttcctgatgctagtggcacacagtgcttatctgcataaataaacactggccaccagcagtg

SEQ ID NO: 11388 - DNA, 3221 bp, Homo sapiens
  source 1..3221: mol_type = unassigned DNA
attccctgctgggcccctcctccctgaagatctacacagcagatctactcacaaaagtccacccagcagaagcaggaggatggtggttgtgggtcctctgtgagcagccctgttaacctttaaaccagcacggccgccgcagctgtgagcctagcacctgatcagtggagagctgtggattgcatgtttgtttgccattgcccccgccaccctgcaagttgcaccttctagaatcagcaagccaagctcctctcacccagcgtaatgatgcggaaatgcaaatgcaccatcatgttgtgacccatattgcgaaaattagaaaaaaggaagttgtgtttcgctattgcacgaagttcagcccagaggagaaactcgctcgccttcagaagacagtacctcctaaatggctctactttgaacctgctgggcaaggaagagattttcaaggaaaccatctaccgtgtgcaagctcctgccggccaaccccagaccccagcacggagccaggcgcctgtgcccgccgaccctcagcatcctcctcagaaaggctggtggcatcaggaagcccctggccagcctccacctgagcccagtgagctcagctttaaggatggagtcaggcagggggtcctcaacccctccaggacccattgctgccctagggatgccagacactgggcctggcagttcctccctagggaagcttcaggcgctccctgttgggcccagagcccactgtggggaccctgtcagcctggctgcagcaggggacggctctccagacataggccccacgggagagctgagtggtagcttaaagatccccaaccgggacagcgggatcgacagtccctcctccagtgtggctggagagaactttccctgcgaggagggcttggaggctggcccaagccccactgtactgggggcgcacgcagagatggccctggacagccaggtcccgaaggtcaccccccaggaggaggcggacagcgacgtgggtgaggaacctgactctgagaacaccccccagaaggctgacaaggatgccggcctggcccagcactctggcccccagaagcttctccacattgcccaggagctcctgcacaccgaggagacctatgtgaagcggctgcacctgctggaccaggttttctgcaccaggctgacggatgcggggatccctccagaagtcatcatgggcatattctctaacatctcctccatccaccgcttccacgggcagttcctgctgccggagctgaagacgcggatcacggaggagtgggacacaaacccacggctcggggacatcctgcagaagctggccccattcctgaagatgtacggcgagtatgtcaagaactttgaccgagccgtagggctggtgagcacgtggacccagcgctccccactgtttaaagacgtcgtccacagcatccagaagcaggaggtatgcgggaacctgacgctgcagcaccacatgctggagcccgtgcagagggtcccccggtacgagctgctgctcaaggactatctgaagaggctcccgcaggacgccccagaccggaaggatgcggagaggtccttggagctcatctccacagccgccaaccactccaatgctgccattcggaaagtggagaaaatgcacaagctcttggaggtgtacgagcagctgggtggggaagaagacattgtcaacccggccaatgaactgatcaaggagggccaaatccagaaactgtcagccaagaacggcaccccccaggaccgccacctcttcctgttcaacagcatgatcctttactgtgtgcccaagctgcggctcatgggccagaagttcagcgtccgggagaagatggacatctcaggcctccaggtgcaggatatcgtcaagccaaacacagcacatacattcatcataacaggaagaaaaaggtccctggagctgcagacgcggacagaggaagagaagaaagaatggattcagatcatccaggccaccatcgagaagcacaaacagaacagcgaaaccttcaaggcttttggtggcgccttcagccaggatgaggaccccagcctctctccagacatgcctatcacgagcaccagccctgtggagcctgtggtgaccaccgaaggcagttcgggtgcagcagggctcgagcccagaaaactatcctctaagaccagacgtgacaaggagaagcagagctgtaagagctgtggtgagaccttcaactccatcaccaagaggaggcatcactgcaagctgtgtggggcggtcatctgtgggaagtgctccgagttcaaggccgagaacagccggcagagccgtgtctgcagagattgtttcctgacacagccagtggcccctgagagcacagagacacccactgcagacccccagcccagcctgctctgcggccccctgcggctgtcagagagcggtgagacctggagcgaggtgtgggccgccatccccatgtcagatccccaggtgctgcacctgcagggaggcagccaggacggccggctgccccgcaccatccctctccccagctgcaaactgagtgtgccggaccctgaggagaggctggactcggggcatgtgtggaagctgcagtgggccaagcagtcctggtacctgagcgcctcctccgcagagctgcagcagcagtggctggaaaccctaagcactgctgcccatggggacacggcccaggacagcccgggggccctgcagcttcaggtccctatgggcgcagctgctccgtgagctgagtctcccactgccctgcacaccaccacattggacctgtgctgtcctgggaggtggtgttggaggccccatgaagagcgccctggactgctgagggtgggccaacagcccagagctcaggacacttggctttggggggaaggaaactgaggcccagagaggggcaaccactggccaagggtcacccagcaagttttggctaagagcctggcctccagccccagcagtgtggcccagagcaggggccgactgccaaagtaaccatcatccatatgggccgtgtggtgatgctggcccggaaggcagaaagaggcagcatgggcactgccagggacagccacatcctgctggtctgcagcgtggtccaccccgcctctgcccagcctgtctacaccgtgtgagctgaatcgtgacttgcttcccacctcctttc

SEQ ID NO: 11389 - DNA, 1342 bp, Homo sapiens
  source 1..1342: mol_type = unassigned DNA
aaatgtcacatcaatgccatgagatgagtctggctcctttagctcaccatgtgggtttgagagattcatccatgttggtgaatgtatcagtagctcattcaaaagatttggtttggctggacgtggtggctcatacctgtaatcccagcactttgggaggctgagttcaacagcatgatcctttactgtgtgcccaagctgcggctcatgggccagaagttcagcgtccgggagaagatggacatctcaggcctccaggtgcaggatatcgtcaagccaaacacagcacatacattcatcataacaggaagaaaaaggtccctggagctgcagacgcggacagaggaagagaagaaagaatggattcagatcatccaggccaccatcgagaagcacaaacagaacagcgaaaccttcaaggcttttggtggcgccttcagccaggatgaggaccccagcctctctccagacatgcctatcacgagcaccagccctgtggagcctgtggtgaccaccgaaggcagttcgggtgcagcagggctcgagcccagaaaactatcctctaagaccagacgtgacaaggagaagcagagctgtaagagctgtggtgagaccttcaactccatcaccaagaggaggcatcactgcaagctgtgtggggcggtcatctgtgggaagtgctccgagttcaaggccgagaacagccggcagagccgtgtctgcagagattgtttcctgacacagccagtggcccctgagagcacagagaagacacccactgcagacccccagcccagcctgctctgcggccccctgcggctgtcagagagcggtgagacctggagcgaggtgtgggccgccatccccatgtcagatccccaggtgctgcacctgcagggaggcagccaggacggccggctgccccgcaccatccctctccccagctgcaaactgagtgtgccggaccctgaggagaggctggactcggggcatgtgtggaagctgcagtgggccaagcagtcctggtacctgagcgcctcctccgcagagctgcagcagcagtggctggaaaccctaagcactgctgcccatggggacacggcccaggacagcccgggggccctgcagcttcaggtccctatgggcgcagctgctccgtgagctgagtctcccactgccctgcacaccaccacattggacctgtgctgtcctgggaggtggtgttggaggccccatgaagagcgccctggactgctgagggtgggccaacagcccagagctcaggacacttggctttggggggaaggaaactgaggcccagagaggggcaaccactggccaa

SEQ ID NO: 11390 - DNA, 2679 bp, Homo sapiens
  source 1..2679: mol_type = unassigned DNA
ctgggctgggaagtggggaaagcaggggagcctgtgctgggtgagattatctgcaatggaccgggttaatgggaggcttgctttggctcgctggaagaacaaatgaagggagttttacttcaaccatttgtgacttctggccaagaggaataaattcagcttttataaggcagcagtacctgtccaaagatcgctttagttccaccttgctccacaagcagcacaaccacactggttggtgagaatgtatctgaagaagaggctcagggaataaatgggaacaggccagcaaaacactcagctgcaagtccaaagccacaagtgcctccaaagccattacacctgcagaattcaccttcgtccaatatacaccaaacccccaggcataaagctttacctagtgcaaaaccaaggatggaggaaattaaacctgcctctgcttcttgtgtctcaaaagaaaaacccagtaaggtatcagatctcatcagtcgctttgaaggaggcagctcattatcaaattatagtgatttgaagaaagagtctgctgtgaacctaaatgctcctagaaccccaggaaggcatggattgacaaccacacctcaacaaaaactcctctcccagcacttgccacagaggcagggaaatgatacagataagactcagggtgcacagacttgtgtggccaacggtgtaatggcagcacaaaaccagatggaatgtgaggaggagaaagctgccactcttagctcagatacttctattcaagcttctgaacccttgcttgatacgcacatagtgaatggagaaagagatgaaactgccacagctcctgcatcacccacaacagacagctgtgatggaaatgcttctgacagtagctacaggactccaggcataggcccagtgctccccctagaagaaagaggggcagaaacagaaaccaaggtacaagagagggaaaatggggaaagccctctggaactggagcagctggaccagcaccatgagatgaaggagactaatgagcaaaaacttcacaaaatagccaatgaacttttgcttactgaaagagcttatgtcaaccgacttgacctcttagatcagaaaatagagtggaggtgaatttagaaaattaacaaccatctggacattatgaaggaatagacctccttctgcctacatgtaacagaatggcaattaagaggtattttattgcaaactgttggaagaagcaaaccgaggctcgtttccagcagagatggtgaataaaatcttttctaatatttcatcaataaatgccttccatagtaaattcctcttgccagagctggagaaacgaatgcaagaatgggaaactactcctagaattggagacatccttcagaaattggcaccattccttaagatgtatggagaatatgtgaaaggatttgataatgcaatggaattggttaaaaacatgacagaacgtattccccagttcaaatcagtggttgaagaaattcagaaacagaaaatctgtgggagcttaactttgcagcatcacatgctagaacctgttcagcggattccccggtatgagatgctccttaaggactatctaaggaaattgcctcctgattccctggactggaatgatgctaaaaaatcacttgaaattatatctacagcagcaagccattctaatagtgcaataaggaaaatggagaacctaaagaaactcttagagatttatgaaatgttgggagaagaagaagacattgtaaacccttcaaatgaactaataaaagaaggacagatcctcaaactagctgctcggaacacttcagcacaagaacgctaccttttcttattcaacaacatgttgctgtactgtgtgcccaaattcagcttggtaggctctaaattcacagttcgaaccagggttggcattgatggaatgaaaattgtagagactcaaaatgaagaatatccacatactttccaggtgtctgggaaagagagaacactggaactgcaggccagttctgcgcaagacaaagaagaatggatcaaggcccttcaagaaaccatcgatgcttttcatcaaaggcatgaaaccttcagaaatgcaattgcaaaggataatgacattcactcagaggtttctactgctgagctagggaaaagagccccaagatggatccgagataatgaagtgacaatgtgtatgaaatgtaaagaacctttcaatgcactgacacgaaggaggcatcattgtcgagcatgtggatatgtggtttgttggaaatgctccgactacaaagctcaacttgaatatgatggtggtaaattgagcaaagtttgtaaagactgttatcaaatcataagtggattcacagacagtgaagaaaagaaaagaaaaggaattttagagattgaatcagcagaagtatctggaaacagtgtggtgtgcagctttcttcagtatatggagaagtcaaaaccttggcagaaagcttggtgtgtgatccccaagcaagaccctcttgtgctgtacatgtatggtgccccccaggtatctaaaccacatctgtctgaagggacagatgcccttgggggcaaggggaagcgagtggacagcggactcaaaatctgtagaacaagagttcaggcagtttcactgtttcattaaaattg

SEQ ID NO: 11391 - DNA, 958 bp, Homo sapiens
  source 1..958: mol_type = unassigned DNA
agccaatgaacttttgcttactgaaagagcttatgtcaaccgacttgacctcttagatcaggtattttattgcaaactgttggaagaagcaaaccgaggctcgtttccagcagagatggtgaataaaatcttttctaatatttcatcaataaatgccttccatagtaaattcctcttgccagagctggagaaacgaatgcaagaatgggaaactactcctagaattggagacatccttcagaaattggcaccattccttaagatgtatggagaatatgtgaaaggatttgataatgcaatggaattggttaaaaacatgacagaacgtattccccagttcaaatcagtggttgaagaaattcagaaacagaaaatctgtgggagcttaactttgcagcatcacatgctagaacctgttcagcggattccccggtatgagatgctccttaaggactatctaaggaaattgcctcctgattccctggactggaatgatgctaaaaaatcacttgaaattatatctacagcagcaagccattctaatagtgcaataaggaaaatggagaacctaaagaaactcttagagatttatgaaatgttgggagaagaagaagacattgtaaacccttcaaatgaactaataaaagaaggacagatcctcaaactagctgctcggaacacttcagcacaagaacgctaccttttcttattcaacaacatgttgctgtactgtgtgcccaaattcagcttggtaggctctaaattcacagttcgaaccagggttggcattgatggaatgaaaattgtagagactcaaaatgaagaatatccacatactttccaggtgtctgggaaagagagaacactggaactgcaggccagttctgcgcaagacaaagaagaatggatcaagagacgaggttttgccatgctgcccaggctgatctcgaactcctga

SEQ ID NO: 11392 - DNA, 1833 bp, Homo sapiens
  source 1..1833: mol_type = unassigned DNA
gtgatggagagtgctgttatgatagatgaatctaggaaagcctctttggagatgtgatacctgaacagaaccccgaatgataagaagaaataccagtgttttaggagagattgtcctaagcagagaacagcagctgcaaagaccccaagacacatacacttggttattaagaatgggagcagcaaggagtatggcaagaacacagtgagttttcccttgagtgtgtgaggaagccctcagagtttgtgactgacttgtagaggttctagtggaggggatcagagtggaaacaaagagaccagttaaaaaggtatggcagcatgaataaaaaagttttgagagtattcattatgccttccaaataaaaaactctttggttcataatttgttcataaattaaggactggctacactgtactatttaaaaatgttaagaaacatcaataagtaaaaatgttaggaagagatgataaatacgtaagtattatatctaactaagtctttactaactagtcacattattaaacagtgcaaggatcaagaaaagttaagcgttgaaaaataaataaataagttataaataaaataaacagcccaaggaaatgttccagtccccataggtagactcggggtcatcttctttatttaaatctttatttaaatgtggatagcatcccaagagacttgggtctacactaagaatattcaaatccatgtttctgaaaccatcagagatagaaaaaaaaagtagcgaatatcccttttcaactggaataaacttgtcttaattctagaacttttccataccaatgttttcatgcttcctttgtattttatcttttagctcattatcaaattatagtgatttgaagaaagagtctgctgtgaacctaaatgctcctagaaccccaggaaggcatggattgacaaccacacctcaacaaaaactcctctcccagcacttgccacagaggcagggaaatgatacagataagactcagggtgcacagacttgtgtggccaacggtgtaatggcagcacaaaaccagatggaatgtgaggaggagaaagctgccactcttagctcagatacttctattcaagcttctgaacccttgcttgatacgcacatagtgaatggagaaagagatgaaactgccacagctcctgcatcacccacaacagacagctgtgatggaaatgcttctgacagtagctacaggactccaggcataggcccagtgctccccctagaagaaagaggggcagaaacagaaaccaaggtacaagagagggaaaatggggaaagccctctggaactggagcagctggaccagcaccatgagatgaaggtagagcatgagactagctcatgagcagggaaaaccctgcctattcgattgttgtcttaaaactctttatttattgcacccctgaaatgtatgaatcagatcacccacactggcagttaaacgattttcaagctctggctgctgattagcatttcccctatgctctaagcagatatttcactttttcttttcatgtagtttctgttaatatctctgttgtaatttcaggagtcagaacagtgtggaaactttaatataggaaatccacaaatgtattgtttttacatagaaagaaaatgttccttgttgctctagatgttggtgctgtatccctaatacttacgggccaagcaagaagaaattgtataatctttgttgttcagaagtttctaatagaataaataggcctgtaagatgaacttgccactagtaaatgttacttttaaggacatgaatatggaagtattaaattattcaacag

SEQ ID NO: 11393 - DNA, 8242 bp, Homo sapiens
  source 1..8242: mol_type = unassigned DNA
attatccttgctgggctgggaagtggggaaagcaggggagcctgtgctgggtgagattatctgcaatggaccgggttaatgggaggcttgctttggctcgctggaagaacaaatgaagggagttttacttcaaccatttgtgacttctggccaagaggaataaattcagcttttataaggcagcagtacctgtccaaagatcgctttagttccaccttgctccacaagcagcacaaccacactggttggtgagaatgtatctgaagaagaggctcagggaataaatgggaacaggccagcaaaacactcagctgcaagtccaaagccacaagtgcctccaaagccattacacctgcagaattcaccttcgtccaatatacaccaaacccccaggcataaagctttacctagtgcaaaaccaaggatggaggaaattaaacctgcctctgcttcttgtgtctcaaaagaaaaacccagtaaggtatcagatctcatcagtcgctttgaaggaggcagctcattatcaaattatagtgatttgaagaaagagtctgctgtgaacctaaatgctcctagaaccccaggaaggcatggattgacaaccacacctcaacaaaaactcctctcccagcacttgccacagaggcagggaaatgatacagataagactcagggtgcacagacttgtgtggccaacggtgtaatggcagcacaaaaccagatggaatgtgaggaggagaaagctgccactcttagctcagatacttctattcaagcttctgaacccttgcttgatacgcacatagtgaatggagaaagagatgaaactgccacagctcctgcatcacccacaacagacagctgtgatggaaatgcttctgacagtagctacaggactccaggcataggcccagtgctccccctagaagaaagaggggcagaaacagaaaccaaggtacaagagagggaaaatggggaaagccctctggaactggagcagctggaccagcaccatgagatgaaggagactaatgagcaaaaacttcacaaaatagccaatgaacttttgcttactgaaagagcttatgtcaaccgacttgacctcttagatcaggtattttattgcaaactgttggaagaagcaaaccgaggctcgtttccagcagagatggtgaataaaatcttttctaatatttcatcaataaatgccttccatagtaaattcctcttgccagagctggagaaacgaatgcaagaatgggaaactactcctagaattggagacatccttcagaaattggcaccattccttaagatgtatggagaatatgtgaaaggatttgataatgcaatggaattggttaaaaacatgacagaacgtattccccagttcaaatcagtggttgaagaaattcagaaacagaaaatctgtgggagcttaactttgcagcatcacatgctagaacctgttcagcggattccccggtatgagatgctccttaaggactatctaaggaaattgcctcctgattccctggactggaatgatgctaaaaaatcacttgaaattatatctacagcagcaagccattctaatagtgcaataaggaaaatggagaacctaaagaaactcttagagatttatgaaatgttgggagaagaagaagacattgtaaacccttcaaatgaactaataaaagaaggacagatcctcaaactagctgctcggaacacttcagcacaagaacgctaccttttcttattcaacaacatgttgctgtactgtgtgcccaaattcagcttggtaggctctaaattcacagttcgaaccagggttggcattgatggaatgaaaattgtagagactcaaaatgaagaatatccacatactttccaggtgtctgggaaagagagaacactggaactgcaggccagttctgcgcaagacaaagaagaatggatcaaggcccttcaagaaaccatcgatgcttttcatcaaaggcatgaaaccttcagaaatgcaattgcaaaggataatgacattcactcagaggtttctactgctgagctagggaaaagagccccaagatggatccgagataatgaagtgacaatgtgtatgaaatgtaaagaacctttcaatgcactgacacgaaggaggcatcattgtcgagcatgtggatatgtggtttgttggaaatgctccgactacaaagctcaacttgaatatgatggtggtaaattgagcaaagtttgtaaagactgttatcaaatcataagtggattcacagacagtgaagaaaagaaaagaaaaggaattttagagattgaatcagcagaagtatctggaaacagtgtggtgtgcagctttcttcagtatatggagaagtcaaaaccttggcagaaagcttggtgtgtgatccccaagcaagaccctcttgtgctgtacatgtatggtgccccccaggacgtcagagcccaggccaccattccacttctgggctatgtggtggatgaaatgccaaggagcgcagacctgccacacagtttcaaactgacccagtctaagtccgtgcacagctttgctgcagacagtgaggaactgaagcagaagtggctgaaagtcatccttttagctgtcacaggtgagacaccaggtggtccaaatgagcatccagccaccttggatgatcatcctgaacctaagaaaaaatcagaatgctgaactcctccaggaccagccatggtgtggaggtctcaggacttacagctcaagacattcccagctcttcttacacatctgctagcactttatgttgaaaaatataggcccataaatgcatcttttgaggactattttcctatgtttatgtactcttagtgaaattagtgtgcagagtcattctaccgataaagttttgaaataatgtgaaaactggagcattttttgagctattccttgaatatgtgcttttttgtcttgaagaaatggtgtatcaattgattctgtcaccgtcaggttagaatgagcacttccatttaagaaatcctttcatgtcttcttctctttcacatgtaggacctggaacagtttgaaagatatacctccatgttgccaaaatagatccatggtgaaaaatacagggacagttgaggctattgtattaacttatttaatttagtttataaatctctagctgcataaatgatgtctgttcttttaaaacaaaagaaaaaggacaaattgttggtgttcagatttccgatttataaagaaaagataacttgtttttgtagaaatactcctaagaatgtcttaagtatatagcaattatgtatatatagtattaaatatatatattatacatgcttttaggttcacattcatctctaatttattttttaaatataaagcatggtttatcgtggaattgagcaatgttctaaactgaagaaatgttttggtgatttatgttttgctgattggcatttgagggtattgatatttttataataagcggtaatttatgtggcatgggatatatttgtgaattccaacagtacttttaaagtaccattttttgtttctgtgcctatttaaaacagtgcctctcttagaaggtgctattaatataagatgagggttcagttaatgcttcagtcttgattattctaagattaaagtgcattttggtcactgggacagtcaaagtcatacaggttattttaccgtttacaatcctataattattgcagtagttaacatcagcatgtacaaacattttcaccaaaacccaaactttatgagacacctgaccttttacagaactaggatatgtggaaaccacatttatcgtaatgtttttcttttccgtaagataatcgagcatggttaaataaggtctctatataatgaacacttaagataactgtatgggccttttcctttgtcggaatgaaacaaaatccacatgtgataacctatgtttggggtgggggctggtcacatgattccttgtcatgaaggctgctcttcactcttttgtacttgtgattaaaatctcacactaagtttactatttaacttaatcctttttctcaaattaaacctttttttatactgtcataccccaaacattgtcactttttaatgtaccagtctgctagaaatctacaagaatgatcccactatctttagtatgtaaggattacaccttagatatagaatagaatttgagactgccacacatttattcaggccttgttactttaagaaatatcttattttttccaccccaaaggagcaagtgaaccaattattgctgacataataggttcccttcctccataaaaggattatcagccatgatcattaacattaaaccaaatagatggagccaaaaagagataaaagtagcttcttaggccctattaaatcagggaaagactagaagaaaatttacattgcttctcttttttaatggccagcggggtatgtgtgtgatgtatactcagagtggttttttggaaaattaaactgtagctatagatgatgctttggttttcttaatctcaagaaaagagaagcaatggaaatacagaatgattaactggggaagaggacttttgtaagtgtgactagaacaatggtaatgtatgggccaatgggaagatttataagtcagattatttttgaaaactatttttaaaagcaagaagactacactttccctaccaaaacagaagtaacatggacacacttaagttttggctcaataaatatcaatgttatttaacttagatcattgaaagaatactcatgtaaagataatgtttattatcatgctcttaacagtcattatctttaattttttaaatgagaagcattaatactagaagagaatttctggttatccggtcaccatattcactttccaccccacattcttcagctaaacgcaaagagaagcagtgaaacagccttacccgcttctctcttattaaagaatcactgatgtttttactcaatgaaaggtaaagtaatacccttagccatttattaaacaattcaaccaagagacctcaaagtgtgattgatgataagaataatcaatgccttttcccttccaacatacttgagcagtcatgacaacctaaaaatatcattggttgctttcccattaaaaccaacgttccctgtgggtcttaattctttattttcactcatttggtgctttccaagtcatcttttctttaaagtgcccttcctccaaactttaaaaagtacttccttgacaaaatttctattcattataaaacatttcaatattttaagcttaaattttgcttttgctgaaagcctaccatttggcgtgttaagtatgaaatatagtgcagacttttatcttggttttaagtggggctcaataaaaaacaccagccacttttgtaataatggcatcacagtgtcatcatgtatgcaagcaataaaactctttagggtatggttttatactgaaaatttaatatgaaggccccttcccacaagaatatagataattattaactttctagatgtgatacggtaattcgaattgcagagtataaggaagggaaatgggaaggggcatcattccttggattttaaataactatcaagaacatttttactttaacaaagaaaatggatagaaaaagcacattttgttttccctgaagtttaatttgacatcaggtttgtgtacttatcttcactaggtgacttaacttaccccaatttttttaaaaattattaaactttttacagaaactaaccttttaaatgtaccctttccccatatatatatacgcacacgtttggattttttttttttaagaacacttgttctagttataaatatataaagaaaacgataaagtttgtggtactgcagggttgttaaagattctttgatgccttctaaaaacttttgtcaaaaatacttttgagttcacaattctgttttacttttccttgtccttactttttggaaacagggtggttgcttttatttgttttctggttatattcaaagccttaagttcttaatctgagcatattgtctgtgataaatttctgatgatctttctggactagatacaacctgagtagcaagcaccaaccggagcaagtaaacttctagggaacaagcgtcttgggttttataggtatctttgctataatgcagaatagattaatgaagatttcctatatcatatgatatttgtgttagtgggtctaagattaagcacatgatatttataagctaaaattaactcaaaagtcaagaatgtcttaatgttttcattcttaaattttgtattctccaagaatgtattagtatatgaactgtggccaaccagttcctattcttcagactgtattgacatctgtagtggatcatgttgcttcttcattcttaccaattttattagaatcaaacttcttgttatttgcatactattatctactatagattctcagctttagaaaatgactatgatacataaagaccactaggtcaacttaaaaaaccctttctgtgaatttatacatgtatgtatatatgtaaaaacactgttgatttgcaattctgtctttccatagaaatgaactttttctatcgaaattgtttaacttaaatattttaacataaattatttacatggatctttatgtataattcatccttatatataccccttaatcacgtagtcatgagaagataactttgctttctttacagaaagggcagagaggaataagataagaaactgaaacaagcaagaatgaagagagatgtgggggagagactgctggtctccagaccacagcaatgtgttttaagataagatgaaatattttaactgcagaagggatataaaatctatgtaattacatgctgatgggatccattgcacccaggtttttgaccttggcctgtaaatgctagactatgatatcttgttattctttttctcctttgggcttttaaaaaataatttcattctcagatcattttctgtactgtttactgaggcaaaaaaaaaaaaaatctgaagtcaatcatggtcttctactttctggactgagcatttggcagaatgcagtatcttttcctgtattttgacatgaaatagcacatggcttctacaagatagttttaacttgttggggtcaccgggagttatatgatggtcaaccccttttcccaaaattcattgtggtagttttagtggaaaacgtaaatcaagaaatctcatatcatactttaataaataaataccaaatacatagtgacatataggtttgggaagaaactagtctgtggggaccattataagagaatcacattatatattacacagtatatggatattggaatgtatcacttgtggggggttctcttcattagcaaaacagtcatgtctgtctgtatataagacttttttttttttaaccaaactagcatttcattttgtgagtgacaattgacattttaaaataagcataggccgggcatagtggctcatgcctgtaatcccagcccttgggaggccgaggtgggcagatcacttcaggtcaggagtttgagaccagcctggccaacatggtgaaaccctgtctctactaaataaaaataaaacaaaataagtgtatctgggccaggcacggtagcccatgcctgtaatcccagcactttgggaggccgaggagttcgagaccagcctggccaacatggcaaaaccctgtctctacaaaaattagccaggtgtggtggcacatgcctgtaatcccagctactcgggaggttgaggcaggagaattgcttgaacccgggagacagaggttgcagtgagccgagattgcaccactgcactccggcctgggtgacagagcaagacttcgactcaaaaaataaaataagcgtatctggatttttcttttgaattcttgactgataagtttgagaatgtatgtttttggaattttacagttgactcaagtgtgaaagtatacacaagtaatttttcttttctagctatgtgaatgtaaaatacttgcagataatgtatatattgtgtaatatatgtatatttggtcataaaagcagataattggaaacattgtaaaattaagcactttaattcctattaaatattaaacatttgtatcttgtaaataaacacatccttaaattaa

SEQ ID NO: 11394 - DNA, 1629 bp, Homo sapiens
  source 1..1629: mol_type = unassigned DNA
ggagcacaaagacagcgattgttacccaataagcagtagtcacacacttctaccaatcgccttaggagggctggttaccatggaatccaccatctgttcactccccaccggaatgtgattatccttgctgggctgggaagtggggaaagcaggggagcctgtgctgggtgagattatctgcaatggaccgggttaatgggaggcttgctttggctcgctggaagaacaaatgaagggagttttacttcaaccatttgtgacttctggccaagaggaataaattcagcttttataaggcagcagtacctgtccaaagatcgctttagttccaccttgctccacaagcagcacaaccacactggttggtgagaatgtatctgaagaagaggctcagggaataaatgggaacaggccagcaaaacactcagctgcaagtccaaagccacaagtgcctccaaagccattacacctgcagaattcaccttcgtccaatatacaccaaacccccaggcataaagctttacctagtgcaaaaccaaggatggaggaaattaaacctgcctctgcttcttgtgtctcaaaagaaaaacccagtaaggtatcagatctcatcagtcgctttgaaggaggcagctcattatcaaattatagtgatttgaagaaagagtctgctgtgaacctaaatgctcctagaaccccaggaaggcatggattgacaaccacacctcaacaaaaactcctctcccagcacttgccacagaggcagggaaatgatacagataagactcagggtgcacagacttgtgtggccaacggtgtaatggcagcacaaaaccagatggaatgtgaggaggagaaagctgccactcttagctcagatacttctattcaagcttctgaacccttgcttgatacgcacatagtgaatggagaaagagatgaaactgccacagctcctgcatcacccacaacagacagctgtgatggaaatgcttctgacagtagctacaggactccaggcataggcccagtgctccccctagaagaaagaggggcagaaacagaaaccaaggtacaagagagggaaaatggggaaagccctctggaactggagcagctggaccagcaccatgagatgaaggtagagcatgagactagctcatgagcagggaaaaccctgcctattcgattgttgtcttaaaactctttatttattgcacccctgaaatgtatgaatcagatcacccacactggcagttaaacgattttcaagctctggctgctgattagcatttcccctatgctctaagcagatatttcactttttcttttcatgtagtttctgttaatatctctgttgtaatttcaggagtcagaacagtgtggaaactttaatataggaaatccacaaatgtattgtttttacatagaaagaaaatgttccttgttgctctagatgttggtgctgtatccctaatacttacgggccaagcaagaagaaattgtataatctttgttgttcagaagtttctaatagaataaataggcctgtaagatgaacttgccactagtaaatgttacttttaaggacatgaatatggaagtattaaattattcaacagattataa

SEQ ID NO: 11395 - DNA, 2925 bp, Homo sapiens
  source 1..2925: mol_type = unassigned DNA
agtgcattggtctgagctcctggcagatcctgtgtaatcttcagcctccctgaagctttacagccaggagtgagattttatcacatgaactttaaaagagtaaagccaaatatctttttattaaaccagagtagattaattatcagtatatgtgaaatcatgtccactgatcaaggcagcagtacctgtccaaagatcgctttagttccaccttgctccacaagcagcacaaccacactggttggtgagaatgtatctgaagaagaggctcagggaataaatgggaacaggccagcaaaacactcagctgcaagtccaaagccacaagtgcctccaaagccattacacctgcagaattcaccttcgtccaatatacaccaaacccccaggcataaagctttacctagtgcaaaaccaaggatggaggaaattaaacctgcctctgcttcttgtgtctcaaaagaaaaacccagtaaggtatcagatctcatcagtcgctttgaaggaggcagctcattatcaaattatagtgatttgaagaaagagtctgctgtgaacctaaatgctcctagaaccccaggaaggcatggattgacaaccacacctcaacaaaaactcctctcccagcacttgccacagaggcagggaaatgatacagataagactcagggtgcacagacttgtgtggccaacggtgtaatggcagcacaaaaccagatggaatgtgaggaggagaaagctgccactcttagctcagatacttctattcaagcttctgaacccttgcttgatacgcacatagtgaatggagaaagagatgaaactgccacagctcctgcatcacccacaacagacagctgtgatggaaatgcttctgacagtagctacaggactccaggcataggcccagtgctccccctagaagaaagaggggcagaaacagaaaccaaggtacaagagagggaaaatggggaaagccctctggaactggagcagctggaccagcaccatgagatgaaggagactaatgagcaaaaacttcacaaaatagccaatgaacttttgcttactgaaagagcttatgtcaaccgacttgacctcttagatcaggtattttattgcaaactgttggaagaagcaaaccgaggctcgtttccagcagagatggtgaataaaatcttttctaatatttcatcaataaatgccttccatagtaaattcctcttgccagagctggagaaacgaatgcaagaatgggaaactactcctagaattggagacatccttcagaaattggcaccattccttaagatgtatggagaatatgtgaaaggatttgataatgcaatggaattggttaaaaacatgacagaacgtattccccagttcaaatcagtggttgaagaaattcagaaacagaaaatctgtgggagcttaactttgcagcatcacatgctagaacctgttcagcggattccccggtatgagatgctccttaaggactatctaaggaaattgcctcctgattccctggactggaatgatgctaaaaaatcacttgaaattatatctacagcagcaagccattctaatagtgcaataaggaaaatggagaacctaaagaaactcttagagatttatgaaatgttgggagaagaagaagacattgtaaacccttcaaatgaactaataaaagaaggacagatcctcaaactagctgctcggaacacttcagcacaagaacgctaccttttcttattcaacaacatgttgctgtactgtgtgcccaaattcagcttggtaggctctaaattcacagttcgaaccagggttggcattgatggaatgaaaattgtagagactcaaaatgaagaatatccacatactttccaggtgtctgggaaagagagaacactggaactgcaggccagttctgcgcaagacaaagaagaatggatcaaggcccttcaagaaaccatcgatgcttttcatcaaaggcatgaaaccttcagaaatgcaattgcaaaggataatgacattcactcagaggtttctactgctgagctagggaaaagagccccaagatggatccgagataatgaagtgacaatgtgtatgaaatgtaaagaacctttcaatgcactgacacgaaggaggcatcattgtcgagcatgtggatatgtggtttgttggaaatgctccgactacaaagctcaacttgaatatgatggtggtaaattgagcaaagtttgtaaagactgttatcaaatcataagtggattcacagacagtgaagaaaagaaaagaaaaggaattttagagattgaatcagcagaagtatctggaaacagtgtggtgtgcagctttcttcagtatatggagaagtcaaaaccttggcagaaagcttggtgtgtgatccccaagcaagaccctcttgtgctgtacatgtatggtgccccccaggacgtcagagcccaggccaccattccacttctgggctatgtggtggatgaaatgccaaggagcgcagacctgccacacagtttcaaactgacccagtctaagtccgtgcacagctttgctgcagacagtgaggaactgaagcagaagtggctgaaagtcatccttttagctgtcacaggtgagacaccaggtggtccaaatgagcatccagccaccttggatgatcatcctgaacctaagaaaaaatcagaatgctgaactcctccaggaccagccatggtgtggaggtctcaggacttacagctcaagacattcccagctcttcttacacatctgctagcactttatgttgaaaaatataggcccataaatgcatcttttgaggactattttcctatgtttatgtactcttagtgaaattagtgtgcagagtcattctaccgataaagttttgaaataatg

SEQ ID NO: 11396 - DNA, 2924 bp, Homo sapiens
  source 1..2924: mol_type = unassigned DNA
agttagttctttatcatgttgaacactagatgtgtatgtgtctagtgtctaaatacagaatgcctatagtttctaccaacaaattatggatccaaatccttgctccagaagcaggaaataggttaatcagaagattgctggatgttatgaaaagaatcttttatggggggctgcagcagtacctgtccaaagatcgctttagttccaccttgctccacaagcagcacaaccacactggttggtgagaatgtatctgaagaagaggctcagggaataaatgggaacaggccagcaaaacactcagctgcaagtccaaagccacaagtgcctccaaagccattacacctgcagaattcaccttcgtccaatatacaccaaacccccaggcataaagctttacctagtgcaaaaccaaggatggaggaaattaaacctgcctctgcttcttgtgtctcaaaagaaaaacccagtaaggtatcagatctcatcagtcgctttgaaggaggcagctcattatcaaattatagtgatttgaagaaagagtctgctgtgaacctaaatgctcctagaaccccaggaaggcatggattgacaaccacacctcaacaaaaactcctctcccagcacttgccacagaggcagggaaatgatacagataagactcagggtgcacagacttgtgtggccaacggtgtaatggcagcacaaaaccagatggaatgtgaggaggagaaagctgccactcttagctcagatacttctattcaagcttctgaacccttgcttgatacgcacatagtgaatggagaaagagatgaaactgccacagctcctgcatcacccacaacagacagctgtgatggaaatgcttctgacagtagctacaggactccaggcataggcccagtgctccccctagaagaaagaggggcagaaacagaaaccaaggtacaagagagggaaaatggggaaagccctctggaactggagcagctggaccagcaccatgagatgaaggagactaatgagcaaaaacttcacaaaatagccaatgaacttttgcttactgaaagagcttatgtcaaccgacttgacctcttagatcaggtattttattgcaaactgttggaagaagcaaaccgaggctcgtttccagcagagatggtgaataaaatcttttctaatatttcatcaataaatgccttccatagtaaattcctcttgccagagctggagaaacgaatgcaagaatgggaaactactcctagaattggagacatccttcagaaattggcaccattccttaagatgtatggagaatatgtgaaaggatttgataatgcaatggaattggttaaaaacatgacagaacgtattccccagttcaaatcagtggttgaagaaattcagaaacagaaaatctgtgggagcttaactttgcagcatcacatgctagaacctgttcagcggattccccggtatgagatgctccttaaggactatctaaggaaattgcctcctgattccctggactggaatgatgctaaaaaatcacttgaaattatatctacagcagcaagccattctaatagtgcaataaggaaaatggagaacctaaagaaactcttagagatttatgaaatgttgggagaagaagaagacattgtaaacccttcaaatgaactaataaaagaaggacagatcctcaaactagctgctcggaacacttcagcacaagaacgctaccttttcttattcaacaacatgttgctgtactgtgtgcccaaattcagcttggtaggctctaaattcacagttcgaaccagggttggcattgatggaatgaaaattgtagagactcaaaatgaagaatatccacatactttccaggtgtctgggaaagagagaacactggaactgcaggccagttctgcgcaagacaaagaagaatggatcaaggcccttcaagaaaccatcgatgcttttcatcaaaggcatgaaaccttcagaaatgcaattgcaaaggataatgacattcactcagaggtttctactgctgagctagggaaaagagccccaagatggatccgagataatgaagtgacaatgtgtatgaaatgtaaagaacctttcaatgcactgacacgaaggaggcatcattgtcgagcatgtggatatgtggtttgttggaaatgctccgactacaaagctcaacttgaatatgatggtggtaaattgagcaaagtttgtaaagactgttatcaaatcataagtggattcacagacagtgaagaaaagaaaagaaaaggaattttagagattgaatcagcagaagtatctggaaacagtgtggtgtgcagctttcttcagtatatggagaagtcaaaaccttggcagaaagcttggtgtgtgatccccaagcaagaccctcttgtgctgtacatgtatggtgccccccaggacgtcagagcccaggccaccattccacttctgggctatgtggtggatgaaatgccaaggagcgcagacctgccacacagtttcaaactgacccagtctaagtccgtgcacagctttgctgcagacagtgaggaactgaagcagaagtggctgaaagtcatccttttagctgtcacaggtgagacaccaggtggtccaaatgagcatccagccaccttggatgatcatcctgaacctaagaaaaaatcagaatgctgaactcctccaggaccagccatggtgtggaggtctcaggacttacagctcaagacattcccagctcttcttacacatctgctagcactttatgttgaaaaatataggcccataaatgcatcttttgaggactattttcctatgtttatgtactcttagtgaaattagtgtgcagagtcattctaccgataaagttttgaaataatgtg

SEQ ID NO: 11397 - DNA, 2977 bp, Homo sapiens
  source 1..2977: mol_type = unassigned DNA
ggtagcggctttgagtgagtgcgggagctgcagataccgagacgctgcgactgccgcaggagtcgccgcagccaaactcgccgcgacgccgggagggagcgtaccgggaaggagagggagaggaggcactcgctgaggagacgccgcagtagagggcgcccccggagtcgcgccgaacctgggcatgcaggcgacgccccccaggggccgctcgcggctggacgggagcgggaggagtcggggagcggcggtcgagcccggcaggatgagcgacgagggcggctccaacttcaggcgggtggcgatccggcggaagtccaacccctcctacctgccgcccggggtgccccggccctggagcaggcccgcgtcgcacctgggacgtgtagggaccgctgccttcaagggccaggtgccctcaggagccacaggcagcagtacctgtccaaagatcgctttagttccaccttgctccacaagcagcacaaccacactggttggtgagaatgtatctgaagaagaggctcagggaataaatgggaacaggccagcaaaacactcagctgcaagtccaaagccacaagtgcctccaaagccattacacctgcagaattcaccttcgtccaatatacaccaaacccccaggcataaagctttacctagtgcaaaaccaaggatggaggaaattaaacctgcctctgcttcttgtgtctcaaaagaaaaacccagtaaggtatcagatctcatcagtcgctttgaaggaggcagctcattatcaaattatagtgatttgaagaaagagtctgctgtgaacctaaatgctcctagaaccccaggaaggcatggattgacaaccacacctcaacaaaaactcctctcccagcacttgccacagaggcagggaaatgatacagataagactcagggtgcacagacttgtgtggccaacggtgtaatggcagcacaaaaccagatggaatgtgaggaggagaaagctgccactcttagctcagatacttctattcaagcttctgaacccttgcttgatacgcacatagtgaatggagaaagagatgaaactgccacagctcctgcatcacccacaacagacagctgtgatggaaatgcttctgacagtagctacaggactccaggcataggcccagtgctccccctagaagaaagaggggcagaaacagaaaccaaggtacaagagagggaaaatggggaaagccctctggaactggagcagctggaccagcaccatgagatgaaggagactaatgagcaaaaacttcacaaaatagccaatgaacttttgcttactgaaagagcttatgtcaaccgacttgacctcttagatcaggtattttattgcaaactgttggaagaagcaaaccgaggctcgtttccagcagagatggtgaataaaatcttttctaatatttcatcaataaatgccttccatagtaaattcctcttgccagagctggagaaacgaatgcaagaatgggaaactactcctagaattggagacatccttcagaaattggcaccattccttaagatgtatggagaatatgtgaaaggatttgataatgcaatggaattggttaaaaacatgacagaacgtattccccagttcaaatcagtggttgaagaaattcagaaacagaaaatctgtgggagcttaactttgcagcatcacatgctagaacctgttcagcggattccccggtatgagatgctccttaaggactatctaaggaaattgcctcctgattccctggactggaatgatgctaaaaaatcacttgaaattatatctacagcagcaagccattctaatagtgcaataaggaaaatggagaacctaaagaaactcttagagatttatgaaatgttgggagaagaagaagacattgtaaacccttcaaatgaactaataaaagaaggacagatcctcaaactagctgctcggaacacttcagcacaagaacgctaccttttcttattcaacaacatgttgctgtactgtgtgcccaaattcagcttggtaggctctaaattcacagttcgaaccagggttggcattgatggaatgaaaattgtagagactcaaaatgaagaatatccacatactttccaggtgtctgggaaagagagaacactggaactgcaggccagttctgcgcaagacaaagaagaatggatcaaggcccttcaagaaaccatcgatgcttttcatcaaaggcatgaaaccttcagaaatgcaattgcaaaggataatgacattcactcagaggtttctactgctgagctagggaaaagagccccaagatggatccgagataatgaagtgacaatgtgtatgaaatgtaaagaacctttcaatgcactgacacgaaggaggcatcattgtcgagcatgtggatatgtggtttgttggaaatgctccgactacaaagctcaacttgaatatgatggtggtaaattgagcaaagtttgtaaagactgttatcaaatcataagtggattcacagacagtgaagaaaagaaaagaaaaggaattttagagattgaatcagcagaagtatctggaaacagtgtggtgtgcagctttcttcagtatatggagaagtcaaaaccttggcagaaagcttggtgtgtgatccccaagcaagaccctcttgtgctgtacatgtatggtgccccccaggacgtcagagcccaggccaccattccacttctgggctatgtggtggatgaaatgccaaggagcgcagacctgccacacagtttcaaactgacccagtctaagtccgtgcacagctttgctgcagacagtgaggaactgaagcagaagtggctgaaagtcatccttttagctgtcacaggtgagacaccaggtggtccaaatgagcatccagccaccttggatgatcatcctgaacctaagaaaaaatcagaatgctga

SEQ ID NO: 11398 - DNA, 3129 bp, Homo sapiens
  source 1..3129: mol_type = unassigned DNA
ctgcccggccccttcgcccacgtgaagaacgccagggagctgtgaggcagtgctgtgtggttcctgccgtccggactctttttcctctactgagattcatctgtgtgaaatatgagttggcgaggaagatcgacctattattggcctagaccaaggcgctatgtacagcctcctgaaatgattgggcctatgcggcccgagcagttcagtgatgaagtggaaccagcaacacctgaagaaggggaaccagcaactcaacgtcaggatcctgcagctgctcaggagggagaggatgagggagcatctgcaggtcaagggccgaagcctgaagctgatagccaggaacagggtcacccacagactgggtgtgagtgtgaagatggtcctgatgggcaggagatggacccgccaaatccagaggaggtgaaaacgcctgaagaagagatgaggtctcactatgttgcccagactgggattctctggcttttaatgaacaattgcttcttaaatctttccccacggaaaccttgagtgactgaaatatcaaatggcaagagaccgtttagttcctatcatctgtggcatgtgaagggcaatcacagtgttaaaagaagacatgctgaaatgttgcaggctgctcctatgttggaaaattcttcattgaagttctcccaataaagctttacagccttctgcaaagaagtcttgtgaatcttttgtcaattttatttctagctatttgatgctgtgaaatgtttcattctttgcaattttgtattctatctccttgagctgtgtgtagaggcataattctcatgtattgattttctatccagcaaccttgttaaatatgcttatgaattttaaaagtttacttctaggttttttcagttttcaacctacagaatcatatcatttttgaataagaacaattttgtttctgccttttttgtttgttttttcttttgtatttttcgtagaggtgggattttggcctgtgtcctaggctttttttgaactcctgagcgcaagtaatccactctccttggcctttcaaagtgttgggattacaggcatgggccaccgtgctggtcctgtttttgccattttaaacccttttatttccttttctgattttatggcattgagcagatctaccggatacaattgtgatagtggaaatttttgtgttattcctgatgagaaatggaaaaatttcaacatttcacgacaatatttagtgtactttttttgtagatggactttttcagagtaagtcaagccattctgttttagtttgttgagagtgttcattttgaatatatgttgaatttcatcaaacactgacctgagtcatcttaaaacatgtgaattgagatttctttgctactaagaaagtgagcgggcactctgcttcatgtttacttttgtcatgttgcatgaaaaacattttgcttcatgtttgattctgtatgttgaaaactgaaatcatctattgtgattaccacagggttttttcccccagtaatctgtttatgtagtcaattacgttgataaatctgtactttttaaattttaacaattgagacaggtctcactctgtcacccatgctgactgcagtagtgtgatcacagcttactgcaacctcaacctcctgggctcaggcgatcctcccacctcaccctcctcagtagctaggactataggtacatgccaccatgccaagctaatttttctgttttagagatggtattttttcatgttgcccaggctggttttatactcctaatctcaagccatccactagcctcagcctcccaaagtgctgggattacaggaatgagtcacggtgcctggaaattttgtacatttaaaccaacaatttggtcatgggtaatctatgtcctaataatttatttaaggatttttatgtatatcctcatgagtgacattacctgtacttttatttcatatgctcatttgttggacgttgttatcaaggttcctctagcttcataaaacgggttggtatgtaaaacctctttttccattcactggaactcaagtctcctcaaggctgtgagtaatgcagggctaggctttcccataatgagcttttctagaatgcttctctcagatttggaccctacttaaacagcagtgaccaaacgggcagctccaggtacctatcccctcaaactttgtgagggtcgcgttctctgaagatgcctcttcaatttgaaagctatctgttcctgtttctctgctgatattaactctctgtgcacagaaagttaaacgtcactggttattaatttccctagattttgatctgtgctgtgtggctgagaatgggctgactgaccctagatctgtgtataattatgacaatggctccatttatttttaaaataagaggaattattataaaattcctatttactggatgtgtactatctatgaattacttctttgtgctaggttgtgtacatgtatgacctctttagatcctcacaagataaggcagaattttcatgaaattgatgactgactccagtaagaagcagatttggggggatttcaatttctaagctcaaagcccttgcacttttctcaaagtaaagcttttgaaagtgttaaatgtacacgaactgatggtgtatatgatgattttagttgtaatctgatgttttctttaaaaatttacatatacaaaagtgtttgactcaaaaggctttgttcttcccttaaaggaagcatctaccaaaatgtggcacacaaaccttgcatggtgtctctagggcctcctaccccgcatttcccctgctttttctcttgttctgactgaaaaacaaagtgctttgactgtgctgtgacccagccagctgcatgtttacccagcatgcttgaacccaagctggagccttgaacataaaggtgtttaagttgttgctcaaaatatggaaagaatctagctctggccttgaaccaaatcccttaaactctcctataaaactccataacctgaccccctcagtgcggatatacctaggcatgacattcttgttgcctgttgcgaggatgctttagcctactctaagttctcccaataaatgctttggactgat

SEQ ID NO: 11399 - DNA, 538 bp, Homo sapiens
  source 1..538: mol_type = unassigned DNA
cacgtggagaacgccagggagctgtgagggtgtgtggtctcgttcctgtcgtctggaatatttttcctctactgagattcatctgtgtgaaatatgagttggcgaggaagatcgacctatcggtctagaccaagactctatgtagagccccctgaaatgattgggcctatgctgcccgagcagttcagtgatgaagtggaaccagcaacacctgaagaaggggaaccagcaactcaacgtcaggatcctgcagctgctcaggagggagaggatgagggagcatctgcaggtcaagggccgaagcctgaagctgatagccaggaacaggttcacccaaagactgggtgtgagtgtggagatggtcctgatggccaggagatgggcctgccaaatccagaggaggtgaaaaggcctgaagaaggtgaaaagcaatcacagtgttaaaagaagacacgttgaaatgatgcaggctgctcctatgttggaaatttgttcattaaaattctcccaataaagctttacagccttctgcaaagaa

SEQ ID NO: 11400 - DNA, 527 bp, Homo sapiens
  source 1..527: mol_type = unassigned DNA
cgccagggagctgtgaggcagtgctgtgtggttcctgccgtccggactctttttcctctactgagattcatctgtgtgaaatatgagttggcgaggaagatcgacctattattggcctagaccaaggcgctatgtacagcctcctgaaatgattgggcctatgcggcccgagcagttcagtgatgaagtggaaccagcaacacctgaagaaggggaaccagcaactcaatgtcaggatcctgcagctgctcaggagggagaggatgagggagcatctgcaggtcaagggccgaagcctgaagctcatagccaggaacagggtcacccacagactgggtgtgagtgtgaagatggtcctgatgggcaggagatggacccgccaaatccagaggaggtgaaaacgcctgaagaaggtgaaaagcaatcacagtgttaaaagaagacacgttgaaatgatgcaggctgctcctatgttggaaatttgttcattaaaattctcccaataaagctttacagccttctgcaaa

SEQ ID NO: 11401 - DNA, 527 bp, Homo sapiens; identical to SEQ ID NO: 11400
  source 1..527: mol_type = unassigned DNA

SEQ ID NO: 11402 - DNA, 520 bp, Homo sapiens
  source 1..520: mol_type = unassigned DNA
ctgtgaggcagtgctgtgtggttcctgccgtccggactctttttcctctactgagattcatctgtgtgaaatatgagttggcgaggaagatcgacctattattggcctagaccaaggcgctatgtacagcctcctgaaatgattgggcctatgcggcccgagcagttcagtgatgaagtggaaccagcaacacctgaagaaggggaaccagcaactcaatgtcaggatcctgcagctgctcaggagggagaggatgagggagcatctgcaggtcaagggccgaagcctgaagctcatagccaggaacagggtcacccacagactgggtgtgagtgtgaagatggtcctgatgggcaggagatggacccgccaaatccagaggaggtgaaaacgcctgaagaaggtgaaaagcaatcacagtgttaaaagaagacacgttgaaatgatgcaggctgctcctatgttggaaatttgttcattaaaattctcccaataaagctttacagccttctgcaaagaa

SEQ ID NO: 11403 - DNA, 527 bp, Homo sapiens
  source 1..527: mol_type = unassigned DNA
cgccagggagctgtgaggcagtgctgtgtggttcctgccgtccggactctttttcctctactgagattcatctgtgtgaaatatgagttggcgaggaagatcgacctattattggcctagaccaaggcgctatgtacagcctcctgaaatgattgggcctatgcggcccgagcagttcagtgatgaagtggaaccagcaacacctgaagaaggggaaccagcaactcaacgtcaggatcctgcagctgctcaggagggagaggatgagggagcatctgcaggtcaagggccgaagcctgaagctcatagccaggaacagggtcacccacagactgggtgtgagtgtgaagatggtcctgatgggcaggagatggacccgccaaatccagaggaggtgaaaacgcctgaagaaggtgaaaagcaatcacagtgttaaaagaagacacgttgaaatgatgcaggctgctcctatgttggaaatttgttcattaaaattctcccaataaagctttacagccttctgcaaa

SEQ ID NO: 11404 - DNA, 527 bp, Homo sapiens; identical to SEQ ID NO: 11403
  source 1..527: mol_type = unassigned DNA

SEQ ID NO: 11405 - DNA, 527 bp, Homo sapiens
  source 1..527: mol_type = unassigned DNA
cgccagggagctgtgaggcagtgctgtgtggttcctgccgtccggactctttttcctctactgagattcatctgtgtgaaatatgagttggcgaggaagatcgacctattattggcctagaccaaggcgctatgtacagcctcctgaaatgattgggcctatgcggcccgagcagttcagtgatgaagtggaaccagcaacacctgaagaaggggaaccagcaactcaatgtcaggatcctgcagctgctcagaagggagaggatgagggagcatctgcaggtcaagggccgaagcctgaagctcatagccaggaacagggtcacccacagactgggtgtgagtgtgaagatggtcctgatgggcaggagatggacccgccaaatccagaggaggtgaaaacgcctgaagaaggtgaaaagcaatcacagtgttaaaagaagacacgttgaaatgatgcaggctgctcctatgttggaaatttgttcattaaaattctcccaataaagctttacagccttctgcaaa

SEQ ID NO: 11406 - DNA, 541 bp, Homo sapiens
  source 1..541: mol_type = unassigned DNA
gcccacgtgaagaacgccagggagctgtgaggcagtgctgtgtggttcctgccgtccggactctttttcctctactgagattcatctgtgtgaaatatgagttggcgaggaagatcgacctattattggcctagaccaagaccctatgtacagcctcctgaaatgattgggcctatgcggcccgagcagttcagtgatgaagtggaaccagcaacacctgaagaaggggaaccagcaactcaacgtcaggatcctgcagctgctcaggagggagaggatgagggagcatctgcaggtcaagggccgaagcctgaagctgatagccaggaacagggtcacccacagactgggtgtgagtgtgaagatggtcctgatgggcaggagatggacccgccaaatccagaggaggtgaaaacgcctgaagaaggtaaaaagcaatcacagtgttaaaagaagacacgttgaaatgatgcaggctgctcctatgttggaaatttgttcattaaaattctcccaataaagctttacagccttctgcaaa

SEQ ID NO: 11407 - DNA, 527 bp, Homo sapiens
  source 1..527: mol_type = unassigned DNA
cgccagggagctgtgaggcagtgctgtgtggttcctgccgtccggactctttttcctctactgagattcatctgtgtgaaatatgagttggcgaggaagatcgacctattatcggcctagaccaagacgctacgtagagcctcctgaaatgattgggcctatgcggcccgagcagttcagtgatgaagtggaaccagcaacacctgaagaaggggaaccagcaactcaatgtcaggatcctgcagctgctcaggagggagaggatgagggagcatctgcaggtcaagggccgaagcctgaagctgatagccaggaacagggtcacccacagactgggtgtgagtgtgaagatggtcctgatgggcaggagatggacccgccaaatccagaggaggtgaaaacgcctgaagaaggtaaaaagcaatcacagtgttaaaagaagacacgttgaaatgatgcaggctgctcctatgttggaaatttgttcattaaaattctcccaataaagctttacagccttctgcaaa

SEQ ID NO: 11408 - DNA, 528 bp, Homo sapiens
  source 1..528: mol_type = unassigned DNA
acgccagggagctgtgaggcagtgctgtgtggttcctgccgtccggactctttttcctctactgagattcatctgtgtgaaatatgagttggcgaggaagatcgacctatcggcctagaccaagacgctacgtagagcctcctgaaatgattgggcctatgcggcccgagcagttcagtgatgaagtggaaccagcaacacctgaagaaggggaaccagcaactcaacgtcaggatcctgcagctgctcaggagggacaggatgagggagcatctgcaggtcaagggccgaagcctgaagctcatagccaggaacagggtcacccacagactgggtgtgagtgtgaagatggtcctgatgggcaggagatggacccgccaaatccagaggaggtgaaaacgcctgaagaaggtgaaaagcaatcacagtgttaaaagaagacacgttgaaatgatgcaggctgctcctatgttggaaatttgttcattaaaattctcccaataaagctttacagccttctgcaaagaa

SEQ ID NO: 11409 - DNA, 509 bp, Homo sapiens
  source 1..509: mol_type = unassigned DNA
acgccagggagctgtgaggcagtgctgtgtggttcctgccgtccggactctttttcctctattgagattcatctgtgtgaaatatgagttggcgaggaagatcgacctatcggcctagaccaagacgctacgtagagcctcctgaaatgattgggcctatgcggcccgagcagttcagtgatgaagtggaaccagcaacacctgaagaaggggaaccagcaactcaacgtcaggatcctgcagctgctcaggagggagaggatgagggagcatctgcaggtcaagggccgaagcctgaagctcatagccaggaacagggtcacccacagactgggtgtgagtgtgaagatggtcctgatgggcaggagatggacccgccaaatccagaggaggtgaaaacgcctgaagaaggtgaaaagcaatcacagtgttaaaagaaggcacgttgaaatgatgcaggctgctcctatgttggaaatttgttcattaaaattctcccaataaagctt

SEQ ID NO: 11410 - DNA, 517 bp, Homo sapiens
  source 1..517: mol_type = unassigned DNA
ctgtgaggcagtgctgtgtggttcctgccgtccggactctttttcctctactgagattcatctgtgtgaaatatgagttggcgaggaagatcgacctatcggcctagaccaagacgctacgtagagcctcctgaaatgattgggcctatgcggcccgagcagttcagtgatgaagtggaaccagcaacacctgaagaaggggaaccagcaactcaacgtcaggatcctgcagctgctcaggagggagaggatgagggagcatctgcaggtcaagggccgaagcctgaagctcatagccaggaacagggtcacccacagactgggtgtgagtgtgaagatggtcctgatgggcaggagatggacccgccaaatccagaggaggtgaaaacgcctgaagaaggtgaaaagcaatcacagtgttaaaagaaggcacgttgaaatgatgcaggctgctcctatgttggaaatttgttcattaaaattctcccaataaagctttacagccttctgcaaagaa

SEQ ID NO: 11411 - DNA, 517 bp, Homo sapiens
  source 1..517: mol_type = unassigned DNA
ctgtgaggcagtgctgtgtggttcctgccgtccggactctttttcctctactgagattcatctgtgtgaaatatgagttggcgaggaagatcgacctatcggcctagaccaagacgctacgtagagcctcctgaaatgattgggcctatgcggcccgagcagttcagtgatgaagtggaaccagcaacacctgaagaaggggaaccagcaactcaacgtcaggatcctgcagctgctcaggagggagaggatgagggagcatctgcaggtcaagggccgaagcctgaagctgatagccaggaacagggtcacccacagactgggtgtgagtgtgaagatggtcctgatgggcaggagatggacccgccaaatccagaggaggtgaaaacgcctgaagaaggtgaaaagcaatcacagtgttaaaagaaggcacgttgaaatgatgcaggctgctcctatgttggaaatttgttcattaaaattctcccaataaagctttacagccttctgcaaagaa

SEQ ID NO: 11412 - DNA, 517 bp, Homo sapiens
  source 1..517: mol_type = unassigned DNA
ctgtgaggcagtgctgtgtggttcctgccgtccggactctttttcctctactgagattcatctgtgtgaaatatgagttggcgaggaagatcgacctatcggcctagaccaagacgctacgtagagcctcctgaaatgattgggcctatgcggcccgagcagttcagtgatgaagtggaaccagcaacacctgaagaaggggaaccagcaactcaacgtcaggatcctgcagctgctcaggagggagaggatgagggagcatctgcaggtcaagggccgaagcctgaagctgatagccaggaacagggtcacccacagactgggtgtgagtgtgaagatggtcctgatgggcaggagatggacccgccaaatccagaggaggtgaaaacgcctgaagaaggtaaaaagcaatcacagtgttaaaagaagacacgttgaaatgatgcaggctgctcctatgttggaaatttgttcattaaaattctcccaataaagctttacagccttctgcaaagaa

SEQ ID NO: 11413 - DNA, 2006 bp, Homo sapiens
  source 1..2006: mol_type = unassigned DNA
tggtgagatgtttctggaagaaaaaatcccctcgatttctgatttaaagctagcaattcgaagagctactctgaaaagatcatttactcctgtatttttgggaagcgccttgaagaacaaaggagttcagcctcttttagatgctgttttagaatacctcccaaatccatctgaagtccagaactatgctattctcaataaagaggatgactcaaaagagaaaaccaaaatcctaatgaactccagtagagacaattcccacccatttgtaggcctggcttttaaactggagtttttgtctaggtcctttttccgtctcactagacagaaggaccacagaaggcccatccagaggaccacgttatatttgattgtcatgtctccttatgatctcctaggctgtaatagtttcttagactttccttgtttctcacgagattgatatttttgagaagtattggtcagctcttttgtagagtgtccctcaatttgggtttattatttgatgcttttcacatgattagattggagtcatgtgtttttaggaggactgccatcgaggtgaagtgttattcttgtcacatcatatccaaggtacagacttgcagcatgatttatcattgtttttgtttttttttgtttttatttttatttttttgagatgagatttcgctcttgttgcccaggctggagtgcaatggcacaatctcggctcgctgcagcctccacctcccaggttcaagcgagtctcctgcctcagcctcccaagtagctgggattacaggcatgcgccaccacgcccagctaattttgtatttttagtagagacatagtttctccctgttggtcaggccggtctcgaactcctgacctcaggtgatccgagtgtcttggcctcccaaagtgctgggattacaggcatgagccaccgcacccggctgatttatcattgttaatgctaacctcaatcaccacacctggctgagatagtgtttgacaggtttctctgctgtaaagttactgtactctttttattccccttttcatagtgtactttttagaaggaagtcacttggctcagccaacacttgaggggggaattatgttccacccccttgaagggggcactatctacataagttatttggaattcttctgaaagggagatttgtctttcttccctgcttatttatctatttggacaatcacttatttaatatcagcgtggactcacgtatatgtattttgaactttgagttataactatgactttgagtatgtcatttgttgttcagattggctgggtttggcgattgggaactctcagttggctcctgtgttcctttaacatcttccaatgttttgcctttttgaatacttccttacttgctggcactacaagacgcctcaggcttatcttgtatattccatgccctaaccctagaatcagccgttctccaaggagcactggttcctttttaagtaaaatggtattagaaaccaagatttggggactggatgggctttttgttgaaatgctgttgcttctgtacataatattttaagtggggaaaaatggtagataagttggaagtgttaagagtggttatttctgggatgggattatattttgggggctttttcttactttaaaaatattttacagtatatttattacctccaaaatgaggggaaaatttttttaattaaaaagtggaaataacattacagtaaaagtatttacacataaagcttttaaaaatacatatataagaatattttcttaggattcccagaatagtgattattgagttaaaggcatagaatgttttcatagttaatggtttatattgccagattgcgttcatactctccaaattaatgtattggattatttcaatgaatatcatcattgagtattgtttaaaaatcattactgatttaacaaatgaagaattctattgtaatcttttatcttgatgaaataaattttgatttttaaaagc

SEQ ID NO: 11414 - DNA, 3721 bp, Homo sapiens
  source 1..3721: mol_type = unassigned DNA
ttctgtatcttcatacagaggtaatatttaaaaaagaagacgaagacaaaaggactcccttccctcacccatatacctatgccgtcttactgggagcaaacacttctttagctccgcaaagcgattgcactttctcttccaagtcggcagacggcgcgcgagcagcgtaggcactgctccgcctccaatccagttgctcttctttcttttcctcactctctttttcctcgcgtcctttgccccggaagtgctcttacaacattggctgccggcgtgactttgaccgcttcccggtgcgttaccggcagctgaacccacccggcgccacgggactttgacgcgtgctctgcgcttgccatgagactcctgggagctgcagccgtcgcggctctggggcgcggaagggcccccgcctccctaggctggcagaggaagcaggttaattggaaggcctgccgatggtcttcatcaggggtgattcctaatgaaaaaatacgaaatattggaatctcagctcacattgattctgggaaaactacattaacagaacgagtcctttactacactggcagaattgcaaagatgcatgaggtgaaaggtaaagatggagttggtgctgtcatggattccatggaactagagagacaaagaggaatcactattcagtcagcagccacttacaccatgtggaaagatgtcaatattaacattatagatactcctgggcatgtggacttcacaatagaagtggaaagggccctgagagtgttggatggtgcagtccttgttctctgtgctgttggaggggtacagtgccagaccatgactgtcaatcgtcagatgaagcgctacaacgttccgtttctaacttttattaacaaattggaccgaatgggctccaacccagccagggccctgcagcaaatgaggtctaaactaaatcataatgcagcgtttatgcagatacccatgggtttggagggtaattttaaaggtattgtagatcttattgaggaacgagccatctattttgatggagactttggtcagattgttcgatatggtgagattccagctgaattaagggcggcggccactgaccaccggcaggagctaattgaatgtgttgccaattcagatgaacagcttggtgagatgtttctggaagaaaaaatcccctcgatttctgatttaaagctagcaattcgaagagctactctgaaaagatcatttactcctgtatttttgggaagcgccttgaagaacaaaggagttcagcctcttttagatgctgttttagaatacctcccaaatccatctgaagtccagaactatgctattctcaataaagaggatgactcaaaagagaaaaccaaaatcctaatgaactccagtagagacaattcccacccatttgtaggcctggcttttaaactggaggtaggtcgatttggacaattaacttatgttcgcagttatcagggagagctaaagaagggtgacaccatctataacacaaggacaagaaagaaagtacggttgcaacggctggctcgcatgcatgccgacatgatggaggatgttgaggaagtatatgccggagacatctgtgcattgtttggcattgactgtgctagtggagacacattcacagacaaagccaacagcggcctttctatggagtcaattcatgttcctgatcctgtcatttcaatagcaatgaagccttctaacaagaacgatctggaaaaattttcaaaaggtattggcaggtttacaagagaagatcccacatttaaagtatactttgacactgagaacaaagagacagttatatctggaatgggagaattacacctggaaatctatgctcagaggctggaaagagagtatggctgtccttgtatcacaggaaagccaaaagttgcctttcgagagaccattactgcccctgtcccgtttgactttacacataaaaaacaatcaggtggtgcaggccagtatggaaaagtaataggtgtcctggagcctctggacccagaggactacactaaattggaattttcagatgaaacattcggatcaaatattccaaagcagtttgtgcctgctgtagaaaaggggtttttagatgcctgcgagaagggccctctttctggtcacaagctctctgggctccggtttgtcctgcaagatggagcacaccacatggttgattctaatgaaatctctttcatccgagcaggagaaggtgctcttaaacaagccttggcaaatgcaacattatgtattcttgaacctattatggctgtggaagttgtagctccaaatgaatttcagggacaagtaattgcaggaattaaccgacgccatggggtaatcactgggcaagatggagttgaggactattttacactgtatgcagatgtccctctaaatgatatgtttggttattccactgaacttaggtcatgcacagagggaaagggagaatacacaatggagtatagcaggtatcagccatgtttaccatccacacaagaagacgtcattaataagtatttggaagctacaggtcaacttcctgttaaaaaaggaaaagccaagaactaactttgcttactgtgagttgactgactctaattgaatctgcgtggttttgatactttgatggattccagtggaataaattcaggctgctgaaacaagaaattctgagcccaggaagcgggctcttctttcttcaaaagaagcccttcttgttcatattcaggagcttctgttatattcaaaggtaattctatgtctatctcaactctattgattggttttatagttcattgaaaatcctcaaataaaatataattattactgaaatatgtttaatatttaaggggaaaagagactaatttcagttatacttttaagcttagaatgtatgttcatttccaaattttgtatcataagagttttcaacatagagaaaagctgaaaaaatgcaaagaataaccacatactttccatctaccttcctttgttaacgggttgtttatcatataataatttgttttgtcatatttgctttcactgtctattatctgtttaagtctcataactctatttttagtttgctgaagacttgaaagtgaatcgcatatatcatgacacttcttggagtgtcattaatgggcaggcttttctgttgaagagtggattccgtatgttcttcatagagagtgtttttcagattcttcattgggatattaaaatattagccaaatttctctctgttttatatatgtctgtttatttcagtttgtggtttctgcaaatttgtaactgcctctgttttaggagtataagtattacttccttgtggtctattgtgaagtaaaaagtagacccttgcatatactattcttgtttgtgttcatcttaatgtttttgtacagctaaatcaaatgtaatttatagagttagtttcatcaacctaatgaatgctagttaaatttgaattccttggaatttatcgtatattgtattcactgagattatgaagggacaaatgttaatcttttgtttccagaaaaagttgggctttcccaagcagttctattacccggttcagaattgcttcatccaaaaatcatctgatggtatagatggatcctagtccttttcattacctgatggtagaaataaaataattgattttaaattc

SEQ ID NO: 11415 - DNA, 2793 bp, Homo sapiens
  source 1..2793: mol_type = unassigned DNA
cacatcaaagtccggagaccccatgtgccgctcccagcgacaagggactcggagcagcgacgacttcagactcaccggctggacggggaccaggactggggtggggtagggaagttgctacttccagggaacggcggcgaccgctacagcgcaggccgcggacccgaccgcggcaggcgaagtggggtggggggagtggaaattagggagggtggggaagagggcaacacgcaagcgccaagggtcaggtgccgcggtggatgccgggacacggagtccccggtagagaaagaaactggctaaatgagagaaagcgaactaccaatcccaggatgacccgcgcacgacctggctgtcacgaaggcccggaggagggcgcttgcgggcggggcacaacgagaagccaccggaagcggaagccagaatggcgccattttgcggtacggaagctacacagcaacacgtataggagactctccccgagatcttctagggagtgacccatctatttttgtttgggaagaggaaactccgaaatgggatcgcggaagacttaaagggccaggctgatttttttttcctactggtctctgaggctgtggttgctacagggtcaccacgagcttggcttacttgtctcatccttcccttgcctggtatcattttctcagttctcccaaaagccatgtcccggcccttgctcatcaccttcaccccagccactgaccccagcgacctctggaaggatgggcagcagcagccacagcccgagaagccagagtccaccctggatggggctgcagccctagctttctatgaggccctgattggggatgagagcagcgctcctgactcccagagatctcagactgaacctgccagagaaagaaagagaaagaaaagaagaataatgaaggcaccagcagcagaagcagtggcagaaggagcatcaggaagacatggacaagggagatcccttgaggctgaggataagatgactcaccggatactgagggcagcccaggagggggacctgccagaacttaggagactgctggaaccgcatgaggcaggaggagctggggggaatatcaacgcccgggatgccttctggtggaccccactgatgtgtgctgctcgagcgggccagggggcagctgtgagctatctcctgggccgtggggctgcctgggtgggggtctgtgagctgagtggcagggatgcggctcagctcgctgaagaagctggcttccctgaggtagcccgcatggtcagggagagccatggagagacaaggagcccggaaaaccggtctcctactccctccctccagtactgcgagaactgtgacacccacttccaagattccaaccaccgcacatccactgctcacctgctgtcactgtcgcagggtcctcagcctcccaaccttccacttggggtgcccatctccagcccgggcttcaaactgctgctgagggggggctgggagccaggaatggggctgggaccccggggtgagggccgtgccaatcccatccccactgtcctcaagagggaccaggaaggactaggctacagatcagcaccccagccccgagtgacacatttcccagcttgggatacccgagctgtggctgggagggagagaccccctcgggtggccacactgagctggagggaggagagaaggagggaggagaaagacagggcttgggagcgggatctaaggacttacatgaacctcgagttctgactttggtaaagtctgaccctagtctgctgctgaagtctgaacttgggcctctgacctgggccctttgacttccccttcctgggatctgctcagatgcagatcctgaagtttttggtcaataggctctgtcttcgtgagagacgggctgagagtcagaaataaatcaaccatttgtggtttattcacttttctggaagctattttgaggaagccaaacagaagcctgggagccacatgcaagtcccacctgagtcagaaggggcagcctctccaggtggcatgataaggtcacctccctgccaatctgggttcactttcaggtcccagaccctcctgggagtcccccacctattctttcaacccccctggaccaagaattgcccagcttcgtgcaagtctcacttcccccaggaggagttccctgactacagccaattcactgatttcacaaacataagtccatatactatgtgccaagaatacaggtaaagacattcccaaccctcaaagagttcacagctggagagggaaagtgccatgttatcaatttttttcttttttttttgagatgcagtttcgctctcattgcccaggctggagtgcaatggcatgatctcggctcaccacaacctctgccccccgagttcaagggattctcctgcctcagcctccccagtagctgggattacaggcatgccccaccacgcccagctaattttgtatttttagtagagacggggtttctccatgttggccaagctggtcttgaactcccgacctcaggtgatccgccggcctcggcttcccaaagtgctggggttgcaggcatgagccaccactcccggcccatgttatcaaatattataatgcagggtgataagggaagtcaaggcctctagagatgagaatgggtagggttttgctggaagaggccagtgtgataggaaggcccacgattatcaagcttgtacacttagttgaactgggaccagaactctagcccccaaatctaaactttaaacttctttgttccaccc

SEQ ID NO: 11416 - DNA, 1598 bp, Homo sapiens
  source 1..1598: mol_type = unassigned DNA
cagagacccttgacgggcatactgtttcctccgggctcctgcctcatgaggggagaggtgcggcttggctccaatggcgccattttgcggtacggaagctacacagcaacacgtataggagactctccccgagatcttctagggagtgacccatctatttttgtttgggaagaggaaactccgaaatgggatcgcggaagacttaaagggccaggctgatttttttttcctactgcaggtctctgaggctgtggttgctacagggtcaccacgagcttggcttacttgtctcatccttcccttgcctggtatcattttctcagttctcccaaaagccatgtcccggcccttgctcatcaccttcaccccagccactgaccccagcgacctctggaaggatgggcagcagcagccacagcccgagaagccagagtccaccctggatggggctgcagcccgagctttctatgaggccctgattggggatgagagcagcgctcctgactcccagagatctcagactgaacctgccagagaaagaaagagaaagaaaagaagaataatgaaggcaccagcagcagaagcagtggcagaaggagcatcaggaagacatggacaagggagatcccttgaggctgaggataagatgactcaccggatactgagggcagcccaggagggggacctgccagaacttaggagactgctggaaccgcatgaggcaggaggagctggggggaatatcaacgcccgggatgccttctggtggaccccactgatgtgtgctgctcgagcgggccagggggcagctgtgagctatctcctgggccgtggggctgcctgggtgggggtctgtgagctgagtggcagggatgcggctcagctcgctgaagaagctggcttccctgaggtagcccgcatggtcagggagagccatggagagacaaggagcccggaaaaccggtctcctactccctccctccagtactgcgagaactgtgacacccacttccaagattccaaccaccgcacatccactgctcacctgctgtcactgtcgcagggtcctcagcctcccaaccttccacttggggtgcccatctccagcccgggcttcaaactgctgctgagggggggctgggagccaggaatggggctgggaccccggggtgagggccgtgccaatcccatccccactgtcctcaagagggaccaggaaggactaggctacagatcagcaccccagccccgagtgacacatttcccagcttgggatacccgagctgtggctgggagggagagaccccctcgggtggccacactgagctggagggaggagagaaggagggaggagaaagacagggcttgggagcgggatctaaggacttacatgaacctcgagttctgactttggtaaagtctgaccctagtctgctgctgaagtctgaacttgggcctctgacctgggccctttgacttccccttcctgggatctgctcagatgcagatcctgaagtttttggtcaataggctctgtcttcgtgagagacgggctgagagtcagaaataaatcaaccatttgtggtttattcactttt

SEQ ID NO: 11417 - DNA, 1800 bp, Homo sapiens
  source 1..1800: mol_type = unassigned DNA
cggggcccgggagtctgggcaatacagttttgtgctcactgggtgaagaggctgacttagggcggggaaaggagggagccaggctggatctctttccgcagctctcctcacgttcccctctagtcccggcgcggcgctgctgcccaggggactggcctatcctcggccaatccgctgggtccttattgcctgttgggcccctagtgcgaatcagtcccgccagagacccttgacgggcatactgtttcctccgggctcctgcctcatgaggggagagaatggcgccattttgcggtacggaagctacacagcaacacgtataggagactctccccgagatcttctagggagtgacccatctatttttgtttgggaagaggaaactccgaaatgggatcgcggaagacttaaagggccaggctgatttttttttcctactggtctctgaggctgtggttgctacagggtcaccacgagcttggcttacttgtctcatccttcccttgcctggtatcattttctcagttctcccaaaagccatgtcccggcccttgctcatcaccttcaccccagccactgaccccagcgacctctggaaggatgggcagcagcagccacagcccgagaagccagagtccaccctggatggggctgcagcccgagctttctatgaggccctgattggggatgagagcagcgctcctgactcccagagatctcagactgaacctgccagagaaagaaagagaaagaaaagaagaataatgaaggcaccagcagcagaagcagtggcagaaggagcatcaggaagacatggacaagggagatcccttgaggctgaggataagatgactcaccggatactgagggcagcccaggagggggacctgccagaacttaggagactgctggaaccgcatgaggcaggaggagctggggggaatatcaacgcccgggatgccttctggtggaccccactgatgtgtgctgctcgagcgggccagggggcagctgtgagctatctcctgggccgtggggctgcctgggtgggggtctgtgagctgagtggcagggatgcggctcagctcgctgaagaagctggcttccctgaggtagcccgcatggtcagggagagccatggagagacaaggagcccggaaaaccggtctcctactccctccctccagtactgcgagaactgtgacacccacttccaagattccaaccaccgcacatccactgctcacctgctgtcactgtcgcagggtcctcagcctcccaaccttccacttggggtgcccatctccagcccgggcttcaaactgctgctgagggggggctgggagccaggaatggggctgggaccccggggtgagggccgtgccaatcccatccccactgtcctcaagagggaccaggaaggactaggctacagatcagcaccccagccccgagtgacacatttcccagcttgggatacccgagctgtggctgggagggagagaccccctcgggtggccacactgagctggagggaggagagaaggagggaggagaaagacagggcttgggagcgggatctaaggacttacatgaacctcgagttctgactttggtaaagtctgaccctagtctgctgctgaagtctgaacttgggcctctgacctgggccctttgacttccccttcctgggatctgctcagatgcagatcctgaagtttttggtcaataggctctgtcttcgtgagagacgggctgagagtcagaaataaatcaaccatttgtggtttattcactttt

SEQ ID NO: 11418 - DNA, 1910 bp, Homo sapiens
  source 1..1910: mol_type = unassigned DNA
aggcgtgacgttatttcattacacggcttctcggcattccacaggtttccctccgcctcctgagggcctttcctaacccacagagtggattcctggctccagaaaatgggcttggagcgggggccacgttgaggaaggcgaagggcattgtgggggcgttatgtaaaagtaggaccccaaccgacagatcctagtgctcgcgccacctgggcgcgcggagctttgctcgtttactattgaaaaagttccagcgcgggaaactgaacccggagctttgcgcacgcccgagccctcaagtaatgtgggttgtggtttttgttgttgttgtcgccacgcatgcgtcttcgtgccgtgtggctatttgattgtgtcaactcttctgattagaatggcgccattttgcggtacggaagctacacagcaacacgtataggagactctccccgagatcttctagggagtgacccatctatttttgtttgggaagaggaaactccgaaatgggatcgcggaagacttaaagggccaggctgatttttttttcctactggtctctgaggctgtggttgctacagggtcaccacgagcttggcttacttgtctcatccttcccttgcctggtatcattttctcagttctcccaaaagccatgtcccggcccttgctcatcaccttcaccccagccactgaccccagcgacctctggaaggatgggcagcagcagccacagcccgagaagccagagtccaccctggatggggctgcagcccgagctttctatgaggccctgattggggatgagagcagcgctcctgactcccagagatctcagactgaacctgccagagaaagaaagagaaagaaaagaagaataatgaaggcaccagcagcagaagcagtggcagaaggagcatcaggaagacatggacaagggagatcccttgaggctgaggataagatgactcaccggatactgagggcagcccaggagggggacctgccagaacttaggagactgctggaaccgcatgaggcaggaggagctggggggaatatcaacgcccgggatgccttctggtggaccccactgatgtgtgctgctcgagcgggccagggggcagctgtgagctatctcctgggccgtggggctgcctgggtgggggtctgtgagctgagtggcagggatgcggctcagctcgctgaagaagctggcttccctgaggtagcccgcatggtcagggagagccatggagagacaaggagcccggaaaaccggtctcctactccctccctccagtactgcgagaactgtgacacccacttccaagattccaaccaccgcacatccactgctcacctgctgtcactgtcgcagggtcctcagcctcccaaccttccacttggggtgcccatctccagcccgggcttcaaactgctgctgagggggggctgggagccaggaatggggctgggaccccggggtgagggccgtgccaatcccatccccactgtcctcaagagggaccaggaaggactaggctacagatcagcaccccagccccgagtgacacatttcccagcttgggatacccgagctgtggctgggagggagagaccccctcgggtggccacactgagctggagggaggagagaaggagggaggagaaagacagggcttgggagcgggatctaaggacttacatgaacctcgagttctgactttggtaaagtctgaccctagtctgctgctgaagtctgaacttgggcctctgacctgggccctttgacttccccttcctgggatctgctcagatgcagatcctgaagtttttggtcaataggctctgtcttcgtgagagacgggctgagagtcagaaataaatcaaccatttgtggtttattcactttt

SEQ ID NO: 11419 - DNA, 1814 bp, Homo sapiens
  source 1..1814: mol_type = unassigned DNA
ggtatggcgttcggggcccgggagtctgggcaatacagttttgtgctcactgggtgaagaggctgacttagggcggggaaaggagggagccaggctggatctctttccgcagctctcctcacgttcccctctagtcccggcgcggcgctgctgcccaggggactggcctatcctcggccaatccgctgggtccttattgcctgttgggcccctagtgcgaatcagtcccgccagagacccttgacgggcatactgtttcctccgggctcctgcctcatgaggggagagaatggcgccattttgcggtacggaagctacacagcaacacgtataggagactctccccgagatcttctagggagtgacccatctatttttgtttgggaagaggaaactccgaaatgggatcgcggaagacttaaagggccaggctgatttttttttcctactgcaggtctctgaggctgtggttgctacagggtcaccacgagcttggcttacttgtctcatccttcccttgcctggtatcattttctcagttctcccaaaagccatgtcccggcccttgctcatcaccttcaccccagccactgaccccagcgacctctggaaggatgggcagcagcagccacagcccgagaagccagagtccaccctggatggggctgcagcccgagctttctatgaggccctgattggggatgagagcagcgctcctgactcccagagatctcagactgaacctgccagagaaagaaagagaaagaaaagaagaataatgaaggcaccagcagcagaagcagtggcagaaggagcatcaggaagacatggacaagggagatcccttgaggctgaggataagatgactcaccggatactgagggcagcccaggagggggacctgccagaacttaggagactgctggaaccgcatgaggcaggaggagctggggggaatatcaacgcccgggatgccttctggtggaccccactgatgtgtgctgctcgagcgggccagggggcagctgtgagctatctcctgggccgtggggctgcctgggtgggggtctgtgagctgagtggcagggatgcggctcagctcgctgaagaagctggcttccctgaggtagcccgcatggtcagggagagccatggagagacaaggagcccggaaaaccggtctcctactccctccctccagtactgcgagaactgtgacacccacttccaagattccaaccaccgcacatccactgctcacctgctgtcactgtcgcagggtcctcagcctcccaaccttccacttggggtgcccatctccagcccgggcttcaaactgctgctgagggggggctgggagccaggaatggggctgggaccccggggtgagggccgtgccaatcccatccccactgtcctcaagagggaccaggaaggactaggctacagatcagcaccccagccccgagtgacacatttcccagcttgggatacccgagctgtggctgggagggagagaccccctcgggtggccacactgagctggagggaggagagaaggagggaggagaaagacagggcttgggagcgggatctaaggacttacatgaacctcgagttctgactttggtaaagtctgaccctagtctgctgctgaagtctgaacttgggcctctgacctgggccctttgacttccccttcctgggatctgctcagatgcagatcctgaagtttttggtcaataggctctgtcttcgtgagagacgggctgagagtcagaaataaatcaaccatttgtggtttattcactttt

SEQ ID NO: 11420 - DNA, 2793 bp, Homo sapiens
  source 1..2793: mol_type = unassigned DNA
cacatcaaagtccggagaccccatgtgccgctcccagcgacaagggactcggagcagcgacgacttcagactcaccggctggacggggaccaggactggggtggggtagggaagttgctacttccagggaacggcggcgaccgctacagcgcaggccgcggacccgaccgcggcaggcgaagtggggtggggggagtggaaattagggagggtggggaagagggcaacacgcaagcgccaagggtcaggtgccgcggtggatgccgggacacggagtccccggtagagaaagaaactggctaaatgagagaaagcgaactaccaatcccaggatgacccgcgcacgacctggctgtcacgaaggcccggaggagggcgcttgcgggcggggcacaacgagaagccaccggaagcggaagccagaatggcgccattttgcggtacggaagctacacagcaacacgtataggagactctccccgagatcttctagggagtgacccatctatttttgtttgggaagaggaaactccgaaatgggatcgcggaagacttaaagggccaggctgatttttttttcctactggtctctgaggctgtggttgctacagggtcaccacgagcttggcttacttgtctcatccttcccttgcctggtatcattttctcagttctcccaaaagccatgtcccggcccttgctcatcaccttcaccccagccactgaccccagcgacctctggaaggatgggcagcagcagccacagcccgagaagccagagtccaccctggatggggctgcagcccgagctttctatgaggccctgattggggatgagagcagcgctcctgactcccagagatctcagactgaacctgccagagaaagaaagagaaagaaaagaagaataatgaaggcaccagcagcagaagcagtggcagaaggagcatcaggaagacatggacaagggagatcccttgaggctgaggataagatgactcaccggatactgagggcagcccaggagggggacctgccagaacttaggagactgctggaaccgcatgaggcaggaggagctggggggaatatcaacgcccgggatgccttctggtggaccccactgatgtgtgctgctcgagcgggccagggggcagctgtgagctatctcctgggccgtggggctgcctgggtgggggtctgtgagctgagtggcagggatgcggctcagctcgctgaagaagctggcttccctgaggtagcccgcatggtcagggagagccatggagagacaaggagcccggaaaaccggtctcctactccctccctccagtactgcgagaactgtgacacccacttccaagattccaaccaccgcacatccactgctcacctgctgtcactgtcgcagggtcctcagcctcccaaccttccacttggggtgcccatctccagcccgggcttcaaactgctgctgagggggggctgggagccaggaatggggctgggaccccggggtgagggccgtgccaatcccatccccactgtcctcaagagggaccaggaaggactaggctacagatcagcaccccagccccgagtgacacatttcccagcttgggatacccgagctgtggctgggagggagagaccccctcgggtggccacactgagctggagggaggagagaaggagggaggagaaagacagggcttgggagcgggatctaaggacttacatgaacctcgagttctgactttggtaaagtctgaccctagtctgctgctgaagtctgaacttgggcctctgacctgggccctttgacttccccttcctgggatctgctcagatgcagatcctgaagtttttggtcaataggctctgtcttcgtgagagacgggctgagagtcagaaataaatcaaccatttgtggtttattcacttttctggaagctattttgaggaagccaaacagaagcctgggagccacatgcaagtcccacctgagtcagaaggggcagcctctccaggtggcatgataaggtcacctccctgccaatctgggttcactttcaggtcccagaccctcctgggagtcccccacctattctttcaacccccctggaccaagaattgcccagcttcgtgcaagtctcacttcccccaggaggagttccctgactacagccaattcactgatttcacaaacataagtccatatactatgtgccaagaatacaggtaaagacattcccaaccctcaaagagttcacagctggagagggaaagtgccatgttatcaatttttttcttttttttttgagatgcagtttcgctctcattgcccaggctggagtgcaatggcatgatctcggctcaccacaacctctgccccccgagttcaagggattctcctgcctcagcctccccagtagctgggattacaggcatgccccaccacgcccagctaattttgtatttttagtagagacggggtttctccatgttggccaagctggtcttgaactcccgacctcaggtgatccgccggcctcggcttcccaaagtgctggggttgcaggcatgagccaccactcccggcccatgttatcaaatattataatgcagggtgataagggaagtcaaggcctctagagatgagaatgggtagggttttgctggaagaggccagtgtgataggaaggcccacgattatcaagcttgtacacttagttgaactgggaccagaactctagcccccaaatctaaactttaaacttctttgttccaccc

SEQ ID NO: 11421 - DNA, 1598 bp, Homo sapiens
  source 1..1598: mol_type = unassigned DNA
cagagacccttgacgggcatactgtttcctccgggctcctgcctcatgaggggagaggtgcggcttggctccaatggcgccattttgcggtacggaagctacacagcaacacgtataggagactctccccgagatcttctagggagtgacccatctatttttgtttgggaagaggaaactccgaaatgggatcgcggaagacttaaagggccaggctgatttttttttcctactgcaggtctctgaggctgtggttgctacagggtcaccacgagcttggcttacttgtctcatccttcccttgcctggtatcattttctcagttctcccaaaagccatgtcccggcccttgctcatcaccttcaccccagccactgaccccagcgacctctggaaggatgggcagcagcagccacagcccgagaagccagagtccaccctggatggggctgcagccctagctttctatgaggccctgattggggatgagagcagcgctcctgactcccagagatctcagactgaacctgccagagaaagaaagagaaagaaaagaagaataatgaaggcaccagcagcagaagcagtggcagaaggagcatcaggaagacatggacaagggagatcccttgaggctgaggataagatgactcaccggatactgagggcagcccaggagggggacctgccagaacttaggagactgctggaaccgcatgaggcaggaggagctggggggaatatcaacgcccgggatgccttctggtggaccccactgatgtgtgctgctcgagcgggccagggggcagctgtgagctatctcctgggccgtggggctgcctgggtgggggtctgtgagctgagtggcagggatgcggctcagctcgctgaagaagctggcttccctgaggtagcccgcatggtcagggagagccatggagagacaaggagcccggaaaaccggtctcctactccctccctccagtactgcgagaactgtgacacccacttccaagattccaaccaccgcacatccactgctcacctgctgtcactgtcgcagggtcctcagcctcccaaccttccacttggggtgcccatctccagcccgggcttcaaactgctgctgagggggggctgggagccaggaatggggctgggaccccggggtgagggccgtgccaatcccatccccactgtcctcaagagagaccaggaaggactaggctacagatcagcaccccagccccgagtgacacatttcccagcttgggatacccgagctgtggctgggagggagagaccccctcgggtggccacactgagctggagggaggagagaaggagggaggagaaagacagggcttgggagcgggatctaaggacttacatgaacctcgagttctgactttggtaaagtctgaccctagtctgctgctgaagtctgaacttgggcctctgacctgggccctttgacttccccttcctgggatctgcccagatgcagatcctgaagtttttggtcaataggctctgtcttcgtgagagacgggctgagagtcagaaataaatcaaccatttgtggtttattcactttt

SEQ ID NO: 11422 - DNA, 1814 bp, Homo sapiens
  source 1..1814: mol_type = unassigned DNA
ggtatggcgttcggggcccgggagtctgggcaatacagttttgtgctcactgggtgaagaggctgacttagggcggggaaaggagggagccaggctggatctctttccgcagctctcctcacgttcccctctagtcccggcgaggcgctgctgcccaggggactggcctatcctcggccaatccgctgggtccttattgcctgttgggcccctagtgcgaatcagtcccgccagagacccttgacgggcatactgtttcctccgggctcctgcctcatgaggggagagaatggcgccattttgcggtacggaagctacacagcaacacgtataggagactctccccgagatcttctagggagtgacccatctatttttgtttgggaagaggaaactccgaaatgggatcgcggaagacttaaagggccaggctgatttttttttcctactgcaggtctctgaggctgtggttgctacagggtcaccacgagcttggcttacttgtctcatccttcccttgcctggtatcattttctcagttctcccaaaagccatgtcccggcccttgctcatcaccttcaccccagccactgaccccagcgacctctggaaggatgggcagcagcagccacagcccgagaagccagagtccaccctggatggggctgcagccctagctttctatgaggccctgattggggatgagagcagcgctcctgactcccagagatctcagactgaacctgccagagaaagaaagagaaagaaaagaagaataatgaaggcaccagcagcagaagcagtggcagaaggagcatcaggaagacatggacaagggagatcccttgaggctgaggataagatgactcaccggatactgagggcagcccaggagggggacctgccagaacttaggagactgctggaaccgcatgaggcaggaggagctggggggaatatcaacgcccgggatgccttctggtggaccccactgatgtgtgctgctcgagcgggccagggggcagctgtgagctatctcctgggccgtggggctgcctgggtgggggtctgtgagctgagtggcagggatgcggctcagctcgctgaagaagctggcttccctgaggtagcccgcatggtcagggagagccatggagagacaaggagcccggaaaaccggtctcctactccctccctccagtactgcgagaactgtgacacccacttccaagattccaaccaccgcacatccactgctcacctgctgtcactgtcgcagggtcctcagcctcccaaccttccacttggggtgcccatctccagcccgggcttcaaactgctgctgagggggggctgggagccaggaatggggctgggaccccggggtgagggccgtgccaatcccatccccactgtcctcaagagagaccaggaaggactaggctacagatcagcaccccagccccgagtgacacatttcccagcttgggatacccgagctgtggctgggagggagagaccccctcgggtggccacactgagctggagggaggagagaaggagggaggagaaagacagggcttgggagcgggatctaaggacttacatgaacctcgagttctgactttggtaaagtctgaccctagtctgctgctgaagtctgaacttgggcctctgacctgggccctttgacttccccttcctgggatctgcccagatgcagatcctgaagtttttggtcaataggctctgtcttcgtgagagacgggctgagagtcagaaataaatcaaccatttgtggtttattcactttt

SEQ ID NO: 11423 - DNA, 1910 bp, Homo sapiens
  source 1..1910: mol_type = unassigned DNA
aggcgtgacgttatttcattacacggcttctcggcattccacaggtttccctccgcctcctgagggcctttcctaacccacagagtggattcctggctccagaaaatgggcttggagcgggggccacgttgaggaaggcgaagggcattgtgggggcgttatgtaaaagtaggaccccaaccgacagatcctagtgctcgcgccacctgggcgcgcggagctttgctcgtttactattgaaaaagttccagcgcgggaaactgaacccggagctttgcgcacgcccgagccctcaagtaatgtgggttgtggtttttgttgttgttgtcgccacgcatgcgtcttcgtgccgtgtggctatttgattgtgtcaactcttctgattagaatggcgccattttgcggtacggaagctacacagcaacacgtataggagactctccccgagatcttctagggagtgacccatctatttttgtttgggaagaggaaactccgaaatgggatcgcggaagacttaaagggccaggctgatttttttttcctactggtctctgaggctgtggttgctacagggtcaccacgagcttggcttacttgtctcatccttcccttgcctggtatcattttctcagttctcccaaaagccatgtcccggcccttgctcatcaccttcaccccagccactgaccccagcgacctctggaaggatgggcagcagcagccacagcccgagaagccagagtccaccctggatggggctgcagccctagctttctatgaggccctgattggggatgagagcagcgctcctgactcccagagatctcagactgaacctgccagagaaagaaagagaaagaaaagaagaataatgaaggcaccagcagcagaagcagtggcagaaggagcatcaggaagacatggacaagggagatcccttgaggctgaggataagatgactcaccggatactgagggcagcccaggagggggacctgccagaacttaggagactgctggaaccgcatgaggcaggaggagctggggggaatatcaacgcccgggatgccttctggtggaccccactgatgtgtgctgctcgagcgggccagggggcagctgtgagctatctcctgggccgtggggctgcctgggtgggggtctgtgagctgagtggcagggatgcggctcagctcgctgaagaagctggcttccctgaggtagcccgcatggtcagggagagccatggagagacaaggagcccggaaaaccggtctcctactccctccctccagtactgcgagaactgtgacacccacttccaagattccaaccaccgcacatccactgctcacctgctgtcactgtcgcagggtcctcagcctcccaaccttccacttggggtgcccatctccagcccgggcttcaaactgctgctgagggggggctgggagccaggaatggggctgggaccccggggtgagggccgtgccaatcccatccccactgtcctcaagagagaccaggaaggactaggctacagatcagcaccccagccccgagtgacacatttcccagcttgggatacccgagctgtggctgggagggagagaccccctcgggtggccacactgagctggagggaggagagaaggagggaggagaaagacagggcttgggagcgggatctaaggacttacatgaacctcgagttctgactttggtaaagtctgaccctagtctgctgctgaagtctgaacttgggcctctgacctgggccctttgacttccccttcctgggatctgcccagatgcagatcctgaagtttttggtcaataggctctgtcttcgtgagagacgggctgagagtcagaaataaatcaaccatttgtggtttattcactttt

SEQ ID NO: 11424 - DNA, 1800 bp, Homo sapiens
  source 1..1800: mol_type = unassigned DNA
cggggcccgggagtctgggcaatacagttttgtgctcactgggtgaagaggctgacttagggcggggaaaggagggagccaggctggatctctttccgcagctctcctcacgttcccctctagtcccggcgaggcgctgctgcccaggggactggcctatcctcggccaatccgctgggtccttattgcctgttgggcccctagtgcgaatcagtcccgccagagacccttgacgggcatactgtttcctccgggctcctgcctcatgaggggagagaatggcgccattttgcggtacggaagctacacagcaacacgtataggagactctccccgagatcttctagggagtgacccatctatttttgtttgggaagaggaaactccgaaatgggatcgcggaagacttaaagggccaggctgatttttttttcctactggtctctgaggctgtggttgctacagggtcaccacgagcttggcttacttgtctcatccttcccttgcctggtatcattttctcagttctcccaaaagccatgtcccggcccttgctcatcaccttcaccccagccactgaccccagcgacctctggaaggatgggcagcagcagccacagcccgagaagccagagtccaccctggatggggctgcagccctagctttctatgaggccctgattggggatgagagcagcgctcctgactcccagagatctcagactgaacctgccagagaaagaaagagaaagaaaagaagaataatgaaggcaccagcagcagaagcagtggcagaaggagcatcaggaagacatggacaagggagatcccttgaggctgaggataagatgactcaccggatactgagggcagcccaggagggggacctgccagaacttaggagactgctggaaccgcatgaggcaggaggagctggggggaatatcaacgcccgggatgccttctggtggaccccactgatgtgtgctgctcgagcgggccagggggcagctgtgagctatctcctgggccgtggggctgcctgggtgggggtctgtgagctgagtggcagggatgcggctcagctcgctgaagaagctggcttccctgaggtagcccgcatggtcagggagagccatggagagacaaggagcccggaaaaccggtctcctactccctccctccagtactgcgagaactgtgacacccacttccaagattccaaccaccgcacatccactgctcacctgctgtcactgtcgcagggtcctcagcctcccaaccttccacttggggtgcccatctccagcccgggcttcaaactgctgctgagggggggctgggagccaggaatggggctgggaccccggggtgagggccgtgccaatcccatccccactgtcctcaagagagaccaggaaggactaggctacagatcagcaccccagccccgagtgacacatttcccagcttgggatacccgagctgtggctgggagggagagaccccctcgggtggccacactgagctggagggaggagagaaggagggaggagaaagacagggcttgggagcgggatctaaggacttacatgaacctcgagttctgactttggtaaagtctgaccctagtctgctgctgaagtctgaacttgggcctctgacctgggccctttgacttccccttcctgggatctgcccagatgcagatcctgaagtttttggtcaataggctctgtcttcgtgagagacgggctgagagtcagaaataaatcaaccatttgtggtttattcactttt

SEQ ID NO: 11425 - DNA, 2798 bp, Homo sapiens
  source 1..2798: mol_type = unassigned DNA
cacatcaaagtccggagaccccatgtgccgctcccagcgacaagggactcggagcagcgacgacttcagactcaccggctggacggggaccaggactggggtggggtagggaagttgctacttccagggaacggcggcgaccgctacagcgcaggccgcggacccgaccgcggcaggcgaagtggggtggggggagtggaaattagggagggtggggaagagggcaacacgcaagcgccaagggtcaggtgccgcggtggatgccgggacacggagtccccggtagagaaagaaactggctaaatgagagaaagcgaactaccaatcccaggatgacccgcgcacgacctggctgtcacgaaggcccggaggagggcgcttgcgggcggggcacaacgagaagccaccggaagcggaagccagaatggcgccattttgcggtacggaagctacacagcaacacgtataggagactctccccgagatcttctagggagtgacccatctatttttgtttgggaagaggaaactccgaaatgggatcgcggaagacttaaagggccaggctgatttttttttcctactggtctctgaggctgtggttgctacagggtcaccacgagcttggcttacttgtctcatccttcccttgcctggtatcattttctcagttctcccaaaagccatgtcccggcccttgctcatcaccttcaccccagccactgaccccagcgacctctggaaggatgggcagcagcagccacagcccgagaagccagagtccaccctggatggggctgcagccctagctttctatgaggccctgattggggatgagagcagcgctcctgactcccagagatctcagactgaacctgccagagaaagaaagagaaagaaaagaagaataatgaaggcaccagcagcagaagcagtggcagaaggagcatcaggaagacatggacaagggagatcccttgaggctgaggataagatgactcaccggatactgagggcagcccaggagggggacctgccagaacttaggagactgctggaaccgcatgaggcaggaggagctggggggaatatcaacgcccgggatgccttctggtggaccccactgatgtgtgctgctcgagcgggccagggggcagctgtgagctatctcctgggccgtggggctgcctgggtgggggtctgtgagctgagtggcagggatgcggctcagctcgctgaagaagctggcttccctgaggtagcccgcatggtcagggagagccatggagagacaaggagcccggaaaaccggtctcctactccctccctccagtactgcgagaactgtgacacccacttccaagattccaaccaccgcacatccactgctcacctgctgtcactgtcgcagggtcctcagcctcccaaccttccacttggggtgcccatctccagcccgggcttcaaactgctgctgagggggggctgggagccaggaatggggctgggaccccggggtgagggccgtgccaatcccatccccactgtcctcaagagagaccaggaaggactaggctacagatcagcaccccagccccgagtgacacatttcccagcttgggatacccgagctgtggctgggagggagagaccccctcgggtggccacactgagctggagggaggagagaaggagggaggagaaagacagggcttgggagcgggatctaaggacttacatgaacctcgagttctgactttggtaaagtctgaccctagtctgctgctgaagtctgaacttgggcctctgacctgggccctttgacttccccttcctgggatctgcccagatgcagatcctgaagtttttggtcaataggctctgtcttcgtgagagacgggctgagagtcagaaataaatcaaccatttgtggtttattcacttttctggaagctattttgaggaagccaaacagaagcctgggagccacatgcaagtcccacctgagtcagaaggggcagcctctccaggtggcatgataaggtcacctccctgccaatctgggttcactttcaggtcccagaccctcctgggagtcccccacctattctttcaacccccctggaccaagaattgcccagcttcgtgcaagtctcacttcccccaggaggagttccctgactacagccaattcactgattcacaaacataagtccatatactatgtgccaagaatacaggtaaagacattcccaaccctcaaagagttcacagctggagagggaaagtgccatgttatcaatttttttctttttttttttgagatgcagtttcgctctcattgcccaggctggagtgcaatggcatgatctcggctcaccacaacctctgccccccgagttcaagggattctcctgcctcagcctccccagtagctgggattacaggcatgccccaccacgcccagctaattttgtatttttagtagagacggggtttctccatgttggccaagctggtcttgaactcccgacctcaggtgatccgccggcctcggcttcccaaagtgctggggttgcaggcatgagccaccactcccggcccatgttatcaaatattataatgcagggtgataagggaagtcaaggcctctagagatgagaatgggtagggttttgctggaagaggccagtgtgataggagggcccacgattatcaagcttgtacacttagttgaactgggaccagaactctagcccccaaatctaaactttaagtcaaacttctttgttccaccc

SEQ ID NO: 11426 - DNA, 802 bp, Homo sapiens
  source 1..802: mol_type = unassigned DNA
cttaggctctaagtgtgaccttcgaaccctggtcagagtaatgaatggcgccattttgcggtacggaagctacacagcaacacgtataggagactctccccgagatcttctagggagtgacccatctatttttgtttgggaagaggaaactccgaaatgggatcgcggaagacttaaagggccaggctgatttttttttcctactgcaggtctctgaggctgtggttgctacagggtcaccacgagcttggcttacttgtctcatccttcccttgcctggtatcattttctcagttctcccaaaagccatgtcccggcccttgctcatcaccttcaccccagccactgaccccagcgacctctggaaggatgggcagcagcagccacagcccgagaagccagagtccaccctggatggggctgcagcccgagctttctatgaggccctgattggggatgagagcagcgctcctgactcccagagatctcagactgaacctgccagagaaagaaagagaaagaaaagaagaataatgaaggcaccagcagcagaagcagtggcagaaggagcatcaggaagacatggacaagggagatcccttgaggctgaggataagatgactcaccggatactgagggcagcccaggagggggacctgccagaacttaggagactgctggaaccgcatgaggcaggaggagctggggggaatatcaacgcccgggatgccttctggtggaccccactgatgtgtgctgctcgagcgggccagggggcagctgtgagctatctcctgggccg

SEQ ID NO: 11427 - DNA, 822 bp, Homo sapiens
  source 1..822: mol_type = unassigned DNA
cgccacctgggcgcgcggagctttgctcgtttactattgaaaaagttccagcgcgggaaactgaacccggagctttgcgcacgcccgagccctcaagtaataatggcgccattttgcggtacggaagctacacagcaacacgtataggagactctccccgagatcttctagggagtgacccatctatttttgtttgggaagaggaaactccgaaatgggatcgcggaagacttaaagggccaggctgatttttttttcctactgcaggtctctgaggctgtggttgctacagggtcaccacgagcttggcttacttgtctcatccttcccttgcctggtatcattttctcagttctcccaaaagccatgtcccggcccttgctcatcaccttcaccccagccactgaccccagcgacctctggaaggatgggcagcagcagccacagcccgagaagccagagtccaccctggatggggctgcagccctagctttctatgaggccctgattggggatgagagcagcgctcctgactcccagagatctcagactgaacctgccagagaaagaaagagaaagaaaagaagaataatgaaggcaccagcagcagaagcagtggcagaaggagcatcaggaagacatggacaagggagatcccttgaggctgaggataagatgactcaccggatactgagggcagcccaggagggggacctgccagaacttaggagactgctggaaccgcatgaggcaggaggagctggggggaatatcaacgcccgggatgccttctggtggaccccactgatgtgtgctgctcga

SEQ ID NO: 11428 - DNA, 1814 bp, Homo sapiens; identical to SEQ ID NO: 11422
  source 1..1814: mol_type = unassigned DNA

SEQ ID NO: 11429 - DNA, 822 bp, Homo sapiens
  source 1..822: mol_type = unassigned DNA
cgccacctgggcgcgcggagctttgctcgtttactattgaaaaagttccagcgcgggaaactgaacccggagctttgcgcacgcccgagccctcaagtaataatggcgccattttgcggtacggaagctacacagcaacacgtataggagactctccccgagatcttctagggagtgacccatctatttttgtttgggaagaggaaactccgaaatgggatcgcggaagacttaaagggccaggctgatttttttttcctactgcaggtctctgaggctgtggttgctacagggtcaccacgagcttggcttacttgtctcatccttcccttgcctggtatcattttctcagttctcccaaaagccatgtcccggcccttgctcatcaccttcaccccagccactgaccccagcgacctctggaaggatgggcagcagcagccacagcccgagaagccagagtccaccctggatggggctgcagcccgagctttctatgaggccctgattggggatgagagcagcgctcctgactcccagagatctcagactgaacctgccagagaaagaaagagaaagaaaagaagaataatgaaggcaccagcagcagaagcagtggcagaaggagcatcaggaagacatggacaagggagatcccttgaggctgaggataagatgactcaccggatactgagggcagcccaggagggggacctgccagaacttaggagactgctggaaccgcatgaggcaggaggagctggggggaatatcaacgcccgggatgccttctggtggaccccactgatgtgtgctgctcga

SEQ ID NO: 11430 - DNA, 802 bp, Homo sapiens
  source 1..802: mol_type = unassigned DNA
cttaggctctaagtgtgaccttcgaaccctggtcagagtaatgaatggcgccattttgcggtacggaagctacacagcaacacgtataggagactctccccgagatcttctagggagtgacccatctatttttgtttgggaagaggaaactccgaaatgggatcgcggaagacttaaagggccaggctgatttttttttcctactgcaggtctctgaggctgtggttgctacagggtcaccacgagcttggcttacttgtctcatccttcccttgcctggtatcattttctcagttctcccaaaagccatgtcccggcccttgctcatcaccttcaccccagccactgaccccagcgacctctggaaggatgggcagcagcagccacagcccgagaagccagagtccaccctggatggggctgcagccctagctttctatgaggccctgattggggatgagagcagcgctcctgactcccagagatctcagactgaacctgccagagaaagaaagagaaagaaaagaagaataatgaaggcaccagcagcagaagcagtggcagaaggagcatcaggaagacatggacaagggagatcccttgaggctgaggataagatgactcaccggatactgagggcagcccaggagggggacctgccagaacttaggagactgctggaaccgcatgaggcaggaggagctggggggaatatcaacgcccgggatgccttctggtggaccccactgatgtgtgctgctcgagcgggccagggggcagctgtgagctatctcctgggccg

SEQ ID NO: 11431 - DNA, 627 bp, Homo sapiens
  source 1..627: mol_type = unassigned DNA
cctgggcgcgcggagctttgctcgtttactattgaaaaagttccagcgcgggaaactgaacccggagctttgcgcacgcccgagccctcaagtaataatggcgccattttgcggtacggaagctacacagcaacacgtataggagactctccccgagatcttctagggagtgacccatctatttttgtttgggaagaggaaactccgaaatgggatcgcggaagacttaaagggccaggctgatttttttttcctactggtctctgaggctgtggttgctacagggtcaccacgagcttggcttacttgtctcatccttcccttgcctggtatcattttctcagttctcccaaaagccatgtcccggcccttgctcatcaccttcaccccagccactgaccccagcgacctctggaaggatgggcagcagcagccacagcccgagaagccagagtccaccctggatggggctgcagccctagctttctatgaggccctgattggggatgagagcagcgctcctgactcccagagatctcagactgaacctgccagagaaagaaagagaaagaaaagaagaataatgaaggcaccagcagcagaagcagtggcagaaggagcatcagg

SEQ ID NO: 11432 - DNA, 2793 bp, Homo sapiens; identical to SEQ ID NO: 11420
  source 1..2793: mol_type = unassigned DNA

SEQ ID NO: 11433 - DNA, 1814 bp, Homo sapiens; identical to SEQ ID NO: 11419
  source 1..1814: mol_type = unassigned DNA

SEQ ID NO: 11434 - DNA, 751 bp, Homo sapiens
  source 1..751: mol_type = unassigned DNA
gggcaatacagttttgtgctcactgggtgaagaggctgacttagggcggggaaaggagggagccaggctggatctctttccgcagctctcctcacgttcccctctagtcccggcgcggcgctgctgcccaggggactggcctatcctcggccaatccgctgggtccttattgcctgttgggcccctagtgcgaatcagtcccgccagagacccttgacgggcatactgtttcctccgggctcctgcctcatgaggggagaggaagaggaaactccgaaatgggatcgcggaagacttaaagggccaggctgatttttttttcctactgcaggtctctgaggctgtggttgctacagggtcaccacgagcttggcttacttgtctcatccttcccttgcctggtatcattttctcagttctcccaaaagccatgtcccggcccttgctcatcaccttcaccccagccactgaccccagcgacctctggaaggatgggcagcagcagccacagcccgagaagccagagtccaccctggatggggctgcagcccgagctttctatgaggccctgattggggatgagagcagcgctcctgactcccagagatctcagactgaacctgccagagaaagaaagagaaagaaaagaagaataatgaaggcaccagcagcagaagcagtggcagaaggagcatcaggaagacatggacaagggagatcccttgaggctgaggataagatgactcaccgg

SEQ ID NO: 11435 - DNA, 751 bp, Homo sapiens
  source 1..751: mol_type = unassigned DNA
gggcaatacagttttgtgctcactgggtgaagaggctgacttagggcggggaaaggagggagccaggctggatctctttccgcagctctcctcacgttcccctctagtcccggcgaggcgctgctgcccaggggactggcctatcctcggccaatccgctgggtccttattgcctgttgggcccctagtgcgaatcagtcccgccagagacccttgacgggcatactgtttcctccgggctcctgcctcatgaggggagaggaagaggaaactccgaaatgggatcgcggaagacttaaagggccaggctgatttttttttcctactgcaggtctctgaggctgtggttgctacagggtcaccacgagcttggcttacttgtctcatccttcccttgcctggtatcattttctcagttctcccaaaagccatgtcccggcccttgctcatcaccttcaccccagccactgaccccagcgacctctggaaggatgggcagcagcagccacagcccgagaagccagagtccaccctggatggggctgcagccctagctttctatgaggccctgattggggatgagagcagcgctcctgactcccagagatctcagactgaacctgccagagaaagaaagagaaagaaaagaagaataatgaaggcaccagcagcagaagcagtggcagaaggagcatcaggaagacatggacaagggagatcccttgaggctgaggataagatgactcaccgg

SEQ ID NO: 11436 - DNA, 1910 bp, Homo sapiens; identical to SEQ ID NO: 11418
  source 1..1910: mol_type = unassigned DNA

SEQ ID NO: 11437 - DNA, 1598 bp, Homo sapiens
  source 1..1598: mol_type = unassigned DNA
cagagacccttgacgggcatactgtttcctccgggctcctgcctcatgaggggagaggtgcggcttggctccaatggcgccattttgcggtacggaagctacacagcaacacgtataggagactctccccgagatcttctagggagtgacccatctatttttgtttgggaagaggaaactccgaaatgggatcgcggaagacttaaagggccaggctgatttttttttcctactgcaggtctctgaggctgtggttgctacagggtcaccacgagcttggcttacttgtctcatccttcccttgcctggtatcattttctcagttctcccaaaagccatgtcccggcccttgctcatcaccttcaccccagccactgaccccagcgacctctggaaggatgggcagcagcagccacagcccgagaagccagagtccaccctggatggggctgcagcccgagctttctatgaggccctgattggggatgagagcagcgctcctgactcccagagatctcagactgaacctgccagagaaagaaagagaaagaaaagaagaataatgaaggcaccagcagcagaagcagtggcagaaggagcatcaggaagacatggacaagggagatcccttgaggctgaggataagatgactcaccggatactgagggcagcccaggagggggacctgccagaacttaggagactgctggaaccgcatgaggcaggaggagctggggggaatatcaacgcccgggatgccttctggtggaccccactgatgtgtgctgctcgagcgggccagggggcagctgtgagctatctcctgggccgtggggctgcctgggtgggggtctgtgagctgagtggcagggatgcggctcagctcgctgaagaagctggcttccctgaggtagcccgcatggtcagggagagccatggagagacaaggagcccggaaaaccggtctcctactccctccctccagtactgcgagaactgtgacacccacttccaagattccaaccaccgcacatccactgctcacctgctgtcactgtcgcagggtcctcagcctcccaaccttccacttggggtgcccatctccagcccgggcttcaaactgctgctgaggcggggctgggagccaggaatggggctgggaccccggggtgagggccgtgccaatcccatccccactgtcctcaagagggaccaggaaggactaggctacagatcagcaccccagccccgagtgacacatttcccagcttgggatacccgagctgtggctgggagggagagaccccctcgggtggccacactgagctggagggaggagagaaggagggaggagaaagacagggcttgggagcgggatctaaggacttacatgaacctcgagttctgactttggtaaagtctgaccctagtctgctgctgaagtctgaacttgggcctctgacctgggccctttgacttccccttcctgggatctgctcagatgcagatcctgaagtttttggtcaataggctctgtcttcgtgagagacgggctgagagtcagaaataaatcaaccatttgtggtttattcactttt

SEQ ID NO: 11438 - DNA, 2794 bp, Homo sapiens
  source 1..2794: mol_type = unassigned DNA
cacatcaaagtccggagaccccatgtgccgctcccagcgacaagggactcggagcagcgacgacttcagactcaccggctggacggggaccaggactggggtggggtagggaagttgctacttccagggaacggcggcgaccgctacagcgcaggccgcggacccgaccgcggcaggcgaagtggggtggggggagtggaaattagggagggtggggaagagggcaaacacgcaagcgccaagggtcaggtgccgcggtggatgccgggacacggagtccccggtagagaaagaaactggctaaatgagagaaagcgaactaccaatcccaggatgacccgcgcacgacctggctgtcacgaaggcccggaggagggcgcttgcgggcggggcacaacgagaagccaccggaagcggaagccagaatggcgccattttgcggtacggaagctacacagcaacacgtataggagactctccccgagatcttctagggagtgacccatctatttttgtttgggaagaggaaactccgaaatgggatcgcggaagacttaaagggccaggctgatttttttttcctactggtctctgaggctgtggttgctacagggtcaccacgagcttggcttacttgtctcatccttcccttgcctggtatcattttctcagttctcccaaaagccatgtcccggcccttgctcatcaccttcaccccagccactgaccccagcgacctctggaaggatgggcagcagcagccacagcccgagaagccagagtccaccctggatggggctgcagcccgagctttctatgaggccctgattggggatgagagcagcgctcctgactcccagagatctcagactgaacctgccagagaaagaaagagaaagaaaagaagaataatgaaggcaccagcagcagaagcagtggcagaaggagcatcaggaagacatggacaagggagatcccttgaggctgaggataagatgactcaccggatactgagggcagcccaggagggggacctgccagaacttaggagactgctggaaccgcatgaggcaggaggagctggggggaatatcaacgcccgggatgccttctggtggaccccactgatgtgtgctgctcgagcgggccagggggcagctgtgagctatctcctgggccgtggggctgcctgggtgggggtctgtgagctgagtggcagggatgcggctcagctcgctgaagaagctggcttccctgaggtagcccgcatggtcagggagagccatggagagacaaggagcccggaaaaccggtctcctactccctccctccagtactgcgagaactgtgacacccacttccaagattccaaccaccgcacatccactgctcacctgctgtcactgtcgcagggtcctcagcctcccaaccttccacttggggtgcccatctccagcccgggcttcaaactgctgctgaggcggggctgggagccaggaatggggctgggaccccggggtgagggccgtgccaatcccatccccactgtcctcaagagggaccaggaaggactaggctacagatcagcaccccagccccgagtgacacatttcccagcttgggatacccgagctgtggctgggagggagagaccccctcgggtggccacactgagctggagggaggagagaaggagggaggagaaagacagggcttgggagcgggatctaaggacttacatgaacctcgagttctgactttggtaaagtctgaccctagtctgctgctgaagtctgaacttgggcctctgacctgggccctttgacttccccttcctgggatctgctcagatgcagatcctgaagtttttggtcaataggctctgtcttcgtgagagacgggctgagagtcagaaataaatcaaccatttgtggtttattcacttttctggaagctattttgaggaagccaaacagaagcctgggagccacatgcaagtcccacctgagtcagaaggggcagcctctccaggtggcatgataaggtcacctccctgccaatctgggttcactttcaggtcccagaccctcctgggagtcccccacctattctttcaacccccctggaccaagaattgcccagcttcgtgcaagtctcacttcccccaggaggagttccctgactacagccaattcactgatttcacaaacataagtccatatactatgtgccaagaatacaggtaaagacattcccaaccctcaaagagttcacagctggagagggaaagtgccatgttatcaatttttttcttttttttttgagatgcagtttcgctctcattgcccaggctggagtgcaatggcatgatctcggctcaccacaacctctgccccccgagttcaagggattctcctgcctcagcctccccagtagctgggattacaggcatgccccaccacgcccagctaattttgtatttttagtagagacggggtttctccatgttggccaagctggtcttgaactcccgacctcaggtgatccgccggcctcggcttcccaaagtgctggggttgcaggcatgagccaccactcccggcccatgttatcaaatattataatgcagggtgataagggaagtcaaggcctctagagatgagaatgggtagggttttgctggaagaggccagtgtgataggaaggcccacgattatcaagcttgtacacttagttgaactgggaccagaactctagcccccaaatctaaactttaaacttctttgttccaccc

SEQ ID NO: 11439 - DNA, 802 bp, Homo sapiens; identical to SEQ ID NO: 11426
  source 1..802: mol_type = unassigned DNA

SEQ ID NO: 11440 - DNA, 1814 bp, Homo sapiens; identical to SEQ ID NO: 11419
  source 1..1814: mol_type = unassigned DNA

SEQ ID NO: 11441 - DNA, 986 bp, Homo sapiens
  source 1..986: mol_type = unassigned DNA
gacttagggcggggaaaggagggagccaggctggatctctttccgcagctctcctcacgttcccctctagtcccggcgcggcgctgctgcccaggggactggcctatcctcggccaatccgctgggtccttattgcctgttgggcccctagtgcgaatcagtcccgccagagacccttgacgggcatactgtttcctccgggctcctgcctcatgaggggagaggaagaggaaactccgaaatgggatcgcggaagacttaaagggccaggctgatttttttttcctactggtctctgaggctgtggttgctacagggtcaccacgagcttggcttacttgtctcatccttcccttgcctggtatcattttctcagttctcccaaaagccatgtcccggcccttgctcatcaccttcaccccagccactgaccccagcgacctctggaaggatgggcagcagcagccacagcccgagaagccagagtccaccctggatggggctgcagcccgagctttctatgaggccctgattggggatgagagcagcgctcctgactcccagagatctcagactgaacctgccagagaaagaaagagaaagaaaagaagaataatgaaggcaccagcagcagaagcagtggcagaaggagcatcaggaagacatggacaagggagatcccttgaggctgaggataagatgactcaccggatactgagggcagcccaggagggggacctgccagaacttaggagactgctggaaccgcatgaggcaggaggagctggggggaatatcaacgcccgggatgccttctggtggaccccactgatgtgtgctgctcgagcgggccagggggcagctgtgagctatctcctgggccgtggggctgcctgggtgggggtctgtgagctgagtggcagggatgcggctcagctcgctgaagaagctggcttccctgaggtagcccgcatggtcagggagag

SEQ ID NO: 11442 - DNA, 1800 bp, Homo sapiens
  source 1..1800: mol_type = unassigned DNA
cggggcccgggagtctgggcaatacagttttgtgctcactgggtgaagaggctgacttagggcggggaaaggagggagccaggctggatctctttccgcagctctcctcacgttcccctctagtcccggcgcggcgctgctgcccgggggactggcctatcctcggccaatccgctgggtccttattgcctgttgggcccctagtgcgaatcagtcccgccagagacccttgacgggcatactgtttcctccgggctcctgcctcatgaggggagagaatggcgccattttgcggtacggaagctacacagcaacacgtataggagactctccccgagatcttctagggagtgacccatctatttttgtttgggaagaggaaactccgaaatgggatcgcggaagacttaaagggccaggctgatttttttttcctactggtctctgaggctgtggttgctacagggtcaccacgagcttggcttacttgtctcatccttcccttgcctggtatcattttctcagttctcccaaaagccatgtcccggcccttgctcatcaccttcaccccagccactgaccccagcgacctctggaaggatgggcagcagcagccacagcccgagaagccagagtccaccctggatggggctgcagcccgagctttctatgaggccctgattggggatgagagcagcgctcctgactcccagagatctcagactgaacctgccagagaaagaaagagaaagaaaagaagaataatgaaggcaccagcagcagaagcagtggcagaaggagcatcaggaagacatggacaagggagatcccttgaggctgaggataagatgactcaccggatactgagggcagcccaggagggggacctgccagaacttaggagactgctggaaccgcatgaggcaggaggagctggggggaatatcaacgcccgggatgccttctggtggaccccactgatgtgtgctgctcgagcgggccagggggcagctgtgagctatctcctgggccgtggggctgcctgggtgggggtctgtgagctgagtggcagggatgcggctcagctcgctgaagaagctggcttccctgaggtagcccgcatggtcagggagagccatggagagacaaggagcccggaaaaccggtctcctactccctccctccagtactgcgagaactgtgacacccacttccaagattccaaccaccgcacatccactgctcacctgctgtcactgtcgcagggtcctcagcctcccaaccttccacttggggtgcccatctccagcccgggcttcaaactgctgctgaggcggggctgggagccaggaatggggctgggaccccggggtgagggccgtgccaatcccatccccactgtcctcaagagggaccaggaaggactaggctacagatcagcaccccagccccgagtgacacatttcccagcttgggatacccgagctgtggctgggagggagagaccccctcgggtggccacactgagctggagggaggagagaaggagggaggagaaagacagggcttgggagcgggatctaaggacttacatgaacctcgagttctgactttggtaaagtctgaccctagtctgctgctgaagtctgaacttgggcctctgacctgggccctttgacttccccttcctgggatctgctcagatgcagatcctgaagtttttggtcaataggctctgtcttcgtgagagacgggctgagagtcagaaataaatcaaccatttgtggtttattcactttt

SEQ ID NO: 11443 - DNA, 802 bp, Homo sapiens; identical to SEQ ID NO: 11430
  source 1..802: mol_type = unassigned DNA

SEQ ID NO: 11444 - DNA, 822 bp, Homo sapiens; identical to SEQ ID NO: 11427
  source 1..822: mol_type = unassigned DNA

SEQ ID NO: 11445 - DNA, 822 bp, Homo sapiens; identical to SEQ ID NO: 11427
  source 1..822: mol_type = unassigned DNA

SEQ ID NO: 11446 - DNA, 986 bp, Homo sapiens
  source 1..986: mol_type = unassigned DNA
gacttagggcggggaaaggagggagccaggctggatctctttccgcagctctcctcacgttcccctctagtcccggcgaggcgctgctgcccaggggactggcctatcctcggccaatccgctgggtccttattgcctgttgggcccctagtgcgaatcagtcccgccagagacccttgacgggcatactgtttcctccgggctcctgcctcatgaggggagaggaagaggaaactccgaaatgggatcgcggaagacttaaagggccaggctgatttttttttcctactggtctctgaggctgtggttgctacagggtcaccacgagcttggcttacttgtctcatccttcccttgcctggtatcattttctcagttctcccaaaagccatgtcccggcccttgctcatcaccttcaccccagccactgaccccagcgacctctggaaggatgggcagcagcagccacagcccgagaagccagagtccaccctggatggggctgcagccctagctttctatgaggccctgattggggatgagagcagcgctcctgactcccagagatctcagactgaacctgccagagaaagaaagagaaagaaaagaagaataatgaaggcaccagcagcagaagcagtggcagaaggagcatcaggaagacatggacaagggagatcccttgaggctgaggataagatgactcaccggatactgagggcagcccaggagggggacctgccagaacttaggagactgctggaaccgcatgaggcaggaggagctggggggaatatcaacgcccgggatgccttctggtggaccccactgatgtgtgctgctcgagcgggccagggggcagctgtgagctatctcctgggccgtggggctgcctgggtgggggtctgtgagctgagtggcagggatgcggctcagctcgctgaagaagctggcttccctgaggtagcccgcatggtcagggagag

SEQ ID NO: 11447 - DNA, 986 bp, Homo sapiens; identical to SEQ ID NO: 11446
  source 1..986: mol_type = unassigned DNA

SEQ ID NO: 11448 - DNA, 1814 bp, Homo sapiens
  source 1..1814: mol_type = unassigned DNA
ggtatggcgttcggggcccgggagtctgggcaatacagttttgtgctcactgggtgaagaggctgacttagggcggggaaaggagggagccaggctggatctctttccgcagctctcctcacgttcccctctagtcccggcgcggcgctgctgcccgggggactggcctatcctcggccaatccgctgggtccttattgcctgttgggcccctagtgcgaatcagtcccgccagagacccttgacgggcatactgtttcctccgggctcctgcctcatgaggggagagaatggcgccattttgcggtacggaagctacacagcaacacgtataggagactctccccgagatcttctagggagtgacccatctatttttgtttgggaagaggaaactccgaaatgggatcgcggaagacttaaagggccaggctgatttttttttcctactgcaggtctctgaggctgtggttgctacagggtcaccacgagcttggcttacttgtctcatccttcccttgcctggtatcattttctcagttctcccaaaagccatgtcccggcccttgctcatcaccttcaccccagccactgaccccagcgacctctggaaggatgggcagcagcagccacagcccgagaagccagagtccaccctggatggggctgcagcccgagctttctatgaggccctgattggggatgagagcagcgctcctgactcccagagatctcagactgaacctgccagagaaagaaagagaaagaaaagaagaataatgaaggcaccagcagcagaagcagtggcagaaggagcatcaggaagacatggacaagggagatcccttgaggctgaggataagatgactcaccggatactgagggcagcccaggagggggacctgccagaacttaggagactgctggaaccgcatgaggcaggaggagctggggggaatatcaacgcccgggatgccttctggtggaccccactgatgtgtgctgctcgagcgggccagggggcagctgtgagctatctcctgggccgtggggctgcctgggtgggggtctgtgagctgagtggcagggatgcggctcagctcgctgaagaagctggcttccctgaggtagcccgcatggtcagggagagccatggagagacaaggagcccggaaaaccggtctcctactccctccctccagtactgcgagaactgtgacacccacttccaagattccaaccaccgcacatccactgctcacctgctgtcactgtcgcagggtcctcagcctcccaaccttccacttggggtgcccatctccagcccgggcttcaaactgctgctgaggcggggctgggagccaggaatggggctgggaccccggggtgagggccgtgccaatcccatccccactgtcctcaagagggaccaggaaggactaggctacagatcagcaccccagccccgagtgacacatttcccagcttgggatacccgagctgtggctgggagggagagaccccctcgggtggccacactgagctggagggaggagagaaggagggaggagaaagacagggcttgggagcgggatctaaggacttacatgaacctcgagttctgactttggtaaagtctgaccctagtctgctgctgaagtctgaacttgggcctctgacctgggccctttgacttccccttcctgggatctgctcagatgcagatcctgaagtttttggtcaataggctctgtcttcgtgagagacgggctgagagtcagaaataaatcaaccatttgtggtttattcactttt

SEQ ID NO: 11449 - DNA, 1910 bp, Homo sapiens; identical to SEQ ID NO: 11423
  source 1..1910: mol_type = unassigned DNA

SEQ ID NO: 11450 - DNA, 986 bp, Homo sapiens; identical to SEQ ID NO: 11446
  source 1..986: mol_type = unassigned DNA

SEQ ID NO: 11451 - DNA, 1598 bp, Homo sapiens
  source 1..1598: mol_type = unassigned DNA
cagagacccttgacgggcatactgtttcctccgggctcctgcctcatgaggggagaggtgcggcttggctccaatggcgccattttgcggtacggaagctacacagcaacacgtataggagactctccccgagatcttctagggagtgacccatctatttttgtttgggaagaggaaactccgaaatgggatcgcggaagacttaaagggccaggctgatttttttttcctactgcaggtctctgaggctgtggttgctacagggtcaccacgagcttggcttacttgtctcatccttcccttgcctggtatcattttctcagttctcccaaaagccatgtcccggcccttgctcatcaccttcaccccagccactgaccccagcgacctctggaaggatgggcagcagcagccacagcccgagaagccagagtccaccctggatggggctgcagccctagctttctatgaggccctgattggggatgagagcagcgctcctgactcccagagatctcagactgaacctgccagagaaagaaagagaaagaaaagaagaataatgaaggcaccagcagcagaagcagtggcagaaggagcatcaggaagacatggacaagggagatcccttgaggctgaggataagatgactcaccggatactgagggcagcccaggagggggacctgccagaacttaggagactgctggaaccgcatgaggcaggaggagctggggggaatatcaacgcccgggatgccttctggtggaccccactgatgtgtgctgctcgagcgggccagggggcagctgtgagctatctcctgggccgtggggctgcctgggtgggggtctgtgagctgagtggcagggatgcggctcagctcgctgaagaagctggcttccctgaggtagcccgcatggtcagggagagccatggagagacaaggagcccggaaaaccggtctcctactccctccctccagtactgcgagaactgtgacacccacttccaagattccaaccaccgcacatccactgctcacctgctgtcactgtcgcagggtcctcagcctcccaaccttccacttggggtgcccatctccagcccgggcttcaaactgctgctgagggggggctgggagccaggaatggggctgggaccccggggtgagggccgtgccaatcccatccccactgtcctcaagagggaccaggaaggactaggctacagatcagcaccccagccccgagtgacacatttcccagcttgggatacccgagctgtggctgggagggagagaccccctcgggtggccacactgagctggagggaggagagaaggagggaggagaaagacagggcttgggagcgggatctaaggacttacatgaacctcgagttctgactttggtaaagtctgaccctagtctgctgctgaagtctgaacttgggcctctgacctgggccctttgacttccccttcctgggatctgctcagatgcagatcctgaagtttttggtcaataggctctgtcttcgtgagagacgggctgagagtcagaaataaatcaaccatttgtggtttattcactttt

SEQ ID NO: 11452 - DNA, 986 bp, Homo sapiens; identical to SEQ ID NO: 11441
  source 1..986: mol_type = unassigned DNA

SEQ ID NO: 11453 - DNA, 1598 bp, Homo sapiens; identical to SEQ ID NO: 11416
  source 1..1598: mol_type = unassigned DNA

SEQ ID NO: 11454 - DNA, 751 bp, Homo sapiens; identical to SEQ ID NO: 11434
  source 1..751: mol_type = unassigned DNA

SEQ ID NO: 11455 - DNA, 1910 bp, Homo sapiens
  source 1..1910: mol_type = unassigned DNA
aggcgtgacgttatttcattacacggcttctcggcattccacaggtttccctccgcctcctgagggcctttcctaacccacagagtggattcctggctccagaaaatgggcttggagcgggggccacgttgaggaaggcgaagggcattgtgggggcgttatgtaaaagtaggaccccaaccgacagatcctagtgctcgcgccacctgggcgcgcggagctttgctcgtttactattgaaaaagttccagcgcgggaaactgaacccggagctttgcgcacgcccgagccctcaagtaatgtgggttgtggtttttgttgttgttgtcgccacgcatgcgtcttcgtgccgtgtggctatttgattgtgtcaactcttctgattagaatggcgccattttgcggtacggaagctacacagcaacacgtataggagactctccccgagatcttctagggagtgacccatctatttttgtttgggaagaggaaactccgaaatgggatcgcggaagacttaaagggccaggctgatttttttttcctactggtctctgaggctgtggttgctacagggtcaccacgagcttggcttacttgtctcatccttcccttgcctggtatcattttctcagttctcccaaaagccatgtcccggcccttgctcatcaccttcaccccagccactgaccccagcgacctctggaaggatgggcagcagcagccacagcccgagaagccagagtccaccctggatggggctgcagcccgagctttctatgaggccctgattggggatgagagcagcgctcctgactcccagagatctcagactgaacctgccagagaaagaaagagaaagaaaagaagaataatgaaggcaccagcagcagaagcagtggcagaaggagcatcaggaagacatggacaagggagatcccttgaggctgaggataagatgactcaccggatactgagggcagcccaggagggggacctgccagaacttaggagactgctggaaccgcatgaggcaggaggagctggggggaatatcaacgcccgggatgccttctggtggaccccactgatgtgtgctgctcgagcgggccagggggcagctgtgagctatctcctgggccgtggggctgcctgggtgggggtctgtgagctgagtggcagggatgcggctcagctcgctgaagaagctggcttccctgaggtagcccgcatggtcagggagagccatggagagacaaggagcccggaaaaccggtctcctactccctccctccagtactgcgagaactgtgacacccacttccaagattccaaccaccgcacatccactgctcacctgctgtcactgtcgcagggtcctcagcctcccaaccttccacttggggtgcccatctccagcccgggcttcaaactgctgctgaggcggggctgggagccaggaatggggctgggaccccggggtgagggccgtgccaatcccatccccactgtcctcaagagggaccaggaaggactaggctacagatcagcaccccagccccgagtgacacatttcccagcttgggatacccgagctgtggctgggagggagagaccccctcgggtggccacactgagctggagggaggagagaaggagggaggagaaagacagggcttgggagcgggatctaaggacttacatgaacctcgagttctgactttggtaaagtctgaccctagtctgctgctgaagtctgaacttgggcctctgacctgggccctttgacttccccttcctgggatctgctcagatgcagatcctgaagtttttggtcaataggctctgtcttcgtgagagacgggctgagagtcagaaataaatcaaccatttgtggtttattcactttt

SEQ ID NO: 11456 - DNA, 751 bp, Homo sapiens; identical to SEQ ID NO: 11434
  source 1..751: mol_type = unassigned DNA

SEQ ID NO: 11457 - DNA, 822 bp, Homo sapiens; identical to SEQ ID NO: 11429
  source 1..822: mol_type = unassigned DNA

SEQ ID NO: 11458 - DNA, 1814 bp, Homo sapiens
  source 1..1814: mol_type = unassigned DNA
ggtatggcgttcggggcccgggagtctgggcaatacagttttgtgctcactgggtgaagaggctgacttagggcggggaaaggagggagccaggctggatctctttccgcagctctcctcacgttcccctctagtcccggcgaggcgctgctgcccaggggactggcctatcctcggccaatccgctgggtccttattgcctgttgggcccctagtgcgaatcagtcccgccagagacccttgacgggcatactgtttcctccgggctcctgcctcatgaggggagagaatggcgccattttgcggtacggaagctacacagcaacacgtataggagactctccccgagatcttctagggagtgacccatctatttttgtttgggaagaggaaactccgaaatgggatcgcggaagacttaaagggccaggctgatttttttttcctactgcaggtctctgaggctgtggttgctacagggtcaccacgagcttggcttacttgtctcatccttcccttgcctggtatcattttctcagttctcccaaaagccatgtcccggcccttgctcatcaccttcaccccagccactgaccccagcgacctctggaaggatgggcagcagcagccacagcccgagaagccagagtccaccctggatggggctgcagccctagctttctatgaggccctgattggggatgagagcagcgctcctgactcccagagatctcagactgaacctgccagagaaagaaagagaaagaaaagaagaataatgaaggcaccagcagcagaagcagtggcagaaggagcatcaggaagacatggacaagggagatcccttgaggctgaggataagatgactcaccggatactgagggcagcccaggagggggacctgccagaacttaggagactgctggaaccgcatgaggcaggaggagctggggggaatatcaacgcccgggatgccttctggtggaccccactgatgtgtgctgctcgagcgggccagggggcagctgtgagctatctcctgggccgtggggctgcctgggtgggggtctgtgagctgagtggcagggatgcggctcagctcgctgaagaagctggcttccctgaggtagcccgcatggtcagggagagccatggagagacaaggagcccggaaaaccggtctcctactccctccctccagtactgcgagaactgtgacacccacttccaagattccaaccaccgcacatccactgctcacctgctgtcactgtcgcagggtcctcagcctcccaaccttccacttggggtgcccatctccagcccgggcttcaaactgctgctgagggggggctgggagccaggaatggggctgggaccccggggtgagggccgtgccaatcccatccccactgtcctcaagagggaccaggaaggactaggctacagatcagcaccccagccccgagtgacacatttcccagcttgggatacccgagctgtggctgggagggagagaccccctcgggtggccacactgagctggagggaggagagaaggagggaggagaaagacagggcttgggagcgggatctaaggacttacatgaacctcgagttctgactttggtaaagtctgaccctagtctgctgctgaagtctgaacttgggcctctgacctgggccctttgacttccccttcctgggatctgctcagatgcagatcctgaagtttttggtcaataggctctgtcttcgtgagagacgggctgagagtcagaaataaatcaaccatttgtggtttattcactttt

SEQ ID NO: 11459 - DNA, 2798 bp, Homo sapiens; identical to SEQ ID NO: 11425
  source 1..2798: mol_type = unassigned DNA

SEQ ID NO: 11460 - DNA, 802 bp, Homo sapiens; identical to SEQ ID NO: 11426
  source 1..802: mol_type = unassigned DNA

SEQ ID NO: 11461 - DNA, 627 bp, Homo sapiens; identical to SEQ ID NO: 11431
  source 1..627: mol_type = unassigned DNA

SEQ ID NO: 11462 - DNA, 1800 bp, Homo sapiens; identical to SEQ ID NO: 11417
  source 1..1800: mol_type = unassigned DNA

SEQ ID NO: 11463 - DNA, 627 bp, Homo sapiens; identical to SEQ ID NO: 11431
  source 1..627: mol_type = unassigned DNA

SEQ ID NO: 11464 - DNA, 1800 bp, Homo sapiens; identical to SEQ ID NO: 11417
  source 1..1800: mol_type = unassigned DNA

SEQ ID NO: 11465 - DNA, 986 bp, Homo sapiens; identical to SEQ ID NO: 11441
  source 1..986: mol_type = unassigned DNA

SEQ ID NO: 11466 - DNA, 751 bp, Homo sapiens; identical to SEQ ID NO: 11435
  source 1..751: mol_type = unassigned DNA

SEQ ID NO: 11467 - DNA, 751 bp, Homo sapiens; identical to SEQ ID NO: 11435
  source 1..751: mol_type = unassigned DNA

SEQ ID NO: 11468 - DNA, 627 bp, Homo sapiens
  source 1..627: mol_type = unassigned DNA
cctgggcgcgcggagctttgctcgtttactattgaaaaagttccagcgcgggaaactgaacccggagctttgcgcacgcccgagccctcaagtaataatggcgccattttgcggtacggaagctacacagcaacacgtataggagactctccccgagatcttctagggagtgacccatctatttttgtttgggaagaggaaactccgaaatgggatcgcggaagacttaaagggccaggctgatttttttttcctactggtctctgaggctgtggttgctacagggtcaccacgagcttggcttacttgtctcatccttcccttgcctggtatcattttctcagttctcccaaaagccatgtcccggcccttgctcatcaccttcaccccagccactgaccccagcgacctctggaaggatgggcagcagcagccacagcccgagaagccagagtccaccctggatggggctgcagcccgagctttctatgaggccctgattggggatgagagcagcgctcctgactcccagagatctcagactgaacctgccagagaaagaaagagaaagaaaagaagaataatgaaggcaccagcagcagaagcagtggcagaaggagcatcagg

SEQ ID NO: 11469 - DNA, 627 bp, Homo sapiens; identical to SEQ ID NO: 11468
  source 1..627: mol_type = unassigned DNA

SEQ ID NO: 11470 - DNA, 822 bp, Homo sapiens; identical to SEQ ID NO: 11429
  source 1..822: mol_type = unassigned DNA

SEQ ID NO: 11471 - DNA, 986 bp, Homo sapiens
  source 1..986: mol_type = unassigned DNA
gacttagggcggggaaaggagggagccaggctggatctctttccgcagctctcctcacgttcccctctagtcccggcgcggcgctgctgcccgggggactggcctatcctcggccaatccgctgggtccttattgcctgttgggcccctagtgcgaatcagtcccgccagagacccttgacgggcatactgtttcctccgggctcctgcctcatgaggggagaggaagaggaaactccgaaatgggatcgcggaagacttaaagggccaggctgatttttttttcctactggtctctgaggctgtggttgctacagggtcaccacgagcttggcttacttgtctcatccttcccttgcctggtatcattttctcagttctcccaaaagccatgtcccggcccttgctcatcaccttcaccccagccactgaccccagcgacctctggaaggatgggcagcagcagccacagcccgagaagccagagtccaccctggatggggctgcagcccgagctttctatgaggccctgattggggatgagagcagcgctcctgactcccagagatctcagactgaacctgccagagaaagaaagagaaagaaaagaagaataatgaaggcaccagcagcagaagcagtggcagaaggagcatcaggaagacatggacaagggagatcccttgaggctgaggataagatgactcaccggatactgagggcagcccaggagggggacctgccagaacttaggagactgctggaaccgcatgaggcaggaggagctggggggaatatcaacgcccgggatgccttctggtggaccccactgatgtgtgctgctcgagcgggccagggggcagctgtgagctatctcctgggccgtggggctgcctgggtgggggtctgtgagctgagtggcagggatgcggctcagctcgctgaagaagctggcttccctgaggtagcccgcatggtcagggagag

SEQ ID NO: 11472 - DNA, 1910 bp, Homo sapiens
  source 1..1910: mol_type = unassigned DNA
aggcgtgacgttatttcattacacggcttctcggcattccacaggtttccctccgcctcctgagggcctttcctaacccacagagtggattcctggctccagaaaatgggcttggagcgggggccacgttgaggaaggcgaagggcattgtgggggcgttatgtaaaagtaggaccccaaccgacagatcctagtgctcgcgccacctgggcgcgcggagctttgctcgtttactattgaaaaagttccagcgcgggaaactgaacccggagctttgcgcacgcccgagccctcaagtaatgtgggttgtggtttttgttgttgttgtcgccacgcatgcgtcttcgtgccgtgtggctatttgattgtgtcaactcttctgattagaatggcgccattttgcggtacggaagctacacagcaacacgtataggagactctccccgagatcttctagggagtgacccatctatttttgtttgggaagaggaaactccgaaatgggatcgcggaagacttaaagggccaggctgatttttttttcctactggtctctgaggctgtggttgctacagggtcaccacgagcttggcttacttgtctcatccttcccttgcctggtatcattttctcagttctcccaaaagccatgtcccggcccttgctcatcaccttcaccccagccactgaccccagcgacctctggaaggatgggcagcagcagccacagcccgagaagccagagtccaccctggatggggctgcagccctagctttctatgaggccctgattggggatgagagcagcgctcctgactcccagagatctcagactgaacctgccagagaaagaaagagaaagaaaagaagaataatgaaggcaccagcagcagaagcagtggcagaaggagcatcaggaagacatggacaagggagatcccttgaggctgaggataagatgactcaccggatactgagggcagcccaggagggggacctgccagaacttaggagactgctggaaccgcatgaggcaggaggagctggggggaatatcaacgcccgggatgccttctggtggaccccactgatgtgtgctgctcgagcgggccagggggcagctgtgagctatctcctgggccgtggggctgcctgggtgggggtctgtgagctgagtggcagggatgcggctcagctcgctgaagaagctggcttccctgaggtagcccgcatggtcagggagagccatggagagacaaggagcccggaaaaccggtctcctactccctccctccagtactgcgagaactgtgacacccacttccaagattccaaccaccgcacatccactgctcacctgctgtcactgtcgcagggtcctcagcctcccaaccttccacttggggtgcccatctccagcccgggcttcaaactgctgctgagggggggctgggagccaggaatggggctgggaccccggggtgagggccgtgccaatcccatccccactgtcctcaagagggaccaggaaggactaggctacagatcagcaccccagccccgagtgacacatttcccagcttgggatacccgagctgtggctgggagggagagaccccctcgggtggccacactgagctggagggaggagagaaggagggaggagaaagacagggcttgggagcgggatctaaggacttacatgaacctcgagttctgactttggtaaagtctgaccctagtctgctgctgaagtctgaacttgggcctctgacctgggccctttgacttccccttcctgggatctgctcagatgcagatcctgaagtttttggtcaataggctctgtcttcgtgagagacgggctgagagtcagaaataaatcaaccatttgtggtttattcactttt

SEQ ID NO: 11473 - DNA, 2793 bp, Homo sapiens
  source 1..2793: mol_type = unassigned DNA
cacatcaaagtccggagaccccatgtgccgctcccagcgacaagggactcggagcagcgacgacttcagactcaccggctggacggggaccaggactggggtggggtagggaagttgctacttccagggaacggcggcgaccgctacagcgcaggccgcggacccgaccgcggcaggcgaagtggggtggggggagtggaaattagggagggtggggaagagggcaacacgcaagcgccaagggtcaggtgccgcggtggatgccgggacacggagtccccggtagagaaagaaactggctaaatgagagaaagcgaactaccaatcccaggatgacccgcgcacgacctggctgtcacgaaggcccggaggagggcgcttgcgggcggggcacaacgagaagccaccggaagcggaagccagaatggcgccattttgcggtacggaagctacacagcaacacgtataggagactctccccgagatcttctagggagtgacccatctatttttgtttgggaagaggaaactccgaaatgggatcgcggaagacttaaagggccaggctgatttttttttcctactggtctctgaggctgtggttgctacagggtcaccacgagcttggcttacttgtctcatccttcccttgcctggtatcattttctcagttctcccaaaagccatgtcccggcccttgctcatcaccttcaccccagccactgaccccagcgacctctggaaggatgggcagcagcagccacagcccgagaagccagagtccaccctggatggggctgcagcccgagctttctatgaggccctgattggggatgagagcagcgctcctgactcccagagatctcagactgaacctgccagagaaagaaagagaaagaaaagaagaataatgaaggcaccagcagcagaagcagtggcagaaggagcatcaggaagacatggacaagggagatcccttgaggctgaggataagatgactcaccggatactgagggcagcccaggagggggacctgccagaacttaggagactgctggaaccgcatgaggcaggaggagctggggggaatatcaacgcccgggatgccttctggtggaccccactgatgtgtgctgctcgagcgggccagggggcagctgtgagctatctcctgggccgtggggctgcctgggtgggggtctgtgagctgagtggcagggatgcggctcagctcgctgaagaagctggcttccctgaggtagcccgcatggtcagggagagccatggagagacaaggagcccggaaaaccggtctcctactccctccctccagtactgcgagaactgtgacacccacttccaagattccaaccaccgcacatccactgctcacctgctgtcactgtcgcagggtcctcagcctcccaaccttccacttggggtgcccatctccagcccgggcttcaaactgctgctgagggggggctgggagccaggaatggggctgggaccccggggtgagggccgtgccaatcccatccccactgtcctcaagagggaccaggaaggactaggctacagatcagcaccccagccccgagtgacacatttcccagcttgggatacccgagctgtggctgggagggagagaccccctcgggtggccacactgagctggagggaggagagaaggagggaggagaaagacagggcttgggagcgggatctaaggacttacatgaacctcgagttctgactttggtaaagtctgaccctagtctgctgctgaagtctgaacttgggcctctgacctgggccctttgacttccccttcctgggatctgctcagatgcagatcctgaagtttttggtcaataggctctgtcttcgtgagagacgggctgagagtcagaaataaatcaaccatttgtggtttattcacttttctggaagctattttgaggaagccaaacagaagcctgggagccacatgcaagtcccacctgagtcagaaggggcagcctctccaggtggcatgataaggtcacctccctgccaatctgggttcactttcaggtcccagaccctcctgggagtcccccacctattctttcaacccccctggaccaagaattgcccagcttcgtgcaagtctcacttcccccaggaggagttccctgactacagccaattcactgatttcacaaacataagtccatatactatgtgccaagaatacaggtaaagacattcccaaccctcaaagagttcacagctggagagggaaagtgccatgttaccaatttttttcttttttttttgagatgcagtttcgctctcattgcccaggctggagtgcaatggcatgatctcggctcaccacaacctctgccccccgagttcaagggattctcctgcctcagcctccccagtagctgggattacaggcatgccccaccacgcccagctaattttgtatttttagtagagacggggtttctccatgttggccaagctggtcttgaactcccgacctcaggtgatccgccggcctcggcttcccaaagtgctggggttgcaggcatgagccaccactcccggcccatgttatcaaatattataatgcagggtgataagggaagtcaaggcctctagagatgagaatgggtagggttttgctggaagaggccagtgtgataggaaggcccacgattatcaagcttgtacacttagttgaactgggaccagaactctagcccccaaatctaaactttaaacttctttgttccaccc

SEQ ID NO: 11474 - DNA, 1910 bp, Homo sapiens; identical to SEQ ID NO: 11418
  source 1..1910: mol_type = unassigned DNA

SEQ ID NO: 11475 - DNA, 802 bp, Homo sapiens; identical to SEQ ID NO: 11430
  source 1..802: mol_type = unassigned DNA

SEQ ID NO: 11476 - DNA, 627 bp, Homo sapiens; identical to SEQ ID NO: 11468
  source 1..627: mol_type = unassigned DNA

SEQ ID NO: 11477 - DNA, 751 bp, Homo sapiens
  source 1..751: mol_type = unassigned DNA
gggcaatacagttttgtgctcactgggtgaagaggctgacttagggcggggaaaggagggagccaggctggatctctttccgcagctctcctcacgttcccctctagtcccggcgcggcgctgctgcccgggggactggcctatcctcggccaatccgctgggtccttattgcctgttgggcccctagtgcgaatcagtcccgccagagacccttgacgggcatactgtttcctccgggctcctgcctcatgaggggagaggaagaggaaactccgaaatgggatcgcggaagacttaaagggccaggctgatttttttttcctactgcaggtctctgaggctgtggttgctacagggtcaccacgagcttggcttacttgtctcatccttcccttgcctggtatcattttctcagttctcccaaaagccatgtcccggcccttgctcatcaccttcaccccagccactgaccccagcgacctctggaaggatgggcagcagcagccacagcccgagaagccagagtccaccctggatggggctgcagcccgagctttctatgaggccctgattggggatgagagcagcgctcctgactcccagagatctcagactgaacctgccagagaaagaaagagaaagaaaagaagaataatgaaggcaccagcagcagaagcagtggcagaaggagcatcaggaagacatggacaagggagatcccttgaggctgaggataagatgactcaccgg

SEQ ID NO: 11478 - DNA, 1598 bp, Homo sapiens; identical to SEQ ID NO: 11416
  source 1..1598: mol_type = unassigned DNA

SEQ ID NO: 11479 - DNA, 1598 bp, Homo sapiens; identical to SEQ ID NO: 11421
  source 1..1598: mol_type = unassigned DNA

SEQ ID NO: 11480 - DNA, 1800 bp, Homo sapiens
  source 1..1800: mol_type = unassigned DNA
cggggcccgggagtctgggcaatacagttttgtgctcactgggtgaagaggctgacttagggcggggaaaggagggagccaggctggatctctttccgcagctctcctcacgttcccctctagtcccggcgaggcgctgctgcccaggggactggcctatcctcggccaatccgctgggtccttattgcctgttgggcccctagtgcgaatcagtcccgccagagacccttgacgggcatactgtttcctccgggctcctgcctcatgaggggagagaatggcgccattttgcggtacggaagctacacagcaacacgtataggagactctccccgagatcttctagggagtgacccatctatttttgtttgggaagaggaaactccgaaatgggatcgcggaagacttaaagggccaggctgatttttttttcctactggtctctgaggctgtggttgctacagggtcaccacgagcttggcttacttgtctcatccttcccttgcctggtatcattttctcagttctcccaaaagccatgtcccggcccttgctcatcaccttcaccccagccactgaccccagcgacctctggaaggatgggcagcagcagccacagcccgagaagccagagtccaccctggatggggctgcagccctagctttctatgaggccctgattggggatgagagcagcgctcctgactcccagagatctcagactgaacctgccagagaaagaaagagaaagaaaagaagaataatgaaggcaccagcagcagaagcagtggcagaaggagcatcaggaagacatggacaagggagatcccttgaggctgaggataagatgactcaccggatactgagggcagcccaggagggggacctgccagaacttaggagactgctggaaccgcatgaggcaggaggagctggggggaatatcaacgcccgggatgccttctggtggaccccactgatgtgtgctgctcgagcgggccagggggcagctgtgagctatctcctgggccgtggggctgcctgggtgggggtctgtgagctgagtggcagggatgcggctcagctcgctgaagaagctggcttccctgaggtagcccgcatggtcagggagagccatggagagacaaggagcccggaaaaccggtctcctactccctccctccagtactgcgagaactgtgacacccacttccaagattccaaccaccgcacatccactgctcacctgctgtcactgtcgcagggtcctcagcctcccaaccttccacttggggtgcccatctccagcccgggcttcaaactgctgctgagggggggctgggagccaggaatggggctgggaccccggggtgagggccgtgccaatcccatccccactgtcctcaagagggaccaggaaggactaggctacagatcagcaccccagccccgagtgacacatttcccagcttgggatacccgagctgtggctgggagggagagaccccctcgggtggccacactgagctggagggaggagagaaggagggaggagaaagacagggcttgggagcgggatctaaggacttacatgaacctcgagttctgactttggtaaagtctgaccctagtctgctgctgaagtctgaacttgggcctctgacctgggccctttgacttccccttcctgggatctgctcagatgcagatcctgaagtttttggtcaataggctctgtcttcgtgagagacgggctgagagtcagaaataaatcaaccatttgtggtttattcactttt

SEQ ID NO: 11481 - DNA, 627 bp, Homo sapiens; identical to SEQ ID NO: 11468
  source 1..627: mol_type = unassigned DNA

SEQ ID NO: 11482 - DNA, 1800 bp, Homo sapiens; identical to SEQ ID NO: 11424
  source 1..1800: mol_type = unassigned DNA

SEQ ID NO: 11483 - DNA, 802 bp, Homo sapiens; identical to SEQ ID NO: 11426
  source 1..802: mol_type = unassigned DNA

SEQ ID NO: 11484 - DNA, 822 bp, Homo sapiens; identical to SEQ ID NO: 11429
  source 1..822: mol_type = unassigned DNA

SEQ ID NO: 11485 - DNA, 6857 bp, Homo sapiens
  source 1..6857: mol_type = unassigned DNA
gggtgtcgcaggagggaaggagcgaaccggagagcgtcgtcctgagaggagtgaaggcggcaaaatggcggaccgcttctcccgcttcaacgaagaccgagactttcagggtaatcactttgatcagtatgaggaaggacacttggaaattgaacaagcgtcacttgacaagcctatagaatcggataatattggacaccgcttactccagaaacatgggtggaagctgggccagggattgggaaaatctcttcaggggagaacagatcccattccaatcgttgtcaagtatgatgtcatgggcatgggtcgcatggaaatggagcttgattatgctgaagatgctaccgaacggcgccgtgtcctagaagtagaaaaagaagacacagaagagctgagacaaaagtacaaggattatgttgacaaagagaaggcaattgccaaagccttggaagacctcagagccaacttttattgtgaactgtgtgataagcaatatcagaaacatcaggaatttgataaccatatcaactcctatgatcatgcacacaagcagagattaaaagatctgaagcagagagagtttgctcgaaatgtctcttcaagatcccgcaaggatgagaaaaaacaggaaaaagcccttcggcggctccatgagttggcagagcaaagaaaacaagctgaatgtgcacctggaagtggtcccatgttcaaaccaaccacagtggctgtagatgaagaaggtggagaagatgataaagatgaatcagctacaaatagtggcacaggtgccactgcttcttgtggcctgggatctgaattctccacagataaaggaggccctttcactgcagtacaaatcactaataccactggactggcccaggctcctgggttagcctcccaaggcatcagctttggcattaagaataatctggggaccccattgcaaaaattgggagtgtcattttcttttgccaaaaaggctcctgtcaaactcgaatcaatagcatcagttttcaaggaccatgcggaggaagggacctctgaagatggaacaaaacccgatgagaagagttctgaccaaggactgcagaaggtaggagactctgatgggagcagtaatcttgatggtaaaaaagaggatgaagaccctcaggatggagggtcccttgcctcaacattatccaaattaaaaaggatgaaacgagaagaaggagctggggctacagagcctgagtattaccactacatccccccagcacactgcaaagtaaaacctaattttccctttctactttttatgagagccagtgaacaaatggatggtgataatactacacacccaaagaatgccccagagagtaaaaaaggcagttctcccaagcctaaaagctgcatcaaggcggcagcaagccaaggagcagaaaagacagttagtgaagtctctgagcagccgaaggaaaccagcatgaccgagccctcagaaccaggaagcaaagctgaggcaaagaaggccttaggaggggatgtaagtgatcagagtttagaaagtcatagtcagaaggtttcagagacccaaatgtgtgagtccaactcttctaaagaaacctctctggccaccccagcagggaaagaaagccaagaaggacccaaacatcctactggtcccttcttcccagttttgagcaaagatgaaagcactgccctccagtggccatcagaactattaattttcaccaaggcagaaccctccatttcatacagttgtaaccctttatattttgactttaaactttcaaggaacaaagatgccagaactaaaggaacagaaaaaccaaaggatataggaagctcctcaaaggaccatctccaaggcctagatcctggtgagccaaataaaagcaaggaagtgggcggagagaaaatagtacgttcctcaggaggcagaatggacgcacctgcttcagggtctgcctgtagcggcctgaacaagcaggagcctgggggtagccatgggtctgagacagaagacacagggagaagccttcccagcaagaaagaacgatctgggaagtcccaccggcacaaaaagaaaaagaagcacaaaaaatccagcaaacacaaacgtaaacacaaggctgacacagaagagaaaagctctaaggcagagtcaggggagaaatctaagaagcgcaagaaacgaaaacgaaagaagaataagtcatcagccccagcagattctgaacgaggacccaaaccagaaccccctgggagtggcagtcccgcaccaccaagaagaaggcggagagctcaagatgactcccagcggagatccctcccagctgaagaggggagcagtggcaaaaaggatgaaggtgggggtggtagcagctcccaagaccatggtgggaggaaacacaaaggtgaacttccaccttcatcctgccagcgaagagcaggcaccaaacggagcagccggtctagccatcggagccaacccagtagtggagatgaggatagtgatgatgcttcctcacaccggctgcaccagaagtctccatcccagtacagtgaggaagaagaagaggaagattcaggcagtgagcattcccgcagccgctcaaggtctggccggcgccattcctcgcatcgttcctcccggcgttcttactcaagtagctcagatgcctcttcagaccagagctgctatagtagacagcgcagttactctgatgacagctacagtgactacagtgacagatcacgaaggcactccaagcgctcccatgactcagatgactcagactatgccagctccaaacaccgatcaaaacggcacaaatattcatcttctgatgatgactatagcctcagttgcagccagtcccgaagccgatctcggagtcataccagagagcgctcaagatcccggggccgcagccgcagcagcagttgtagtcgtagtcgaagcaagcggagaagccgtagcaccacagcccacagctggcaacggagccggagctatagccgggaccgcagccgcagcaccaggagcccttcccagagatcaggctccaggaagagatcatggggtcacgagagccctgaggagaggcattctgggcgtcgggacttcattcgttctaagatctaccgctcccagtccccccactatttccgatcaggccggggagaaggtcctgggaagaaagatgatggcagaggagatgacagtaaagcaacaggtccaccttcccagaacagcaacattggcacaggaagagggtcagaaggtgactgcagtcctgaagacaagaactctgtcactgccaaactgctactggagaagatccagtcaaggaaagtggagaggaaacctagtgtgagtgaggaggtgcaggccacccctaataaagctgggcccaagctcaaggaccccccacaaggttactttgggcccaagctccccccatctcttggcaataagcctgtccttccactgatagggaagctcccagctacccgaaagcccaataagaagtgtgaagagtctggcttggaaaggggggaagagcaagaacagtcagagacagaagaggggcccccagggagtagtgatgccctatttgggcatcagttcccttcagaggaaacaactggccccttattagacccacccccagaagagtcaaagtctggagaagctactgctgatcaccctgtggctccactaggcaccccagcacattctgactgctaccctggggacccaaccatctcccataactacctccccgaccccagtgatggggacaccctggagtccctggatagcagcagtcagccaggccctgtggagtccagcttgctgcctatagcaccagaccttgagcatttccccagttatgcacctcccagtggggatcctagtattgagtcaacagatggggctgaggatgcttcactggcccccctggaaagccagcccatcaccttcacccctgaggagatggagaagtacagcaagctccagcaggctgctcagcaacacatccagcagcagcttctggccaagcaagtaaaggcctttccagcctcagctgccctggccccagccacaccagccctgcaacccatccacattcagcagccagctacagcctctgccacctccatcacaactgttcagcatgccatcctacaacatcatgctgccgcagctgctgccgccatcggcattcaccctcacccccatccccaaccacttgcccaggtgcatcatattccccagccccatctgacccccatttctttgtcccacctcactcactcaatcatccctggccaccctgccacctttctcgctagccatcccatccacatcattcccgcctcagccatccatcctgggcccttcacctttcaccctgtcccacatgctgccctctaccccaccctacttgctccacggcctgctgcagcagctgccactgcacttcaccttcacccactacttcaccccatcttctcaggtcaggacctgcaacatccccccagccatggcacgtgagttgggggatgggatcctaggtagggccaggggaggagacccataaatgttcccttgggggtgttgagccattaataccagcaagtagaagctgggatgggcagtgtctgacagccaaagaattgagttttggcttgcaggggtgggtttagatttgaagtttgctttcagtttactatcagggatttctttttcctgtcctcctctcaatttgtccctccctcttctgtgtttctaagctagggaacaccagtaagtgctacccacccctctgcagcaacatctccaaactgtcaagtttagataatcccctcctccctctgcttttttcctctgctcttcccttctgtaaattttaaaacattttcctcccctctggccagtgggttgtcaccagagcacttgctgtgggcccatctggtcttgccttctcagcgccacagggaaggccaagctgttctagtggtggaagtgccaccattttggggtagtatctttgaccatctttggtgacgttacgttatcccaggtgaggtggaaagcgtctcacctggaacctgatataactcaggctgcaattccatccagttcccacatcaacggagccacacatttggcactgttatcttggtatccctcatcccagaagaggcatctccatatcccagaaaagaagatcctatcatgaataaaagctgtatggcccagagaggagctcatgtgtctaaagtgaagggtatattttcttctgttgtgttgatgtttccttcttaatttataggatttttttaatgtaaaaaattgcactgaactctataaacgtaaatgctgctttttgtagctcatataaaaaaggttccatatttgtagtatactgcaataatattttttacatccagctctttaagtgatcctcgttctggtggctttgtgtaaatatgtttgccctagttgaattaagaaactctaaaggttataaaatgaaaacaaaaaataaaatatttgttttctgctagatgcaaaactgactaagcatgtatattttaccaaacttatgtattttttgaagttatgaactataaaatgttaaaacattttttgctgggacaaaatgttaagtaatttgcagtatgtagtgcccccagtattgggatttttgagctaatgggcagcagtcagctgggggcttctgagggatgctcatctttaacagtctccctcatgtacttttgctgttttacacagagaaacaggtagaccccacagaggagaaggaggggattcaacagctttattgtctggaagcagtgagatttggtgattgtctggggggattcctgggtttccctgggtaccttgttccaggcagtcagtccatttgccttcctagtacttagccccctctgacaattttttttttaatgtgccttttgggttggtagaaacggaagtagaagtaggctggaggatgagttgggacagtcttccttttgttgggaggtgagcacatttacagatattttgcttcatagtttccatgccctctgcccagctcagtttagacagtaaacgttccttgtttcttttctcccatgacactgacaagaggaattaccacctcagcctcttttgcccctcttcttgcctttcacccaggctctcagccctaattaacacactgacccaaaggtgcttgtgttgcaggtcccatctcctttgatgaggttaacaattcccactttggcattttcctaactattcgtgtggctagaattggttggttggtcacttgacaagaaaaaccatacttacctgggccaaggctctgttcctgccttcgcaaattctcaaaagagtaaagtttatgaaaagaaagtggcaggcaaacacaactcttgactgccctcccaccctcctacctgttcagtactcatctgattcagaagcatcacttcttggataactagcactggaaaaatgaaatcatctgtgtaagtgaagggactcatttttctttgctttcagcccatgtaaataaataatacagtattaacattttcgtgctgcttcccattagcttgtagattgagccatactctggctgcctctttgccttcctaggggcattttctttaacttccagaatagtgattttaaaagtaaaaataaaaataaaccttacttacaagcataacagattgtatttaactttatcacatatgatagagatatatatgctgtaaaatgagggaaaggaactttctaataaaccaatgatttgtgg

SEQ ID NO: 11486 - DNA, 4710 bp, Homo sapiens
  source 1..4710: mol_type = unassigned DNA
gcgtcgtcctgagaggagtgaaggcggcaaaatggcggaccgcttctcccgcttcaacgaagaccgagactttcagggtaatcactttgatcagtatgaggaaggacacttggaaattgaacaagcgtcacttgacaagcctatagaatcgcccagtttttaaagccaggataatattggacaccgcttactccagaaacatgggtggaagctgggccagggattgggaaaatctcttcaggggagaacagatcccattccaatcgttgtcaagtatgatgtcatgggcatgggtcgcatggaaatggagcttgattatgctgaagatgctaccgaacggcgccgtgtcctagaagtagaaaaagaagacacagaagagctgagacaaaagtacaaggattatgttgacaaagagaaggcaattgccaaagccttggaagacctcagagccaacttttattgtgaactgtgtgataagcaatatcagaaacatcaggaatttgataaccatatcaactcctatgatcatgcacacaagcagagattaaaagatctgaagcagagagagtttgctcgaaatgtctcttcaagatcccgcaaggatgagaaaaaacaggaaaaagcccttcggcggctccatgagttggcagagcaaagaaaacaagctgaatgtgcacctggaagtggtcccatgttcaaaccaaccacagtggctgtagatgaagaaggtggagaagatgataaagatgaatcagctacaaatagtggcacaggtgccactgcttcttgtggcctgggatctgaattctccacagataaaggaggccctttcactgcagtacaaatcactaataccactggactggcccaggctcctgggttagcctcccaaggcatcagctttggcattaagaataatctggggaccccattgcaaaaattgggagtgtcattttcttttgccaaaaaggctcctgtcaaactcgaatcaatagcatcagttttcaaggaccatgcggaggaagggacctctgaagatggaacaaaacccgatgagaagagttctgaccaaggactgcagaaggtaggagactctgatgggagcagtaatcttgatggtaaaaaagaggatgaagaccctcaggatggagggtcccttgcctcaacattatccaaattaaaaaggatgaaacgagaagaaggagctggggctacagagcctgagtattaccactacatccccccagcacactgcaaagtaaaacctaattttccctttctactttttatgagagccagtgaacaaatggatggtgataatactacacacccaaagaatgccccagagagtaaaaaaggcagttctcccaagcctaaaagctgcatcaaggcggcagcaagccaaggagcagaaaagacagttagtgaagtctctgagcagccgaaggaaaccagcatgaccgagccctcagaaccaggaagcaaagctgaggcaaagaaggccttaggaggggatgtaagtgatcagagtttagaaagtcatagtcagaaggtttcagagacccaaatgtgtgagtccaactcttctaaagaaacctctctggccaccccagcagggaaagaaagccaagaaggacccaaacatcctactggtcccttcttcccagttttgagcaaagatgaaagcactgccctccagtggccatcagaactattaattttcaccaaggcagaaccctccatttcatacagttgtaaccctttatattttgactttaaactttcaaggaacaaagatgccagaactaaaggaacagaaaaaccaaaggatataggaagctcctcaaaggaccatctccaaggcctagatcctggtgagccaaataaaagcaaggaagtgggcggagagaaaatagtacgttcctcaggaggcagaatggacgcacctgcttcagggtctgcctgtagcggcctgaacaagcaggagcctgggggtagccatgggtctgagacagaagacacagggagaagccttcccagcaagaaagaacgatctgggaagtcccaccggcacaaaaagaaaaagaagcacaaaaaatccagcaaacacaaacgtaaacacaaggctgacacagaagagaaaagctctaaggcagagtcaggggagaaatctaagaagcgcaagaaacgaaaacgaaagaagaataagtcatcagccccagcagattctgaacgaggacccaaaccagaaccccctgggagtggcagtcccgcaccaccaagaagaaggcggagagctcaagatgactcccagcggagatccctcccagctgaagaggggagcagtggcaaaaaggatgaaggtgggggtggtagcagctcccaagaccatggtgggaggaaacacaaaggtgaacttccaccttcatcctgccagcgaagagcaggcaccaaacggagcagccggtctagccatcggagccaacccagtagtggagatgaggatagtgatgatgcttcctcacaccggctgcaccagaagtctccatcccagtacagtgaggaagaagaagaggaagattcaggcagtgagcattcccgcagccgctcaaggtctggccggcgccattcctcgcatcgttcctcccggcgttcttactcaagtagctcagatgcctcttcagaccagagctgctatagtagacagcgcagttactctgatgacagctacagtgactacagtgacagatcacgaaggcactccaagcgctcccatgactcagatgactcagactatgccagctccaaacaccgatcaaaacggcacaaatattcatcttctgatgatgactatagcctcagttgcagccagtcccgaagccgatctcggagtcataccagagagcgctcaagatcccggggccgcagccgcagcagcagttgtagtcgtagtcgaagcaagcggagaagccgtagcaccacagcccacagctggcaacggagccggagctatagccgggaccgcagccgcagcaccaggagcccttcccagagatcaggctccaggaagagatcatggggtcacgagagccctgaggagaggcattctgggcgtcgggacttcattcgttctaagatctaccgctcccagtccccccactatttccgatcaggccggggagaaggtcctgggaagaaagatgatggcagaggagatgacagtaaagcaacaggtccaccttcccagaacagcaacattggcacaggaagagggtcagaaggtgactgcagtcctgaagacaagaactctgtcactgccaaactgctactggagaagatccagtcaaggaaagtggagaggaaacctagtgtgagtgaggaggtgcaggccacccctaataaagctgggcccaagctcaaggaccccccacaaggttactttgggcccaagctccccccatctcttggcaataagcctgtccttccactgatagggaagctcccagctacccgaaagcccaataagaagtgtgaagagtctggcttggaaaggggggaagagcaagaacagtcagagacagaagaggggcccccagggagtagtgatgccctatttgggcatcagttcccttcagaggaaacaactggccccttattagacccacccccagaagagtcaaagtctggagaagctactgctgatcaccctgtggctccactaggcaccccagcacattctgactgctaccctggggacccaaccatctcccataactacctccccgaccccagtgatggggacaccctggagtccctggatagcagcagtcagccaggccctgtggagtccagcttgctgcctatagcaccagaccttgagcatttccccagttatgcacctcccagtggggatcctagtattgagtcaacagatggggctgaggatgcttcactggcccccctggaaagccagcccatcaccttcacccctgaggagatggagaagtacagcaagctccagcaggctgctcagcaacacatccagcagcagcttctggccaagcaagtaaaggcctttccagcctcagctgccctggccccagccacaccagccctgcaacccatccacattcagcagccagctacagcctctgccacctccatcacaactgttcagcatgccatcctacaacatcatgctgccgcagctgctgccgccatcggcattcaccctcacccccatccccaaccacttgcccaggtgcatcatattccccagccccatctgacccccatttctttgtcccacctcactcactcaatcatccctggccaccctgccacctttctcgctagccatcccatccacatcattcccgcctcagccatccatcctgggcccttcacctttcaccctgtcccacatgctgccctctaccccaccctacttgctccacggcctgctgcagcagctgccactgcacttcaccttcacccactacttcaccccatcttctcaggtcaggacctgcaacatccccccagccatggcacgtgagttgggggatgggatcctaggtagggccaggggaggagacccataaatgttcccttgggggtgttgagccattaataccagcaagtagaagctgggatgggcagtgtctgacagccaaagaattgagttttggcttgcaggggtgggtttag

SEQ ID NO: 11487 - DNA, 163 bp, Homo sapiens
  source 1..163: mol_type = unassigned DNA
agagcgtcgtcctgagaggagtgaaggcggcaaaatggcggaccgcttctcccgcttcaacgaagaccgagactttcagggtaatcactttgatcagtatgaggaaggacacttggaaattgaacaagcgtcacttgacaagcctatagaatcgagttgtttt

SEQ ID NO: 11488 - DNA, 4692 bp, Homo sapiens
  source 1..4692: mol_type = unassigned DNA
gcgtcgtcctgagaggagtgaaggcggcaaaatggcggaccgcttctcccgcttcaacgaagaccgagactttcagggtaatcactttgatcagtatgaggaaggacacttggaaattgaacaagcgtcacttgacaagcctatagaatcggataatattggacaccgcttactccagaaacatgggtggaagctgggccagggattgggaaaatctcttcaggggagaacagatcccattccaatcgttgtcaagtatgatgtcatgggcatgggtcgcatggaaatggagcttgattatgctgaagatgctaccgaacggcgccgtgtcctagaagtagaaaaagaagacacagaagagctgagacaaaagtacaaggattatgttgacaaagagaaggcaattgccaaagccttggaagacctcagagccaacttttattgtgaactgtgtgataagcaatatcagaaacatcaggaatttgataaccatatcaactcctatgatcatgcacacaagcagagattaaaagatctgaagcagagagagtttgctcgaaatgtctcttcaagatcccgcaaggatgagaaaaaacaggaaaaagcccttcggcggctccatgagttggcagagcaaagaaaacaagctgaatgtgcacctggaagtggtcccatgttcaaaccaaccacagtggctgtagatgaagaaggtggagaagatgataaagatgaatcagctacaaatagtggcacaggtgccactgcttcttgtggcctgggatctgaattctccacagataaaggaggccctttcactgcagtacaaatcactaataccactggactggcccaggctcctgggttagcctcccaaggcatcagctttggcattaagaataatctggggaccccattgcaaaaattgggagtgtcattttcttttgccaaaaaggctcctgtcaaactcgaatcaatagcatcagttttcaaggaccatgcggaggaagggacctctgaagatggaacaaaacccgatgagaagagttctgaccaaggactgcagaaggtaggagactctgatgggagcagtaatcttgatggtaaaaaagaggatgaagaccctcaggatggagggtcccttgcctcaacattatccaaattaaaaaggatgaaacgagaagaaggagctggggctacagagcctgagtattaccactacatccccccagcacactgcaaagtaaaacctaattttccctttctactttttatgagagccagtgaacaaatggatggtgataatactacacacccaaagaatgccccagagagtaaaaaaggcagttctcccaagcctaaaagctgcatcaaggcggcagcaagccaaggagcagaaaagacagttagtgaagtctctgagcagccgaaggaaaccagcatgaccgagccctcagaaccaggaagcaaagctgaggcaaagaaggccttaggaggggatgtaagtgatcagagtttagaaagtcatagtcagaaggtttcagagacccaaatgtgtgagtccaactcttctaaagaaacctctctggccaccccagcagggaaagaaagccaagaaggacccaaacatcctactggtcccttcttcccagttttgagcaaagatgaaagcactgccctccagtggccatcagaactattaattttcaccaaggcagaaccctccatttcatacagttgtaaccctttatattttgactttaaactttcaaggaacaaagatgccagaactaaaggaacagaaaaaccaaaggatataggaagctcctcaaaggaccatctccaaggcctagatcctggtgagccaaataaaagcaaggaagtgggcggagagaaaatagtacgttcctcaggaggcagaatggacgcacctgcttcagggtctgcctgtagcggcctgaacaagcaggagcctgggggtagccatgggtctgagacagaagacacagggagaagccttcccagcaagaaagaacgatctgggaagtcccaccggcacaaaaagaaaaagaagcacaaaaaatccagcaaacacaaacgtaaacacaaggctgacacagaagagaaaagctctaaggcagagtcaggggagaaatctaagaagcgcaagaaacgaaaacgaaagaagaataagtcatcagccccagcagattctgaacgaggacccaaaccagaaccccctgggagtggcagtcccgcaccaccaagaagaaggcggagagctcaagatgactcccagcggagatccctcccagctgaagaggggagcagtggcaaaaaggatgaaggtgggggtggtagcagctcccaagaccatggtgggaggaaacacaaaggtgaacttccaccttcatcctgccagcgaagagcaggcaccaaacggagcagccggtctagccatcggagccaacccagtagtggagatgaggatagtgatgatgcttcctcacaccggctgcaccagaagtctccatcccagtacagtgaggaagaagaagaggaagattcaggcagtgagcattcccgcagccgctcaaggtctggccggcgccattcctcgcatcgttcctcccggcgttcttactcaagtagctcagatgcctcttcagaccagagctgctatagtagacagcgcagttactctgatgacagctacagtgactacagtgacagatcacgaaggcactccaagcgctcccatgactcagatgactcagactatgccagctccaaacaccgatcaaaacggcacaaatattcatcttctgatgatgactatagcctcagttgcagccagtcccgaagccgatctcggagtcataccagagagcgctcaagatcccggggccgcagccgcagcagcagttgtagtcgtagtcgaagcaagcggagaagccgtagcaccacagcccacagctggcaacggagccggagctatagccgggaccgcagccgcagcaccaggagcccttcccagagatcaggctccaggaagagatcatggggtcacgagagccctgaggagaggcattctgggcgtcgggacttcattcgttctaagatctaccgctcccagtccccccactatttccgatcaggccggggagaaggtcctgggaagaaagatgatggcagaggagatgacagtaaagcaacaggtccaccttcccagaacagcaacattggcacaggaagagggtcagaaggtgactgcagtcctgaagacaagaactctgtcactgccaaactgctactggagaagatccagtcaaggaaagtggagaggaaacctagtgtgagtgaggaggtgcaggccacccctaataaagctgggcccaagctcaaggaccccccacaaggttactttgggcccaagctccccccatctcttggcaataagcctgtccttccactgatagggaagctcccagctacccgaaagcccaataagaagtgtgaagagtctggcttggaaaggggggaagagcaagaacagtcagagacagaagaggggcccccagggagtagtgatgccctatttgggcatcagttcccttcagaggaaacaactggccccttattagacccacccccagaagagtcaaagtctggagaagctactgctgatcaccctgtggctccactaggcaccccagcacattctgactgctaccctggggacccaaccatctcccataactacctccccgaccccagtgatggggacaccctggagtccctggatagcagcagtcagccaggccctgtggagtccagcttgctgcctatagcaccagaccttgagcatttccccagttatgcacctcccagtggggatcctagtattgagtcaacagatggggctgaggatgcttcactggcccccctggaaagccagcccatcaccttcacccctgaggagatggagaagtacagcaagctccagcaggctgctcagcaacacatccagcagcagcttctggccaagcaagtaaaggcctttccagcctcagctgccctggccccagccacaccagccctgcaacccatccacattcagcagccagctacagcctctgccacctccatcacaactgttcagcatgccatcctacaacatcatgctgccgcagctgctgccgccatcggcattcaccctcacccccatccccaaccacttgcccaggtgcatcatattccccagccccatctgacccccatttctttgtcccacctcactcactcaatcatccctggccaccctgccacctttctcgctagccatcccatccacatcattcccgcctcagccatccatcctgggcccttcacctttcaccctgtcccacatgctgccctctaccccaccctacttgctccacggcctgctgcagcagctgccactgcacttcaccttcacccactacttcaccccatcttctcaggtcaggacctgcaacatccccccagccatggcacgtgagttgggggatgggatcctaggtagggccaggggaggagacccataaatgttcccttgggggtgttgagccattaataccagcaagtagaagctgggatgggcagtgtctgacagccaaagaattgagttttggcttgcaggggtgggtttag

SEQ ID NO: 11489 - DNA, 1506 bp, Homo sapiens
  source 1..1506: mol_type = unassigned DNA
gacggcacgccgcggcggggtgggtgcaagatgccgctgccggttcaggtgtttaacttgcagggggccgtggagcccatgcagatcgacgtggacccccaggaagacccgcagaatgcacctgacgtcaactacgtggtggagaaccccagcctggatctggaacagtacgcggccagctacagcggcctgatgcgcatcgaacggctgcagttcattgctgatcactgccccacgctgcgggtggaggccctgaagatggccctctccttcgtgcagagaacctttaacgtggacatgtacgaggagatccaccgcaagctctcagaggccaccaggtcctctctcagggagctgcagaacgcacccgacgccatccctgagagcggcgtggagcccccagccctggacacggcctgggtggaggccacgcggaagaaggcgctgctgaagctggagaagctggacacagacctgaagaactacaagggcaactccatcaaagagagcatccggcgcggccacgacgacctgggcgaccactacctggactgtggggacctcagcaacgccctcaagtgctattcccgggcccgggactactgcaccagcgccaaacacgtcatcaacatgtgcctcaatgtcatcaaggtcagcgtctacttgcagaattggtctcatgtgctcagctacgtcagcaaggctgagtccaccccagagattgccgagcagcgaggagagcgtgacagccagacccaggccatcctcaccaagctcaagtgtgccgcaggcttggcagagctggccgccaggaagtacaagcaggctgccaagtgcctcctgctggcttcctttgatcactgtgacttccctgagctgctgtcccccagcaacgtggccatctacggtggcctgtgcgccttggctacctttgaccggcaggagctgcagcgcaatgtcatctccagcagctccttcaagttgttcttggagctggagccacaggtccgagacatcatcttcaaattctacgagtccaagtacgcctcatgtctcaagatgctggacgagatgaaggacaacctgctcctggacatgtatctggccccccatgtcaggaccctgtacacccagattcgcaaccgtgccctcatccagtatttcagcccctacgtgtcagccgacatgcataggatggcggcagccttcaataccacggtggccgccctggaggacgagctgacgcagctaatcctggaggggctgatcagtgcccgtgtggactcacacagcaagatcctatacgcccgggacgtggatcagcgcagcaccacctttgagaagtctctgttgatgggcaaggagttccagcgccgcgccaaggccatgatgctgcgggcagctgtgctccgcaaccagatccatgtcaagtccccgcccagagaagggagccagggggagctgactccagccaacagccagtcccggatgagcaccaacatgtga

SEQ ID NO: 11490 - DNA, 1700 bp, Homo sapiens
  source 1..1700: mol_type = unassigned DNA
gacggcacgccgcggcggggtgggtgcaagatgccgctgccggttcaggtgtttaacttgcagcagccagccagctctgtgtcagggtcggggggtgcagaaagtcaggacagaatgagggatagctcggcccccagctcggcctcctcgtcagtgacagatctgtactgcacccctcacagcagtaggtcagacctcgtcctgcccggcacggccggggacttcagcctgagcgccagcctgtcggcctgtacgctgctctacgagggggccgtggagcccatgcagatcgacgtggacccccaggaagacccgcagaatgcacctgacgccatccctgagagcggcgtggagcccccagccctggacacggcctgggtggaggccacgcggaagaaggcgctgctgaagctggagaagctggacacagacctgaagaactacaagggcaactccatcaaagagagcatccggcgcggccacgacgacctgggcgaccactacctggactgtggggacctcagcaacgccctcaagtgctattcccgggcccgggactactgcaccagcgccaaacacgtcatcaacatgtgcctcaatgtcatcaaggtcagcgtctacttgcagaattggtctcatgtgctcagctacgtcagcaaggctgagtccaccccagagattgccgagcagcgaggagagcgtgacagccagacccaggccatcctcaccaagctcaagtgtgccgcaggcttggcagagctggccgccaggaagtacaagcaggctgccaagtgcctcctgctggcttcctttgatcactgtgacttccctgagctgctgtcccccagcaacgtggccatctacggtggcctgtgcgccttggctacctttgaccggcaggagctgcagcgcaatgtcatctccagcagctccttcaagttgttcttggagctggagccacaggtccgagacatcatcttcaaattctacgagtccaagtacgcctcatgtctcaagatgctggacgagatgaaggacaacctgctcctggacatgtatctggccccccatgtcaggaccctgtacacccagattcgcaaccgtgccctcatccagtatttcagcccctacgtgtcagccgacatgcataggatggcggcagccttcaataccacggtggccgccctggaggacgagctgacgcagctaatcctggaggggctgatcagtgcccgtgtggactcacacagcaagatcctatacgcccgggacgtggatcagcgcagcaccacctttgagaagtctctgttgatgggcaaggagttccagcgccgcgccaaggccatgatgctgcgggcagctgtgctccgcaaccagatccatgtcaagcccctccccacctccacggacctcggacctccaggcggctcagtgctgcctgcggcccagctaaggggcctggccactgggtgccacccagcctgtgtgccctccctggggctgaggaggcaggcggctgctagttgtggcccttcctggaaggagaggcctgcagggctcgaccctgtgggtttctgtccccagggagcagactgtgcggcacccaggcccagtggcaccatttcccagacccctcctgttcccgcctcagtcaggtgcagacaagtgggcggtgtccattaaagagcagactcagcgtt

SEQ ID NO: 11491 - DNA, 1695 bp, Homo sapiens
  source 1..1695: mol_type = unassigned DNA
gacggcacgccgcggcggggtgggtgcaagatgccgctgccggttcaggtgtttaacttgcagccagccagctctgtgtcagggtcggggggtgcagaaagtcaggacagaatgagggatagctcggcccccagctcggcctcctcgtcagtgacagatctgtactgcacccctcacagcagtaggtcagacctcgtcctgcccggcacggccggggacttcagcctgagcgccagcctgtcggcctgtacgctgctctacgagggggccgtggagcccatgcagatcgacgtggacccccaggaagacccgcagaatgcacctgacgtcaactacgtggtggagaaccccagcctggatctggaacagtacgcggccagctacagcggcctgatgcgcatcgaacggctgcagttcattgctgatcactgccccacgctgcgggtggaggccctgaagatggccctctccttcgtgcagagaacctttaacgtggacatgtacgaggagatccaccgcaagctctcagaggccaccagggagctgcagaacgcacccgacgccatccctgagagcggcgtggagcccccagccctggacacggcctgggtggaggccacgcggaagaaggcgctgctgaagctggagaagctggacacagacctgaagaactacaagggcaactccatcaaagagagcatccggcgcggccacgacgacctgggcgaccactacctggactgtggggacctcagcaacgccctcaagtgctattcccgggcccgggactactgcaccagcgccaaacacgtcatcaacatgtgcctcaatgtcatcaaggtcagcgtctacttgcagaattggtctcatgtgctcagctacgtcagcaaggctgagtccaccccagagattgccgagcagcgaggagagcgtgacagccagacccaggccatcctcaccaagctcaagtgtgccgcaggcttggcagagctggccgccaggaagtacaagcaggctgccaagtgcctcctgctggcttcctttgatcactgtgacttccctgagctgctgtcccccagcaacgtggccatctacggtggcctgtgcgccttggctacctttgaccggcaggagctgcagcgcaatgtcatctccagcagctccttcaagttgttcttggagctggagccacaggtccgagacatcatcttcaaattctacgagtccaagtacgcctcatgtctcaagatgctggacgagatgaaggacaacctgctcctggacatgtatctggccccccatgtcaggaccctgtacacccagattcgcaaccgtgccctcatccagtatttcagcccctacgtgtcagccgacatgcataggatggcggcagccttcaataccacggtggccgccctggaggacgagctgacgcagctaatcctggaggggctgatcagtgcccgtgtggactcacacagcaagatcctatacgcccgggacgtggatcagcgcagcaccacctttgagaagtctctgttgatgggcaaggagttccagcgccgcgccaaggccatgatgctgcgggcagctgtgctccgcaaccagatccatgtcaagtccccgcccagagaagggagccagggggagctgactccagccaacagccagtcccggatgagcaccaacatgtga

SEQ ID NO: 11492 - DNA, 4076 bp, Homo sapiens
  source 1..4076: mol_type = unassigned DNA
gccaagcgcaggaggggagggagccccggtgggcccggggcctgcggagggagccgagctcttggtgcttttcccgaaggagcgcgggaggcccacgggtccggcgagtgcccggcatggcggcttttccagcctgctttgtgttaagccgaggtcctggcttctctgtgtctcccagctgggggccatgaggctccctgagatgactcttttccccttctcccaactccgtggcgtgactctcagcccagtattgctgctccgctgctcaggacagattccgggggctggtcctcctgcctcctggggttgaggtggcgtcccgttcttctccgtggcttggaggaaactacatcaggatggtggctgggaacgtgtaggggccctcagaggcccctgtgtagttggttgtcccctgtctgctttctggctttcagagatgagcggctagaatcaggcgaggggtttctgcttctgagccttagagtcttgtgaggagacccctccctgatgtggtggcacaggagcctgggtgggggcgggggtgactgggagggcacacctgggggacagcagcggcgggagtgtggtccgactggcctggaagatcttgggcagagctgacctcagagaacagtgcgggtctctcgccctcctggggcagtccccaggacgaggtgccaggtgcctggcccatgttgcagggggccgtggagcccatgcagatcgacgtggacccccaggaagacccgcagaatgcacctgacgtcaactacgtggtggagaaccccagcctggatctggaacagtacgcggccagctacagcggcctgatgcgcatcgaacggctgcagttcattgctgatcactgccccacgctgcgggtggaggccctgaagatggccctctccttcgtgcagagaacctttaacgtggacatgtacgaggagatccaccgcaagctctcagaggccaccaggtgaggccaggggcttggcgagaggaagcagaggccaccaagggagcgcgggtgtctgggactgggcccccttcctgtgccctgcatctcccacccctgtgctgggaagtcgggcgggtagagctctcgctctcttttggccagcagtggaagtgccctgtgtgtgtgtggcttctgtgtgtgtgcatgcagggctttgattccaaggggagctgttggagactgtggctcaggggccgcctccctgctggtttccccacccggctgtaggctcctggggcagcagttctctctgtggccctggtgcagactggtccctagaggtggggtttgaggccagcgggaggtgcccacctgtgtgccggttgggcctttgagggcagcctgagattggcggcttcctcccctcctccctggcccccgtgaccgccgccatcctgatggccaggtcctctctcagggagctgcagaacgcacccgacgccatccctgagagcggcgtggagcccccagccctggacacggcctgggtggaggccacgcggaagaaggcgctgctgaagctggagaagctggacacagacctgaagaactacaagggcaactccatcaaagagagcatccggcgcggccacgacgacctgggcgaccactacctggactgtggggacctcagcaacgccctcaagtgctattcccgggcccgggactactgcaccagcgccaaacacgtcatcaacatgtgcctcaatgtcatcaaggtcagcgtctacttgcagaattggtctcatgtgctcagctacgtcagcaaggctgagtccaccccagagattgccgaggtacgggccacctcctcagagaccttgcccccaggattcctgaccactgctggcccctcctgtcctcccccacctcattctcccccagatctgaatctgccttcatcccctctcagtctgggggctgggcatcgagctctaggaaatgtggagcatgggcctcacgcatgtggcttcctcctacagcagcgaggagagcgtgacagccagacccaggccatcctcaccaagctcaagtgtgccgcaggtgagggcctgggtcacgcccagctgaccccacgttcccctgttgctaagtcctcccagcccagggcagtaggctggtccctgcctcagccagggaaaacttccctggcagggcgcaggatgttgtgggcacatgtacaggtgtaggtggtgcctaaagtctgccccggggaagccagtgggtgacgtgtggtcagggtctggctgctgtcactgtgggcgtgaggcaggtctgccagcccgagctgctctgaactggggtgtcctttgcagccctgctagcacctagggcttccctgcatgcctggcttcagggagcctcctcagcattggtggggctctttccacccgtgactagagtatctgtccccagcgctgaggaacagctcccggggcaggagaggccagcgagccggctggtggtcgcgttctccctggtttccaggcgttagcggcttccccaggctctggggtcttaccccctctcccccctccccgcccccggctccttccactaggcttggcagagctggccgccaggaagtacaagcaggctgccaagtgcctcctgctggcttcctttgatcactgtgacttccctgaggtgaggagccctctggggacttgggaggcagagcatgggctcatgggtcaggctgcttctgtaggagggtgaggtctctcacaaatggggtcttaggcattctccgagcgggtgatgggcaggcaggggtggcctggcccttcactgcctgtgacgccaggtctctgctcctcagctgctgtcccccagcaacgtggccatctacggtggcctgtgcgccttggctacctttgaccggcaggagctgcagcgcaatgtcatctccagcaggtaggtgccccggtcctgcagccctgaaggctgtccccgtccctctccgtggctgctgcttcggccttgcatgtcctggccccctggccccagcgttttctcaggtgtttgtctggggactggtgtcccactggccacttggagggaggggcaggcagaggacagagttctgaggggtctgcctcaccagctccttcaagttgttcttggagctggagccacaggtccgagacatcatcttcaaattctacgagtccaagtacgcctcatgtctcaagatgctggacgagatgaagtatttcagcccctacgtgtcagccgacatgcataggatggcggcagccttcaataccacggtggccgccctggaggacgagctgacgcagctaatcctggaggggctgatcagtgcccgtgtggactcacacagcaaggtggctgtgggctgcggggcggtgggggcagctgggggtgagcctgggccccgctgagcttgtgcctgcacagatcctatacgcccgggacgtggatcagcgcagcaccacctttgagaagtctctgttgatgggcaaggagttccagcgccgcgccaaggccatgatgctgcgggcagctgtgctccgcaaccagatccatgtcaaggtgggctggcttgagggggggcaggcgcacggcgtgtggggcctggtggctgtgagctgctccttgtctcccctgcagtccccgcccagagaagggagccagggggagctgactccagccaacagccagtcccggatgagcaccaacatgtgaggggtgaaccttggcctccaggacatctgcaccccctccccacctccacggacctcggacctccaggcggctcagtgctgcctgcggcccagctaaggggcctggccactgggtgccacccagcctgtgtgccctccctggggctgaggaggcaggcggctgctagttgtggcccttcctggaaggagaggcctgcagggctcgaccctgtgggtttctgtccccagggagcagactgtgcggcacccaggcccagtggcaccatttcccagacccctcctgttcccgcctcagtcaggtgcagacaagtgggcggtgtccattaaagagcagactcagcgtt

SEQ ID NO: 11493 - DNA, 2347 bp, Homo sapiens
  source 1..2347: mol_type = unassigned DNA
gctgccccggaagtggacggcacgccgcggcggggtgggtgcaagatgccgctgccggttcaggtgtttaacttgcaggtaacgagccgaggccgccccgggcctccgcgcccccgcgccccccgccactggggccgggctgaggtcgagcaggggcgcggggcctgcgccaggagtcggtcgggcacgctccgtgccgggcctccgcgggcagcgcgcgtcgggggctgcagggccgagggcgcgtctccgccgtggctgcgcgctgcgatcgggggccgccgggccgcgcccgccccgcctcccctcccagcagctcacgggagaggttcccggccgccccgacgctaacgctctttctcccttcagcagccagccagctctgtgtcagggtcggggggtgcagaaagtcaggacagaatgagggatagctcggcccccagctcggcctcctcgtcagtgacagatctgtactgcacccctcacagcagtaggtcagacctcgtcctgcccggcacggccggggacttcagcctgagcgccagcctgtcggcctgtacgctgctctacgagggggccgtggagcccatgcagatcgacgtggacccccaggaagacccgcagaatgcacctgacgtcaactacgtggtggagaaccccagcctggatctggaacagtacgcggccagctacagcggcctgatgcgcatcgaacggctgcagttcattgctgatcactgccccacgctgcgggtggaggccctgaagatggccctctccttcgtgcagagaacctttaacgtggacatgtacgaggagatccaccgcaagctctcagaggccaccagggagctgcagaacgcacccgacgccatccctgagagcggcgtggagcccccagccctggacacggcctgggtggaggccacgcggaagaaggcgctgctgaagctggagaagctggacacagacctgaagaactacaagggcaactccatcaaagagagcatccggcgcggccacgacgacctgggcgaccactacctggactgtggggacctcagcaacgccctcaagtgctattcccgggcccgggactactgcaccagcgccaaacacgtcatcaacatgtgcctcaatgtcatcaaggtcagcgtctacttgcagaattggtctcatgtgctcagctacgtcagcaaggctgagtccaccccagagattgccgagcagcgaggagagcgtgacagccagacccaggccatcctcaccaagctcaagtgtgccgcaggcttggcagagctggccgccaggaagtacaagcaggctgccaagtgcctcctgctggcttcctttgatcactgtgacttccctgagctgctgtcccccagcaacgtggccatctacggtggcctgtgcgccttggctacctttgaccggcaggagctgcagcgcaatgtcatctccagcagctccttcaagttgttcttggagctggagccacaggtccgagacatcatcttcaaattctacgagtccaagtacgcctcatgtctcaagatgctggacgagatgaaggacaacctgctcctggacatgtatctggccccccatgtcaggaccctgtacacccagattcgcaaccgtgccctcatccagtatttcagcccctacgtgtcagccgacatgcataggatggcggcagccttcaataccacggtggccgccctggaggacgagctgacgcagctaatcctggaggggctgatcagtgcccgtgtggactcacacagcaagatcctatacgcccgggacgtggatcagcgcagcaccacctttgagaagtctctgttgatgggcaaggagttccagcgccgcgccaaggccatgatgctgcgggcagctgtgctccgcaaccagatccatgtcaagtccccgcccagagaagggagccagggggagctgactccagccaacagccagtcccggatgagcaccaacatgtgaggggtgaaccttggcctccaggacatctgcaccccctccccacctccacggacctcggacctccaggcggctcagtgctgcctgcggcccagctaaggggcctggccactgggtgccacccagcctgtgtgccctccctggggctgaggaggcaggcggctgctagttgtggcccttcctggaaggagaggcctgcagggctcgaccctgtgggtttctgtccccagggagcagactgtgcggcacccaggcccagtggcaccatttcccagacccctcctgttcccgcctcagtcaggtgcagacaagtgggcggtgtccattaaagagcagactcagcgtt

SEQ ID NO: 11494 - DNA, 1869 bp, Homo sapiens
  source 1..1869: mol_type = unassigned DNA
cccgaccagatcccgtggttctgaggaccggccctggaaccctgcgtccttccgacccaccagctccctcgaggatggacttgaggctggatgctttcctcttcccactttttgtcccaacagaagtccctgatctccaggatccctgactggctgtgcagagctggcacagccacactccacgggcttccagcccttcaggcccagctctcccggagagcaccagagtccctttgctccatttacttgcgctcttcagccagcaagtgtttcctaatgtctcacccccagtcccagctttcctgctgcaatttccgcctgttccctcccatttcaggccttaagggagtgtggctgggcttctctcctccccctcactccaaagccgcacttgatacaaggtggaaatcaaagcaccacttctggcttcccagccttgaacttgcccttccctctcaatgtatctggtttcctcagcttccctgtgcagcaagagtgtcactcccctcttgcttttcccaagctccccatgcgcccctctcagcagatctgtcttagaggggccaggtgcagagaaaggcagaaatcctaataatgttcccagcgatcgctgcctgtcgcggagtgctgaagggccaagtgttgatctgagtcctcatcacacgggacttcatttagtctcacgataggcatgccggctgccgctccaggactcccctgtccccaggaccaagatgacgcccaacagcactggcgaggtgcccagccccattcccaagggggctttggggctctccctggccctggcaagcctcatcatcaccgcgaacctgctcctagccctgggcatcgcctgggaccgccgcctgcgcagcccacctgctggctgcttcttcctgagcctactgctggctgggctgctcacgggtctggcattgcccacattgccagggctgtggaaccagagtcgccggggttactggtcctgcctcctcgtctacttggctcccaacttctccttcctctccctgcttgccaacctcttgctggtgcacggggagcgctacatggcagtcctgaggccactccagccccctgggagcattcggctggccctgctcctcacctgggctggtcccctgctctttgccagtctgcccgctctggggtggaaccactggacccctggtgccaactgcagctcccaggctatcttcccagccccctacctgtacctcgaagtctatgggctcctgctgcccgccgtgggtgctgctgccttcctctctgtccgcgtgctggccactgcccaccgccagctgcaggacatctgccggctggagcgggcagtgtgccgcgatgagccctccgccctggcccgggcccttacctggaggcaggcaagggcacaggctggagccatgctgctcttcgggctgtgctgggggccctacgtggccacactgctcctctcagtcctggcctatgagcagcgcccgccactggggcctgggacactgttgtccctcctctccctaggaagtgccagtgcagcggcagtgcccgtagccatggggctgggcgatcagcgctacacagccccctggagggcagccgcccaaaggtgcctgcaggggctgtggggaagagcctcccgggacagtcccggccccagcattgcctaccacccaagcagccaaagcagtgtcgacctggacttgaactaaaggaagggcctctgctgactcctaccagagcatccgtccagctcagccatccagcctgtctctaccgggccccacttctctggatcagagaccctgcctctgtttgaccccgcactgactgaataaagctcctctggccgtt

SEQ ID NO: 11495 - DNA, 1382 bp, Homo sapiens
  source 1..1382: mol_type = unassigned DNA
gagaacccagacgggcagagcctgggtaggagagcctggccccgctgtccccactgggtggagacaccatgcacttggtccacttgtgctcttcagccaggacaccagacatggtccaaaccgctgcagggctggctgcagcaactccctgacactcaggaaggcccaggctgggcaggcaatacctgctcccaacagccatgcatgccggctgccgctccaggactcccctgtccccaggaccaagatgacgcccaacagcactggcgaggtgcccagccccattcccaagggggctttggggctctccctggccctggcaagcctcatcatcaccgcgaacctgctcctagccctgggcatcgcctgggaccgccgcctgcgcagcccacctgctggctgcttcttcctgagcctactgctggctgggctgctcacgggtctggcattgcccacattgccagggctgtggaaccagagtcgccggggttactggtcctgcctcctcgtctacttggctcccaacttctccttcctctccctgcttgccaacctcttgctggtgcacggggagcgctacatggcagtcctgaggccactccagccccctgggagcattcggctggccctgctcctcacctgggctggtcccctgctctttgccagtctgcccgctctggggtggaaccactggacccctggtgccaactgcagctcccaggctatcttcccagccccctacctgtacctcgaagtctatgggctcctgctgcccgccgtgggtgctgctgccttcctctctgtccgcgtgctggccactgcccaccgccagctgcaggacatctgccggctggagcgggcagtgtgccgcgatgagccctccgccctggcccgggcccttacctggaggcaggcaagggcacaggctggagccatgctgctcttcgggctgtgctgggggccctacgtggccacactgctcctctcagtcctggcctatgagcagcgcccgccactggggcctgggacactgttgtccctcctctccctaggaagtgccagtgcagcggcagtgcccgtagccatggggctgggcgatcagcgctacacagccccctggagggcagccgcccaaaggtgcctgcaggggctgtggggaagagcctcccgggacagtcccggccccagcattgcctaccacccaagcagccaaagcagtgtcgacctggacttgaactaaaggaagggcctctgctgactcctaccagagcatccgtccagctcagccatccagcctgtctctaccgggccccacttctctggatcagagaccctgcctctgtttgaccccgcactgactgaataaagctcctctggccgtt

SEQ ID NO: 11496 - DNA, 1465 bp, Homo sapiens
  source 1..1465: mol_type = unassigned DNA
gcctgggtaggagagcctggccccgctgtccccactgggtggagacaccatgcacttggtccacttgtgctcttcagccaggacaccagacatggtccaaaccgctgcagggctggctgcagcaactccctgacactcaggaaggcccaggctgggcaggcaatacctgctcccaacagccatcgaacatgatacagcccacagcctgcgggtctgcgcccctggattaacatgctgccctgccaggaggacacgacctgcagccccatcctaactctggccaccccatcctgcaggcatgccggctgccgctccaggactcccctgtccccaggaccaagatgacgcccaacagcactggcgaggtgcccagccccattcccaagggggctttggggctctccctggccctggcaagcctcatcatcaccgcgaacctgctcctagccctgggcatcgcctgggaccgccgcctgcgcagcccacctgctggctgcttcttcctgagcctactgctggctgggctgctcacgggtctggcattgcccacattgccagggctgtggaaccagagtcgccggggttactggtcctgcctcctcgtctacttggctcccaacttctccttcctctccctgcttgccaacctcttgctggtgcacggggagcgctacatggcagtcctgaggccactccagccccctgggagcattcggctggccctgctcctcacctgggctggtcccctgctctttgccagtctgcccgctctggggtggaaccactggacccctggtgccaactgcagctcccaggctatcttcccagccccctacctgtacctcgaagtctatgggctcctgctgcccgccgtgggtgctgctgccttcctctctgtccgcgtgctggccactgcccaccgccagctgcaggacatctgccggctggagcgggcagtgtgccgcgatgagccctccgccctggcccgggcccttacctggaggcaggcaagggcacaggctggagccatgctgctcttcgggctgtgctgggggccctacgtggccacactgctcctctcagtcctggcctatgagcagcgcccgccactggggcctgggacactgttgtccctcctctccctaggaagtgccagtgcagcggcagtgcccgtagccatggggctgggcgatcagcgctacacagccccctggagggcagccgcccaaaggtgcctgcaggggctgtggggaagagcctcccgggacagtcccggccccagcattgcctaccacccaagcagccaaagcagtgtcgacctggacttgaactaaaggaagggcctctgctgactcctaccagagcatccgtccagctcagccatccagcctgtctctaccgggccccacttctctggatcagagaccctgcctctgtttgaccccgcactgactgaataaagctc

SEQ ID NO: 11497 - DNA, 2003 bp, Homo sapiens
  source 1..2003: mol_type = unassigned DNA
gagaacccagacgggcagagcctgggtaggagagcctggccccgctgtccccactgggtggagacaccatgcacttggtccacttgtgctcttcagccaggacaccagacatggtccaaaccgctgcagggctggctgcagcaactccctgacactcaggaaggcccaggctgggcaggcaatacctgctcccaacagccatctcccaggaaggaccctgttgctagtgtggagcaaagacgagtcaagtttatgggctggaagtcctacccggaggctgctcactgagctgtgatggctacaaggacagatggggggaagggtgcagggtgcccgagacctggcccgctggagcctgtcacctaatggctggctggaagaccactacacaccagccagccctggtccattctctcatttagaggcctccccggtggaggcagggatacacaaaatgctttggggctggatgggcccgcctttcagtctaaacaagagacctcaacacagctgcccagaaaaggcagataccagaaatggataaagctggctgggtggggactgtccgaagggcagccagcagtgagctccggctggttgctaccacacaggacatatgtgttgccagacctgaattttcaatagaaaccaaagatagttttttatataaatgtttaattggcaattaattgaaaaattctgtgtatcagcgaacatgatacagcccacagcctgcgggtctgcgcccctggattaacatgctgccctgccaggaggacacgacctgcagccccatcctaactctggccaccccatcctgcaggcatgccggctgccgctccaggactcccctgtccccaggaccaagatgacgcccaacagcactggcgaggtgcccagccccattcccaagggggctttggggctctccctggccctggcaagcctcatcatcaccgcgaacctgctcctagccctgggcatcgcctgggaccgccgcctgcgcagcccacctgctggctgcttcttcctgagcctactgctggctgggctgctcacgggtctggcattgcccacattgccagggctgtggaaccagagtcgccggggttactggtcctgcctcctcgtctacttggctcccaacttctccttcctctccctgcttgccaacctcttgctggtgcacggggagcgctacatggcagtcctgaggccactccagccccctgggagcattcggctggccctgctcctcacctgggctggtcccctgctctttgccagtctgcccgctctggggtggaaccactggacccctggtgccaactgcagctcccaggctatcttcccagccccctacctgtacctcgaagtctatgggctcctgctgcccgccgtgggtgctgctgccttcctctctgtccgcgtgctggccactgcccaccgccagctgcaggacatctgccggctggagcgggcagtgtgccgcgatgagccctccgccctggcccgggcccttacctggaggcaggcaagggcacaggctggagccatgctgctcttcgggctgtgctgggggccctacgtggccacactgctcctctcagtcctggcctatgagcagcgcccgccactggggcctgggacactgttgtccctcctctccctaggaagtgccagtgcagcggcagtgcccgtagccatggggctgggcgatcagcgctacacagccccctggagggcagccgcccaaaggtgcctgcaggggctgtggggaagagcctcccgggacagtcccggccccagcattgcctaccacccaagcagccaaagcagtgtcgacctggacttgaactaaaggaagggcctctgctgactcctaccagagcatccgtccagctcagccatccagcctgtctctaccgggccccacttctctggatcagagaccctgcctctgtttgaccccgcactgactgaataaagctcctctggccgtt

SEQ ID NO: 11498 - DNA, 2778 bp, Homo sapiens
  source 1..2778: mol_type = unassigned DNA
ggaaaacgacacctagaagtaggagtgagattcgctgaagttcccttctgaggaagacccacccctccgcctggagagccggggctggcggtgcctgaggaccccttcggcctggacagcccacgcgggcttggggggcctcgctctgccctcatggggcggccatcggttcccgaagcggcgagtgaaaattcaaatggccagtagggggcgcactcggaagtggccgccccgcatgaggcagttcagcggccccgagagtccggggagggaggtttattctccgcctgcacgagactgtgaaatccgcaaccatgagcaggagaggcggccctggtggggaagaggccaccaacatctggacggcaggtacccagagagtgagcagctccacgcgggactgtgcacggtggccgacacccgcagggacgcccgccggacgagcacgcggagggccctcgcctccacggatgcaccatgccggtgtgaggagcatctgttcttcccactctctgcagttaacaaacccaacccaaaccaccacaggtgctcctcctggggagtttcctgtctgacaaatgccaggctcacttcaaggagaatcacgcttctttctaaagatggattcaccatttaaaacagagctctgggagcctttcggcaaatcttgaaagctgcacggtgcagagacatggatgtgacttcccaagcccggggcgtgggcctggagatgtacccaggcaccgcgcagcctgcggcccccaacaccacctcccccgagctcaacctgtcccacccgctcctgggcaccgccctggccaatgggacaggtgagctctcggagcaccagcagtacgtgatcggcctgttcctctcgtgcctctacaccatcttcctcttccccatcggctttgtgggcaacatcctgatcctggtggtgaacatcagcttccgcgagaagatgaccatccccgacctgtacttcatcaacctggcggtggcggacctcatcctggtggccgactccctcattgaggtgttcaacctgcacgagcggtactacgacatcgccgtcctgtgcaccttcatgtcgctcttcctgcaggtcaacatgtacagcagcgtcttcttcctcacctggatgagcttcgaccgctacatcgccctggccagggccatgcgctgcagcctgttccgcaccaagcaccacgcccggctgagctgtggcctcatctggatggcatccgtgtcagccacgctggtgcccttcaccgccgtgcacctgcagcacaccgacgaggcctgcttctgtttcgcggatgtccgggaggtgcagtggctcgaggtcacgctgggcttcatcgtgcccttcgccatcatcggcctgtgctactccctcattgtccgggtgctggtcagggcgcaccggcaccgtgggctgcggccccggcggcagaaggcgctccgcatgatcctcgcggtggtgctggtcttcttcgtctgctggctgccggagaacgtcttcatcagcgtgcacctcctgcagcggacgcagcctggggccgctccctgcaagcagtctttccgccatgcccaccccctcacgggccacattgtcaacctcgccgccttctccaacagctgcctaaaccccctcatctacagctttctcggggagaccttcagggacaagctgaggctgtacattgagcagaaaacaaatttgccggccctgaaccgcttctgtcacgctgccctgaaggccgtcattccagacagcaccgagcagtcggatgtgaggttcagcagtgccgtgtagacagccttggccgcataggcccagccagggtgtgactcgggagctgcacacacctgggtggacacaaggcacggccacgtcatgtctctaaactgcggtcagatgtggcttctggctcctcggggcctcgcgagggtcacgcttgcctggtcaccctggggctgcttaggaaacctcacgactggtcaccttgcactcctcacacagaattgctacaatcccaaagcgctcgccccgcagggtccaaaggccagcggtgaccagcctgtcacccagctcctccccgccaaccctgcctgccgctgcacctgcctgccgctgcaggaaacatttctgacaccgtcgaccaggaaagccacacggagaggccactgtgggtgaagcgcctcagttacacaggaaccctaaagcaaatctgccaccgtgggggaactgacgctggagatgcaaggtgctggtgggtctgagctggacgtcgcggtgtgtcctctgtgcccacggtctgagctagctagcgcaccgccgagttaaagaggagaaggaaaacatgctgctctggtgcacgcctgagcgtcctccatcttccaggatggcagcaatggcgctgtgcggcctcaccaggcccacgaggagcagcagcgctcggcccggagcagcaggaaggcccctctgtggagcgcccgccgtctgctccggggtggttcagtcactgcttgttgacatcaacatggcaattgcactcatgtggactgggaccgtgcgagctgccgtgtgggttagtcgggtgccaggacaatgaaatactccagcacctgtggctgacgaatttgtttctacagaaataacagctggggacaactgcggtgatgatgtaaaaaccttcccataaaatgtaagaaaagctgatgaggctggtgacgttcagcctttgtcaataaacctgtcatgtgcggatcctt

SEQ ID NO: 11499 - DNA, 571 bp, Homo sapiens
  source 1..571: mol_type = unassigned DNA
atgtctctaaactgcggtcagatgtggcttctggctcctcggggcctcgcgagggtcacgcttgcctggtcaccctggggctgcttaggaaacctcacgactggtcaccttgcactcctcacacagaattgctacaatcccaaagcgctcgccccgcagggtccaaaggccagcggtgaccagcctgtcacccagctcctccccgccaaccctgcctgccgctgcacctgcctgccgctgcaggaaacatttctgagcgtcctccatcttccaggatggcagcaatggcgctgtgcggcctcaccaggcccacgaggagcagcagcgctcggcccggagcagcaggaaggcccctctgtggagcgcccgccgtctgctccggggtggttcagtcactgcttgttgacatcaacatggcaattgcactcatgtggactgggaccgtgcgagctgccgtgtgggttagtcgggtgccaggacaatgaaatactccagcacctgtggctgacgaatttgtttctacagaaataacagctggggacaactgcggtgatgatgtaaaaaccttccc

SEQ ID NO: 11500 - DNA, 2639 bp, Homo sapiens
  source 1..2639: mol_type = unassigned DNA
aaagccctgtgccaaggggcagactcactggctcagagggaggacgcacccgccagccagccgggaaccttccctcgcgggctcccagggcgggtctcttcctctctctagccctgctcaggcattcggcaggtccagcagaggtacacctcctgcagcgggttccaagtgcacctccagcctgatgggcctgaccaaggaggcttccaggagcacagaaggggctgcaacccaggtacccagagagtgagcagctccacgcgggactgtgcacggtggccgacacccgcagggacgcccgccggacgagcacgcggagggccctcgcctccacggatgcaccatgccggtgtgaggagcatctgttcttcccactctctgcagttaacaaacccaacccaaaccaccacaggtgctcctcctggggagtttcctgtctgacaaatgccaggctcacttcaaggagaatcacgcttctttctaaagatggattcaccatttaaaacagagctctgggagcctttcggcaaatcttgaaagctgcacggtgcagagacatggatgtgacttcccaagcccggggcgtgggcctggagatgtacccaggcaccgcgcagcctgcggcccccaacaccacctcccccgagctcaacctgtcccacccgctcctgggcaccgccctggccaatgggacaggtgagctctcggagcaccagcagtacgtgatcggcctgttcctctcgtgcctctacaccatcttcctcttccccatcggctttgtgggcaacatcctgatcctggtggtgaacatcagcttccgcgagaagatgaccatccccgacctgtacttcatcaacctggcggtggcggacctcatcctggtggccgactccctcattgaggtgttcaacctgcacgagcggtactacgacatcgccgtcctgtgcaccttcatgtcgctcttcctgcaggtcaacatgtacagcagcgtcttcttcctcacctggatgagcttcgaccgctacatcgccctggccagggccatgcgctgcagcctgttccgcaccaagcaccacgcccggctgagctgtggcctcatctggatggcatccgtgtcagccacgctggtgcccttcaccgccgtgcacctgcagcacaccgacgaggcctgcttctgtttcgcggatgtccgggaggtgcagtggctcgaggtcacgctgggcttcatcgtgcccttcgccatcatcggcctgtgctactccctcattgtccgggtgctggtcagggcgcaccggcaccgtgggctgcggccccggcggcagaaggcgctccgcatgatcctcgcggtggtgctggtcttcttcgtctgctggctgccggagaacgtcttcatcagcgtgcacctcctgcagcggacgcagcctggggccgctccctgcaagcagtctttccgccatgcccaccccctcacgggccacattgtcaacctcgccgccttctccaacagctgcctaaaccccctcatctacagctttctcggggagaccttcagggacaagctgaggctgtacattgagcagaaaacaaatttgccggccctgaaccgcttctgtcacgctgccctgaaggccgtcattccagacagcaccgagcagtcggatgtgaggttcagcagtgccgtgtagacagccttggccgcataggcccagccagggtgtgactcgggagctgcacacacctgggtggacacaaggcacggccacgtcatgtctctaaactgcggtcagatgtggcttctggctcctcggggcctcgcgagggtcacgcttgcctggtcaccctggggctgcttaggaaacctcacgactggtcaccttgcactcctcacacagaattgctacaatcccaaagcgctcgccccgcagggtccaaaggccagcggtgaccagcctgtcacccagctcctccccgccaaccctgcctgccgctgcacctgcctgccgctgcaggaaacatttctgacaccgtcgaccaggaaagccacacggagaggccactgtgggtgaagcgcctcagttacacaggaaccctaaagcaaatctgccaccgtgggggaactgacgctggagatgcaaggtgctggtgggtctgagctggacgtcgcggtgtgtcctctgtgcccacggtctgagctagctagcgcaccgccgagttaaagaggagaaggaaaacatgctgctctggtgcacgcctgagcgtcctccatcttccaggatggcagcaatggcgctgtgcggcctcaccaggcccacgaggagcagcagcgctcggcccggagcagcaggaaggcccctctgtggagcgcccgccgtctgctccggggtggttcagtcactgcttgttgacatcaacatggcaattgcactcatgtggactgggaccgtgcgagctgccgtgtgggttagtcgggtgccaggacaatgaaatactccagcacctgtggctgacgaatttgtttctacagaaataacagctggggacaactgcggtgatgatgtaaaaaccttcccataaaatgtaagaaaagctgatgaggctggtgacgttcagcctttgtcaataaacctgtcatgtgcgga

SEQ ID NO: 11501 - DNA, 2971 bp, Homo sapiens
  source 1..2971: mol_type = unassigned DNA
gcattactcatactcagcggacaaaggatcactcagcattcaatctcaccacttcaaaacattacagagggaaaacgacacctagaagtaggagtgagattcgctgaagttcccttctgaggaagacccacccctccgcctggagagccggggctggcggtgcctgaggaccccttcggcctggacagcccacgcgggcttggggggcctcgctctgccctcatggggcggccatcggttcccgaagcggcgagtgaaaattcaaatggccagtagggggcgcactcggaagtggccgccccgcatgaggcagttcagcggccccgagagtccggggagggaggtttattctccgcctgcacgagactgtgaaatccgcaaccatgagcaggagaggcggccctggtggggaagaggccaccaacatctggacggcagccctgctcaggcattcggcaggtccagcagaggtacacctcctgcagcgggttccaagtgcacctccagcctgatgggcctgaccaaggaggcttccaggagcacagaaggggctgcaacccaggtacccagagagtgagcagctccacgcgggactgtgcacggtggccgacacccgcagggacgcccgccggacgagcacgcggagggccctcgcctccacggatgcaccatgccggtgtgaggagcatctgttcttcccactctctgcagttaacaaacccaacccaaaccaccacaggtgctcctcctggggagtttcctgtctgacaaatgccaggctcacttcaaggagaatcacgcttctttctaaagatggattcaccatttaaaacagagctctgggagcctttcggcaaatcttgaaagctgcacggtgcagagacatggatgtgacttcccaagcccggggcgtgggcctggagatgtacccaggcaccgcgcagcctgcggcccccaacaccacctcccccgagctcaacctgtcccacccgctcctgggcaccgccctggccaatgggacaggtgagctctcggagcaccagcagtacgtgatcggcctgttcctctcgtgcctctacaccatcttcctcttccccatcggctttgtgggcaacatcctgatcctggtggtgaacatcagcttccgcgagaagatgaccatccccgacctgtacttcatcaacctggcggtggcggacctcatcctggtggccgactccctcattgaggtgttcaacctgcacgagcggtactacgacatcgccgtcctgtgcaccttcatgtcgctcttcctgcaggtcaacatgtacagcagcgtcttcttcctcacctggatgagcttcgaccgctacatcgccctggccagggccatgcgctgcagcctgttccgcaccaagcaccacgcccggctgagctgtggcctcatctggatggcatccgtgtcagccacgctggtgcccttcaccgccgtgcacctgcagcacaccgacgaggcctgcttctgtttcgcggatgtccgggaggtgcagtggctcgaggtcacgctgggcttcatcgtgcccttcgccatcatcggcctgtgctactccctcattgtccgggtgctggtcagggcgcaccggcaccgtgggctgcggccccggcggcagaaggcgctccgcatgatcctcgcggtggtgctggtcttcttcgtctgctggctgccggagaacgtcttcatcagcgtgcacctcctgcagcggacgcagcctggggccgctccctgcaagcagtctttccgccatgcccaccccctcacgggccacattgtcaacctcgccgccttctccaacagctgcctaaaccccctcatctacagctttctcggggagaccttcagggacaagctgaggctgtacattgagcagaaaacaaatttgccggccctgaaccgcttctgtcacgctgccctgaaggccgtcattccagacagcaccgagcagtcggatgtgaggttcagcagtgccgtgtagacagccttggccgcataggcccagccagggtgtgactcgggagctgcacacacctgggtggacacaaggcacggccacgtcatgtctctaaactgcggtcagatgtggcttctggctcctcggggcctcgcgagggtcacgcttgcctggtcaccctggggctgcttaggaaacctcacgactggtcaccttgcactcctcacacagaattgctacaatcccaaagcgctcgccccgcagggtccaaaggccagcggtgaccagcctgtcacccagctcctccccgccaaccctgcctgccgctgcacctgcctgccgctgcaggaaacatttctgacaccgtcgaccaggaaagccacacggagaggccactgtgggtgaagcgcctcagttacacaggaaccctaaagcaaatctgccaccgtgggggaactgacgctggagatgcaaggtgctggtgggtctgagctggacgtcgcggtgtgtcctctgtgcccacggtctgagctagctagcgcaccgccgagttaaagaggagaaggaaaacatgctgctctggtgcacgcctgagcgtcctccatcttccaggatggcagcaatggcgctgtgcggcctcaccaggcccacgaggagcagcagcgctcggcccggagcagcaggaaggcccctctgtggagcgcccgccgtctgctccggggtggttcagtcactgcttgttgacatcaacatggcaattgcactcatgtggactgggaccgtgcgagctgccgtgtgggttagtcgggtgccaggacaatgaaatactccagcacctgtggctgacgaatttgtttctacagaaataacagctggggacaactgcggtgatgatgtaaaaaccttcccataaaatgtaagaaaagctgatgaggctggtgacgttcagcctttgtcaataaacctgtcatgtgcggatcctt

SEQ ID NO: 11502 - DNA, 1542 bp, Homo sapiens
  source 1..1542: mol_type = unassigned DNA
attccatggtactcggagtcctgggaaccactcatcactgtcgggtgcaggtggacgtcccctcacggtacccagagagtgagcagctccacgcgggactgtgcacggtggccgacacccgcagggacgcccgccggacgagcacgcggagggccctcgcctccacggatgcaccatgccggtgtgaggagcatctgttcttcccactctctgcagttaacaaacccaacccaaaccaccacaggtgctcctcctggggagtttcctgtctgacaaatgccaggctcacttcaaggagaatcacgcttctttctaaagatggattcaccatttaaaacagagctctgggagcctttcggcaaatcttgaaagctgcacggtgcagagacatggatgtgacttcccaagcccggggcgtgggcctggagatgtacccaggcaccgcgcagcctgcggcccccaacaccacctcccccgagctcaacctgtcccacccgctcctgggcaccgccctggccaatgggacaggtgagctctcggagcaccagcagtacgtgatcggcctgttcctctcgtgcctctacaccatcttcctcttccccatcggctttgtgggcaacatcctgatcctggtggtgaacatcagcttccgcgagaagatgaccatccccgacctgtacttcatcaacctggcggtggcggacctcatcctggtggccgactccctcattgaggtgttcaacctgcacgagcggtactacgacatcgccgtcctgtgcaccttcatgtcgctcttcctgcaggtcaacatgtacagcagcgtcttcttcctcacctggatgagcttcgaccgctacatcgccctggccagggccatgcgctgcagcctgttccgcaccaagcaccacgcccggctgagctgtggcctcatctggatggcatccgtgtcagccacgctggtgcccttcaccgccgtgcacctgcagcacaccgacgaggcctgcttctgtttcgcggatgtccgggaggtgcagtggctcgaggtcacgctgggcttcatcgtgcccttcgccatcatcggcctgtgctactccctcattgtccgggtgctggtcagggcgcaccggcaccgtgggctgcggccccggcggcagaaggcgctccgcatgatcctcgcggtggtgctggtcttcttcgtctgctggctgccggagaacgtcttcatcagcgtgcacctcctgcagcggacgcagcctggggccgctccctgcaagcagtctttccgccatgcccaccccctcacgggccacattgtcaacctcgccgccttctccaacagctgcctaaaccccctcatctacagctttctcggggagaccttcagggacaagctgaggctgtacattgagcagaaaacaaatttgccggccctgaaccgcttctgtcacgctgccctgaaggccgtcattccagacagcaccgagcagtcggatgtgaggttcagcagtgccgtgtagacagccttggccgcataggcccagc

SEQ ID NO: 11503 - DNA, 1105 bp, Homo sapiens
  source 1..1105: mol_type = unassigned DNA
gcattactcatactcagcggacaaaggatcactcagcattcaatctcaccacttcaaaacattacagagggaaaacgacacctagaagtaggagtgagattcgctgaagttcccttctgaggaagacccacccctccgcctggagagccggggctggcggtgcctgaggaccccttcggcctggacagcccacgcgggcttggggggcctcgctctgccctcatggggcggccatcggttcccgaagcggcgagtgaaaattcaaatggccagtagggggcgcactcggaagtggccgccccgcatgaggcagttcagcggccccgagagtccggggagggaggtttattctccgcctgcacgagactgtgaaatccgcaaccatgagcaggagaggcggccctggtggggaagaggccaccaacatctggacggcagccctgctcaggcattcggcaggtccagcagaggtacacctcctgcagcgggttccaagtgcacctccagcctgatgggcctgaccaaggaggcttccaggagcacagaaggggctgcaacccaggtacccagagagtgagcagctccacgcgggactgtgcacggtggccgacacccgcagggacgcccgccggacgagcacgcggagggccctcgcctccacggatgcaccatgccggtgtgaggagcatctgttcttcccactctctgcagttaacaaacccaacccaaaccaccacaggtgctcctcctggggagtttcctgtctgacaaatgccaggctcacttcaaggagaatcacgcttctttctaaagatggattcaccatttaaaacagagctctgggagcctttcggcaaatcttgaaagctgcacggtgcagagacatggatgtgacttcccaagcccggggcgtgggcctggagatgtacccaggcaccgcgcagcctgcggcccccaacaccacctcccccgagctcaacctgtcccacccgctcctgggcaccgccctggccaatgggacaggtgagctctcggagcaccagcagtacgtgatcggcctgttcctctcgtgcctctacaccatcttcctcttccccatcggctt

SEQ ID NO: 11504 - DNA, 1900 bp, Homo sapiens
  source 1..1900: mol_type = unassigned DNA
cttcaaggagaatcacgcttctttctaaagatggattcaccatttaaaacagagctctgggagcctttcggcaaatcttgaaagctgcacggtgcagagacatggatgtgacttcccaagcccggggcgtgggcctggagatgtacccaggcaccgcgcagcctgcggcccccaacaccacctcccccgagctcaacctgtcccacccgctcctgggcaccgccctggccaatgggacaggtgagctctcggagcaccagcagtacgtgatcggcctgttcctctcgtgcctctacaccatcttcctcttccccatcggctttgtgggcaacatcctgatcctggtggtgaacatcagcttccgcgagaagatgaccatccccgacctgtacttcatcaacctggcggtggcggacctcatcctggtggccgactccctcattgaggtgttcaacctgcacgagcggtactacgacatcgccgtcctgtgcaccttcatgtcgctcttcctgcaggtcaacatgtacagcagcgtcttcttcctcacctggatgagcttcgaccgctacatcgccctggccagggccatgcgctgcagcctgttccgcaccaagcaccacgcccggctgagctgtggcctcatctggatggcatccgtgtcagccacgctggtgcccttcaccgccgtgcacctgcagcacaccgacgaggcctgcttctgtttcgcggatgtccgggaggtgcagtggctcgaggtcacgctgggcttcatcgtgcccttcgccatcatcggcctgtgctactccctcattgtccgggtgctggtcagggcgcaccggcaccgtgggctgcggccccggcggcagaaggcgctccgcatgatcctcgcggtggtgctggtcttcttcgtctgctggctgccggagaacgtcttcatcagcgtgcacctcctgcagcggacgcagcctggggccgctccctgcaagcagtctttccgccatgcccaccccctcacgcacggccacgtcatgtctctaaactgcggtcagatgtggcttctggctcctcggggcctcgcgagggtcacgcttgcctggtcaccctggggctgcttaggaaacctcacgactggtcaccttgcactcctcacacagaattgctacaatcccaaagcgctcgccccgcagggtccaaaggccagcggtgaccagcctgtcacccagctcctccccgccaaccctgcctgccgctgcacctgcctgccgctgcaggaaacatttctgacaccgtcgaccaggaaagccacacggagaggccactgtgggtgaagcgcctcagttacacaggaaccctaaagcaaatctgccaccgtgggggaactgacgctggagatgcaaggtgctggtgggtctgagctggacgtcgcggtgtgtcctctgtgcccacggtctgagctagctagcgcaccgccgagttaaagaggagaaggaaaacatgctgctctggtgcacgcctgagcgtcctccatcttccaggatggcagcaatggcgctgtgcggcctcaccaggcccacgaggagcagcagcgctcggcccggagcagcaggaaggcccctctgtggagcgcccgccgtctgctccggggtggttcagtcactgcttgttgacatcaacatggcaattgcactcatgtggactgggaccgtgcgagctgccgtgtgggttagtcgggtgccaggacaatgaaatactccagcacctgtggctgacgaatttgtttctacagaaataacagctggggacaactgcggtgatgatgtaaaaaccttcccataaaatgtaagaaaagctgatgaggctggtgacgttcagcctttgtcaataaacctgtcatgtgcgg

SEQ ID NO: 11505 - DNA, 2295 bp, Homo sapiens
  source 1..2295: mol_type = unassigned DNA
aaaccacatttccttttccagggcaataacttaaaatattatgtatttccctttgttgcaaagagaggaaatacttcttcctagactcagggcagctgtgacccgtcctcccagagaaatcattaaaccacaaggattcagacagagcccagagccctgaaaactttggccacgcactttcccgcagcagccacaggcaccggcaacttcagagagccagataaaagtggaatgaggaatgcagccgttctgaacaccaccctccatttcattctggaaccgggaaggtacacccaggcatgacaatagcttctctcctcacagaaatttaactgatttcttcattctccatttagcaaggtcatggaagatttggaggaaacattatttgaagaatttgaaaactattcctatgacctagactattactctctggagtctgatttggaggagaaagtccagctgggagttgttcactgggtctccctggtgttatattgtttggcttttgttctgggaattccaggaaatgccatcgtcatttggttcacggggttcaagtggaagaagacagtcaccactctgtggttcctcaatctagccattgcggatttcatttttcttctctttctgcccctgtacatctcctatgtggccatgaatttccactggccctttggcatctggctgtgcaaagccaattccttcactgcccagttgaacatgtttgccagtgtttttttcctgacagtgatcagcctggaccactatatccacttgatccatcctgtcttatctcatcggcatcgaaccctcaagaactctctgattgtcattatattcatctggcttttggcttctctaattggcggtcctgccctgtacttccgggacactgtggagttcaataatcatactctttgctataacaattttcagaagcatgatcctgacctcactttgatcaggcaccatgttctgacttgggtgaaatttatcattggctatctcttccctttgctaacaatgagtatttgctacttgtgtctcatcttcaaggtgaagaagcgaagcatcctgatctccagtaggcatttctggacaattctggttgtggttgtggcctttgtggtttgctggactccttatcacctgtttagcatttgggagctcaccattcaccacaatagctattcccaccatgtgatgcaggctggaatccccctctccactggtttggcattcctcaatagttgcttgaaccccatcctttatgtcctaattagtaagaagttccaagctcgcttccggtcctcagttgctgagatactcaagtacacactgtgggaagtcagctgttctggcacagtgagtgaacagctcaggaactcagaaaccaagaatctgtgtctcctggaaacagctcaataagttattacttttccacaaatcagtatatggctttttatgtgggtcctctgactgatgctttcagattaaaattgtttccaagatagagagccgactccactttcatagttattgtttctggtcactatataggcatcacatttttgtgtggatatgaaacttaggaaggatcctcttgactccttgtgatgtggcaataaattttttttaaaaaactgaaaatacttaggaaggatccgcataatttttttctgcaacttaaatgaaatgcatcattcttgttaattataccatggtgaattaatcacttttgaagcaatatcagttattttttgaataataacttttctaaagccttaagtcttaatattaaatatatgattagccaggcacggtggctgacacctgtaatcccagcactttgggaggccaaggtggggggattacccgaggtcaggaattcgagaccagcctgaccaacatggagaaaccccgtctctactaaaaatacaaaattagccggtcatggtggtgcatgtctgcaaacccagctactcgggaggctgaagcaggagaatcacttgaacctgggaggcagaggttgtggtgagccaacatcacaccattgcactccagcctgggcaacaagagtaaaactctgtctcaaaaataaataaataaaatagataaataaatatatgattaactaattttaaaaatgttaaaatgtattcttaaattcattttaattttgtacaataacctgctagacacatttttaaaatgcaacatgtgtacttaatttctttatgtaatctatgtatatacatttatgaattaaagtaattgttggttatcttaaaa

SEQ ID NO: 11506 - DNA, 603 bp, Homo sapiens
  source 1..603: mol_type = unassigned DNA
aacagatttacttaaccactggcaaaccacatttccttttccagggcaataacttaaaatattatgtatttccctttgttgcaaagagaggaaatacttcttcctagactcagggcagctgtgacccgtcctcccagagaaatcattaaaccacaaggattcagacagagcccagagccctgaaaactttggccacgcactttcccgcagcagccacaggcaccggcaacttcagagagataaaagtggaatgaggaatgcagccgttctgaacaccaccctccatttcattctggaaccgggaaggtacacccaggcatgacaatagcttctctcctcacagaaatttaactgatttcttcattctccatttagcaaggtcatggaagatttggaggaaacattatttgaagaatttgaaaactattcctatgacctagactattactctctggagtctgatttggaggagaaagtccagctgggagttgttcactgggtctccctggtgttatattgtttggcttttgttctgggaattccaggaaatgccatcgtcatttggttcacggggttcaagtggaagaagacagtcaccactct

SEQ ID NO: 11507 - DNA, 1557 bp, Homo sapiens
  source 1..1557: mol_type = unassigned DNA
attaaaccacaaggattcagacagagcccagagccctgaaaactttggccacgcactttcccgcagcagccacaggcaccggcaacttcagagaggtaattagaacttcggaaatcttagtggaaaagatggagaactaagtcctccgcagactttcccactaagtatcctcaagaatcactttctgcatcgggcaaaacagaattagaagcaagaatctagacaaggcttcgtcctcatttagaagcctttaagaattctctgctttaagtggatgaaaacgtccctgtatggctgggttgccatggttcctcgctgtgacccccagggctactgagcctgccatataaaagtggaatgaggaatgcagccgttctgaacaccaccctccatttcattctggaaccgggaaggtacacccaggcatgacaatagcttctctcctcacagaaatttaactgatttcttcattctccatttagcaaggtcatggaagatttggaggaaacattatttgaagaatttgaaaactattcctatgacctagactattactctctggagtctgatttggaggagaaagtccagctgggagttgttcactgggtctccctggtgttatattgtttggcttttgttctgggaattccaggaaatgccatcgtcatttggttcacggggttcaagtggaagaagacagtcaccactctgtggttcctcaatctagccattgcggatttcatttttcttctctttctgcccctgtacatctcctatgtggccatgaatttccactggccctttggcatctggctgtgcaaagccaattccttcactgcccagttgaacatgtttgccagtgtttttttcctgacagtgatcagcctggaccactatatccacttgatccatcctgtcttatctcatcggcatcgaaccctcaagaactctctgattgtcattatattcatctggcttttggcttctctaattggcggtcctgccctgtacttccgggacactgtggagttcaataatcatactctttgctataacaattttcagaagcatgatcctgacctcactttgatcaggcaccatgttctgacttgggtgaaatttatcattggctatctcttccctttgctaacaatgagtatttgctacttgtgtctcatcttcaaggtgaagaagcgaagcatcctgatctccagtaggcatttctggacaattctggttgtggttgtggcctttgtggtttgctggactccttatcacctgtttagcatttgggagctcaccattcaccacaatagctattcccaccatgtgatgcaggctggaatccccctctccactggtttggcattcctcaatagttgcttgaaccccatcctttatgtcctaattagtaagaagttccaagctcgcttccggtcctcagttgctgagatactcaagtacacactgtgggaagtcagctgttctggcacagtgagtgaacagctcaggaactcagaaaccaagaatctgtgtctcctggaaacagctcaataa

SEQ ID NO: 11508 - DNA, 592 bp, Homo sapiens
  source 1..592: mol_type = unassigned DNA
attcgaagaacattccatctctgctaatttaacttgccttttcataagcaaaagcctacccagacaaaggagggctgggtgacccccatccattaccgattttcagtctgcagcagaacagctagtagcagtggtttccattcaaaaaacaaacttcttacacaaacataggctggtcgaaagaattaatttgtacaccagataaaagtggaatgaggaatgcagccgttctgaacaccaccctccatttcattctggaaccgggaaggtacacccaggcatgacaatagcttctctcctcacagaaatttaactgatttcttcattctccatttagcaaggtcatggaagatttggaggaaacattatttgaagaatttgaaaactattcctatgacctagactattactctctggagtctgatttggaggagaaagtccagctgggagttgttcactgggtctccctggtgttatattgtttggcttttgttctgggaattccaggaaatgccatcgtcatttggttcacggggttcaagtggaagaagacagtcaccactctgtggttcctcaatctagccattgcgga

SEQ ID NO: 11509 - DNA, 830 bp, Homo sapiens
  source 1..830: mol_type = unassigned DNA
attctggaaccgggaaggtacacccaggcatgacaatagcttctctcctcacagaaatttaactgttccctatatcatcgatgaaggaacaggagctgattgtaccaaaacacttatatgatttcttcattctccatttagcaaggtcatggaagatttggaggaaacattatttgaagaatttgaaaactattcctatgacctagactattactctctggagtctgatttggaggagaaagtccagctgggagttgttcactgggtctccctggtgttatattgtttggcttttgttctgggaattccaggaaatgccatcgtcatttggttcacggggttcaagtggaagaagacagtcaccactctgtggttcctcaatctagccattgcggatttcatttttcttctctttctgcccctgtacatctcctatgtggccatgaatttccactggccctttggcatctggctgtgcaaagccaattccttcactgcccagttgaacatgtttgccagtgtttttttcctgacagtgatcagcctggaccactatatccacttgatccatcctgtcttatctcatcggcatcgaaccctcaagaactctctgattgtcattatattcatctggcttttggcttctctaattggcggtcctgccctgtacttccgggacactgtggagttcaataatcatactctttgctataacaattttcagaagcatgatcctgacctcactttgatcaggcaccatgttctgacttgggtgaaatttatcattggctatctcttccctttgctaacaatgagtatttgctacttgt

SEQ ID NO: 11510 - DNA, 572 bp, Homo sapiens
  source 1..572: mol_type = unassigned DNA
gtcatttcaaaagccagataaaagtggaatgaggaatgcagccgttctgaacaccaccctccatttcattctggaaccgggaaggtacacccaggcatgacaatagcttctctcctcacagaaatttaactgatttcttcattctccatttagcaaggtcatggaagatttggaggaaacattatttgaagaatttgaaaactattcctatgacctagactattactctctggagtctgatttggaggagaaagtccagctgggagttgttcactgggtctccctggtgttatattgtttggcttttgttctgggaattccaggaaatgccatcgtcatttggttcacggggttcaagtggaagaagacagtcaccactctgtggttcctcaatctagccattgcggatttcatttttcttctctttctgcccctgtacatctcctatgtggccatgaatttccactggccctttggcatctggctgtgcaaagccaattccttcactgcccagttgaacatgtttgccagtgtttttttcctgacagtgatcagcctggaccactatatcc

SEQ ID NO: 11511 - DNA, 756 bp, Homo sapiens
  source 1..756: mol_type = unassigned DNA
agctagtagcagtggtttccattcaaaaaacaaacttcttacacaaacataggctggtcgaaagaattaatttgtacaataaaagtggaatgaggaatgcagccgttctgaacaccaccctccatttcattctggaaccgggaaggtacacccaggcatgacaatagcttctctcctcacagaaatttaactgatttcttcattctccatttagcaaggtcatggaagatttggaggaaacattatttgaagaatttgaaaactattcctatgacctagactattactctctggagtctgatttggaggagaaagtccagctgggagttgttcactgggtctccctggtgttatattgtttggcttttgttctgggaattccaggaaatgccatcgtcatttggttcacggggttcaagtggaagaagacagtcaccactctgtggttcctcaatctagccattgcggatttcatttttcttctctttctgcccctgtacatctcctatgtggccatgaatttccactggccctttggcatctggctgtgcaaagccaattccttcactgcccagttgaacatgtttgccagtgtttttttcctgacagtgatcagcctggaccactatatccacttgatccatcctgtcttatctcatcggcatcgaaccctcaagaactctctgattgtcattatattcatctggcttttggcttctctaattggcggtcctgccctgtacttccgggacactg

SEQ ID NO: 11512 - DNA, 547 bp, Homo sapiens
  source 1..547: mol_type = unassigned DNA
aaaccacaaggattcagacagagcccagagccctgaaaactttggccacgcactttcccgcagcagccacaggcaccggcaacttcagagaggtaattagaacttcggaaatcttagtggaaaagatggagaactaagtcctccgcagactttcccactaagtatcctcaagaatcactttctgcatcgggcaaaacagaattagaagcaagaatctagacaaggcttcgtcctcatttagaagcctttaagaattctctgctttaagtggatgaaaacgtccctgtatggctgggttgccatggttcctcgctgtgacccccagggctactgagcctgccatccagataaaagtggaatgaggaatgcagccgttctgaacaccaccctccatttcattctggaaccgggaaggtacacccaggcatgacaatagcttctctcctcacagaaatttaactgatttcttcattctccatttagcaaggtcatggaagatttggaggaaacattatttgaagaatttgaaaactattcctatgaccta

SEQ ID NO: 11513 - DNA, 1527 bp, Homo sapiens
  source 1..1527: mol_type = unassigned DNA
atgacgtccacctgcaccaacagcacgcgcgagagtaacagcagccacacgtgcatgcccctctccaaaatgcccatcagcctggcccacggcatcatccgctcaaccgtgctggttatcttcctcgccgcctctttcgtcggcaacatagtgctggcgctagtgttgcagcgcaagccgcagctgctgcaggtgaccaaccgttttatctttaacctcctcgtcaccgacctgctgcagatttcgctcgtggccccctgggtggtggccacctctgtgcctctcttctggcccctcaacagccacttctgcacggccctggttagcctcacccacctgttcgccttcgccagcgtcaacaccattgtcgtggtgtcagtggatcgctacttgtccatcatccaccctctctcctacccgtccaagatgacccagcgccgcggttacctgctcctctatggcacctggattgtggccatcctgcagagcactcctccactctacggctggggccaggctgcctttgatgagcgcaatgctctctgctccatgatctggggggccagccccagctacactattctcagcgtggtgtccttcatcgtcattccactgattgtcatgattgcctgctactccgtggtgttctgtgcagcccggaggcagcatgctctgctgtacaatgtcaagagacacagcttggaagtgcgagtcaaggactgtgtggagaatgaggatgaagagggagcagagaagaaggaggagttccaggatgagagtgagtttcgccgccagcatgaaggtgaggtcaaggccaaggagggcagaatggaagccaaggacggcagcctgaaggccaaggaaggaagcacggggaccagtgagagtagtgtagaggccaggggcagcgaggaggtcagagagagcagcacggtggccagcgacggcagcatggagggtaaggaaggcagcaccaaagttgaggagaacagcatgaaggcagacaagggtcgcacagaggtcaaccagtgcagcattgacttgggtgaagatgacatggagtttggtgaagacgacatcaatttcagtgaggatgacgtcgaggcagtgaacatcccggagagcctcccacccagtcgtcgtaacagcaacagcaaccctcctctgcccaggtgctaccagtgcaaagctgctaaagtgatcttcatcatcattttctcctatgtgctatccctggggccctactgctttttagcagtcctggccgtgtgggtggatgtcgaaacccaggtaccccagtgggtgatcaccataatcatctggcttttcttcctgcagtgctgcatccacccctatgtctatggctacatgcacaagaccattaagaaggaaatccaggacatgctgaagaagttcttctgcaaggaaaagcccccgaaagaagatagccacccagacctgcccggaacagagggtgggactgaaggcaagattgtcccttcctacgattctgctacttttccttga

SEQ ID NO: 11514 - DNA, 3162 bp, Homo sapiens
  source 1..3162: mol_type = unassigned DNA
acaagccttgaaactgtgggtaactttacagttctcagatcggcttctcgcaacaggcagtcagttctcactgggccccttggactcccatttcaaaaatggagaagacagatcacagccactgaccagggaccgtgggaggtgccacgtgatggtgaggcatcatgctagggagctgagctctgaccttcctgctgggtgattctccacctctgggctgctagatctacttcctggatgccgtgaagatcctcatgtatgaaaatgaagtcccaggcaaccatgatttgctgcttagtgttctttctgtccacagaatgttcccactatagatccaagattcacctaaaagctggagataaacttcaaagccctgaagggaaacccaagactggaaggatccaagagaaatgcgaaggaccttgtatttcttcttccaactgcagccagccctgtgctaaggactttcatggagaaataggatttacatgtaatcaaaaaaagtggcaaaaatcagctgaaacatgtacaagcctttctgtggaaaaactctttaaggactcaactggtgcatctcgcctttctgtagcagcaccatctatacctctgcatattctagactttcgagctccagagaccattgagagtgtagctcaaggaatccgtaagaactgcccctttgattatgcctgcatcactgacatggtgaaatcatcagaaacaacatctggaaatattgcatttatagtggagttattaaaaaatatttctacagacttgtctgataatgttactcgagagaaaatgaagagctatagtgaagtggccaaccacatcctcgacacagcagccatttcaaactgggctttcattcccaacaaaaatgccagctcggatttgttgcagtcagtgaatttgtttgccagacaactccacatccacaataattctgagaacattgtgaatgaactcttcattcagacaaaagggtttcacatcaaccataatacctcagagaaaagcctcaatttctccatgagcatgaacaataccacagaagatatcttaggaatggtacagattcccaggcaagagctaaggaagctgtggccaaatgcatcccaagccattagcatagctttcccaaccttgggggctatcctgagagaagcccacttgcaaaatgtgagtcttcccagacaggtaaatggtctggtgctatcagtggttttaccagaaaggttgcaagaaatcatactcaccttcgaaaagatcaataaaacccgcaatgccagagcccagtgtgttggctggcactccaagaaaaggagatgggatgagaaagcgtgccaaatgatgttggatatcaggaacgaagtgaaatgccgctgtaactacaccagtgtggtgatgtctttttccattctcatgtcctccaaatcgatgaccgacaaagttctggactacatcacctgcattgggctcagcgtctcaatcctaagcttggttctttgcctgatcattgaagccacagtgtggtcccgggtggttgtgacggagatatcatacatgcgtcacgtgtgcatcgtgaatatagcagtgtcccttctgactgccaatgtgtggtttatcataggctctcactttaacattaaggcccaggactacaacatgtgtgttgcagtgacatttttcagccactttttctacctctctctgtttttctggatgctcttcaaagcattgctcatcatttatggaatattggtcattttccgtaggatgatgaagtcccgaatgatggtcattggctttgccattggctatgggtgcccattgatcattgctgtcactacagttgctatcacagagccagagaaaggctacatgagacctgaggcctgttggcttaactgggacaataccaaagcccttttagcatttgccatcccggcgttcgtcattgtggctgtaaatctgattgtggttttggttgttgctgtcaacactcagaggccctctattggcagttccaagtctcaggatgtggtcataattatgaggatcagcaaaaatgttgccatcctcactccactgctgggactgacctggggttttggaatagccactctcatagaaggcacttccttgacgttccatataatttttgccttgctcaatgctttccagggttttttcatcctgctgtttggaaccattatggatcacaagataagagatgctttgaggatgaggatgtcttcactgaaggggaaatcgagggcagctgagaatgcatcactaggcccaaccaatggatctaaattaatgaatcgtcaaggatgaaatgctgccccatttctcatggatgtcctgagaccaagaggggagatccaggagaaagaggccatggaaagcaggctggagtgaggaggaatggtcatgcttccttggaagactttctcttcttgtcaggagtgactcccaagctcttggtcggccgaagaaaaactgaggataacatttgctgactgggctttaaggagcatgatttatggaccccttaacctacccgtgccctgcaagaggctggcttcttggtcaatcttgactagattaagagtcaatctgcaagccattttatggtctccctggccagctgggggctgtagggccctgctgggcttggtcgtctttcactcctgaggcctgctctgtggctccatagctcagtcctccatcactctgcgtggatcctgggtactttggacagtgagggttcgatccaattttaggggtagggttgggggtgggagtgggagtgtgggttggcaggaggaagaatgagtctactttggagacaattaagtcatggtacgtttcctaaagatagggaacggaagaaaagcaagagaactgtttaatatgctgattattttagtctattttagaccttgagtaaactaatttagcttctaggatccaagtttccttatttgtgaaacaggaaaaaaaaattcttgtaggtattactgtttgtgtgtttgagtttactgcacatgtttgtgtttgtgtatatgtgtcttttaaaaatactatatataaagaagattctggttgttattttagacataaacgaatatatgtacctttcacaacttg

SEQ ID NO: 11515 - DNA, 3074 bp, Homo sapiens
  source 1..3074: mol_type = unassigned DNA
acaagccttgaaactgtgggtaactttacagttctcagatcggcttctcgcaacaggcagtcagttctcactgggccccttggactcccatttcaaaaatggagaagacagatcacagccactgaccagggaccgtgggaggtgccacgtgatggtgaagatcctcatgtatgaaaatgaagtcccaggcaaccatgatttgctgcttagtgttctttctgtccacagaatgttcccactatagatccaagattcacctaaaagctggagataaacttcaaagccctgaagggaaacccaagactggaaggatccaagagaaatgcgaaggaccttgtatttcttcttccaactgcagccagccctgtgctaaggactttcatggagaaataggatttacatgtaatcaaaaaaagtggcaaaaatcagctgaaacatgtacaagcctttctgtggaaaaactctttaaggactcaactggtgcatctcgcctttctgtagcagcaccatctatacctctgcatattctagactttcgagctccagagaccattgagagtgtagctcaaggaatccgtaagaactgcccctttgattatgcctgcatcactgacatggtgaaatcatcagaaacaacatctggaaatattgcatttatagtggagttattaaaaaatatttctacagacttgtctgataatgttactcgagagaaaatgaagagctatagtgaagtggccaaccacatcctcgacacagcagccatttcaaactgggctttcattcccaacaaaaatgccagctcggatttgttgcagtcagtgaatttgtttgccagacaactccacatccacaataattctgagaacattgtgaatgaactcttcattcagacaaaagggtttcacatcaaccataatacctcagagaaaagcctcaatttctccatgagcatgaacaataccacagaagatatcttaggaatggtacagattcccaggcaagagctaaggaagctgtggccaaatgcatcccaagccattagcatagctttcccaaccttgggggctatcctgagagaagcccacttgcaaaatgtgagtcttcccagacaggtaaatggtctggtgctatcagtggttttaccagaaaggttgcaagaaatcatactcaccttcgaaaagatcaataaaacccgcaatgccagagcccagtgtgttggctggcactccaagaaaaggagatgggatgagaaagcgtgccaaatgatgttggatatcaggaacgaagtgaaatgccgctgtaactacaccagtgtggtgatgtctttttccattctcatgtcctccaaatcgatgaccgacaaagttctggactacatcacctgcattgggctcagcgtctcaatcctaagcttggttctttgcctgatcattgaagccacagtgtggtcccgggtggttgtgacggagatatcatacatgcgtcacgtgtgcatcgtgaatatagcagtgtcccttctgactgccaatgtgtggtttatcataggctctcactttaacattaaggcccaggactacaacatgtgtgttgcagtgacatttttcagccactttttctacctctctctgtttttctggatgctcttcaaagcattgctcatcatttatggaatattggtcattttccgtaggatgatgaagtcccgaatgatggtcattggctttgccattggctatgggtgcccattgatcattgctgtcactacagttgctatcacagagccagagaaaggctacatgagacctgaggcctgttggcttaactgggacaataccaaagcccttttagcatttgccatcccggcgttcgtcattgtggctgtaaatctgattgtggttttggttgttgctgtcaacactcagaggccctctattggcagttccaagtctcaggatgtggtcataattatgaggatcagcaaaaatgttgccatcctcactccactgctgggactgacctggggttttggaatagccactctcatagaaggcacttccttgacgttccatataatttttgccttgctcaatgctttccagggttttttcatcctgctgtttggaaccattatggatcacaagataagagatgctttgaggatgaggatgtcttcactgaaggggaaatcgagggcagctgagaatgcatcactaggcccaaccaatggatctaaattaatgaatcgtcaaggatgaaatgctgccccatttctcatggatgtcctgagaccaagaggggagatccaggagaaagaggccatggaaagcaggctggagtgaggaggaatggtcatgcttccttggaagactttctcttcttgtcaggagtgactcccaagctcttggtcggccgaagaaaaactgaggataacatttgctgactgggctttaaggagcatgatttatggaccccttaacctacccgtgccctgcaagaggctggcttcttggtcaatcttgactagattaagagtcaatctgcaagccattttatggtctccctggccagctgggggctgtagggccctgctgggcttggtcgtctttcactcctgaggcctgctctgtggctccatagctcagtcctccatcactctgcgtggatcctgggtactttggacagtgagggttcgatccaattttaggggtagggttgggggtgggagtgggagtgtgggttggcaggaggaagaatgagtctactttggagacaattaagtcatggtacgtttcctaaagatagggaacggaagaaaagcaagagaactgtttaatatgctgattattttagtctattttagaccttgagtaaactaatttagcttctaggatccaagtttccttatttgtgaaacaggaaaaaaaaattcttgtaggtattactgtttgtgtgtttgagtttactgcacatgtttgtgtttgtgtatatgtgtcttttaaaaatactatatataaagaagattctggttgttattttagacataaacgaatatatgtacctttcacaacttg

SEQ ID NO: 11516 - DNA, 3075 bp, Homo sapiens
  source 1..3075: mol_type = unassigned DNA
atgtacactggtccctgtaaggtcctccacctctcatctgggcttttaccaaatagcggtaggtttggtattgttctcagcgatgaataccaggttgtaacatctttatggtgccagctgtatacaacccatgcacctcaacaggcctctggaatgcttcttctgaattatcttgtcatcccatcaaaggcccaagttaacaaaccaggctacatccctaacctaggagaatgttcccactatagatccaagattcacctaaaagctggagataaacttcaaagccctgaagggaaacccaagactggaaggatccaagagaaatgcgaaggaccttgtatttcttcttccaactgcagccagccctgtgctaaggactttcatggagaaataggatttacatgtaatcaaaaaaagtggcaaaaatcagctgaaacatgtacaagcctttctgtggaaaaactctttaaggactcaactggtgcatctcgcctttctgtagcagcaccatctatacctctgcatattctagactttcgagctccagagaccattgagagtgtagctcaaggaatccgtaagaactgcccctttgattatgcctgcatcactgacatggtgaaatcatcagaaacaacatctggaaatattgcatttatagtggagttattaaaaaatatttctacagacttgtctgataatgttactcgagagaaaatgaagagctatagtgaagtggccaaccacatcctcgacacagcagccatttcaaactgggctttcattcccaacaaaaatgccagctcggatttgttgcagtcagtgaatttgtttgccagacaactccacatccacaataattctgagaacattgtgaatgaactcttcattcagacaaaagggtttcacatcaaccataatacctcagagaaaagcctcaatttctccatgagcatgaacaataccacagaagatatcttaggaatggtacagattcccaggcaagagctaaggaagctgtggccaaatgcatcccaagccattagcatagctttcccaaccttgggggctatcctgagagaagcccacttgcaaaatgtgagtcttcccagacaggtaaatggtctggtgctatcagtggttttaccagaaaggttgcaagaaatcatactcaccttcgaaaagatcaataaaacccgcaatgccagagcccagtgtgttggctggcactccaagaaaaggagatgggatgagaaagcgtgccaaatgatgttggatatcaggaacgaagtgaaatgccgctgtaactacaccagtgtggtgatgtctttttccattctcatgtcctccaaatcgatgaccgacaaagttctggactacatcacctgcattgggctcagcgtctcaatcctaagcttggttctttgcctgatcattgaagccacagtgtggtcccgggtggttgtgacggagatatcatacatgcgtcacgtgtgcatcgtgaatatagcagtgtcccttctgactgccaatgtgtggtttatcataggctctcactttaacattaaggcccaggactacaacatgtgtgttgcagtgacatttttcagccactttttctacctctctctgtttttctggatgctcttcaaagcattgctcatcatttatggaatattggtcattttccgtaggatgatgaagtcccgaatgatggtcattggctttgccattggctatgggtgcccattgatcattgctgtcactacagttgctatcacagagccagagaaaggctacatgagacctgaggcctgttggcttaactgggacaataccaaagcccttttagcatttgccatcccggcgttcgtcattgtggctgtaaatctgattgtggttttggttgttgctgtcaacactcagaggccctctattggcagttccaagtctcaggatgtggtcataattatgaggatcagcaaaaatgttgccatcctcactccactgctgggactgacctggggttttggaatagccactctcatagaaggcacttccttgacgttccatataatttttgccttgctcaatgctttccagggttttttcatcctgctgtttggaaccattatggatcacaagataagagatgctttgaggatgaggatgtcttcactgaaggggaaatcgagggcagctgagaatgcatcactaggcccaaccaatggatctaaattaatgaatcgtcaaggatgaaatgctgccccatttctcatggatgtcctgagaccaagaggggagatccaggagaaagaggccatggaaagcaggctggagtgaggaggaatggtcatgcttccttggaagactttctcttcttgtcaggagtgactcccaagctcttggtcggccgaagaaaaactgaggataacatttgctgactgggctttaaggagcatgatttatggaccccttaacctacccgtgccctgcaagaggctggcttcttggtcaatcttgactagattaagagtcaatctgcaagccattttatggtctccctggccagctgggggctgtagggccctgctgggcttggtcgtctttcactcctgaggcctgctctgtggctccatagctcagtcctccatcactctgcgtggatcctgggtactttggacagtgagggttcgatccaattttaggggtagggttgggggtgggagtgggagtgtgggttggcaggaggaagaatgagtctactttggagacaattaagtcatggtacgtttcctaaagatagggaacggaagaaaagcaagagaactgtttaatatgctgattattttagtctattttagaccttgagtaaactaatttagcttctaggatccaagtttccttatttgtgaaacaggaaaaaaaaattcttgtaggtattactgtttgtgtgtttgagtttactgcacatgtttgtgtttgtgtatatgtgtcttttaaaaatactatatataaagaagattctggttgttattttagacataaacgaatatatgtacctttcacaacttg

SEQ ID NO: 11517 - DNA, 1981 bp, Homo sapiens
  source 1..1981: mol_type = unassigned DNA
ggaaataggcgatttaaatattccatcgaggatggcggcccctggctcgagacctgccgctgccgcgtggttttctcggcagcagcccagatgtcaaacagttgttcgttttcagcatgcaagatgtgattttccaatgtgcattcccagcgctgttgcaaacagaccgccgcgagtccgtgtgtgcctgcctcgctcacgctggtgttttgaagtcctaccctgtgttttccccaatgccaaacggcatttttgttgtggggtttaaaccacagagactttggcttttgtttcatttcccaacagttcctcattcccgaagcttgtggcatttggtactggtatctgagcaggggctggctttctgtttgtctgtgtgttttttgcatgatcttggattgtcaccctgctgtatttaaacattaaaaagcctgtcttttcgttgaagaggacaggggttaaaatgaatgaagacctgaaggtcaatttaagcgggctgcctcgggattatttagatgccgctgctgcggagaacatctcggctgctgtctcctcccgggttcctgccgtagagccagagcctgagctcgtagtcaacccctgggacattgtcttgtgtacctcgggaaccctcatctcctgtgaaaatgccattgtggtccttatcatcttccacaaccccagcctgcgagcacccatgttcctgctaataggcagcctggctcttgcagacctgctggccggcattggactcatcaccaattttgtttttgcctacctgcttcagtcagaagccaccaagctggtcacgatcggcctcattgtcgcctctttctctgcctctgtctgcagcttgctggctatcactgttgaccgctacctctcactgtactacgctctgacgtaccattcggagaggacggtcacgtttacctatgtcatgctcgtcatgctctgggggacctccatctgcctggggctgctgcccgtcatgggctggaactgcctccgagacgagtccacctgcagcgtggtcagaccgctcaccaagaacaacgcggccatcctctcggtgtccttcctcttcatgtttgcgctcatgcttcagctctacatccagatctgtaagattgtgatgaggcacgcccatcagatagccctgcagcaccacttcctggccacgtcgcactatgtgaccacccggaaaggggtctccaccctggctatcatcctggggacgtttgctgcttgctggatgcctttcaccctctattccttgatagcggattacacctacccctccatctatacctacgccaccctcctgcccgccacctacaattccatcatcaaccctgtcatatatgctttcagaaaccaagagatccagaaagcgctctgtctcatttgctgcggctgcatcccgtccagtctcgcccagagagcgcgctcgcccagtgatgtgtagcacccttgcacccaggaggactctgcatttaccaagcacttccactgcctggccaaggtttgagatgcttcccttgaattccttgcattggattccctctcaagccacaggagcacttagcattcgtgaaacaatgacatcgttcagatgagttaagtgattgaagtgaaaataatgttaccagtgttttcaccattaaaaaaaattgttgagctctccactcaacattattttgttttgcttgggggcaagggtttccttttatactttgtttggagggctgactgggggtaggaaaggaagggatatgatacgcccatgatgttattagaagtaaatgagtttcagagtttttacctggactttaaaataaatttgagtgattgaggaaaattgagaaagacttactttttccagactattttttttttttacatgatggtagattttttaatgctgcatgtatgtaacagaatatgacccctttcaatccaatacaaatagtttacataa

SEQ ID NO: 11518 - DNA, 4846 bp, Homo sapiens
  source 1..4846: mol_type = unassigned DNA
aaagctgggcgcgcgagccgaggctgctgctcacctgcagccgcgccgctcacctgccgcggagtgcgcgccccgcgccctcccggcccgctccggagcccggccgccccccccttgccacagcgggcaactgcgccgacatgcgacacgagtagcccacgcgcttcggaagcaccggaggagccccctcggcctgggcgagccaagaggacaggggttaaaatgaatgaagacctgaaggtcaatttaagcgggctgcctcgggattatttagatgccgctgctgcggagaacatctcggctgctgtctcctcccgggttcctgccgtagagccagagcctgagctcgtagtcaacccctgggacattgtcttgtgtacctcgggaaccctcatctcctgtgaaaatgccattgtggtccttatcatcttccacaaccccagcctgcgagcacccatgttcctgctaataggcagcctggctcttgcagacctgctggccggcattggactcatcaccaattttgtttttgcctacctgcttcagtcagaagccaccaagctggtcacgatcggcctcattgtcgcctctttctctgcctctgtctgcagcttgctggctatcactgttgaccgctacctctcactgtactacgctctgacgtaccattcggagaggacggtcacgtttacctatgtcatgctcgtcatgctctgggggacctccatctgcctggggctgctgcccgtcatgggctggaactgcctccgagacgagtccacctgcagcgtggtcagaccgctcaccaagaacaacgcggccatcctctcggtgtccttcctcttcatgtttgcgctcatgcttcagctctacatccagatctgtaagattgtgatgaggcacgcccatcagatagccctgcagcaccacttcctggccacgtcgcactatgtgaccacccggaaaggggtctccaccctggctatcatcctggggacgtttgctgcttgctggatgcctttcaccctctattccttgatagcggattacacctacccctccatctatacctacgccaccctcctgcccgccacctacaattccatcatcaaccctgtcatatatgctttcagaaaccaagagatccagaaagcgctctgtctcatttgctgcggctgcatcccgtccagtctcgcccagagagcgcgctcgcccagtgatgtgtagcacccttgcacccaggaggactctgcatttaccaagcacttccactgcctggccaaggtttgagatgcttcccttgaattccttgcattggattccctctcaagccacaggagcacttagcattcgtgaaacaatgacatcgttcagatgagttaagtgattgaagtgaaaataatgttaccagtgttttcaccattaaaaaaaattgttgagctctccactcaacattattttgttttgcttgggggcaagggtttccttttatactttgtttggagggctgactgggggtaggaaaggaagggatatgatacgcccatgatgttattagaagtaaatgagtttcagagtttttacctggactttaaaataaatttgagtgattgaggaaaattgagaaagacttactttttccagactattttttttttttacatgatggtagattttttaatgctgcatgtatgtaacagaatatgacccctttcaatccaatacaaatagtttacataattgtgtttggaagggacctgattttgctaacatgaactcagtaatgtcaccgacactgaaaccgtgaacccattcttatccattctttctttcctttcggcaattactgttcacgagaattccttcggtatttctataaatgttgcaactccttctgcatggtcgactgtgttagctagaccacttgtttcaaatgttgccatgtcaatctagattccaacgggtcatttttcaatatagttttccaatatgtactttctaaaatgaatcctgaagtaggttttgatcttcatatgaagtaggattgattagatccaccattgtagtttcttaagctattgtctgattgttttcagaaaacaaaaggaaaaaatattagcaattgagagtagattaaatttattttaatatattctgaaaaaaactaatgtgacattatcatgaaatgaaaaaaatcacctttcctctctctctgagaatatactaatggttattcttgattgagataattagaataaatattataggccaagtttttctggttcatactgtctgtggtgcataatgcatttgaaacaggcagtcccctattttaatgattaggtttgtttgtcagtgcacagcgtccatctatgactgtgacatataccagctatatcctgtaaggtcataaacagaatgaccattggctgttgatgaaaagttaagtttgaaatcttttaactccttttcaccaaaaaccaatttatacacaataaaaatcacattgcctgttttcagagaacaagaatgtagtcaggaaattgcaaagaagaattcactttaaacacattgtaaaatcgatgtgtctcaggtttcttttctgttcatgcagacaaatgtagacgcaggtaccttccctccatttgcaatggatttatagttatgtctatataatcagtggaaaaaattcttggcagcacattaattgagcccattcagatggcagcaaaagcagtatttcagggtcattggggaatcatttgtaataaattaacctcatcggtttgtcccagatgtgatgcccagggtgctctcaagaccattctgggagcctgcatgctgatgccttctctccagagcatcttctaatgtagcacacgtgtgaaaaaatcctctacttgaatctgtgtctcctccctgaggttacttatggaagcaggagagggactgaaatacttaagaagtgggaaagaattttcaatacataccactgtatgatcaatctaataaaactgatgcctttaaaacatttcttttgaacatttgatggagttagtaggttgaacatgatgagtctgttcgtttttaattaattaaaattgaatagcaccaccataggagacttgacaaaggtaagttggttttgagaggggctaggaaatatccgtaatgaggttttaaaggaataaatgatgattttataaaaatagtggctccatttgcatatctccaatagtcagaattataaagagaataatatgtacttgttgtgaccacatgtgtgccaggccccatgctgcgtgttttactataatcacaaaactactacttttataggtgagaaaactaagactaagagaggcgaggataaaaaatgtgcccgaggccacaaagcacaaggatagagtcagaatttgaagccagcttttccaaagtctaagtcttgctccttccctgtaccttgcaagctttcatccctcagtggataccagggctgaggaaactgatttgtaacacgttcctgtcacagagttttggctctacatttaagacataaaacttggcctggcgcagtggctcacgcctgtaatcccagcactttggggggccaaggcaggtggatcacctgaggtcaggagttcgaaaccagcctgaccaatatggcaaaaccctgtctctactaaaaataaaatttagccgggcgtggtggcgggtgcctgtaatcccagctactcaggaggctgaggcaggagaactgcttgaagacaggaggcagaggtagcagtgaacaaagatcgcaccactgcactccagcctgggtgacagagcaagactccatctcaaaaaaaaaaggacataaaatttcctgtttaaagttacactagttacgtggttgcttttggcccatgtttttaaaacatatagtttcagctaagagatttttcagttcaactaacaacatgcctttaccgtttaaattgtgaaaaatgttggatatttatgtggttttctacaaggtttcttttttcctgtggagctaattatttttaaatgtgcacacatctcaatgtacatatgtgtatgtatgtatttatgcatacgtatacccaataatattaactttgcaacaggaccaaagacctcatggaaaactgtcttatttccaacagtcctgaggtagcagataatcttttactccacataattaaaatttctagctaccaaggaattgatatttttccagtagaaacagttatccttgtaactaggacagttccattactttaccagaatcctgaattagtcaaaactagtcatcgaagttatgactatctagggttttgtttccttttattcctttaactctgtatttctttctatcagtgaagtttgtttttaaaggtacctggggcagggaagcagggtggagatagagcccctccttgcctggagcctacagtaaggagccaggttcaggaggagtggattccttggttgacttggccatgcagaaatagtcttagactcccccaggatttaaaataggattgaaacaagaagtttaaaagagcagaggaggaatagagatacttagtgccaataaaaatatcatggagacttcttcggctttttaaaaaaaatgcttaatccattattaaaataatgattgactttattttatagtaatatgtgataatatgaagttaggatgacttgccatttcagatttaaaatacatattaattaagtgactactatgttgtgattttgaataatgtttaagtttctatattgattgtatgcctggtataataaaggaaaagactgccttattgtccccttt

SEQ ID NO: 11519 - DNA, 3837 bp, Homo sapiens
  source 1..3837: mol_type = unassigned DNA
atgcgaggccacgggaaccactcgcggctgaaatccagatgtgcttctctgggcaacgtccatcaccaccaggcacagatggcgcacggtgcacactgccgagggggccggacaccacagtcaccagacagccggggcccaaccgctgggggccacacccggggcagatggacgtaccggcccatcgaggccctcatcaacgtcagctttcccggagcaaagggtgggagaacggccgagggcgagccctcatgggcgtgggtcttcagaagtggctatttgcagagacaggctcttcctgggcttcccgtctccacccgagtggctgcctgctggtggcaacaccatccaggcagggactcagggttcttgggacctggatttattgacctgctcagagaggagcccagcggccgtgcagatgggaaggcagctgctcagaaaacagggcgtctttatttgttcccgactttcctaggcaacaaattaccagaggccgccgactcgtttggggaaattgcttctgggaacagtgttatttttacctccgtcttgcaatcctctcacccacctggcaccccaccgcccagcgcacgcaagccaagtcccggagctgccatgctcgtctgtgaggaaacgctggagctgggtgcccagggctgctgggggtccacgagcccccggggccaggccgtgagcttggtcggtgggcccacggccggaggctccaggctgggaggggctggctgcaccatgggcctgctcatggccctccaggccagacgccccagggacggcacctgggctgaccctcgaagatgctccagggctgtagagggctcgggcctcaccagggctgcccttgtgagtccagggccatcgggggtggaggaggacaccaggagggaaggctgcgtgcttgtgggctcctggaggtcgtccacccacagaagccgtgttctgattatcaacacgccctctggcaggaccccctggagccagggctccctcggcagcaccgggcgctacaaccagacccgggcaccaggcagccagcagcaggggctgtgctcggatgcagctctacacgaggattttgtgccggagcctactcctgccttctttcaataccctccacaagccttcagcaaaaccaaggttcgcgacttggggaggggaggcctttatgccttttccaaggaggagaaggtatctgaggcccagcgggtagaggcctacgagacccacggccttggcctgagtacaggccgacagaaccctgtgccgtccccctgtaagcctggatgcgtgtgccagggccttgcgctggacgcagaggcctggccgaggcaccctggacgcaggccctgtgcggccaaggaggcctgcctgggcccacctggctgcagcggggagctgagcctccctgaggaggaaggaatcgcacctggggcagcaacagcagctcctgcctgggtccctcatggccgcgtgagccgcttcctcactgtaaagctcttcacctatgtaactatgtatcaatgtaaacaggaacgtatcctccgcctctgcatctctggtgaatccgggcgatacgtgcggcgctcacgcttccgcaactttgcagcgctcatggtgagtacgggggtcccgggggtcctgcagctgggggctaggccgctgcgggggggcggccacccgtatggggactcccaggctggaaaagttgtggaatggcgagctggtgaccgggcttccgggctcagtgccggggaaagaaggttcctcagccagtcggagctgcagacctggccccggacacctcactgtgtaggaaagaaggttcctcagccagttggagctgcagacctagccccggacacctcactgtgcaggaaagaaggttcctcagccagtcggagctgcagacctggccccggacacctcacccgcagggaggaagattccttcaggcagctggcattccccaggtttgaagaggtcactttcccacctctcactgctgcagaaagagcaccctctgtccacggtggacactctctagccagccagggcctcgtcttggctggacggacaagaagtgtggcctcaggagggaagcaggagctctcgggcccgctggctgcctgcatcccgacacaggatctgaagacagtgctctccctgccccgctacccaggggagttcctgcaccccgtggtgtacgcgtgcacggccgtcatgctgctctgcctcctggcctccttcgtcacctacatcgtgcaccagagcgccatccgcatcagccgcaagggccggcacacgctcctgaatttctgcttccacgcggccctgaccttcactgtgttcgccggcggcatcaatcgcaccaagtaccccatcctgtgccaggcggtgggcatcgtgctgcactattctacactgtccaccatgctgtggataggagtgaccgccaggaacatctacaagcaggtgaccaagaaggcccctctgtgcctggacacagaccagccaccgtaccccaggcagcccctgctcaggttttacctcgtcagcggaggggtcccctttatcatctgtggggtcacggctgccacgaacatcaggaattacgggacagaggacgaggacacggcctgctggatggcctgggagcccagcctgggcgccttctacggcccagccgccatcatcaccctggtcacctgtgtgtacttcctgggcacctacgtgcagctgcggcgccacccagggcgcaggtacgagctgcgcacacagcccgaggagcagcggcggctggcgacacccgagggcggccgtgggatccggccaggcaccccacccgcacacgatgcccccggcgcctccgtgctgcagaacgagcactcattccaggcacagctgcgcgccgccgccttcacgctgttcctgttcacggccacgtgggccttcggggcgctggcggtgtcacagggccacttcctggacatggtcttcagctgcctgtacggcgccttctgcgtgaccctgggactcttcgtgctcatccaccactgcgccaagcgtgaggacgtgtggcagtgctggtgggcatgctgcccgccccgcaaggacgcccaccccgcacttgacgccaacggggccgcgctgggccgcgccgcctgcctgcactcgccgggactgggccagccacggggcttcgcgcacccaccgggcccctgcaagatgaccaacctgcaggccgcgcagggccacgccagttgcctgtcaccggccaccccgtgctgcgccaagatgcactgcgagccactgacggcggacgaggcgcacgtgcacctgcaggaggagggcgccttcgggcacgacccccacctgcacgggtgccttcagggcagaactaagccgccctactttagccggcacccagcagaggagcccgagtacgcctaccacatcccatccagcctggatggcagcccccgcagctcgcgcacagacagcccccccagctctctggatggcccggcggggacacacacgctggcctgctgcacccagggcgaccccttccccatggtcacccagcccgagggcagtgatgggagccctgccctctacagctgccccacgcagccgggcagggaggcagcgctcgggcccggccacttggagatgctgcggaggacacagtccctgccctttggtggccccagccagaacgggctgcccaagggtaaattgctagaaggcctgccgtttggcaccgacgggaccggcaacatccgaacgggaccctggaaaaacgaaactactgtg

SEQ ID NO: 11520 - DNA, 3441 bp, Homo sapiens
  source 1..3441: mol_type = unassigned DNA
cccgtggggggctcatcctacccacagtaagagcatcctggcgtgaccccactgaggacttcacctcctctcccttggtggacacctatccaggtgggcatcgtgctgcactattctacactgtccaccatgctgtggataggagtgaccgccaggaacatctacaagcaggtgaccaagaaggcccctctgtgcctggacacagaccagccaccgtaccccaggcagcccctgctcagcaggttttacctcgtcagcggaggggtcccctttatcatctgtggggtcacggctgccacgaacatcaggaattacgggacagaggacgaggacacggcgtactgctggatggcctgggagcccagcctgggcgccttctacggcccagccgccatcatcaccctggtcacctgtgtgtacttcctgggcacctacgtgcagctgcggcgccacccagggcgcaggtacgagctgcgcacacagcccgaggagcagcggcggctggcgacacccgagggcggccgtgggatccggccaggcaccccacccgcacacgatgcccccggcgcctccgtgctgcagaacgagcactcattccaggcacagctgcgcgccgccgccttcacgctgttcctgttcacggccacgtgggccttcggggcgctggcggtgtcacagggccacttcctggacatggtcttcagctgcctgtacggcgccttctgcgtgaccctgggactcttcgtgctcatccaccactgcgccaagcgtgaggacgtgtggcagtgctggtgggcatgctgcccgccccgcaaggacgcccaccccgcacttgacgccaacggggccgcgctgggccgcgccgcctgcctgcactcgccgggactgggccagccacggggcttcgcgcacccaccgggcccctgcaagatgaccaacctgcaggccgcgcagggccacgccagttgcctgtcaccggccaccccgtgctgcgccaagatgcactgcgagccactgacggcggacgaggcgcacgtgcacctgcaggaggagggcgccttcgggcacgacccccacctgcacgggtgccttcagggcagaactaagccgccctactttagccggcacccagcagaggagcccgagtacgcctaccacatcccatccagcctggatggcagcccccgcagctcgcgcacagacagcccccccagctctctggatggcccggcggggacacacacgctggcctgctgcacccagggcgaccccttccccatggtcacccagcccgagggcagtgatgggagccctgccctctacagctgccccacgcagccgggcagggaggcagcgctcgggcccggccacttggagatgctgcggaggacacagtccctgccctttggtggccccagccagaacgggctgcccaagggtaaattgctagaaggcctgccgtttggcaccgacgggaccggcaacatccgaacgggaccctggaaaaacgaaactactgtgtagatgggggcagaggacacggtgttcctggaggagcttcagagcagagtggggggcccatctgccacatgaggtcactgggggtaccgaagtgaccccgcctttcagaagccgttcacacccctgccccttccttgtgatcacacccctgccccttccttgtgatcacacccctgccccttccttgtgatcacacccctgccccttccttgtgaaagacctcagcggggaaacgctccgggccacgcccactccccttatcccaattccgcgtgctggtcccgcacacggtcatccggtttctgtcctgtggtctccagtcctggggcaccctagaggcagagcaggggattccatcaaaggacccactgagaccccagcatggccctgcccgagatgccctgctgcccacggagtcctggcttcccctggtgtggccgggcagggccgagatcgcaggagggggctgccctgacctttcccagtgttcaatgtgtgtgtcttgcgttctactccgggggtggcggcggcaggtctgtccccagcattctcgctctgggcagaaccctcgggaccctccgctgtcgtgtgtctgagccacccctgcagcttcacagggcccctgcacacctctgcccactcagtgtgccctgtcagccctgtccttgtcgtagccccagccctgcagggctgagagcaccacagatgctgggggctgctctggactttggggatggctgtcagcctcagagggccaatggggggctttcacgggcccaaggcttgggaaaatgcccagacatcctttagtgaagactcgacttccaaaaccagccaccgctgggactggattccactccagtataggcacttagcaacacgaaggtttattccaaaaagaaaaggggctgacagacgggagattctcatggacaaaatccctttccctttttctcgtctccatgaacatctgggtaccaagccctgactcaaaggacagatgtggatgacagcaagacttctgtgaaagcaagtggcccgtccctaggtgggagggagtccagagggtcatgggtgtgaaactgtgcacagctttccctccctccctcttcctccttgtctgtgacacatgtgcacccacacacacacacacaaacacatgtgcatatcacacacatgcacacacacaaacacatgtgcatatcacacacgcgcacacacccaaacacgtgcatatcacacacatgcacacacacaaacacgtgcatatcacacacatgcacacaaacgtgcatatcacacacacgcacacacacccaaacacgtgcatatcacacacacgcacacacacaaacacgtgcatatcacacacaaacacacgtgcacacatacttaacacacacttgcacctgctgtgcacatgtgcacacacacgtagtagtgtgttttccagccacccacacactgggtttgcattggagattgtttcaccctgcaaacgtcaacgtcagcagactcgtcggtgcgctgtgctatccggttgggaggtctcaccaggagcagagcctccctaacgtgcacctccgagaagaggggtgtcggggagtgttcccagcacctgctcggtggaagggctctccggagactggcactcagtatctgagtatgaggagcctcacttcccggggtgtcggtaaacttgaccgtgactcagtaacccacagcgtgctcctcccagcaaaccccgtgtgtccttacaggtcgaccagacgggccgtcggaggaccaccaggtggctctgcctctgcctcaccttctcacctgcttccatagctgatgtgaacccgaatccccacgctgtgctgtgtacgcactgtaggtgcagaaccgtccacacaaaaatacagtcttggcattgtt

SEQ ID NO: 11521 - DNA, 4283 bp, Homo sapiens
  source 1..4283: mol_type = unassigned DNA
gtcgccgcgggaggtgcgcgcagaggcggcggcgctgctggccgggctgggccgctcgtgcgcggggctgtgactcaccggccggcgccgcagccccgcaatctgttgataactcggtcccagctcggccgctgccctcgcgaatggagagcgggtccccggcggggggagcgcagcgcgtctgtctccgggagcgcggcccggccgccccggcagccgcttcggccacagcagatgggagcagctcccggactgcgcccgccccgccgcggtcaccctgaggccaggggcccgggagcgcgacctcctggccgccgtctgggactttgaccttccagaggccatggaggctggcggggagcagggcgccacctgatcgcctccccctggacgcctcctccagcggcgctcacgcttccgcaactttgcagcgctcatggatctgaagacagtgctctccctgccccgctacccaggggagttcctgcaccccgtggtgtacgcgtgcacggccgtcatgctgctctgcctcctggcctccttcgtcacctacatcgtgcaccagagcgccatccgcatcagccgcaagggccggcacacgctcctgaatttctgcttccacgcggccctgaccttcactgtgttcgccggcggcatcaatcgcaccaagtaccccatcctgtgccaggcggtgggcatcgtgctgcactattctacactgtccaccatgctgtggataggagtgaccgccaggaacatctacaagcaggtgaccaagaaggcccctctgtgcctggacacagaccagccaccgtaccccaggcagcccctgctcaggttttacctcgtcagcggaggggtcccctttatcatctgtggggtcacggctgccacgaacatcaggaattacgggacagaggacgaggacacggcgtactgctggatggcctgggagcccagcctgggcgccttctacggcccagccgccatcatcaccctggtcacctgtgtgtacttcctgggcacctacgtgcagctgcggcgccacccagggcgcaggtacgagctgcgcacacagcccgaggagcagcggcggctggcgacacccgagggcggccgtgggatccggccaggcaccccacccgcacacgatgcccccggcgcctccgtgctgcagaacgagcactcattccaggcacagctgcgcgccgccgccttcacgctgttcctgttcacggccacgtgggccttcggggcgctggcggtgtcacagggccacttcctggacatggtcttcagctgcctgtacggcgccttctgcgtgaccctgggactcttcgtgctcatccaccactgcgccaagcgtgaggacgtgtggcagtgctggtgggcatgctgcccgccccgcaaggacgcccaccccgcacttgacgccaacggggccgcgctgggccgcgccgcctgcctgcactcgccgggactgggccagccacggggcttcgcgcacccaccgggcccctgcaagatgaccaacctgcaggccgcgcagggccacgccagttgcctgtcaccggccaccccgtgctgcgccaagatgcactgcgagccactgacggcggacgaggcgcacgtgcacctgcaggaggagggcgccttcgggcacgacccccacctgcacgggtgccttcagggcagaactaagccgccctactttagccggcacccagcagaggagcccgagtacgcctaccacatcccatccagcctggatggcagcccccgcagctcgcgcacagacagcccccccagctctctggatggcccggcggggacacacacgctggcctgctgcacccagggcgaccccttccccatggtcacccagcccgagggcagtgatgggagccctgccctctacagctgccccacgcagccgggcagggaggcagcgctcgggcccggccacttggagatgctgcggaggacacagtccctgccctttggtggccccagccagaacgggctgcccaagggtaaattgctagaaggcctgccgtttggcaccgacgggaccggcaacatccgaacgggaccctggaaaaacgaaactactgtgtagatgggggcagaggacacggtgttcctggaggagcttcagagcagagtggggggcccatctgccacatgaggtcactgggggtaccgaagtgaccccgcctttcagaagccgttcacacccctgccccttccttgtgatcacacccctgccccttccttgtgatcacacccctgccccttccttgtgatcacacccctgccccttccttgtgaaagacctcagcggggaaacgctccgggccacgcccactccccttatcccaattccgcgtgctggtcccgcacacggtcatccggtttctgtcctgtggtctccagtcctggggcaccctagaggcagagcaggggattccatcaaaggacccactgagaccccagcatggccctgcccgagatgccctgctgcccacggagtcctggcttcccctggtgtggccgggcagggccgagatcgcaggagggggctgccctgacctttcccagtgttcaatgtgtgtgtcttgcgttctactccgggggtggcggcggcaggtctgtccccagcattctcgctctgggcagaaccctcgggaccctccgctgtcgtgtgtctgagccacccctgcagcttcacagggcccctgcacacctctgcccactcagtgtgccctgtcagccctgtccttgtcgtagccccagccctgcagggctgagagcaccacagatgctgggggctgctctggactttggggatggctgtcagcctcagagggccaatggggggctttcacgggcccaaggcttgggaaaatgcccagacatcctttagtgaagactcgacttccaaaaccagccaccgctgggactggattccactccagtataggcacttagcaacacgaaggtttattccaaaaagaaaaggggctgacagacgggagattctcatggacaaaatccctttccctttttctcgtctccatgaacatctgggtaccaagccctgactcaaaggacagatgtggatgacagcaagacttctgtgaaagcaagtggcccgtccctaggtgggagggagtccagagggtcatgggtgtgaaactgtgcacagctttccctccctccctcttcctccttgtctgtgacacatgtgcacccacacacacacacacaaacacatgtgcatatcacacacatgcacacacacaaacacatgtgcatatcacacacgcgcacacacccaaacacgtgcatatcacacacatgcacacacacaaacacgtgcatatcacacacatgcacacaaacgtgcatatcacacacacgcacacacacccaaacacgtgcatatcacacacacgcacacacacaaacacgtgcatatcacacacaaacacacgtgcacacatacttaacacacacttgcacctgctgtgcacatgtgcacacacacgtagtagtgtgttttccagccacccacacactgggtttgcattggagattgtttcaccctgcaaacgtcaacgtcagcagactcgtcggtgcgctgtgctatccggttgggaggtctcaccaggagcagagcctccctaacgtgcacctccgagaagaggggtgtcggggagtgttcccagcacctgctcggtggaagggctctccggagactggcactcagtatctgagtatgaggagcctcacttcccggggtgtcggtaaacttgaccgtgactcagtaacccacagcgtgctcctcccagcaaaccccgtgtgtccttacaggtcgaccagacgggccgtcggaggaccaccaggtggctctgcctctgcctcaccttctcacctgcttccatagctgatgtgaacccgaatccccacgctgtgctgtgtacgcactgtaggtgcagaaccgtccacacaaaaatacagtcttggcattgtttgttctttgtgaggctggttaatagcatccccgtgtgtttttctcaccctcgatggggtagaggggcacctgaatgtgtggcccccgtctgtgtcctggatcctggggcagggctgctctccctggcccctgcagcccctcatgaactttccaccctcagtgcccccggctgagcagagaggcgtcccaccattcaaccaaagaaagtcaacattgaacattaaacctctgtgtgtttctatactga

SEQ ID NO: 11522 - DNA, 6006 bp, Homo sapiens
  source 1..6006: mol_type = unassigned DNA
atgcgaggccacgggaaccactcgcggctgaaatccagatgtgcttctctgggcaacgtccatcaccaccaggcacagatggcgcacggtgcacactgccgagggggccggacaccacagtcaccagacagccggggcccaaccgctgggggccacacccggggcagatggacgtaccggcccatcgaggccctcatcaacgtcagctttcccggagcaaagggtgggagaacggccgagggcgagccctcatgggcgtgggtcttcagaagtggctatttgcagagacaggctcttcctgggcttcccgtctccacccgagtggctgcctgctggtggcaacaccatccaggcagggactcagggttcttgggacctggatttattgacctgctcagagaggagcccagcggccgtgcagatgggaaggcagctgctcagaaaacagggcgtctttatttgttcccgactttcctaggcaacaaattaccagaggccgccgactcgtttggggaaattgcttctgggaacagtgttatttttacctccgtcttgcaatcctctcacccacctggcaccccaccgcccagcgcacgcaagccaagtcccggagctgccatgctcgtctgtgaggaaacgctggagctgggtgcccagggctgctgggggtccacgagcccccggggccaggccgtgagcttggtcggtgggcccacggccggaggctccaggctgggaggggctggctgcaccatgggcctgctcatggccctccaggccagacgccccagggacggcacctgggctgaccctcgaagatgctccagggctgtggagggctcgggcctcaccagggctgcccttgtgagtccagggccatcgggggtggaggaggacaccaggagggaaggctgcgtgcttgtgggctcctggaggtcgtccacccacagaagccgtgttctgattatcaacacgccctctggcaggaccccctggagccagggctccctcggcagcaccgggcgctacaaccagacccgggcaccaggcagccagcagcaggggctgtgctcggatgcagctctacacgaggattttgtgccggagcctactcctgccttctttcaataccctccacaagccttcagcaaaaccaaggttcgcgacttggggaggggaggcctttatgccttttccaaggaggagaaggtatctgaggcccagcgggtagaggcctacgagacccacggccttggcctgagtacaggccgacagaaccctgtgccgtccccctgtaagcctggatgcgtgtgccagggccttgcgctggacgcagaggcctggccgaggcaccctggacgcaggccctgtgcggccaaggaggcctgcctgggcccacctggctgcagcggggagctgagcctccctgaggaggaaggaatcgcacctggggcagcaacagcagctcctgcctgggtccctcatggccgcgtgagccgcttcctcactgtaaagctcttcacctatgtaactatgtatcaatgtaaacaggaacgtatcctccgcctctgcatctctggtgaatccgggcgatacgtgcggcgctcacgcttccgcaactttgcagcgctcatggtgagtacgggggtcccgggggtcctgcagctgggggctaggccgctgcgggggggcggccacccgtatggggactcccaggctggaaaagttgtggaatggcgagctggtgaccgggcttccgggctcagtgccggggaaagaaggttcctcagccagtcggagctgcagacctggccccggacacctcactgtgtaggaaagaaggttcctcagccagttggagctgcagacctagccccggacacctcactgtgcaggaaagaaggttcctcagccagtcggagctgcagacctggccccggacacctcacccgcagggaggaagattccttcaggcagctggcattccccaggtttgaagaggtcactttcccacctctcactgctgcagaaagagcaccctctgtccacggtggacactctctagccagccagggcctcgtcttggctggacggacaagaagtgtggcctcaggagggaagcaggagctctcgggcccgctggctgcctgcatcccgacacaggatctgaagacagtgctctccctgccccgctacccaggggagttcctgcaccccgtggtgtacgcgtgcacggccgtcatgctgctctgcctcctggcctccttcgtcacctacatcgtgcaccagagcgccatccgcatcagccgcaagggccggcacacgctcctgaatttctgcttccacgcggccgagcatcctggcgtgaccccactgaggacttcacctcctctcccttggtggacacctatccaggtgggcatcgtgctgcactattctacactgtccaccatgctgtggataggagtgaccgccaggaacatctacaagcaggtgaccaagaaggcccctctgtgcctggacacagaccagccaccgtaccccaggcagcccctgctcaggttttacctcgtcagcggaggggtcccctttatcatctgtggggtcacggctgccacgaacatcaggaattacgggacagaggacgaggacacggcgtactgctggatggcctgggagcccagcctgggcgccttctacggcccagccgccatcatcaccctggtcacctgtgtgtacttcctgggcacctacgtgcagctgcggcgccacccagggcgcaggtacgagctgcgcacacagcccgaggagcagcggcggctggcgacacccgagggcggccgtgggatccggccaggcaccccacccgcacacgatgcccccggcgcctccgtgctgcagaacgagcactcattccaggcacagctgcgcgccgccgccttcacgctgttcctgttcacggccacgtgggccttcggggcgctggcggtgtcacagggccacttcctggacatggtcttcagctgcctgtacggcgccttctgcgtgaccctgggactcttcgtgctcatccaccactgcgccaagcgtgaggacgtgtggcagtgctggtgggcatgctgcccgccccgcaaggacgcccaccccgcacttgacgccaacggggccgcgctgggccgcgccgcctgcctgcactcgccgggactgggccagccacggggcttcgcgcacccaccgggcccctgcaagatgaccaacctgcaggccgcgcagggccacgccagttgcctgtcaccggccaccccgtgctgcgccaagatgcactgcgagccactgacggcggacgaggcgcacgtgcacctgcaggaggagggcgccttcgggcacgacccccacctgcacgggtgccttcagggcagaactaagccgccctactttagccggcacccagcagaggagcccgagtacgcctaccacatcccatccagcctggatggcagcccccgcagctcgcgcacagacagcccccccagctctctggatggcccggcggggacacacacgctggcctgctgcacccagggcgaccccttccccatggtcacccagcccgagggcagtgatgggagccctgccctctacagctgccccacgcagccgggcagggaggcagcgctcgggcccggccacttggagatgctgcggaggacacagtccctgccctttggtggccccagccagaacgggctgcccaagggtaaattgctagaaggcctgccgtttggcaccgacgggaccggcaacatccgaacgggaccctggaaaaacgaaactactgtgtagatgggggcagaggacacggtgttcctggaggagcttcagagcagagtggggggcccatctgccacatgaggtcactgggggtaccgaagtgaccccgcctttcagaagccgttcacacccctgccccttccttgtgatcacacccctgccccttccttgtgatcacacccctgccccttccttgtgatcacacccctgccccttccttgtgaaagacctcagcggggaaacgctccgggccacgcccactccccttatcccaattccgcgtgctggtcccgcacacggtcatccggtttctgtcctgtggtctccagtcctggggcaccctagaggcagagcaggggattccatcaaaggacccactgagaccccagcatggccctgcccgagatgccctgctgcccacggagtcctggcttcccctggtgtggccgggcagggccgagatcgcaggagggggctgccctgacctttcccagtgttcaatgtgtgtgtcttgcgttctactccgggggtggcggcggcaggtctgtccccagcattctcgctctgggcagaaccctcgggaccctccgctgtcgtgtgtctgagccacccctgcagcttcacagggcccctgcacacctctgcccactcagtgtgccctgtcagccctgtccttgtcgtagccccagccctgcagggctgagagcaccacagatgctgggggctgctctggactttggggatggctgtcagcctcagagggccaatggggggctttcacgggcccaaggcttgggaaaatgcccagacatcctttagtgaagactcgacttccaaaaccagccaccgctgggactggattccactccagtataggcacttagcaacacgaaggtttattccaaaaagaaaaggggctgacagacgggagattctcatggacaaaatccctttccctttttctcgtctccatgaacatctgggtaccaagccctgactcaaaggacagatgtggatgacagcaagacttctgtgaaagcaagtggcccgtccctaggtgggagggagtccagagggtcatgggtgtgaaactgtgcacagctttccctccctccctcttcctccttgtctgtgacacatgtgcacccacacacacacacacaaacacatgtgcatatcacacacatgcacacacacaaacacatgtgcatatcacacacgcgcacacacccaaacacgtgcatatcacacacatgcacacacacaaacacgtgcatatcacacacatgcacacaaacgtgcatatcacacacacgcacacacacccaaacacgtgcatatcacacacacgcacacacacaaacacgtgcatatcacacacaaacacacgtgcacacatacttaacacacacttgcacctgctgtgcacatgtgcacacacacgtagtagtgtgttttccagccacccacacactgggtttgcattggagattgtttcaccctgcaaacgtcaacgtcagcagactcgtcggtgcgctgtgctatccggttgggaggtctcaccaggagcagagcctccctaacgtgcacctccgagaagaggggtgtcggggagtgttcccagcacctgctcggtggaagggctctccggagactggcactcagtatctgagtatgaggagcctcacttcccggggtgtcggtaaacttgaccgtgactcagtaacccacagcgtgctcctcccagcaaaccccgtgtgtccttacaggtcgaccagacgggccgtcggaggaccaccaggtggctctgcctctgcctcaccttctcacctgcttccatagctgatgtgaacccgaatccccacgctgtgctgtgtacgcactgtaggtgcagaaccgtccacacaaaaatacagtcttggcattgtttgttctttgtgaggctggttaatagcatccccgtgtgtttttctcaccctcgatggggtagaggggcacctgaatgtgtggcccccgtctgtgtcctggatcctggggcagggctgctctccctggcccctgcagcccctcatgaactttccaccctcagtgcccccggctgagcagagaggcgtcccaccattcaaccaaagaaagtcaacattgaacattaaacctctgtgtgtttctatactg

SEQ ID NO: 11523 - DNA, 6270 bp, Homo sapiens
  source 1..6270: mol_type = unassigned DNA
gcggcggcagcaggagcccggcgcgatccgctaggtcccagcccagcgcccagcgagcaggcgacgcggaggggccgggcctccagtgtcccgagggccgggcgctgagactccggccgcgcagctgggagctgcccgcgctgcgctgacagccgcgccgacgtcctccccgccggggcgctcgcaggacatgcccccggggcgcggcggcggggaccccggggctcgcctccgcccagggcccccctccacgccctcgggagccccgggcccccgctgagcactcctcccgcacgcctgggtccctccggccggcgcgcagcccggccccagcgctgtgggtccccgcggggcgatgggttgatgggcgccgggggacgcaggatgcggggggcgcccgcgcgcctgctgctgccgctgctgccgtggctcctgctgctcctggcgcccgaggctcggggcgcgcccggctgcccgctatccatccgcagctgcaagtgctcgggggagcggcccaaggggctgagcggcggcgtccctggcccggctcggcggagggtggtgtgcagcggcggggacctcccggagcctcccgagcccggccttctgcctaacggcaccgttaccctgctcttgagcaataacaagatcacggggctccgcaatggctccttcctgggactgtcactgctggagaagctggacctgaggaacaacatcatcagcacagtgcagccgggcgccttcctgggcctgggggagctgaagcgtttagatctctccaacaaccggattggctgtctcacctccgagaccttccagggcctccccaggcttctccgactaaacatatctggaaacatcttctccagtctgcaacctggggtctttgatgagctgccagcccttaaggttgtggacttgggcaccgagttcctgacctgtgactgccacctgcgctggctgctgccctgggcccagaatcgctccctgcagctgtcggaacacacgctctgtgcttaccccagtgccctgcatgctcaggccctgggcagcctccaggaggcccagctctgctgcgagggggccctggagctgcacacacaccacctcatcccgtccctacgccaagtggtgttccagggggatcggctgcccttccagtgctctgccagctacctgggcaacgacacccgcatccgctggtaccacaaccgagcccctgtggagggtgatgagcaggcgggcatcctcctggccgagagcctcatccacgactgcaccttcatcaccagtgagctgacgctgtctcacatcggcgtgtgggcctcaggcgagtgggagtgcaccgtgtccatggcccaaggcaacgccagcaagaaggtggagatcgtggtgctggagacctctgcctcctactgccccgccgagcgtgttgccaacaaccgcggggacttcaggtggccccgaactctggctggcatcacagcctaccagtcctgcctgcagtatcccttcacctcagtgcccctgggcgggggtgccccgggcacccgagcctcccgccggtgtgaccgtgccggccgctgggagccaggggactactcccactgtctctacaccaacgacatcaccagggtgctgtacaccttcgtgctgatgcccatcaatgcctccaatgcgctgaccctggctcaccagctgcgcgtgtacacagccgaggccgctagcttttcagacatgatggatgtagtctatgtggctcagatgatccagaaatttttgggttatgtcgaccagatcaaagagctggtagaggtgatggtggacatggccagcaacctgatgctggtggacgagcacctgctgtggctggcccagcgcgaggacaaggcctgcagccgcatcgtgggtgccctggagcgcattgggggggccgccctcagcccccatgcccagcacatctcagtggagctgagcgcctttcccagggaggtggggggcgccggggcagggctgcaccccgtggtatacccctgcacggccttgctgctgctctgcctcttcgccaccatcatcacctacatcctcaaccacagctccatccgtgtgtcccggaaaggctggcacatgctgctgaacttgtgcttccacatagccatgacctctgctgtctttgcggggggcatcacactcaccaactaccagatggtctgccaggcggtgggcatcaccctgcactactcctccctatccacgctgctctggatgggcgtgaaggcgcgagtgctccataaggagctcacctggagggcaccccctccgcaagaaggggaccccgctctgcctactcccagtcctatgctccggttctatttgatcgctggagggattccactcattatctgtggcatcacagctgcagtcaacatccacaactaccgggaccacagcccctactgctggctggtgtggcgtccaagccttggcgccttctacatccctgtggctttgattctgctcatcacctggatctatttcctgtgcgccgggctacgcttacggggtcctctggcacagaaccccaaggcgggcaacagcagggcctccctggaggcaggggaggagctgaggggttccaccaggctcaggggcagcggccccctcctgagtgactcaggttcccttcttgctactgggagcgcgcgagtggggacgcccgggcccccggaggatggtgacagcctctattctccgggagtccagctaggggcgctggtgaccacgcacttcctgtacttggccatgtgggcctgcggggctctggcagtgtcccagcgctggctgccccgggtggtgtgcagctgcttgtacggggtggcagcctccgccctgggcctcttcgtcttcactcaccactgtgccaggcggagggacgtgagagcctcgtggcgcgcctgctgcccccctgcctctcccgcggccccccatgccccgccccgggccctgcccgccgccgcagaggacggttccccggtgttcggggagggccccccctccctcaagtcctccccaagcggcagcagcggccatccgctggctctgggcccctgcaagctcaccaacctgcagctggcccagagtcaggtgtgcgaggcgggggcggcggccggcggggaaggagagccggagccggcgggcacccggggaaacctcgcccaccgccaccccaacaacgtgcaccacgggcgtcgggcgcacaagagccgggccaagggacaccgcgcgggggaggcctgcggcaagaaccggctcaaggccctgcgcgggggcgcggcgggggcgctggagctgctgtccagcgagagcggcagtctgcacaacagccccaccgacagctacctgggcagcagccgcaacagcccgggcgccggcctgcagctggaaggcgagcccatgctcacgccgtccgagggcagcgacaccagcgccgcgccgctttctgaggcgggccgggcaggccagcgccgcagcgccagccgcgacagtctcaagggcggcggcgcgctggagaaggagagccatcgccgctcgtacccgctcaacgccgccagcctaaacggcgcccccaaggggggcaagtacgacgacgtcaccctgatgggcgcggaggtagccagcggcggctgcatgaagaccggactctggaagagcgaaactaccgtctaaggtggggcgggcgacgcggtagacgggctggccacgcggctcgttcccccgctcctcggggccctccaaggtgtctccgtagtcagcaggttggaggcagaggagccgatggctggaggaagcccacaggcggatgttccccacttgcctagagggcatccctctggggtagcgacagacaatcccagaaacacgcataatacatttccgtccagcccggggcagtctgactgtcggtgccctcccaggaacggggaaggcctccgtctgtgtgaaagggcacagcacatcccaggtgcaccctccccaagtactcccaccccgcctactgtccatgcggcctcactgggggccatcagcctcaccagcaaagcagagatgagagcgtgggaactgtgttctttcctccctgccctctactgatttcagcccagcccctgcctagatcctaggtcccttttcctcccgagtttggctggcacgagagctagcccagcacatgaagcaggtgatgttaagtcacaaggtgctgcttttcagatccactatgcaagaggggagggtggggccacgtgaaaggcagctctagacatcaaccagtcctgggggaggggagtgggaaccgggcacaactaggaacaatgccaccattcccacaggagtggtacttaaaccagacagcagggttcagaggtggcacaccgggacaaagctgaggccctgcacctcaacagctgactgccaggtgcctgtgggtgaactgaggggagtagagggagagggcaggtggaactggggcagaatctagtcatgccctaaagctagtcctgtaaacaatggtgccccagaaagctgcaggtggtgtttggagaagcagttacttttcagttacaagacccatctccctagtctcagccttacaacaccacgggactaaggaagagcacttccttgcctccgtaaggccagaggaagaaccatcccaatcatttgatctccagctccacagtagagagaaacctacaaaatgtcaaaccagcttcccgactcccaggagctcaagccaagcccagaggcagtggctggggtccctgcaggtcatgaggggcctatgcctttactccttttaaacaccagcacccgtcttttccccaacctaaaaccaaccaccagcatttcactacaggaccaaatggaaaccgagggaaccctgggtcttgggaagaacaacaggaaaccaaggtctgacctagggttccctcccagtcttcacatcactctggcctcatcaccaaggtgacagaggacacaggggagggggaaaacccacacacactccttggaatgggtcctgttatttatgcttgctgcacagacatattagaagaaaaaaaaaagctttgtattattcttccacatatgctggctgctgtttacacaccctgccaatgccttagcactggagagctttttgcaatatgctggggaaaggggagggagggaatgaaagtgccaaagaaaacatgtttttaagaactcgggttttatacaatagaatgttttctagcagatgcctcttgttttaatatattaaaattttgcaaagccctttgagctactgccttagtctacccactgtccttttgttatgaggtagaggatctcatgacaccatacacacaaacccatcattgcctgtgaatgcacgtagggccagaattccccagttcccgctcctctgagggttgatactgctgggaatgccaaccactccacaagcagagggaagccccctcaggcctgcaggaggagccgcagcagtgtgtccaattcaaaccagcagcaaagagcctgacattttcccatccatctatgaggaaagccatctcacagaacatggacataggcaacttgctctcccacaccaagggatgggaatctctcctacctatagtcatccctgcactcctgactttactccaggacccagggtccaactaatggcagagcccctcttggttccttcaaacaagaaaagcaatacctacggactggtgtacacttccatccttggttataacaggaatgttatcaagctgtcagaacaggatgaagtgctcccagtggatatccatcagggagggttagggacactcgtggcagcctgtctagcagcctgggctctctgaaagtccctaacttcctgaggggtacgcaaatactgttctatttcactatcagaaatgttctcatctccagtgacagtggagacagggggtacagggcagatccgcttcggggacttcaacatgcagggtggcaagagaagggcaggactggccggccgcttcccctggggtaaacctaaggaattatttcccacctccccttctccttgcccctgtccccaccccggtggctccttctctcgggtctccacttctgctgtcccatcccgaaaggcagagcggaccagtgactggcggtgctggagaaggtcaccgatgtgcttcaccacagaccgtttgtcaagtctcagaa

SEQ ID NO: 11524 - DNA, 5651 bp, Homo sapiens
  source 1..5651: mol_type = unassigned DNA
gggcgatgggttgatgggcgccgggggacgcaggatgcggggggcgcccgcgcgcctgctgctgccgctgctgccgtggctcctgctgctcctggcgcccgaggctcggggcgcgcccggctgcccgctatccatccgcagctgcaagtgctcgggggagcggcccaaggggctgagcggcggcgtccctggcccggctcggcggagggtggtgtgcagcggcggggacctcccggagcctcccgagcccggccttctgcctaacggcaccgttaccctgctcttgagcaataacaagatcacggggctccgcaatggctccttcctgggactgtcactgctggagaagctggacctgaggaacaacatcatcagcacagtgcagccgggcgccttcctgggcctgggggagctgaagcgtttagatctctccaacaaccggattggctgtctcacctccgagaccttccagggcctccccaggcttctccgactaaacatatctggaaacatcttctccagtctgcaacctggggtctttgatgagctgccagcccttaaggttgtggacttgggcaccgagttcctgacctgtgactgccacctgcgctggctgctgccctgggcccagaatcgctccctgcagctgtcggaacacacgctctgtgcttaccccagtgccctgcatgctcaggccctgggcagcctccaggaggcccagctctgctgcgagggggccctggagctgcacacacaccacctcatcccgtccctacgccaagtggtgttccagggggatcggctgcccttccagtgctctgccagctacctgggcaacgacacccgcatccgctggtaccacaaccgagcccctgtggagggtgatgagcaggcgggcatcctcctggccgagagcctcatccacgactgcaccttcatcaccagtgagctgacgctgtctcacatcggcgtgtgggcctcaggcgagtgggagtgcaccgtgtccatggcccaaggcaacgccagcaagaaggtggagatcgtggtgctggagacctctgcctcctactgccccgccgagcgtgttgccaacaaccgcggggacttcaggtggccccgaactctggctggcatcacagcctaccagtcctgcctgcagtatcccttcacctcagtgcccctgggcgggggtgccccgggcacccgagcctcccgccggtgtgaccgtgccggccgctgggagccaggggactactcccactgtctctacaccaacgacatcaccagggtgctgtacaccttcgtgctgatgcccatcaatgcctccaatgcgctgaccctggctcaccagctgcgcgtgtacacagccgaggccgctagcttttcagacatgatggatgtagtctatgtggctcagatgatccagaaatttttgggttatgtcgaccagatcaaagagctggtagaggtgatggtggacatggccagcaacctgatgctggtggacgagcacctgctgtggctggcccagcgcgaggacaaggcctgcagccgcatcgtgggtgccctggagcgcattgggggggccgccctcagcccccatgcccagcacatctcagtgaatgcgaggaacgtggcattggaggcctacctcatcaagccgcacagctacgtgggcctgacctgcacagccttccagaggagggagggaggggtgccgggcacacggccaggaagccctggccagaaccccccacctgagcccgagcccccagctgaccagcagctccgcttccgctgcaccaccgggaggcccaatgtttctctgtcgtccttccacatcaagaacagcgtggccctggcctccatccagctgcccccgagtctattctcatcccttccggctgccctggctcccccggtgcccccagactgcaccctgcaactgctcgtcttccgaaatggccgcctcttccacagccacagcaacacctcccgccctggagctgctgggcctggcaagaggcgtggcgtggccacccccgtcatcttcgcaggaaccagtggctgtggcgtgggaaacctgacagagccagtggccgtttcgctgcggcactgggctgagggagccgaacctgtggccgcttggtggagccaggaggggcccggggaggctgggggctggacctcggagggctgccagctccgctccagccagcccaatgtcagcgccctgcactgccagcacttgggcaatgtggccgtgctcatggagctgagcgcctttcccagggaggtggggggcgccggggcagggctgcaccccgtggtatacccctgcacggccttgctgctgctctgcctcttcgccaccatcatcacctacatcctcaaccacagctccatccgtgtgtcccggaaaggctggcacatgctgctgaacttgtgcttccacatagccatgacctctgctgtctttgcggggggcatcacactcaccaactaccagatggtctgccaggcggtgggcatcaccctgcactactcctccctatccacgctgctctggatgggcgtgaaggcgcgagtgctccataaggagctcacctggagggcaccccctccgcaagaaggggaccccgctctgcctactcccagtcctatgctccggttctatttgatcgctggagggattccactcattatctgtggcatcacagctgcagtcaacatccacaactaccgggaccacagcccctactgctggctggtgtggcgtccaagccttggcgccttctacatccctgtggctttgattctgctcatcacctggatctatttcctgtgcgccgggctacgcttacggggtcctctggcacagaaccccaaggcgggcaacagcagggcctccctggaggcaggggaggagctgaggggttccaccaggctcaggggcagcggccccctcctgagtgactcaggttcccttcttgctactgggagcgcgcgagtggggacgcccgggcccccggaggatggtgacagcctctattctccgggagtccagctaggggcgctggtgaccacgcacttcctgtacttggccatgtgggcctgcggggctctggcagtgtcccagcgctggctgccccgggtggtgtgcagctgcttgtacggggtggcagcctccgccctgggcctcttcgtcttcactcaccactgtgccaggcggagggacgtgagagcctcgtggcgcgcctgctgcccccctgcctctcccgcggccccccatgccccgccccgggccctgcccgccgccgcagaggacggttccccggtgttcggggagggccccccctccctcaagtcctccccaagcggcagcagcggccatccgctggctctgggcccctgcaagctcaccaacctgcagctggcccagagtcaggtgtgcgaggcgggggcggcggccggcggggaaggagagccggagccggcgggcacccggggaaacctcgcccaccgccaccccaacaacgtgcaccacgggcgtcgggcgcacaagagccgggccaagggacaccgcgcgggggaggcctgcggcaagaaccggctcaaggccctgcgcgggggcgcggcgggggcgctggagctgctgtccagcgagagcggcagtctgcacaacagccccaccgacagctacctgggcagcagccgcaacagcccgggcgccggcctgcagctggaaggcgagcccatgctcacgccgtccgagggcagcgacaccagcgccgcgccgctttctgaggcgggccgggcaggccagcgccgcagcgccagccgcgacagtctcaagggcggcggcgcgctggagaaggagagccatcgccgctcgtacccgctcaacgccgccagcctaaacggcgcccccaaggggggcaagtacgacgacgtcaccctgatgggcgcggaggtagccagcggcggctgcatgaagaccggactctggaagagcgaaactaccgtctaaggtggggcgggcgacgcggtagacgggctggccacgcggctcgttcccccgctcctcggggccctccaaggtgtctccgtagtcagcaggttggaggcagaggagccgatggctggaggaagcccacaggcggatgttccccacttgcctagagggcatccctctggggtagcgacagacaatcccagaaacacgcataatacatttccgtccagcccggggcagtctgactgtcggtgccctcccaggaacggggaaggcctccgtctgtgtgaaagggcacagcacatcccaggtgcaccctccccaagtactcccaccccgcctactgtccatgcggcctcactgggggccatcagcctcaccagcaaagcagagatgagagcgtgggaactgtgttctttcctccctgccctctactgatttcagcccagcccctgcctagatcctaggtcccttttcctcccgagtttggctggcacgagagctagcccagcacatgaagcaggtgatgttaagtcacaaggtgctgcttttcagatccactatgcaagaggggagggtggggccacgtgaaaggcagctctagacatcaaccagtcctgggggaggggagtgggaaccgggcacaactaggaacaatgccaccattcccacaggagtggtacttaaaccagacagcagggttcagaggtggcacaccgggacaaagctgaggccctgcacctcaacagctgactgccaggtgcctgtgggtgaactgaggggagtagagggagagggcaggtggaactggggcagaatctagtcatgccctaaagctagtcctgtaaacaatggtgccccagaaagctgcaggtggtgtttggagaagcagttacttttcagttacaagacccatctccctagtctcagccttacaacaccacgggactaaggaagagcacttccttgcctccgtaaggccagaggaagaaccatcccaatcatttgatctccagctccacagtagagagaaacctacaaaatgtcaaaccagcttcccgactcccaggagctcaagccaagcccagaggcagtggctggggtccctgcaggtcatgaggggcctatgcctttactccttttaaacaccagcacccgtcttttccccaacctaaaaccaaccaccagcatttcactacaggaccaaatggaaaccgagggaaccctgggtcttgggaagaacaacaggaaaccaaggtctgacctagggttccctcccagtcttcacatcactctggcctcatcaccaaggtgacagaggacacaggggagggggaaaacccacacacactccttggaatgggtcctgttatttatgcttgctgcacagacatattagaagaaaaaaaaaagctttgtattattcttccacatatgctggctgctgtttacacaccctgccaatgccttagcactggagagctttttgcaatatgctggggaaaggggagggagggaatgaaagtgccaaagaaaacatgtttttaagaactcgggttttatacaatagaatgttttctagcagatgcctcttgttttaatatattaaaattttgcaaagccctttgagctactg

SEQ ID NO: 11525 - DNA, 6022 bp, Homo sapiens
  source 1..6022: mol_type = unassigned DNA
atccatggcacggagcggcggcggcggcggcagcaggagcccggcgcgatccgctaggtcccagcccagcgcccagcgagcaggcgacgcggaggggccgggcctccagtgtcccgagggccgggcgctgagactccggccgcgcagctgggagctgcccgcgctgcgctgacagccgcgccgacgtcctccccgccggggcgctcgcaggacatgcccccggggcgcggcggcggggaccccggggctcgcctccgcccagggcccccctccacgccctcgggagccccgggcccccgctgagcactcctcccgcacgcctgggtccctccggccggcgcgcagcccggccccagcgctgtgggtccccgcggggcgatgggttgatgggcgccgggggacgcaggatgcggggggcgcccgcgcgcctgctgctgccgctgctgccgtggctcctgctgctcctggcgcccgaggctcggggcgcgcccggctgcccgctatccatccgcagctgcaagtgctcgggggagcggcccaaggggctgagcggcggcgtccctggcccggctcggcggagggtggtgtgcagcggcggggacctcccggagcctcccgagcccggccttctgcctaacggcaccgttaccctgctcttgagcaataacaagatcacggggctccgcaatggctccttcctgggactgtcactgctggagaagctggacctgaggaacaacatcatcagcacagtgcagccgggcgccttcctgggcctgggggagctgaagcgtttagatctctccaacaaccggattggctgtctcacctccgagaccttccagggcctccccaggcttctccgactaaacatatctggaaacatcttctccagtctgcaacctggggtctttgatgagctgccagcccttaaggttgtggacttgggcaccgagttcctgacctgtgactgccacctgcgctggctgctgccctgggcccagaatcgctccctgcagctgtcggaacacacgctctgtgcttaccccagtgccctgcatgctcaggccctgggcagcctccaggaggcccagctctgctgcgagggggccctggagctgcacacacaccacctcatcccgtccctacgccaagtggtgttccagggggatcggctgcccttccagtgctctgccagctacctgggcaacgacacccgcatccgctggtaccacaaccgagcccctgtggagggtgatgagcaggcgggcatcctcctggccgagagcctcatccacgactgcaccttcatcaccagtgagctgacgctgtctcacatcggcgtgtgggcctcaggcgagtgggagtgcaccgtgtccatggcccaaggcaacgccagcaagaaggtggagatcgtggtgctggagacctctgcctcctactgccccgccgagcgtgttgccaacaaccgcggggacttcaggtggccccgaactctggctggcatcacagcctaccagtcctgcctgcagtatcccttcacctcagtgcccctgggcgggggtgccccgggcacccgagcctcccgccggtgtgaccgtgccggccgctgggagccaggggactactcccactgtctctacaccaacgacatcaccagggtgctgtacaccttcgtgctgatgcccatcaatgcctccaatgcgctgaccctggctcaccagctgcgcgtgtacacagccgaggccgctagcttttcagacatgatggatgtagtctatgtggctcagatgatccagaaatttttgggttatgtcgaccagatcaaagagctggtagaggtgatggtggacatggccagcaacctgatgctggtggacgagcacctgctgtggctggcccagcgcgaggacaaggcctgcagccgcatcgtgggtgccctggagcgcattgggggggccgccctcagcccccatgcccagcacatctcagtgaatgcgaggaacgtggcattggaggcctacctcatcaagccgcacagctacgtgggcctgacctgcacagccttccagaggagggagggaggggtgccgggcacacggccaggaagccctggccagaaccccccacctgagcccgagcccccagctgaccagcagctccgcttccgctgcaccaccgggaggcccaatgtttctctgtcgtccttccacatcaagaacagcgtggccctggcctccatccagctgcccccgagtctattctcatcccttccggctgccctggctcccccggtgcccccagactgcaccctgcaactgctcgtcttccgaaatggccgcctcttccacagccacagcaacacctcccgccctggagctgctgggcctggcaagaggcgtggcgtggccacccccgtcatcttcgcaggaaccagtggctgtggcgtgggaaacctgacagagccagtggccgtttcgctgcggcactgggctgagggagccgaacctgtggccgcttggtggagccaggaggggcccggggaggctgggggctggacctcggagggctgccagctccgctccagccagcccaatgtcagcgccctgcactgccagcacttgggcaatgtggccgtgctcatggagctgagcgcctttcccagggaggtggggggcgccggggcagggctgcaccccgtggtatacccctgcacggccttgctgctgctctgcctcttcgccaccatcatcacctacatcctcaaccacagctccatccgtgtgtcccggaaaggctggcacatgctgctgaacttgtgcttccacatagccatgacctctgctgtctttgcggggggcatcacactcaccaactaccagatggtctgccaggcggtgggcatcaccctgcactactcctccctatccacgctgctctggatgggcgtgaaggcgcgagtgctccataaggagctcacctggagggcaccccctccgcaagaaggggaccccgctctgcctactcccagtcctatgctccggttctatttgatcgctggagggattccactcattatctgtggcatcacagctgcagtcaacatccacaactaccgggaccacagcccctactgctggctggtgtggcgtccaagccttggcgccttctacatccctgtggctttgattctgctcatcacctggatctatttcctgtgcgccgggctacgcttacggggtcctctggcacagaaccccaaggcgggcaacagcagggcctccctggaggcaggggaggagctgaggggttccaccaggctcaggggcagcggccccctcctgagtgactcaggttcccttcttgctactgggagcgcgcgagtggggacgcccgggcccccggaggatggtgacagcctctattctccgggagtccagaggggcgctggtgaccacgcacttcctgtacttggccatgtgggcctgcggggctctggcagtgtcccagcgctggctgccccgggtggtgtgcagctgcttgtacggggtggcagcctccgccctgggcctcttcgtcttcactcaccactgtgccaggcggagggacgtgagagcctcgtggcgcgcctgctgcccccctgcctctcccgcggccccccatgccccgccccgggccctgcccgccgccgcagaggacggttccccggtgttcggggagggccccccctccctcaagtcctccccaagcggcagcagcggccatccgctggctctgggcccctgcaagctcaccaacctgcagctggcccagagtcaggtgtgcgaggcgggggcggcggccggcggggaaggagagccggagccggcgggcacccggggaaacctcgcccaccgccaccccaacaacgtgcaccacgggcgtcgggcgcacaagagccgggccaagggacaccgcgcgggggaggcctgcggcaagaaccggctcaaggccctgcgcgggggcgcggcgggggcgctggagctgctgtccagcgagagcggcagtctgcacaacagccccaccgacagctacctgggcagcagccgcaacagcccgggcgccggcctgcagctggaaggcgagcccatgctcacgccgtccgagggcagcgacaccagcgccgcgccgctttctgaggcgggccgggcaggccagcgccgcagcgccagccgcgacagtctcaagggcggcggcgcgctggagaaggagagccatcgccgctcgtacccgctcaacgccgccagcctaaacggcgcccccaaggggggcaagtacgacgacgtcaccctgatgggcgcggaggtagccagcggcggctgcatgaagaccggactctggaagagcgaaactaccgtctaaggtggggcgggcgacgcggtagacgggctggccacgcggctcgttcccccgctcctcggggccctccaaggtgtctccgtagtcagcaggttggaggcagaggagccgatggctggaggaagcccacaggcggatgttccccacttgcctagagggcatccctctggggtagcgacagacaatcccagaaacacgcataatacatttccgtccagcccggggcagtctgactgtcggtgccctcccaggaacggggaaggcctccgtctgtgtgaaagggcacagcacatcccaggtgcaccctccccaagtactcccaccccgcctactgtccatgcggcctcactgggggccatcagcctcaccagcaaagcagagatgagagcgtgggaactgtgttctttcctccctgccctctactgatttcagcccagcccctgcctagatcctaggtcccttttcctcccgagtttggctggcacgagagctagcccagcacatgaagcaggtgatgttaagtcacaaggtgctgcttttcagatccactatgcaagaggggagggtggggccacgtgaaaggcagctctagacatcaaccagtcctgggggaggggagtgggaaccgggcacaactaggaacaatgccaccattcccacaggagtggtacttaaaccagacagcagggttcagaggtggcacaccgggacaaagctgaggccctgcacctcaacagctgactgccaggtgcctgtgggtgaactgaggggagtagagggagagggcaggtggaactggggcagaatctagtcatgccctaaagctagtcctgtaaacaatggtgccccagaaagctgcaggtggtgtttggagaagcagttacttttcagttacaagacccatctccctagtctcagccttacaacaccacgggactaaggaagagcacttccttgcctccgtaaggccagaggaagaaccatcccaatcatttgatctccagctccacagtagagagaaacctacaaaatgtcaaaccagcttcccgactcccaggagctcaagccaagcccagaggcagtggctggggtccctgcaggtcatgaggggcctatgcctttactccttttaaacaccagcacccgtcttttccccaacctaaaaccaaccaccagcatttcactacaggaccaaatggaaaccgagggaaccctgggtcttgggaagaacaacaggaaaccaaggtctgacctagggttccctcccagtcttcacatcactctggcctcatcaccaaggtgacagaggacacaggggagggggaaaacccacacacactccttggaatgggtcctgttatttatgcttgctgcacagacatattagaagaaaaaaaaaagctttgtattattcttccacatatgctggctgctgtttacacaccctgccaatgccttagcactggagagctttttgcaatatgctggggaaaggggagggagggaatgaaagtgccaaagaaaacatgtttttaagaactcgggttttatacaatagaatgttttctagcagatgcctcttgttttaatatattaaaattttgcaaagccctttgagctactg

SEQ ID NO: 11526 - DNA, 4557 bp, Homo sapiens
  source 1..4557: mol_type = unassigned DNA
ggcggcggcagaggaggaggaggaggcggtgctcgcgccgggcggtagagcggcgctgggacccatgcggccgtgacccccggctccctagaggcccagcgcagccgcagcggacaaaggagcatgtccgcgccggggaaggcccgtcctccggccgccataaggctccggtcgccgctgggcccgcgccgcgctcctgcccgcccgggctccggggcggcccgctaggccagtgcgccgccgctcgccccgcaggccccggcccgcagcatggagccacccggacgccggcggggccgcgcgcagccgccgctgttgctgccgctctcgctgttagcgctgctcgcgctgctgggaggcggcggcggcggcggcgccgcggcgctgcccgccggctgcaagcacgatgggcggccccgaggggctggcagggcggcgggcgccgccgagggcaaggtggtgtgcagcagcctggaactcgcgcaggtcctgcccccagatactctgcccaaccgcacggtcaccctgattctgagtaacaataagatatccgagctgaagaatggctcattttctgggttaagtctccttgaaagattggacctccgaaacaatcttattagtagtatagatccaggtgccttctggggactgtcatctctaaaaagattggatctgacaaacaatcgaataggatgtctgaatgcagacatatttcgaggactcaccaatctggttcggctaaacctttcggggaatttgttttcttcattatctcaaggaacttttgattatcttgcgtcattacggtctttggaattccagactgagtatcttttgtgtgactgtaacatactgtggatgcatcgctgggtaaaggagaagaacatcacggtacgggataccaggtgtgtttatcctaagtcactgcaggcccaaccagtcacaggcgtgaagcaggagctgttgacatgcgaccctccgcttgaattgccgtctttctacatgactccatctcatcgccaagttgtgtttgaaggagacagccttcctttccagtgcatggcttcatatattgatcaggacatgcaagtgttgtggtatcaggatgggagaatagttgaaaccgatgaatcgcaaggtatttttgttgaaaagaacatgattcacaactgctccttgattgcaagtgccctaaccatttctaatattcaggctggatctactggaaattggggctgtcatgtccagaccaaacgtgggaataatacgaggactgtggatattgtggtattagagagttctgcacagtactgtcctccagagagggtggtaaacaacaaaggtgacttcagatggcccagaacattggcaggcattactgcatatctgcagtgtacgcggaacacccatggcagtgggatatatcccggaaacccacaggatgagagaaaagcttggcgcagatgtgatagaggtggcttttgggcagatgatgattattctcgctgtcagtatgcaaatgatgtcactagagttctttatatgtttaatcagatgcccctcaatcttaccaatgccgtggcaacagctcgacagttactggcttacactgtggaagcagccaacttttctgacaaaatggatgttatatttgtggcagaaatgattgaaaaatttggaagatttaccaaggaggaaaaatcaaaagagctaggtgacgtgatggttgacattgcaagtaacatcatgttggctgatgaacgtgtcctgtggctggcgcagagggaagctaaagcctgcagtaggattgtgcagtgtcttcagcgcattgctacctaccggctagccggtggagctcacgtttattcaacatattcacccaatattgctctggaagcttatgtcatcaagtctactggcttcacggggatgacctgtaccgtgttccagaaagtggcagcctctgatcgtacaggactttcggattatgggaggcgggatccagagggaaacctggataagcagctgagctttaagtgcaatgtttcaaatacattttcgagtctggcactaaagaatactattgtggaggcttctattcagcttcctccttcccttttctcaccaaagcaaaaaagagaactcagaccaactgatgactctctttacaagcttcaactcattgcattccgcaatggaaagctttttccagccactggaaattcaacaaatttggctgatgatggaaaacgacgtactgtggttacccctgtgattctcaccaaaatagatggtgtgaatgtagatacccaccacatccctgttaatgtgacactgcgtcgaattgcacatggagcagatgctgttgcagcccggtgggatttcgatttgctgaacggacaaggaggctggaagtcagatgggtgccatatactctattcagatgaaaatatcactacgattcagtgctactcccttagtaactatgcagttttaatggatttgacgggatctgaactatacacccaggcggccagcctcctgcatcctgtggtttatactaccgctatcattctcctcttatgtctcttagccgtcattgtcagttacatataccatcacagtttgattagaatcagcctcaagagctggcacatgcttgtgaacttgtgctttcatattttcctaacctgtgtggtctttgtgggaggaataacccagactaggaatgccagcatctgccaagcagttgggataattcttcactattccacccttgccacagtactatgggtaggagtgacagctcgaaatatctacaaacaagtcactaaaaaagctaaaagatgccaggatcctgatgaaccaccacctccaccaagaccaatgctcagattttacctgattggtggtggtatccccatcattgtttgcggcataactgcagcagcgaacattaagaattacggcagtcggccaaacgcaccctattgctggatggcatgggaaccctccttgggagccttctatgggccagccagcttcatcacttttgtaaactgcatgtactttctgagcatatttattcagttgaaaagacaccctgagcgcaaatatgagcttaaggagcccacggaggagcaacagagattggcagccaatgaaaatggcgaaataaatcatcaggattcaatgtctttgtctctgatttctacatcagccttggaaaatgagcacacttttcattctcagctcttgggggccagccttactttgctcttatatgttgcactgtggatgtttggggctttggctgtttctttgtattaccctttggacttggtttttagcttcgtttttggagccacaagtttaagcttcagtgcgttcttcgtggtccaccattgtgttaatagggaggatgttagacttgcgtggatcatgacttgctgcccaggacggagctcgtattcagtgcaagtcaacgtccagccccccaactctaatgggacgaatggagaggcacccaaatgccccaatagcagtgcggagtcttcatgcacaaacaaaagtgcttcaagcttcaaaaattcctcccagggctgcaaattaacaaacttgcaggcggctgcagctcagtgccatgccaattctttacctttgaactccacccctcagcttgataatagtctgacagaacattcaatggacaatgatattaaaatgcacgtggcgcctttagaagttcagtttcgaacaaatgtgcactcaagccgccaccataaaaacagaagtaaaggacaccgggcaagccgactcacagtcctgagagaatatgcctacgatgtcccaacgagcgtggaaggaagcgtgcagaacggcttacctaaaagccggctgggcaataacgaaggacactcgaggagccgaagagcttatttagcctacagagagagacagtacaacccaccccagcaagacagcagcgatgcttgtagcacacttcccaaaagtagcagaaattttgaaaagccagtttcaaccactagtaaaaaagatgcgttaaggaagccagctgtggttgaacttgaaaatcagcaaaaatcttatggcctcaacttggccattcagaatggaccaattaaaagcaatgggcaggagggacccttgctcggtaccgatagcactggcaatgttaggactggattatggaaacacgaaactactgtgtaacattgctgggcttcctaggcagaaattcatataaactgtgatactcacattccttgaagctatgagcatttaaaaactgtttacagccaccatagggattcaaaagaatttggaataaactttgaagttttggattttacttatttttatccccaaattgttgctattttttaggatctgaaacaaaatctttctaaaacattgttttagttgtcaaagcaccaacaggacattttgggatgtgaaatgtaatttcttggaatctgtaatttgtacttaatatttcaggcttgtatttaatataataaataggtgtttgtt

SEQ ID NO: 11527 - DNA, 2870 bp, Homo sapiens
  source 1..2870: mol_type = unassigned DNA
gggacccatgcggccgtgacccccggctccctagaggcccagcgcagccgcagcggacaaaggagcatgtccgcgccggggaaggcccgtcctccggccgccataaggctccggtcgccgctgggcccgcgccgcgctcctgcccgcccgggctccggggcggcccgctaggccagtgcgccgccgctcgccccgcaggccccggcccgcagcatggagccacccggacgccggcggggccgcgcgcagccgccgctgttgctgccgctctcgctgttagcgctgctcgcgctgctgggaggcggcggcggcggcggcgccgcggcgctgcccgccggctgcaagcacgatgggcggccccgaggggctggcagggcggcgggcgccgccgagggcaaggtggtgtgcagcagcctggaactcgcgcaggtcctgcccccagatactctgcccaaccgcacggtcaccctgattctgagtaacaataagatatccgagctgaagaatggctcattttctgggttaagtctccttgaaagattggacctccgaaacaatcttattagtagtatagatccaggtgccttctggggactgtcatctctaaaaagattggatctgacaaacaatcgaataggatgtctgaatgcagacatatttcgaggactcaccaatctggttcggctaaacctttcggggaatttgttttcttcattatctcaaggaacttttgattatcttgcgtcattacggtctttggaattccagactgagtatcttttgtgtgactgtaacatactgtggatgcatcgctgggtaaaggagaagaacatcacggtacgggataccaggtgtgtttatcctaagtcactgcaggcccaaccagtcacaggcgtgaagcaggagctgttgacatgcgaccctccgcttgaattgccgtctttctacatgactccatctcatcgccaagttgtgtttgaaggagacagccttcctttccagtgcatggcttcatatattgatcaggacatgcaagtgttgtggtatcaggatgggagaatagttgaaaccgatgaatcgcaaggtatttttgttgaaaagaacatgattcacaactgctccttgattgcaagtgccctaaccatttctaatattcaggctggatctactggaaattggggctgtcatgtccagaccaaacgtgggaataatacgaggactgtggatattgtggtattagagagttctgcacagtactgtcctccagagagggtggtaaacaacaaaggtgacttcagatggcccagaacattggcaggcattactgcatatctgcagtgtacgcggaacacccatggcagtgggatatatcccggaaacccacaggatgagagaaaagcttggcgcagatgtgatagaggtggcttttgggcagatgatgattattctcgctgtcagtatgcaaatgatgtcactagagttctttatatgtttaatcagatgcccctcaatcttaccaatgccgtggcaacagctcgacagttactggcttacactgtggaagcagccaacttttctgacaaaatggatgttatatttgtggcagaaatgattgaaaaatttggaagatttaccaaggaggaaaaatcaaaagagctaggtgacgtgatggttgacattgcaagtaacatcatgttggctgatgaacgtgtcctgtggctggcgcagagggaagctaaagcctgcagtaggattgtgcagtgtcttcagcgcattgctacctaccggctagccggtggagctcacgtttattcaacatattcacccaatattgctctggaagcttatgtcatcaagtctactggcttcacggggatgacctgtaccgtgttccagaaagtggcagcctctgatcgtacaggactttcggattatgggaggcgggatccagagggaaacctggataagcagctgagctttaagtgcaatgtttcaaatacattttcgagtctggcactaaaggtatgttacattctgcaatcatttaagactatttacagttaaattagaatgctccaaatgttctgcttcgcaaaataaccttattaaaagattttttttttgcaggaagataggtattattgcttttgctactgttttaaagaaaactaaccaggaagaactgcattacgactttcaagggccctaggcatttttgcctttgattccctttcttcacataaaaatatcagaaattacattttataactgcagtggtataaatgcaaatatactattgttacatgtgaaaaaatcttatttgacttaaaagtttatttatttgtttttttgctcctgattttaagacaataagatgttttcatgggcccctaaaagtatcatgagcctttggcactgcgcctgccaagcctagtggagaagtcaaccctgagaccaggtgtttaatcaagcaagctgtatatcaaaatttttggcagaaaacacaaatatgtcatatatctttttttaaaaaaagtatttcattgaagcaagcaaaatgaaagcatttttactgatttttaaaattggtgctttagatatatttgactacactgtattgaagcaaatagaggaggcacaactccagcaccctaatggaaccacatttttttcacttagctttctgtgggcatgtgtaattgtattctctgcggtttttaatctcacagtactttatttctgtcttgtccctcaataatatcacaaacaatattccagtcattttaatggctgcataataactgatccaacaggtgttaggtgttctggtttagtgtgagcactcaataaatattgaatgaatgaacgaa

SEQ ID NO: 11528 - DNA, 1572 bp, Homo sapiens
  source 1..1572: mol_type = unassigned DNA
atttctgtaatcatctgatactcttaggatgccactgaagaggaataactctaaataccctccgcttgaattgccgtctttctacatgactccatctcatcgccaagttgtgtttgaaggagacagccttcctttccagtgcatggcttcatatattgatcaggacatgcaagtgttgtggtatcaggatgggagaatagttgaaaccgatgaatcgcaaggtatttttgttgaaaagaacatgattcacaactgctccttgattgcaagtgccctaaccatttctaatattcaggctggatctactggaaattggggctgtcatgtccagaccaaacgtgggaataatacgaggactgtggatattgtggtattagagagttctgcacagtactgtcctccagagagggtggtaaacaacaaaggtgacttcagatggcccagaacattggcaggcattactgcatatctgcagtgtacgcggaacacccatggcagtgggatatatcccggaaacccacaggatgagagaaaagcttggcgcagatgtgatagaggtggcttttgggcagatgatgattattctcgctgtcagtatgcaaatgatgtcactagagttctttatatgtttaatcagatgcccctcaatcttaccaatgccgtggcaacagctcgacagttactggcttacactgtggaagcagccaacttttctgacaaaatggatgttatatttgtggcagaaatgattgaaaaatttggaagatttaccaaggaggaaaaatcaaaagagctaggtgacgtgatggttgacattgcaagtaacatcatgttggctgatgaacgtgtcctgtggctggcgcagagggaagctaaagcctgcagtaggattgtgcagtgtcttcagcgcattgctacctaccggctagccggtggagctcacgtttattcaacatattcacccaatattgctctggaagcttatgtcatcaagtctactggcttcacggggatgacctgtaccgtgttccagaaagtggcagcctctgatcgtacaggactttcggattatgggaggcgggatccagagggaaacctggataagcagctgagctttaagtgcaatgtttcaaatacattttcgagtctggcactaaaggggaaattccggtgaatatggaattagaagaagagaggttagaagccaagaaaaagattgtacaataaattcttcaactatggaatgtttttagatggttaattgttcacttctttggtatatatatattttttactgaatgctgaataatttgttatttaaaaatcctcaataaagaaatctgaaaaaattcagtgatcagtcagcattttcagttgttcctatgtgttattattttttttttctaaatgtgtttcctagtctcaaggaaatttctgctaagtgtactgaatctaaacctctattatgtttgtataatttcattcttttgttgtgtggaggtttgaattcatcataaatcaccttaaagttccataagcccaaattaattatactcatatttatgatatgct

SEQ ID NO: 11529 - DNA, 7026 bp, Homo sapiens
  source 1..7026: mol_type = unassigned DNA
ccagctccagtcacgccggaagcgcgggcggagcgcacgggtccggggagagtcgcctgcgcccgcgagggggacccaagtacctagggtggtggccgagtcccgcctcccgccagcgggggcgaggacctgcgacgcgcacccctgcctggcccggtctcctcagcaccagccccacgcacaccctacttcctcagcttctcgccctcaccctgccaacttccctgcgaggagggacctgccgccagcctgcttcctcgtccgcaggccctgcgctgaacgctgccgcgcccagggttcaccttgcgccgtcgggaaagcccatgaactctccagaaacggcgtaaaggagggtcccgccgcggcgcagggctggggcgcctgggttccccctgggtggagcagcggcagcagagcgggaaagtggtggaggatgatcttgcggccaaaggggacctcggcgcagtaatgtcaacatgatgtttcgctcagatcgaatgtggagctgccattggaaatggaagcccagtcctctcctgttcttatttgctttatatatcatgtgtgttcctcactcagtgtggggatgtgccaactgccgagtggttttgtccaacccttctgggacctttacttctccatgctaccctaacgactacccaaacagccaggcttgcatgtggacgctccgagcccccaccggttatatcattcagataacatttaacgactttgacattgaagaagctcccaattgcatttatgactcattatcccttgataatggagagagccagactaaattttgtggagcaactgccaaaggcctatcatttaactcaagtgcgaatgagatgcatgtgtccttttcaagtgactttagcatccagaagaaaggtttcaatgccagctacatcagagttgccgtgtccttaaggaatcaaaaggtcattttaccccagacatcagatgcttaccaggtatctgttgcaaaaagcatctctattccagagctcagtgctttcacactctgctttgaagcaaccaaagttggccatgaagacagtgattggacagctttctcctactcaaatgcatccttcacacaattgctcagttttggaaaggccaagagtggctactttctatccatttctgattcaaaatgtttgttgaataatgcattacctgtcaaagaaaaagaagacatttttgcagaaagctttgaacagctctgccttgtttggaataattctttgggctctattggtgtaaatttcaaaagaaactatgaaacagttccatgtgattctaccattagtaaagttattcctgggaatgggaaattgttgttgggctccaatcaaaatgaaattgtctctctaaaaggggacatttataactttcgactttggaattttaccatgaatgccaaaatcctctccaacctcagctgtaatgtgaaagggaatgtagtcgactggcaaaatgacttctggaatatcccaaacctagctctgaaagctgaaagcaacctaagctgtggttcctacctgatcccgctcccagcagcagaactggccagctgtgcagacctggggaccctctgtcaagctactgtaaactctcctagtactacaccacccactgtcaccactaacatgcctgttactaacagaatcgataaacaaaggaatgatggaattatctatagaatatccgtagtgattcagaacatccttcgtcaccctgaggtaaaagtacagagcaaggtggcagaatggctcaattcaaccttccaaaattggaactacacggtttatgtcgttaatatcagttttcacctgagtgctggagaggacaagattaaagtcaagagaagccttgaggatgagccaaggttggtgctttgggcccttctagtttacaatgctaccaacaatactaatttggaaggaaaaatcattcagcagaagctcctaaaaaataatgagtccttggatgaaggcttgaggctacatacagtgaatgtgagacaactgggtcattgtcttgccatggaggaacccaaaggctactactggccatctatccaaccttctgaatacgttcttccttgtccagacaagcctggcttttctgcttctcggatatgtttttacaatgctaccaacccattggtaacctactggggacctgttgatatctccaactgtttaaaagaagcaaatgaagttgctaaccagattttaaatttaactgctgatgggcagaacttaacctcagccaatattaccaacattgtggaacaggtcaaaagaattgtgaataaagaagaaaacattgatataacacttggctcaactctaatgaatatattttctaatatcttaagcagttcagacagtgacttgcttgagtcatcttctgaagctttaaaaacaattgatgaattggccttcaagatagacctaaatagcacatcacatgtgaatattacaactcggaacttggctctcagcgtatcatccctgttaccagggacaaatgcaatttcaaattttagcattggtcttccaagcaataatgaatcgtatttccagatggattttgagagtggacaagtggatccactggcatctgtaattttgcctccaaacttacttgagaatttaagtccagaagattctgtattagttagaagagcacagtttactttcttcaacaaaactggacttttccaggatgtaggaccccaaagaaaaactttagtgagttatgtgatggcgtgcagtattggaaacattactatccagaatctgaaggatcctgttcaaataaaaatcaaacatacaagaactcaggaagtgcatcatcccatctgtgccttctgggatctgaacaaaaacaaaagttttggaggatggaacacgtcaggatgtgttgcacacagagattcagatgcaagtgagacagtctgcctgtgtaaccacttcacacactttggagttctgatggaccttccaagaagtgcctcacagttagatgcaagaaacactaaagtcctcactttcatcagctatattgggtgtggaatatctgctattttttcagcagcaactctcctgacatatgttgcttttgagaaattgcgaagggattatccctccaaaatcttgatgaacctgagcacagccctgctgttcctgaatctcctcttcctcctagatggctggatcacctccttcaatgtggatggactttgcattgctgttgcagtcctgttgcatttcttccttctggcaacctttacctggatggggctagaagcaattcacatgtacattgctctagttaaagtatttaacacttacattcgccgatacattctaaaattctgcatcattggctggggtttgcctgccttagtggtgtcagttgttctagcgagcagaaacaacaatgaagtctatggaaaagaaagttatgggaaagaaaaaggtgatgaattctgttggattcaagatccagtcatattttatgtgacctgtgctgggtattttggagtcatgttttttctgaacattgccatgttcattgtggtaatggtgcagatctgtgggaggaatggcaagagaagcaaccggaccctgagagaagaagtgttaaggaacctgcgcagtgtggttagcttgacctttctgttgggcatgacatggggttttgcattctttgcctggggacccttaaatatccccttcatgtacctcttctccatcttcaattcattacaaggcttatttatattcatcttccactgtgctatgaaggagaatgttcagaaacagtggcggcagcatctctgctgtggtagatttcggttagcagataactcagattggagtaagacagctaccaatatcatcaagaaaagttctgataatctaggaaaatctttgtcttcaagctccattggttccaactcaacctatcttacatccaaatctaaatccagctctaccacctatttcaaaaggaatagccacacagataatgtctcctatgagcattccttcaacaaaagtggatcactcagacagtgcttccatggacaagtccttgtcaaaactggcccatgctgatggagatcaaacatcaatcatccctgtccatcaggtcattgataaggtcaagggttattgcaatgctcattcagacaacttctataaaaatattatcatgtcagacaccttcagccacagcacaaagttttaatgtctttaagaaaaagaaatcaatctgcagaaatgtgaagatttgcaagcagtgtaaactgcaactagtgatgtaaatgtgctattacctaggtaactgcatatatataaggaatgtattttgttaagaaggcttttgtgaaattcagaatttttctttttaatatatttcttccatggaagagttgtcatcactaaaacttcagtactgagagtaacatgactcagtagccacagaagctatgatttgtaaaatatataattgaatcagagtaatcataatgcaggggagacattcaaattagagacaagggagaagcaatgctgaggaagaccctagatagagctcattttactccacctaatcgttatatctggatatacccattttctgcatcttctttctcaacaataaaaaatgtaactattttgaatgcccacaaatcccattccagtgttactttctgtgaatgcagtaccatattctcattttcaatgacatttcaaccacaggcagaaaagactgtttactccttgacccaaagattaaaaaggattttttattattttaaatattacaccttcagaaccataacatgcttaagaaaactttcccaaaatgttgacctagttaaatgaggctatataaatttctaatattttacttattctattcaaggcatagggccaaagcattaagtataatttaatcccatacattcgagttaagtttagtgttgatgttccatcattctggacctcccaggagttgtttaagaatgaatctcttacacctctacttttgcccctctactgtatattaagcccataggcttgtgggaggaaggagaatttccattaggcaagctgtatgcagtggaattttccttttaggagacacacaattaagactctctggttctgtccttgctttggagactttaagacatttcctaaagcacaaataaaagcctcgtatttccccattgagagttttgttccaaggaatatgaagtgagacatatgggtgagtcataataatcaaaataatttatgaagagctgggtctgcaatagctagtctaaaaactacttgtgtgtcagtcctctggttatagtatataagagcctgaggaggtctggcaagatagatggtgtattatttatggatcaggctgctgcatacaaaccttgcatactattatgcagcttacctaactctcagactattctgagtaatgcttgcttgctaatgaatgtataggagaccacattgtaattgttcttagatgatggagtccatgcagtttcttagaaatcggtctcagtgcatgctgtgctttttcacatttgctctgggttatctgggaagtatcaggttctgggaggcaacagcattaagtgataagaaaaggagacattctggcaaagccaatctgcttaaaggcaaagtccagaacctggaacctagaggcctttctctctgcacgaaaaacaggtagtttgcagtctgagatatgggagagcttttaggctacacagcaacccaagggacctctcaccttttgctgagcttcaatcaggaagctatttgcctggctccagcagatgatgagataatgaggtagtgggttttttattactgttccattttgcaacatcctgcaacaccatcctgggagacaagagcattacccagcttggctttcacgggggagggttgtattcagtaaaaaagaatagtaaatataaggtcactgagattctaagtaagatagtaaatctaaggtcactgagccaaatccttttcaataggcatatattaacaggctgcttattttggcggaggttacatatggatgaaaatgaatcttagtcactgaatattcatatacatttcccccaaaaccttagacattcatagtagattttaattagttagctttctaactagtcagatttctgcccaaagtgcttagtcaatagtaattaagatatagcttcaaaaatggctttgcttttgatttctactcatattcgtatggctccagaaaaatatttttttcatatttgacaatgtcagctccactttagaaattttcaataaccagatgagaaaaaaattaagaaattgctcaagggaaacatttgtaaatggatttgaaagattgagccaaattctgttgtcagttctaagcatgcagttctcacctccatttagtcccccatcagaacagaggtcaggaatttagctggggagcctaaatttagttcagcttacctttgagaatagcatcaattcagactctcttttcattatgttttcttttctttttccctctttttaaactacattgtgttagagtcatagtctaggatcctgagagattttccattcttgtcaccattcacttgcattgtaaagattttctttgtctgttgttggcatagattcttttgtacatatttatttatttgtgtttatatatgtcaattggtttcctttcttagcttgatattgcctagctttgttgttttaattaactttctattagagagactgtatatattttttctaaatactttgtgaaatcatttttggtagcaatatctttgaatatgatgaataaaagtgactgtgagtgcaaatagaattagcagtaagaagctactctagctaatttgccattttacttaaatggaaaatgtttttcaaataaatacttatgttgttcatgttccaagttattcaa

SEQ ID NO: 11530 - DNA, 6849 bp, Homo sapiens
  source 1..6849: mol_type = unassigned DNA
ccaagtacctagggtggtggccgagtcccgcctcccgccagcgggggcgaggacctgcgacgcgcacccctgcctggcccggtctcctcagcaccagccccacgcacaccctacttcctcagcttctcgccctcaccctgccaacttccctgcgaggagggacctgccgccagcctgcttcctcgtccgcaggccctgcgctgaacgctgccgcgcccagggttcaccttgcgccgtcgggaaagcccatgaactctccagaaacggcgtaaaggagggtcccgccgcggcgcagggctggggcgcctgggttccccctgggtggagcagcggcagcagagcgggaaagtggtggaggatgatcttgcggccaaaggggacctcggcgcagtaatgtcaacatgatgtttcgctcagatcgaatgtggagctgccattggaaatggaagcccagtcctctcctgttcttatttgctttatatatcatgtgtgttcctcactcagtgtggggatgtgccaactgccgagtggttttgtccaacccttctgggacctttacttctccatgctaccctaacgactacccaaacagccaggcttgcatgtggacgctccgagcccccaccggttatatcattcagataacatttaacgactttgacattgaagaagctcccaattgcatttatgactcattatcccttgataatggagagagccagactaaattttgtggagcaactgccaaaggcctatcatttaactcaagtgcgaatgagatgcatgtgtccttttcaagtgactttagcatccagaagaaaggtttcaatgccagctacatcagagttgccgtgtccttaaggaatcaaaaggtcattttaccccagacatcagatgcttaccaggtatctgttgcaaaaagcatctctattccagagctcagtgctttcacactctgctttgaagcaaccaaagttggccatgaagacagtgattggacagctttctcctactcaaatgcatccttcacacaattgctcagttttggaaaggccaagagtggctactttctatccatttctgattcaaaatgtttgttgaataatgcattacctgtcaaagaaaaagaagacatttttgcagaaagctttgaacagctctgccttgtttggaataattctttgggctctattggtgtaaatttcaaaagaaactatgaaacagttccatgtgattctaccattagtaaagttattcctgggaatgggaaattgttgttgggctccaatcaaaatgaaattgtctctctaaaaggggacatttataactttcgactttggaattttaccatgaatgccaaaatcctctccaacctcagctgtaatgtgaaagggaatgtagtcgactggcaaaatgacttctggaatatcccaaacctagctctgaaagctgaaagcaacctaagctgtggttcctacctgatcccgctcccagcagcagaactggccagctgtgcagacctggggaccctctgtcaagatggaattatctatagaatatccgtagtgattcagaacatccttcgtcaccctgaggtaaaagtacagagcaaggtggcagaatggctcaattcaaccttccaaaattggaactacacggtttatgtcgttaatatcagttttcacctgagtgctggagaggacaagattaaagtcaagagaagccttgaggatgagccaaggttggtgctttgggcccttctagtttacaatgctaccaacaatactaatttggaaggaaaaatcattcagcagaagctcctaaaaaataatgagtccttggatgaaggcttgaggctacatacagtgaatgtgagacaactgggtcattgtcttgccatggaggaacccaaaggctactactggccatctatccaaccttctgaatacgttcttccttgtccagacaagcctggcttttctgcttctcggatatgtttttacaatgctaccaacccattggtaacctactggggacctgttgatatctccaactgtttaaaagaagcaaatgaagttgctaaccagattttaaatttaactgctgatgggcagaacttaacctcagccaatattaccaacattgtggaacaggtcaaaagaattgtgaataaagaagaaaacattgatataacacttggctcaactctaatgaatatattttctaatatcttaagcagttcagacagtgacttgcttgagtcatcttctgaagctttaaaaacaattgatgaattggccttcaagatagacctaaatagcacatcacatgtgaatattacaactcggaacttggctctcagcgtatcatccctgttaccagggacaaatgcaatttcaaattttagcattggtcttccaagcaataatgaatcgtatttccagatggattttgagagtggacaagtggatccactggcatctgtaattttgcctccaaacttacttgagaatttaagtccagaagattctgtattagttagaagagcacagtttactttcttcaacaaaactggacttttccaggatgtaggaccccaaagaaaaactttagtgagttatgtgatggcgtgcagtattggaaacattactatccagaatctgaaggatcctgttcaaataaaaatcaaacatacaagaactcaggaagtgcatcatcccatctgtgccttctgggatctgaacaaaaacaaaagttttggaggatggaacacgtcaggatgtgttgcacacagagattcagatgcaagtgagacagtctgcctgtgtaaccacttcacacactttggagttctgatggaccttccaagaagtgcctcacagttagatgcaagaaacactaaagtcctcactttcatcagctatattgggtgtggaatatctgctattttttcagcagcaactctcctgacatatgttgcttttgagaaattgcgaagggattatccctccaaaatcttgatgaacctgagcacagccctgctgttcctgaatctcctcttcctcctagatggctggatcacctccttcaatgtggatggactttgcattgctgttgcagtcctgttgcatttcttccttctggcaacctttacctggatggggctagaagcaattcacatgtacattgctctagttaaagtatttaacacttacattcgccgatacattctaaaattctgcatcattggctggggtttgcctgccttagtggtgtcagttgttctagcgagcagaaacaacaatgaagtctatggaaaagaaagttatgggaaagaaaaaggtgatgaattctgttggattcaagatccagtcatattttatgtgacctgtgctgggtattttggagtcatgttttttctgaacattgccatgttcattgtggtaatggtgcagatctgtgggaggaatggcaagagaagcaaccggaccctgagagaagaagtgttaaggaacctgcgcagtgtggttagcttgacctttctgttgggcatgacatggggttttgcattctttgcctggggacccttaaatatccccttcatgtacctcttctccatcttcaattcattacaaggcttatttatattcatcttccactgtgctatgaaggagaatgttcagaaacagtggcggcagcatctctgctgtggtagatttcggttagcagataactcagattggagtaagacagctaccaatatcatcaagaaaagttctgataatctaggaaaatctttgtcttcaagctccattggttccaactcaacctatcttacatccaaatctaaatccagctctaccacctatttcaaaaggaatagccacacagataatgtctcctatgagcattccttcaacaaaagtggatcactcagacagtgcttccatggacaagtccttgtcaaaactggcccatgctgatggagatcaaacatcaatcatccctgtccatcaggtcattgataaggtcaagggttattgcaatgctcattcagacaacttctataaaaatattatcatgtcagacaccttcagccacagcacaaagttttaatgtctttaagaaaaagaaatcaatctgcagaaatgtgaagatttgcaagcagtgtaaactgcaactagtgatgtaaatgtgctattacctaggtaactgcatatatataaggaatgtattttgttaagaaggcttttgtgaaattcagaatttttctttttaatatatttcttccatggaagagttgtcatcactaaaacttcagtactgagagtaacatgactcagtagccacagaagctatgatttgtaaaatatataattgaatcagagtaatcataatgcaggggagacattcaaattagagacaagggagaagcaatgctgaggaagaccctagatagagctcattttactccacctaatcgttatatctggatatacccattttctgcatcttctttctcaacaataaaaaatgtaactattttgaatgcccacaaatcccattccagtgttactttctgtgaatgcagtaccatattctcattttcaatgacatttcaaccacaggcagaaaagactgtttactccttgacccaaagattaaaaaggattttttattattttaaatattacaccttcagaaccataacatgcttaagaaaactttcccaaaatgttgacctagttaaatgaggctatataaatttctaatattttacttattctattcaaggcatagggccaaagcattaagtataatttaatcccatacattcgagttaagtttagtgttgatgttccatcattctggacctcccaggagttgtttaagaatgaatctcttacacctctacttttgcccctctactgtatattaagcccataggcttgtgggaggaaggagaatttccattaggcaagctgtatgcagtggaattttccttttaggagacacacaattaagactctctggttctgtccttgctttggagactttaagacatttcctaaagcacaaataaaagcctcgtatttccccattgagagttttgttccaaggaatatgaagtgagacatatgggtgagtcataataatcaaaataatttatgaagagctgggtctgcaatagctagtctaaaaactacttgtgtgtcagtcctctggttatagtatataagagcctgaggaggtctggcaagatagatggtgtattatttatggatcaggctgctgcatacaaaccttgcatactattatgcagcttacctaactctcagactattctgagtaatgcttgcttgctaatgaatgtataggagaccacattgtaattgttcttagatgatggagtccatgcagtttcttagaaatcggtctcagtgcatgctgtgctttttcacatttgctctgggttatctgggaagtatcaggttctgggaggcaacagcattaagtgataagaaaaggagacattctggcaaagccaatctgcttaaaggcaaagtccagaacctggaacctagaggcctttctctctgcacgaaaaacaggtagtttgcagtctgagatatgggagagcttttaggctacacagcaacccaagggacctctcaccttttgctgagcttcaatcaggaagctatttgcctggctccagcagatgatgagataatgaggtagtgggttttttattactgttccattttgcaacatcctgcaacaccatcctgggagacaagagcattacccagcttggctttcacgggggagggttgtattcagtaaaaaagaatagtaaatataaggtcactgagattctaagtaagatagtaaatctaaggtcactgagccaaatccttttcaataggcatatattaacaggctgcttattttggcggaggttacatatggatgaaaatgaatcttagtcactgaatattcatatacatttcccccaaaaccttagacattcatagtagattttaattagttagctttctaactagtcagatttctgcccaaagtgcttagtcaatagtaattaagatatagcttcaaaaatggctttgcttttgatttctactcatattcgtatggctccagaaaaatatttttttcatatttgacaatgtcagctccactttagaaattttcaataaccagatgagaaaaaaattaagaaattgctcaagggaaacatttgtaaatggatttgaaagattgagccaaattctgttgtcagttctaagcatgcagttctcacctccatttagtcccccatcagaacagaggtcaggaatttagctggggagcctaaatttagttcagcttacctttgagaatagcatcaattcagactctcttttcattatgttttcttttctttttccctctttttaaactacattgtgttagagtcatagtctaggatcctgagagattttccattcttgtcaccattcacttgcattgtaaagattttctttgtctgttgttggcatagattcttttgtacatatttatttatttgtgtttatatatgtcaattggtttcctttcttagcttgatattgcctagctttgttgttttaattaactttctattagagagactgtatatattttttctaaatactttgtgaaatcatttttggtagcaatatctttgaatatgatgaataaaagtgactgtgagtgcaaatagaattagcagtaagaagctactctagctaatttgccattttacttaaatggaaaatgtttttcaaataaatacttatgttgttc

SEQ ID NO: 11531 - DNA, 6879 bp, Homo sapiens
  source 1..6879: mol_type = unassigned DNA
tccagtcacgccggaagcgcgggcggagcgcacgggtccggggagagtcgcctgcgcccgcgagggggacccaagtacctagggtggtggccgagtcccgcctcccgccagcgggggcgaggacctgcgacgcgcacccctgcctggcccggtctcctcagcaccagccccacgcacaccctacttcctcagcttctcgccctcaccctgccaacttccctgcgaggagggacctgccgccagcctgcttcctcgtccgcaggccctgcgctgaacgctgccgcgcccagggttcaccttgcgccgtcgggaaagcccatgaactctccagaaacggcgtaaaggagggtcccgccgcggcgcagggctggggcgcctgggttccccctgggtggagcagcggcagcagagcgggaaagtggtggaggatgatcttgcggccaaaggggacctcggcgcagtaatgtcaacatgatgtttcgctcagatcgaatgtggagctgccattggaaatggaagcccagtcctctcctgttcttatttgctttatatatcatgtgtgttcctcactcagtgtggggatgtgccaactgccgagtggttttgtccaacccttctgggacctttacttctccatgctaccctaacgactacccaaacagccaggcttgcatgtggacgctccgagcccccaccggttatatcattcagataacatttaacgactttgacattgaagaagctcccaattgcatttatgactcattatcccttgataatggagagagccagactaaattttgtggagcaactgccaaaggcctatcatttaactcaagtgcgaatgagatgcatgtgtccttttcaagtgactttagcatccagaagaaaggtttcaatgccagctacatcagagttgccgtgtccttaaggaatcaaaaggtcattttaccccagacatcagatgcttaccaggtatctgttgcaaaaagcatctctattccagagctcagtgctttcacactctgctttgaagcaaccaaagttggccatgaagacagtgattggacagctttctcctactcaaatgcatccttcacacaattgctcagttttggaaaggccaagagtggctactttctatccatttctgattcaaaatgtttgttgaataatgcattacctgtcaaagaaaaagaagacatttttgcagaaagctttgaacagctctgccttgtttggaataattctttgggctctattggtgtaaatttcaaaagaaactatgaaacagttccatgtgattctaccattagtaaagttattcctgggaatgggaaattgttgttgggctccaatcaaaatgaaattgtctctctaaaaggggacatttataactttcgactttggaattttaccatgaatgccaaaatcctctccaacctcagctgtaatgtgaaagggaatgtagtcgactggcaaaatgacttctggaatatcccaaacctagctctgaaagctgaaagcaacctaagctgtggttcctacctgatcccgctcccagcagcagaactggccagctgtgcagacctggggaccctctgtcaagatggaattatctatagaatatccgtagtgattcagaacatccttcgtcaccctgaggtaaaagtacagagcaaggtggcagaatggctcaattcaaccttccaaaattggaactacacggtttatgtcgttaatatcagttttcacctgagtgctggagaggacaagattaaagtcaagagaagccttgaggatgagccaaggttggtgctttgggcccttctagtttacaatgctaccaacaatactaatttggaaggaaaaatcattcagcagaagctcctaaaaaataatgagtccttggatgaaggcttgaggctacatacagtgaatgtgagacaactgggtcattgtcttgccatggaggaacccaaaggctactactggccatctatccaaccttctgaatacgttcttccttgtccagacaagcctggcttttctgcttctcggatatgtttttacaatgctaccaacccattggtaacctactggggacctgttgatatctccaactgtttaaaagaagcaaatgaagttgctaaccagattttaaatttaactgctgatgggcagaacttaacctcagccaatattaccaacattgtggaacaggtcaaaagaattgtgaataaagaagaaaacattgatataacacttggctcaactctaatgaatatattttctaatatcttaagcagttcagacagtgacttgcttgagtcatcttctgaagctttaaaaacaattgatgaattggccttcaagatagacctaaatagcacatcacatgtgaatattacaactcggaacttggctctcagcgtatcatccctgttaccagggacaaatgcaatttcaaattttagcattggtcttccaagcaataatgaatcgtatttccagatggattttgagagtggacaagtggatccactggcatctgtaattttgcctccaaacttacttgagaatttaagtccagaagattctgtattagttagaagagcacagtttactttcttcaacaaaactggacttttccaggatgtaggaccccaaagaaaaactttagtgagttatgtgatggcgtgcagtattggaaacattactatccagaatctgaaggatcctgttcaaataaaaatcaaacatacaagaactcaggaagtgcatcatcccatctgtgccttctgggatctgaacaaaaacaaaagttttggaggatggaacacgtcaggatgtgttgcacacagagattcagatgcaagtgagacagtctgcctgtgtaaccacttcacacactttggagttctgatggaccttccaagaagtgcctcacagttagatgcaagaaacactaaagtcctcactttcatcagctatattgggtgtggaatatctgctattttttcagcagcaactctcctgacatatgttgcttttgagaaattgcgaagggattatccctccaaaatcttgatgaacctgagcacagccctgctgttcctgaatctcctcttcctcctagatggctggatcacctccttcaatgtggatggactttgcattgctgttgcagtcctgttgcatttcttccttctggcaacctttacctggatggggctagaagcaattcacatgtacattgctctagttaaagtatttaacacttacattcgccgatacattctaaaattctgcatcattggctggggtttgcctgccttagtggtgtcagttgttctagcgagcagaaacaacaatgaagtctatggaaaagaaagttatgggaaagaaaaaggtgatgaattctgttggattcaagatccagtcatattttatgtgacctgtgctgggtattttggagtcatgttttttctgaacattgccatgttcattgtggtaatggtgcagatctgtgggaggaatggcaagagaagcaaccggaccctgagagaagaagtgttaaggaacctgcgcagtgtggttagcttgacctttctgttgggcatgacatggggttttgcattctttgcctggggacccttaaatatccccttcatgtacctcttctccatcttcaattcattacaaggcttatttatattcatcttccactgtgctatgaaggagaatgttcagaaacagtggcggcagcatctctgctgtggtagatttcggttagcagataactcagattggagtaagacagctaccaatatcatcaagaaaagttctgataatctaggaaaatctttgtcttcaagctccattggttccaactcaacctatcttacatccaaatctaaatccagctctaccacctatttcaaaaggaatagccacacagacagtgcttccatggacaagtccttgtcaaaactggcccatgctgatggagatcaaacatcaatcatccctgtccatcaggtcattgataaggtcaagggttattgcaatgctcattcagacaacttctataaaaatattatcatgtcagacaccttcagccacagcacaaagttttaatgtctttaagaaaaagaaatcaatctgcagaaatgtgaagatttgcaagcagtgtaaactgcaactagtgatgtaaatgtgctattacctaggtaactgcatatatataaggaatgtattttgttaagaaggcttttgtgaaattcagaatttttctttttaatatatttcttccatggaagagttgtcatcactaaaacttcagtactgagagtaacatgactcagtagccacagaagctatgatttgtaaaatatataattgaatcagagtaatcataatgcaggggagacattcaaattagagacaagggagaagcaatgctgaggaagaccctagatagagctcattttactccacctaatcgttatatctggatatacccattttctgcatcttctttctcaacaataaaaaatgtaactattttgaatgcccacaaatcccattccagtgttactttctgtgaatgcagtaccatattctcattttcaatgacatttcaaccacaggcagaaaagactgtttactccttgacccaaagattaaaaaggattttttattattttaaatattacaccttcagaaccataacatgcttaagaaaactttcccaaaatgttgacctagttaaatgaggctatataaatttctaatattttacttattctattcaaggcatagggccaaagcattaagtataatttaatcccatacattcgagttaagtttagtgttgatgttccatcattctggacctcccaggagttgtttaagaatgaatctcttacacctctacttttgcccctctactgtatattaagcccataggcttgtgggaggaaggagaatttccattaggcaagctgtatgcagtggaattttccttttaggagacacacaattaagactctctggttctgtccttgctttggagactttaagacatttcctaaagcacaaataaaagcctcgtatttccccattgagagttttgttccaaggaatatgaagtgagacatatgggtgagtcataataatcaaaataatttatgaagagctgggtctgcaatagctagtctaaaaactacttgtgtgtcagtcctctggttatagtatataagagcctgaggaggtctggcaagatagatggtgtattatttatggatcaggctgctgcatacaaaccttgcatactattatgcagcttacctaactctcagactattctgagtaatgcttgcttgctaatgaatgtataggagaccacattgtaattgttcttagatgatggagtccatgcagtttcttagaaatcggtctcagtgcatgctgtgctttttcacatttgctctgggttatctgggaagtatcaggttctgggaggcaacagcattaagtgataagaaaaggagacattctggcaaagccaatctgcttaaaggcaaagtccagaacctggaacctagaggcctttctctctgcacgaaaaacaggtagtttgcagtctgagatatgggagagcttttaggctacacagcaacccaagggacctctcaccttttgctgagcttcaatcaggaagctatttgcctggctccagcagatgatgagataatgaggtagtgggttttttattactgttccattttgcaacatcctgcaacaccatcctgggagacaagagcattacccagcttggctttcacgggggagggttgtattcagtaaaaaagaatagtaaatataaggtcactgagattctaagtaagatagtaaatctaaggtcactgagccaaatccttttcaataggcatatattaacaggctgcttattttggcggaggttacatatggatgaaaatgaatcttagtcactgaatattcatatacatttcccccaaaaccttagacattcatagtagattttaattagttagctttctaactagtcagatttctgcccaaagtgcttagtcaatagtaattaagatatagcttcaaaaatggctttgcttttgatttctactcatattcgtatggctccagaaaaatatttttttcatatttgacaatgtcagctccactttagaaattttcaataaccagatgagaaaaaaattaagaaattgctcaagggaaacatttgtaaatggatttgaaagattgagccaaattctgttgtcagttctaagcatgcagttctcacctccatttagtcccccatcagaacagaggtcaggaatttagctggggagcctaaatttagttcagcttacctttgagaatagcatcaattcagactctcttttcattatgttttcttttctttttccctctttttaaactacattgtgttagagtcatagtctaggatcctgagagattttccattcttgtcaccattcacttgcattgtaaagattttctttgtctgttgttggcatagattcttttgtacatatttatttatttgtgtttatatatgtcaattggtttcctttcttagcttgatattgcctagctttgttgttttaattaactttctattagagagactgtatatattttttctaaatactttgtgaaatcatttttggtagcaatatctttgaatatgatgaataaaagtgactgtgagtgcaaatagaattagcagtaagaagctactctagctaatttgccattttacttaaatggaaaatgtttttcaaataaatacttatgttgttcatgttc

SEQ ID NO: 11532 - DNA, 6887 bp, Homo sapiens
  source 1..6887: mol_type = unassigned DNA
ccaagtacctagggtggtggccgagtcccgcctcccgccagcgggggcgaggacctgcgacgcgcacccctgcctggcccggtctcctcagcaccagccccacgcacaccctacttcctcagcttctcgccctcaccctgccaacttccctgcgaggagggacctgccgccagcctgcttcctcgtccgcaggccctgcgctgaacgctgccgcgcccagggttcaccttgcgccgtcgggaaagcccatgaactctccagaaacggcgtaaaggagggtcccgccgcggcgcagggctggggcgcctgggttccccctgggtggagcagcggcagcagagcgggaaagtggtggaggatgatcttgcggccaaaggggacctcggcgcagtaatgtcaacatgatgtttcgctcagatcgaatgtggagctgccattggaaatggaagcccagtcctctcctgttcttatttgctttatatatcatgtgtgttcctcactcagtgtggggatgtgccaactgccgagtggttttgtccaacccttctgggacctttacttctccatgctaccctaacgactacccaaacagccaggcttgcatgtggacgctccgagcccccaccggttatatcattcagataacatttaacgactttgacattgaagaagctcccaattgcatttatgactcattatcccttgataatggagagagccagactaaattttgtggagcaactgccaaaggcctatcatttaactcaagtgcgaatgagatgcatgtgtccttttcaagtgactttagcatccagaagaaaggtttcaatgccagctacatcagagttgccgtgtccttaaggaatcaaaaggtcattttaccccagacatcagatgcttaccaggtatctgttgcaaaaagcatctctattccagagctcagtgctttcacactctgctttgaagcaaccaaagttggccatgaagacagtgattggacagctttctcctactcaaatgcatccttcacacaattgctcagttttggaaaggccaagagtggctactttctatccatttctgattcaaaatgtttgttgaataatgcattacctgtcaaagaaaaagaagacatttttgcagaaagctttgaacagctctgccttgtttggaataattctttgggctctattggtgtaaatttcaaaagaaactatgaaacagttccatgtgattctaccattagtaaagttattcctgggaatgggaaattgttgttgggctccaatcaaaatgaaattgtctctctaaaaggggacatttataactttcgactttggaattttaccatgaatgccaaaatcctctccaacctcagctgtaatgtgaaagggaatgtagtcgactggcaaaatgacttctggaatatcccaaacctagctctgaaagctgaaagcaacctaagctgtggttcctacctgatcccgctcccagcagcagaactggccagctgtgcagacctggggaccctctgtcaagctactgtaaactctcctagtactacaccacccactgtcaccactaacatgcctgttactaacagaatcgataaacaaaggaatgatggaattatctatagaatatccgtagtgattcagaacatccttcgtcaccctgaggtaaaagtacagagcaaggtggcagaatggctcaattcaaccttccaaaattggaactacacggtttatgtcgttaatatcagttttcacctgagtgctggagaggacaagattaaagtcaagagaagccttgaggatgagccaaggttggtgctttgggcccttctagtttacaatgctaccaacaatactaatttggaaggaaaaatcattcagcagaagctcctaaaaaataatgagtccttggatgaaggcttgaggctacatacagtgaatgtgagacaactgggtcattgtcttgccatggaggaacccaaaggctactactggccatctatccaaccttctgaatacgttcttccttgtccagacaagcctggcttttctgcttctcggatatgtttttacaatgctaccaacccattggtaacctactggggacctgttgatatctccaactgtttaaaagaagcaaatgaagttgctaaccagattttaaatttaactgctgatgggcagaacttaacctcagccaatattaccaacattgtggaacaggtcaaaagaattgtgaataaagaagaaaacattgatataacacttggctcaactctaatgaatatattttctaatatcttaagcagttcagacagtgacttgcttgagtcatcttctgaagctttaaaaacaattgatgaattggccttcaagatagacctaaatagcacatcacatgtgaatattacaactcggaacttggctctcagcgtatcatccctgttaccagggacaaatgcaatttcaaattttagcattggtcttccaagcaataatgaatcgtatttccagatggattttgagagtggacaagtggatccactggcatctgtaattttgcctccaaacttacttgagaatttaagtccagaagattctgtattagttagaagagcacagtttactttcttcaacaaaactggacttttccaggatgtaggaccccaaagaaaaactttagtgagttatgtgatggcgtgcagtattggaaacattactatccagaatctgaaggatcctgttcaaataaaaatcaaacatacaagaactcaggaagtgcatcatcccatctgtgccttctgggatctgaacaaaaacaaaagttttggaggatggaacacgtcaggatgtgttgcacacagagattcagatgcaagtgagacagtctgcctgtgtaaccacttcacacactttggagttctgatggaccttccaagaagtgcctcacagttagatgcaagaaacactaaagtcctcactttcatcagctatattgggtgtggaatatctgctattttttcagcagcaactctcctgacatatgttgcttttgagaaattgcgaagggattatccctccaaaatcttgatgaacctgagcacagccctgctgttcctgaatctcctcttcctcctagatggctggatcacctccttcaatgtggatggactttgcattgctgttgcagtcctgttgcatttcttccttctggcaacctttacctggatggggctagaagcaattcacatgtacattgctctagttaaagtatttaacacttacattcgccgatacattctaaaattctgcatcattggctggggtttgcctgccttagtggtgtcagttgttctagcgagcagaaacaacaatgaagtctatggaaaagaaagttatgggaaagaaaaaggtgatgaattctgttggattcaagatccagtcatattttatgtgacctgtgctgggtattttggagtcatgttttttctgaacattgccatgttcattgtggtaatggtgcagatctgtgggaggaatggcaagagaagcaaccggaccctgagagaagaagtgttaaggaacctgcgcagtgtggttagcttgacctttctgttgggcatgacatggggttttgcattctttgcctggggacccttaaatatccccttcatgtacctcttctccatcttcaattcattacaaggcttatttatattcatcttccactgtgctatgaaggagaatgttcagaaacagtggcggcagcatctctgctgtggtagatttcggttagcagataactcagattggagtaagacagctaccaatatcatcaagaaaagttctgataatctaggaaaatctttgtcttcaagctccattggttccaactcaacctatcttacatccaaatctaaatccagctctaccacctatttcaaaaggaatagccacacagacagtgcttccatggacaagtccttgtcaaaactggcccatgctgatggagatcaaacatcaatcatccctgtccatcaggtcattgataaggtcaagggttattgcaatgctcattcagacaacttctataaaaatattatcatgtcagacaccttcagccacagcacaaagttttaatgtctttaagaaaaagaaatcaatctgcagaaatgtgaagatttgcaagcagtgtaaactgcaactagtgatgtaaatgtgctattacctaggtaactgcatatatataaggaatgtattttgttaagaaggcttttgtgaaattcagaatttttctttttaatatatttcttccatggaagagttgtcatcactaaaacttcagtactgagagtaacatgactcagtagccacagaagctatgatttgtaaaatatataattgaatcagagtaatcataatgcaggggagacattcaaattagagacaagggagaagcaatgctgaggaagaccctagatagagctcattttactccacctaatcgttatatctggatatacccattttctgcatcttctttctcaacaataaaaaatgtaactattttgaatgcccacaaatcccattccagtgttactttctgtgaatgcagtaccatattctcattttcaatgacatttcaaccacaggcagaaaagactgtttactccttgacccaaagattaaaaaggattttttattattttaaatattacaccttcagaaccataacatgcttaagaaaactttcccaaaatgttgacctagttaaatgaggctatataaatttctaatattttacttattctattcaaggcatagggccaaagcattaagtataatttaatcccatacattcgagttaagtttagtgttgatgttccatcattctggacctcccaggagttgtttaagaatgaatctcttacacctctacttttgcccctctactgtatattaagcccataggcttgtgggaggaaggagaatttccattaggcaagctgtatgcagtggaattttccttttaggagacacacaattaagactctctggttctgtccttgctttggagactttaagacatttcctaaagcacaaataaaagcctcgtatttccccattgagagttttgttccaaggaatatgaagtgagacatatgggtgagtcataataatcaaaataatttatgaagagctgggtctgcaatagctagtctaaaaactacttgtgtgtcagtcctctggttatagtatataagagcctgaggaggtctggcaagatagatggtgtattatttatggatcaggctgctgcatacaaaccttgcatactattatgcagcttacctaactctcagactattctgagtaatgcttgcttgctaatgaatgtataggagaccacattgtaattgttcttagatgatggagtccatgcagtttcttagaaatcggtctcagtgcatgctgtgctttttcacatttgctctgggttatctgggaagtatcaggttctgggaggcaacagcattaagtgataagaaaaggagacattctggcaaagccaatctgcttaaaggcaaagtccagaacctggaacctagaggcctttctctctgcacgaaaaacaggtagtttgcagtctgagatatgggagagcttttaggctacacagcaacccaagggacctctcaccttttgctgagcttcaatcaggaagctatttgcctggctccagcagatgatgagataatgaggtagtgggttttttattactgttccattttgcaacatcctgcaacaccatcctgggagacaagagcattacccagcttggctttcacgggggagggttgtattcagtaaaaaagaatagtaaatataaggtcactgagattctaagtaagatagtaaatctaaggtcactgagccaaatccttttcaataggcatatattaacaggctgcttattttggcggaggttacatatggatgaaaatgaatcttagtcactgaatattcatatacatttcccccaaaaccttagacattcatagtagattttaattagttagctttctaactagtcagatttctgcccaaagtgcttagtcaatagtaattaagatatagcttcaaaaatggctttgcttttgatttctactcatattcgtatggctccagaaaaatatttttttcatatttgacaatgtcagctccactttagaaattttcaataaccagatgagaaaaaaattaagaaattgctcaagggaaacatttgtaaatggatttgaaagattgagccaaattctgttgtcagttctaagcatgcagttctcacctccatttagtcccccatcagaacagaggtcaggaatttagctggggagcctaaatttagttcagcttacctttgagaatagcatcaattcagactctcttttcattatgttttcttttctttttccctctttttaaactacattgtgttagagtcatagtctaggatcctgagagattttccattcttgtcaccattcacttgcattgtaaagattttctttgtctgttgttggcatagattcttttgtacatatttatttatttgtgtttatatatgtcaattggtttcctttcttagcttgatattgcctagctttgttgttttaattaactttctattagagagactgtatatattttttctaaatactttgtgaaatcatttttggtagcaatatctttgaatatgatgaataaaagtgactgtgagtgcaaatagaattagcagtaagaagctactctagctaatttgccattttacttaaatggaaaatgtttttcaaataaatacttatgttgttc

SEQ ID NO: 11533 - DNA, 3140 bp, Homo sapiens
  source 1..3140: mol_type = unassigned DNA
ataactctaatcacttttttcatgttctccttgagtgaaggatgaggaaattgaaagcagagtatgcaccttttattaggagattcaaactgcatcctactggattagcctcaaaagtcctaaaatacaaagacatccatctgacagatcactgaggggaggacttgtttttctgttttagaatagtttccgattaaactttttagctcaagaagaaaagaagctagttatttctcacccaggagtggatttgtggtttggcttcaccatggcttcctgccgtgcctggaaccttagggtgctggtggctgtcgtgtgtggactactgactggcatcattttgggactgggcatctggaggattgtgatcaggatccaaagaggaaaatctacttcctcatcaagcacccctacagagttctgcaggaatggtggaacctgggaaaatggcagatgtatttgtacagaagagtggaaaggactgagatgtacaattgctaatttttgtgaaaatagtacctatatgggttttacttttgccagaatcccagtgggcagatatggaccatccttgcaaacatgtggcaaggatactccaaatgcgggcaatccaatggcagtccggttgtgcagtctctctctatatggagagatagaattacaaaaagtgacaataggaaattgcaatgaaaatctggaaaccctggaaaagcaggtaaaggatgtcacagcaccacttaataacatttcttctgaagtccagattttaacatctgatgccaataaattaactgctgagaacatcactagtgctacgcgagtggttggacagatattcaacacttccagaaatgcttcacctgaggcaaagaaagttgccatagtaacagtgagtcaactcctagatgccagtgaagatgcttttcaaagagttgctgctactgctaatgatgatgcccttacaacgcttattgagcaaatggagacttattccttgtctttgggtaatcaatcagtggtggaacctaacatagcaatacagtcagcaaatttctcttcagaaaatgcggtggggccttcaaatgttcgcttctctgtgcagaaaggagctagcagttctctagtttctagttcaacatttatacatacaaatgtggatggccttaacccagatgcacagactgagcttcaggtcttgcttaatatgacgaaaaattacaccaagacatgcggctttgtagtttatcaaaatgacaagcttttccaatcaaaaacttttacagctaaatcggattttagtcaaaaaattatctcaagcaaaactgatgaaaatgagcaagatcagagtgcttctgttgacatggtctttagtccaaagtacaaccaaaaagaatttcaactctattcctatgcctgtgtctattggaatttgtcagcgaaggactgggacacatatggctgtcaaaaagacaagggcactgatggattcctgcgctgccgctgcaaccatactactaattttgctgtattaatgactttcaaaaaggattatcaatatcccaaatcacttgacatattatccaacgttggatgtgcactgtctgttactggtctggctctcacagttatatttcagattgtcaccaggaaagtcagaaaaacctcagtaacctgggttttggtcaatctgtgcatatcaatgttgattttcaacctcctctttgtgtttggaattgaaaactccaataagaacttgcagacaagtgatggtgacatcaataatattgactttgacaataatgacatacccaggacagacaccattaacatcccgaatcccatgtgcactgcgattgccgccttactgcactattttctgttagtgacatttacctggaacgcactcagcgctgcacagctctattaccttctaataaggaccatgaagcctcttcctcggcatttcattcttttcatctcattaattggatggggagtcccagctatagtagtggctataacagtgggagttatttattctcagaatggaaataatccacagtgggaattagactaccggcaagagaaaatctgctggctggcaattccagaacccaatggtgttataaaaagtccgctgttgtggtcattcatcgtacctgtaaccattatcctcatcagcaatgttgttatgtttattacaatctcgatcaaagtgctgtggaagaataaccagaacctgacaagcacaaaaaaagtttcatccatgaagaagattgttagcacattatctgttgcagttgtttttggaattacctggattctagcatacctgatgctagttaatgatgatagcatcaggatcgtcttcagctacatattctgccttttcaacactacacagggattgcaaatttttatcctgtacactgttagaacaaaagtcttccagagtgaagcttccaaagtgttgatgttgctatcgtctattgggagaaggaagtcattgccttcagtgacgcggccgaggctgcgtgtaaagatgtataatttcctcaggtcattgccaaccttacatgaacgctttaggctactggaaacctctccgagtactgaggaaatcacactctctgaaagtgacaatgcaaaggaaagcatctagacagtaaaacttacctgttgtggtctttttaatcacctcgtttgagttttatctgtttctctcctttatttcccagtcctctcagaaagtcttcctcaatgtattttgctcaggattaagaattagataaaacctgttgtttattattattcggcataatggacttggtagtttttctatttttcaatagatttgtacttgaataaggtgaagaatttcacacaacatacaagagtaccattgttccttatatcgttaaatctttgtgacacactttgacaaaaatgtagaacctataacaaattcttttacaagttactataaaggacacaaagagaaaactttaccttccagaacaaaatgactcctgatgaacagtgtgtggggatttgcttgtatgtattaaacttttgacctctgaatattttacagtcgtatgtgcttgtacttttatttccaatgaagaatttggcaccaa

SEQ ID NO: 11534 - DNA, 2035 bp, Homo sapiens
  source 1..2035: mol_type = unassigned DNA
ttatttacctgcagttgcttacaaagtgtttggacataattgtgtaaagctagggttttttttctggtttttaaaacaggtaaaggatgtcacagcaccacttaataacatttcttctgaagtccagattttaacatctgatgccaataaattaactgctgagaacatcactagtgctacgcgagtggttggacagatattcaacacttccagaaatgcttcacctgaggcaaagaaagttgccatagtaacagtgagtcaactcctagatgccagtgaagatgcttttcaaagagttgctgctactgctaatgatgatgcccttacaacattacaccaagacatgcggctttgtagtttatcaaaatgacaagcttttccaatcaaaaacttttacagctaaatcggattttagtcaaaaaattatctcaagcaaaactgatgaaaatgagcaagatcagagtgcttctgttgacatggtctttagtccaaagtacaaccaaaaagaatttcaactctattcctatgcctgtgtctattggaatttgtcagcgaaggactgggacacatatggctgtcaaaaagacaagggcactgatggattcctgcgctgccgctgcaaccatactactaattttgctgtattaatgactttcaaaaaggattatcaatatcccaaatcacttgacatattatccaacgttggatgtgcactgtctgttactggtctggctctcacagttatatttcagattgtcaccaggaaagtcagaaaaacctcagtaacctgggttttggtcaatctgtgcatatcaatgttgattttcaacctcctctttgtgtttggaattgaaaactccaataagaacttgcagacaagtgatggtgacatcaataatattgactttgacaataatgacatacccaggacagacaccattaacatcccgaatcccatgtgcactgcgattgccgccttactgcactattttctgttagtgacatttacctggaacgcactcagcgctgcacagctctattaccttctaataaggaccatgaagcctcttcctcggcatttcattcttttcatctcattaattggatggggagtcccagctatagtagtggctataacagtgggagttatttattctcagaatggaaataatccacagtgggaattagactaccggcaagagaaaatctgctggctggcaattccagaacccaatggtgttataaaaagtccgctgttgtggtcattcatcgtacctgtaaccattatcctcatcagcaatgttgttatgtttattacaatctcgatcaaagtgctgtggaagaataaccagaacctgacaagcacaaaaaaagtttcatccatgaagaagattgttagcacattatctgttgcagttgtttttggaattacctggattctagcatacctgatgctagttaatgatgatagcatcaggatcgtcttcagctacatattctgccttttcaacactacacagggattgcaaatttttatcctgtacactgttagaacaaaagtcttccagagtgaagcttccaaagtgttgatgttgctatcgtctattgggagaaggaagtcattgccttcagtgacgcggccgaggctgcgtgtaaagatgtataatttcctcaggtcattgccaaccttacatgaacgctttaggctactggaaacctctccgagtactgaggaaatcacactctctgaaagtgacaatgcaaaggaaagcatctagacagtaaaacttacctgttgtggtctttttaatcacctcgtttgagttttatctgtttctctcctttatttcccagtcctctcagaaagtcttcctcaatgtattttgctcaggattaagaattagataaaacctgttgtttattattattcggcataatggacttggtagtttttctatttttcaatagatttgtacttgaataaggtgaagaatttcacacaacatacaagagtaccattgttccttatatcgtt

SEQ ID NO: 11535 - DNA, 3658 bp, Homo sapiens
  source 1..3658: mol_type = unassigned DNA
agctaggactgcagggaggggtgcgaggctagccacgcaggcggggccctgggtcattttaaactctcagagtgaacgtcttgataggaccgacaagacgcatgacatgtacttagaaagcttatcttagagccacactgagattggaacccgcaaaatatgccagggaggaaggtgagcaagggacacgacactcacccggagaaacccagcaagcgcagcgaggctgtggggagaccggagccctgcacaccgccgggggaaggtgggccagcgccaccaccgtggagaacagcgcggaggcaccccacgagatgagacggaactgccgtgagatccagcaatgccaactgtgggtctgacccaggagaacggaaagcagggacgtgaacagccctcctcatgttcttgacaccgtcattctcagcagctcagctaaggcacagaggcagccgagcgtctgtcagcggagtcgtggctgagcagaacacgccacacgccacacgccacacgccacacgtgcaggattgctcaagatggaagggcacagtggaatatatatatatatttatatttttggcgagaccctggaggacacactgaatacaatggaataccatcccgcctttgaaaggaagggaaatcctggcacacgctgcaacaggagggagcttgaggacactgtggtgagtggagcacgtgagacacggaaggacacacgctgaagacacgcagagatgcccacccacgtggggaggtgacaggggagcccagcgcacagagacaaagtggaatggaggcctgggggctgggagcaaatgcggagcgagtgcttcctggggcagagtctccgtttgggaagatgagaaggttctgccgacggatgctggcgatggttgcagaagaatgtgaatgtgcccaatgctactgaaaaacggttacaatggaaacgccaccccagtgaccaccactgccccgtgggcctccctgggcctctccgccaagacctgcaacaacgtgtccttcgaagagagcaggatagtcctggtcgtggtgtacagcgcggtgtgcacgctgggggtgccggccaactgcctgactgcgtggctggcgctgctgcaggtactgcagggcaacgtgctggccgtctacctgctctgcctggcactctgcgagctgctgtacacaggcacgctgccactctgggtcatctatatccgcaaccagcaccgctggaccctaggcctgctggcctgcaaggtgaccgcctacatcttcttctgcaacatctacgtcagcatcctcttcctgtgctgcatctcctgcgaccgcttcgtggccgtggtgtacgcgctggagagtcggggccgccgccgccggaggaccgccatcctcatctccgcctgcatcttcatcctcgtcgggatcgttcactacccggtgttccagacggaagacaaggagacctgctttgacatgctgcagatggacagcaggattgccgggtactactacgccaggttcaccgttggctttgccatccctctctccatcatcgccttcaccaaccaccggattttcaggagcatcaagcagagcatgggcttaagcgctgcccagaaggccaaggtgaagcactcggccatcgcggtggttgtcatcttcctagtctgcttcgccccgtaccacctggttctcctcgtcaaagccgctgccttttcctactacagaggagacaggaacgccatgtgcggcttggaggaaaggctgtacacagcctctgtggtgtttctgtgcctgtccacggtgaacggcgtggctgaccccattatctacgtgctggccacggaccattcccgccaagaagtgtccagaatccataaggggtggaaagagtggtccatgaagacagacgtcaccaggctcacccacagcagggacaccgaggagctgcagtcgcccgtggcccttgcagaccactacaccttctccaggcccgtgcacccaccagggtcaccatgccctgcaaagaggctgattgaggagtcctgctgagcccactgtgtggcagggggatggcaggttgggggtcctggggccagcaatgtggttcctgtgcactgagcccaccagccacagtgcccatgtcccctctggaagacaaactaccaatttctcgttcctgaagccactccctccgtgaccactggccccaggctttcccacatggaaggtggctgcatgccaaggggaggagcgacacctccaggcttccgggagcccagagagcatgtggcaggcagtggggcctcttcatcagcagcctgcctggctggctcccttggctgtgggcaggtagcacgcctgctggcagaggtacctggtggctgccctgttcgcatcagtggcgatgactttatttgcggagcatttctgcaagcgttgcctggatgcggtggtgcattgtgggccctctgggctcctgcctcagaatgtcagtgagcaccatgctggaggtcacccagcactgtggcagcgcccaggagggcatagggcagcctaccacctccaagggggcaggcgccctcatctggggttgggtctgtgctgagctggagggcctctagggaaccgtggggcagggtggccagctgctggctcccagagcgcagcccaggcgtcctcaacggggagccccaaatgtccacgcccagaacaacagttggcaggacaggtgtgacacagccacagcagaggcaaggggtgccaggagtccccagcggcatcctcggggagatgctggtgaggggtccgtacagggtggggtccccacccctagccccttactgaggggggagtgcagcagttggcctgcttgtctggcggagaaagccagctccctgcaccctcggggctgagtcagatctgggtctgccgcaaaggccttgcctagaccaggtcacactgatgccctggtttccctatctgtaaaatggggccaatgacacctacctcactgggtcaccatcgagatcaatcctcctccctgccccgacacctcgggcacatcgcatgcactcagagcacagagccgggcagacgcagcacctgcatggggagcccagtgcccggcacagcacaggggcttccagggaggccgcgcagggccgtggggctgagccacgctctcgttttgtcaggcagctatgcagttgctcttccttgtttttgttttgtttttgtttttgtttttaatatttatttttttagagacagggccttgctctgttgcctgggctggagaacagtggcaccatcatagctcactgcagcctcaaactcctgggctcaagcgatcctccccgctcagcctcctgagtagctgggactacaggtgtgcaccaccacacccagccaaaacagccatcctccccttgagagtcatcagaaaaatacattaggaaaatgtgtttagaaataaaagcacaaggcagggcagtgctcacgcctgtcatcccagcactttgggaggccgagacgggaggatcagttgaggtcaggagtttgagaccagcctcggcaacatggcaaaatcttgtctcttttttttggtattaaaaaaatcataaaaataaaagaaataatgcaatttaacctt

SEQ ID NO: 11536 - DNA, 2887 bp, Homo sapiens
  source 1..2887: mol_type = unassigned DNA
acttcctgaaacctcagctaggactgcagggaggggtgcgaggctagccacgcaggcggggccctgggtcattttaaactctcagagtgaacgtcttgataggaccgacaagacgcatgacatgtacttagaaagcttatcttagagccacactgagattggaacccgcaaaatatgccaggaaacgccaccccagtgaccaccactgccccgtgggcctccctgggcctctccgccaagacctgcaacaacgtgtccttcgaagagagcaggatagtcctggtcgtggtgtacagcgcggtgtgcacgctgggggtgccggccaactgcctgactgcgtggctggcgctgctgcaggtactgcagggcaacgtgctggccgtctacctgctctgcctggcactctgcgagctgctgtacacaggcacgctgccactctgggtcatctatatccgcaaccagcaccgctggaccctaggcctgctggcctgcaaggtgaccgcctacatcttcttctgcaacatctacgtcagcatcctcttcctgtgctgcatctcctgcgaccgcttcgtggccgtggtgtacgcgctggagagtcggggccgccgccgccggaggaccgccatcctcatctccgcctgcatcttcatcctcgtcgggatcgttcactacccggtgttccagacggaagacaaggagacctgctttgacatgctgcagatggacagcaggattgccgggtactactacgccaggttcaccgttggctttgccatccctctctccatcatcgccttcaccaaccaccggattttcaggagcatcaagcagagcatgggcttaagcgctgcccagaaggccaaggtgaagcactcggccatcgcggtggttgtcatcttcctagtctgcttcgccccgtaccacctggttctcctcgtcaaagccgctgccttttcctactacagaggagacaggaacgccatgtgcggcttggaggaaaggctgtacacagcctctgtggtgtttctgtgcctgtccacggtgaacggcgtggctgaccccattatctacgtgctggccacggaccattcccgccaagaagtgtccagaatccataaggggtggaaagagtggtccatgaagacagacgtcaccaggctcacccacagcagggacaccgaggagctgcagtcgcccgtggcccttgcagaccactacaccttctccaggcccgtgcacccaccagggtcaccatgccctgcaaagaggctgattgaggagtcctgctgagcccactgtgtggcagggggatggcaggttgggggtcctggggccagcaatgtggttcctgtgcactgagcccaccagccacagtgcccatgtcccctctggaagacaaactaccaatttctcgttcctgaagccactccctccgtgaccactggccccaggctttcccacatggaaggtggctgcatgccaaggggaggagcgacacctccaggcttccgggagcccagagagcatgtggcaggcagtggggcctcttcatcagcagcctgcctggctggctcccttggctgtgggcaggtagcacgcctgctggcagaggtacctggtggctgccctgttcgcatcagtggcgatgactttatttgcggagcatttctgcaagcgttgcctggatgcggtggtgcattgtgggccctctgggctcctgcctcagaatgtcagtgagcaccatgctggaggtcacccagcactgtggcagcgcccaggagggcatagggcagcctaccacctccaagggggcaggcgccctcatctggggttgggtctgtgctgagctggagggcctctagggaaccgtggggcagggtggccagctgctggctcccagagcgcagcccaggcgtcctcaacggggagccccaaatgtccacgcccagaacaacagttggcaggacaggtgtgacacagccacagcagaggcaaggggtgccaggagtccccagcggcatcctcggggagatgctggtgaggggtccgtacagggtggggtccccacccctagccccttactgaggggggagtgcagcagttggcctgcttgtctggcggagaaagccagctccctgcaccctcggggctgagtcagatctgggtctgccgcaaaggccttgcctagaccaggtcacactgatgccctggtttccctatctgtaaaatggggccaatgacacctacctcactgggtcaccatcgagatcaatcctcctccctgccccgacacctcgggcacatcgcatgcactcagagcacagagccgggcagacgcagcacctgcatggggagcccagtgcccggcacagcacaggggcttccagggaggccgcgcagggccgtggggctgagccacgctctcgttttgtcaggcagctatgcagttgctcttccttgtttttgttttgtttttgtttttgtttttaatatttatttttttagagacagggccttgctctgttgcctgggctggagaacagtggcaccatcatagctcactgcagcctcaaactcctgggctcaagcgatcctccccgctcagcctcctgagtagctgggactacaggtgtgcaccaccacacccagccaaaacagccatcctccccttgagagtcatcagaaaaatacattaggaaaatgtgtttagaaataaaagcacaaggcagggcagtgctcacgcctgtcatcccagcactttgggaggccgagacgggaggatcagttgaggtcaggagtttgagaccagcctcggcaacatggcaaaatcttgtctcttttttttggtattaaaaaaatcataaaaataaaagaaataatgcaattt

SEQ ID NO: 11537 - DNA, 2779 bp, Homo sapiens
  source 1..2779: mol_type = unassigned DNA
agctaggactgcagggaggggtgcgaggctagccacgcaggcggggccctggctttataaaggtataattgacaaacaagaagagtacctaggccaggtgcggtggcttacgcctgtaatcccagcactttgggaggccgaggtcattttaaactctcagagtgaacgtcttgataggaccgacaagacgcatgacatgtacttagaaagcttatcttagagccacactgagattggaacccgcaaaatatgccagggaggaaggtgagcaagggacacgacactcacccggagaaacccagcaagcgcagcgaggctgtggggagaccggagccctgcacaccgccgggggaaggtgggccagcgccaccaccgtggagaacagcgcggaggcaccccacgagatgagacggaactgccgtgagatccagcaatgccaactgtgggtctgacccaggagaacggaaagcagggacgtgaacagccctcctcatgttcttgacaccgtcattctcagcagctcagctaaggcacagaggcagccgagcgtctgtcagcggagtcgtggctgagcagaacacgccacacgccacacgccacacgccacacgtgcaggattgctcaagatggaagggcacagtggaatatatatatatatttatatttttggcgagaccctggaggacacactgaatacaatggaataccatcccgcctttgaaaggaagggaaatcctggcacacgctgcaacaggagggagcttgaggacactgtggtgagtggagcacgtgagacacggaaggacacacgctgaagacacgcagagatgcccacccacgtggggaggtgacaggggagcccagcgcacagagacaaagtggaatggaggcctgggggctgggagcaaatgcggagcgagtgcttcctggggcagagtctccgtttgggaagatgagaaggttctgccgacggatgctggcgatggttgcagaagaatgtgaatgtgcccaatgctactgaaaaacggttacaatggaaacgccaccccagtgaccaccactgccccgtgggcctccctgggcctctccgccaagacctgcaacaacgtgtccttcgaagagagcaggatagtcctggtcgtggtgtacagcgcggtgtgcacgctgggggtgccggccaactgcctgactgcgtggctggcgctgctgcaggtactgcagggcaacgtgctggccgtctacctgctctgcctggcactctgcgagctgctgtacacaggcacgctgccactctgggtcatctatatccgcaaccagcaccgctggaccctaggcctgctggcctgcaaggtgaccgcctacatcttcttctgcaacatctacgtcagcatcctcttcctgtgctgcatctcctgcgaccgcttcgtggccgtggtgtacgcgctggagagtcggggccgccgccgccggaggaccgccatcctcatctccgcctgcatcttcatcctcgtcgggatcgttcactacccggtgttccagacggaagacaaggagacctgctttgacatgctgcagatggacagcaggattgccgggtactactacgccaggttcaccgttggctttgccatccctctctccatcatcgccttcaccaaccaccggattttcaggagcatcaagcagagcatgggcttaagcgctgcccagaaggccaaggtgaagcactcggccatcgcggtggttgtcatcttcctagtctgcttcgccccgtaccacctggttctcctcgtcaaagccgctgccttttcctactacagaggagacaggaacgccatgtgcggcttggaggaaaggctgtacacagcctctgtggtgtttctgtgcctgtccacggtgaacggcgtggctgaccccattatctacgtgctggccacggaccattcccgccaagaagtgtccagaatccataaggggtggaaagagtggtccatgaagacagacgtcaccaggctcacccacagcagggacaccgaggagctgcagtcgcccgtggcccttgcagaccactacaccttctccaggcccgtgcacccaccagggtcaccatgccctgcaaagaggctgattgaggagtcctgctgagcccactgtgtggcagggggatggcaggttgggggtcctggggccagcaatgtggttcctgtgcactgagcccaccagccacagtgcccatgtcccctctggaagacaaactaccaatttctcgttcctgaagccactccctccgtgaccactggccccaggctttcccacatggaaggtggctgcatgccaaggggaggagcgacacctccaggcttccgggagcccagagagcatgtggcaggcagtggggcctcttcatcagcagcctgcctggctggctcccttggctgtgggcaggtagcacgcctgctggcagaggtacctggtggctgccctgttcgcatcagtggcgatgactttatttgcggagcatttctgcaagcgttgcctggatgcggtggtgcattgtgggccctctgggctcctgcctcagaatgtcagtgagcaccatgctggaggtcacccagcactgtggcagcgcccaggagggcatagggcagcctaccacctccaagggggcaggcgccctcatctggggttgggtctgtgctgagctggagggcctctagggaaccgtggggcagggtggccagctgctggctcccagagcgcagcccaggcgtcctcaacg

SEQ ID NO: 11538 - DNA, 1092 bp, Homo sapiens
  source 1..1092: mol_type = unassigned DNA
gacgttttgatgcctgttggcttggagccttgcttgtgtttctcatgtgggatgcaacggcagattctcaacatttaaaaaacacctacgaatcaacgggccacttagtaaattagtaaatactcactagccgtttgtcaatgggttaacttgtgactcaatctgatttccctaaaacaatttcaacctactctttttccaggtcattttaaactctcagagtgaacgtcttgataggaccgacaagacgcatgacatgtacttagaaagcttatcttagagccacactgagattggaacccgcaaaatatgccagggaggaaggtgagcaagggacacgacactcacccggagaaacccagcaagcgcagcgaggctgtggggagaccggagccctgcacaccgccgggggaaggtgggccagcgccaccaccgtggagaacagcgcggaggcaccccacgagatgagacggaactgccgtgagatccagcaatgccaactgtgggtctgacccaggagaacggaaagcagggacgtgaacagccctcctcatgttcttgacaccgtcattctcagcagctcagctaaggcacagaggcagccgagcgtctgtcagcggagtcgtggctgagcagaacacgccacacgccacacgccacacgccacacgtgcaggattgctcaagatggaagggcacagtggaatatatatatatatttatatttttggcgagaccctggaggacacactgaatacaatggaataccatcccgcctttgaaaggaagggaaatcctggcacacgctgcaacaggagggagcttgaggacactgtggtgagtggagcacgtgagacacggaaggacacacgctgaagacacgcagagatgcccacccacgtggggaggtgacaggggagcccagcgcacagagacaaagtggaatggaggcctgggggctgggagcaaatgcggagcgagtgcttcctggggcagagtctccgtttgggaagatgagaaggttctgccgacggatgctggcgatggttgcagaagaatgtgaatgtgcccaatgctactgaaaaacggttac

SEQ ID NO: 11539 - DNA, 5168 bp, Homo sapiens
  source 1..5168: mol_type = unassigned DNA
actcactccccctccacccagagagcaggacggaggtgtgaacttgagccagaccagaaggagctcgagagcggccgcaggacaagcccgaggagcaggcgggcgctccaggggaaaaccacgcacaaaaccttcttcagagaaaagggaagctccaaacctgactgagacaaacggaggctcttgaaataaaaagaaaataccgcaggacaaacagcctcccgtccccgggcgcaggtcgcggtcacagtggtgacctgggattgctttcccaggactgcgagtcgggtttgggtttctcctccctgcattccacagctgctctggtcatcgcaacgtgtttattgatcactgaagaatctcaagttttgagacgaggaagaaacacccattaggtctccaagacagctgtgtttcacaaactttaaggagacagaaattttctcccctggaacctgtgaaaatgtcccttttccaaggaagtgaaggttaagaggtcccgttctcacagaccctcaggaatttcacttggctccgagctttgacctccgagagagccatggaaaagctgctgcggctgtgctgctggtactcctggctgctgctattttattacaactttcaggtgcgtggcgtctactccagatcgcaggaccatccaggatttcaggtgttggcgtctgcttcccattactggccactggagaatgtggatgggatccatgaacttcaggatacaactggagatattgtggaagggaaggtcaacaaaggcatttacctgaaagaggaaaagggagtcacgcttctctattacggcaggtacaacagctcctgcatcagcaagccagagcagtgtggccctgaaggggtcacgttttcttttttctggaagacacaaggagaacagtctagaccaatcccttctgcgtatgggggacaggtcatctccaatgggttcaaagtctgctccagcggtggcagaggctctgtggagctgtatacgcgggacaattccatgacatgggaggcctccttcagccccccaggcccctattggactcatgtcctatttacatggaaatccaaggagggcctgaaagtctacgtcaacgggaccctgagcacctctgatccgagtggaaaagtgtctcgtgactatggagagtccaacgtcaacctcgtgatagggtctgagcaggaccaggccaagtgttatgagaacggtgctttcgatgagttcatcatctgggagcgggctctgactccggatgagatcgccatgtacttcactgctgccattggaaagcatgctttattgtcttcaacgctgccaagcctcttcatgacatccacagcaagccccgtgatgcccacagatgcctaccatcccatcataaccaacctgacagaagagagaaaaaccttccaaagtcccggagtgatactgagttacctccaaaatgtatccctcagcttacccagtaagtccctctcggagcagacagccttgaatctcaccaagaccttcttaaaagccgtgggagagatccttctactgcctggttggattgctctgtcagaggacagcgccgtggtactgagtctcatcgacactattgacaccgtcatgggccatgtatcctccaacctgcacggcagcacgccccaggtcaccgtggagggctcctctgccatggcagagttttccgtggccaaaatcctgcccaagaccgtgaattcctcccattaccgcttcccggcccacgggcagagcttcatccagatcccccacgaggccttccacaggcacgcctggagcaccgtcgtgggtctgctgtaccacagcatgcactactacctgaacaacatctggcccgcccacaccaagatcgcggaggccatgcatcaccaggactgcctgctgttcgccaccagccacctgatttccctggaggtgtccccaccacccaccctgtctcagaacctgtcgggctctccactcattacggtccacctcaagcacagattgacacgtaagcagcacagtgaggccaccaacagcagcaaccgagtcttcgtgtactgcgccttcctggacttcagctccggagaaggggtctggtcgaaccacggctgtgcgctcacgagaggaaacctcacctactccgtctgccgctgcactcacctcaccaactttgccatcctcatgcaggtggtcccgctggagcttgcacgcggacaccaggtggcgctgtcgtctatcagctatgtgggctgctccctctccgtgctctgcctggtggccacgctggtcaccttcgccgtgctgtcctccgtgagcaccatccggaaccagcgctaccacatccacgccaacctgtccttcgccgtgctggtggcccaggtcctgctgctcattagtttccgcctcgagccgggcacgaccccctgccaagtgatggccgtgctcctacactacttcttcctgagtgccttcgcatggatgctggtggaggggctgcacctctacagcatggtgatcaaggtctttgggtcggaggacagcaagcaccgttactactatgggatgggatggggttttcctcttctgatctgcatcatttcactgtcatttgccatggacagttacggaacaagcaacaattgctggctgtcgttggcgagtggcgccatctgggcctttgtagcccctgccctgtttgtcatcgtggtcaacattggcatcctcatcgctgtgaccagagtcatctcacagatcagcgccgacaactacaagatccatggagaccccagtgccttcaagttgacagccaaggcagtggccgtgctgctgcccatcctgggtacctcgtgggtctttggcgtgcttgctgtcaacggttgtgctgtggttttccagtacatgtttgccacgctcaactccctgcagggactgttcatattcctctttcattgtctcctgaattcagaggtgagagccgccttcaagcacaaaaccaaggtctggtcgctcacgagcagctctgcccgcacctccaacgcgaagcccttccactcggacctcatgaatgggacccggccaggcatggcctccaccaagctcagcccttgggacaagagcagccactctgcccaccgcgtcgacctgtcagccgtgtgagccgggaggctgccaaccaggccaggctgcgctcagaacacacccccccaaacagaatgaaatgccccacctttgcccatggaccctctccttgctgctgtctggacatgggtgttgtggccccgagacagctgtcctcccctgtgactctggctgtcggagcacactgctcagcccagcagcctgatgcccaggccagcgtgggccctcctgccttgcatccacccgtgggctgagtgacttcctcgggggattcccaggacacagtggcctgactgtgatggtgcccttgagcctcccttcatcactcagcatcagacccagcgaggccaggacactcggggccggtcccgcagcaccaggaggggatgttcagcctctgtgccttggtggggcttggggactcagggccaaagaggtggttcaggtccccacgcaccctcagtcaggcgcaggcagctgggggtgtgtggggaagagcatgcggagtccccagtgtctgaatccactgagtggtgagttccccacagccggcgctagccgtggtgtgtgtctctgtaggtggtgccggcgtgggccaacctgtgctgtgtcatcagttgggggcccctgcccaagccgagctcgagccgtgggcgggagtcgttgactctccaggtgagggcgacccctctgccctgtccttgggggggtcccctctgctcacgtgaagagccgctctgggccttgaggctgcctgatggtgcctgtgcttgggggagcttctcggccatccgctgtgagttttgcctctttggaccccaattcggccttaagatgccctcctccctcgtgtgccagcctccttggttgttcttgggccacaggagctggccgtgtccccgcagtgcctggtgtccaggtggaaagtggagggcattttccagggcactgctttccccagaggcttcctcatggctcacaggcactctacgaagtttctaatgggcagaccacgcggcaggtagcacagtgcgctccgtctggtcaccatgagaccgacctgcgctgagtccccactgacctggagagggagggctggtgacagccgtgtcttctgtgttgagggaaatttatggactcagattcagccccagaggagatgggataattgttatggacccatgtgtgggcatgatcctgtggaacacaggtttgggatcatagatgtgaattaagacaccaccgagatacgggctgtgaggttcatactgtgctgatagcactcgtggtgtctgtgaaatgtgggtaagacattcaaacctggttttgatactggaaactcttcctttaaaactgtgaccatgatttcattcagcccctccacacccctatgtctgccttgtttcagagtgagttttctatggagcctgtggcccttttgcagcccacctggtggcttcttaatgtaactcttcccctggtcgcctggagtggaccactcatctgcaggcctctcctgcatggggagggtaggcagggagcagcatgtctgcaggggtgaacctttgctcttctgtcaggcgaggcccaggctgcaccagccacctgccacatggtgacagtgccacgggccctgcgtatggcccctgcaaccgtgctctggcgggcacacctggctgctgcaggccaaggccgctgttcagtgaagagtcccatgtttagtatggactaaagtcccatgtttagccactgccccaggctcccgtgaccccagaaaccaggtcacatggaccacagtgccagatcctcatcacgccggtgagcacctagaagtgagaacactgtattcctacaatgtacacttggatatttctccttatttagtttctagtgaaacaaatcaagtaaggaactatctttagtttagatggaattatttgtttttaattgttgccgtattcatctatatagctaatatttcaagataagtaatgaacaaaac

SEQ ID NO: 11540 - DNA, 2892 bp, Homo sapiens
  source 1..2892: mol_type = unassigned DNA
gtcatggagtgtctgcacgggacgtcctggagagtcggacacgtaagcagcacagtgaggccaccaacagcagcaaccgagtcttcgtgtactgcgccttcctggacttcagctccggagaaggggtctggtcgaaccacggctgtgcgctcacgagaggaaacctcacctactccgtctgccgctgcactcacctcaccaactttgccatcctcatgcaggtggtcccgctggaggtcaacattggcatcctcatcgctgtgaccagagtcatctcacagatcagcgccgacaactacaagatccatggagaccccagtgccttcaagttgacagccaaggcagtggccgtgctgctgcccatcctgggtacctcgtgggtctttggcgtgcttgctgtcaacggttgtgctgtggttttccagtacatgtttgccacgctcaactccctgcagggactgttcatattcctctttcattgtctcctgaattcagaggtgagagccgccttcaagcacaaaaccaaggtctggtcgctcacgagcagctctgcccgcacctccaacgcgaagcccttccactcggacctcatgaatgggacccggccaggcatggcctccaccaagctcagcccttgggacaagagcagccactctgcccaccgcgtcgacctgtcagccgtgtgagccgggaggctgccaaccaggccaggctgcgctcagaacacacccccccaaacagaatgaaatgccccacctttgcccatggaccctctccttgctgctgtctggacatgggtgttgtggccccgagacagctgtcctcccctgtgactctggctgtcggagcacactgctcagcccagcagcctgatgcccaggccagcgtgggccctcctgccttgcatccacccgtgggctgagtgacttcctcgggggattcccaggacacagtggcctgactgtgatggtgcccttgagcctcccttcatcactcagcatcagacccagcgaggccaggacactcggggccggtcccgcagcaccaggaggggatgttcagcctctgtgccttggtggggcttggggactcagggccaaagaggtggttcaggtccccacgcaccctcagtcaggcgcaggcagctgggggtgtgtggggaagagcatgcggagtccccagtgtctgaatccactgagtggtgagttccccacagccggcgctagccgtggtgtgtgtctctgtaggtggtgccggcgtgggccaacctgtgctgtgtcatcagttgggggcccctgcccaagccgagctcgagccgtgggcgggagtcgttgactctccaggtgagggcgacccctctgccctgtccttgggggggtcccctctgctcacgtgaagagccgctctgggccttgaggctgcctgatggtgcctgtgcttgggggagcttctcggccatccgctgtgagttttgcctctttggaccccaattcggccttaagatgccctcctccctcgtgtgccagcctccttggttgttcttgggccacaggagctggccgtgtccccgcagtgcctggtgtccaggtggaaagtggagggcattttccagggcactgctttccccagaggcttcctcatggctcacaggcactctacgaagtttctaatgggcagaccacgcggcaggtagcacagtgcgctccgtctggtcaccatgagaccgacctgcgctgagtccccactgacctggagagggagggctggtgacagccgtgtcttctgtgttgagggaaatttatggactcagattcagccccagaggagatgggataattgttatggacccatgtgtgggcatgatcctgtggaacacaggtttgggatcatagatgtgaattaagacaccaccgagatacgggctgtgaggttcatactgtgctgatagcactcgtggtgtctgtgaaatgtgggtaagacattcaaacctggttttgatactggaaactcttcctttaaaactgtgaccatgatttcattcagcccctccacacccctatgtctgccttgtttcagagtgagttttctatggagcctgtggcccttttgcagcccacctggtggcttcttaatgtaactcttcccctggtcgcctggagtggaccactcatctgcaggcctctcctgcatggggagggtaggcagggagcagcatgtctgcaggggtgaacctttgctcttctgtcaggcgaggcccaggctgcaccagccacctgccacatggtgacagtgccacgggccctgcgtatggcccctgcaaccgtgctctggcgggcacacctggctgctgcaggccaaggccgctgttcagtgaagagtcccatgtttagtatggactaaagtcccatgtttagccactgccccaggctcccgtgaccccagaaaccaggtcacatggaccacagtgccagatcctcatcacgccggtgagcacctagaagtgagaacactgtattcctacaatgtacacttggatatttctccttatttagtttctagtgaaacaaatcaagtaaggaactatctttagtttagatggaattatttgtttttaattgttgccgtattcatctatatagctaatatttcaagataagtaatgaacaaaacctgtctaaaccttttgtttccaatgaatgaaagtcatgcactttatttataggctctatgttttggcttctgcagtacttttattatctatacataatttggccaaaaataagaaattggaaagaatgaaatgtttagtttatagtagaagaaagatgatgacactaagttgtgaaaatatgttgtgatttttatgaaataaactcatgtcctgaaaagaaa

SEQ ID NO: 11541 - DNA, 2776 bp, Homo sapiens
  source 1..2776: mol_type = unassigned DNA
tggctccgagctttgacctccgagagagccatggaaaagctgctgcggctgtgctgctggtactcctggctgctgctattttattacaactttcaggtgcgtggcgtctactccagatcgcaggaccatccaggatttcaggtgttggcgtctgcttcccattactggccactggagaatgtggatgggatccatgaacttcaggatacaactggagcgtcccgaacccacaagctcactgtgcttccttcccgtaatgctacttttgtgtattccaatgattctgcctactcaaatctctctgcaactgtagatattgtggaagggaaggtcaacaaaggcatttacctgaaagaggaaaagggagtcacgcttctctattacggcaggtacaacagctcctgcatcagcaagccagagcagtgtggccctgaaggggtcacgttttcttttttctggaagacacaaggagaacagtctagaccaatcccttctgcgtatgggggacaggtcatctccaatgggttcaaagtctgctccagcggtggcagaggctctgtggagctgtatacgcgggacaattccatgacatgggaggcctccttcagccccccaggcccctattggactcatgtcctatttacatggaaatccaaggagggcctgaaagtctacgtcaacgggaccctgagcacctctgatccgagtggaaaagtgtctcgtgactatggagagtccaacgtcaacctcgtgatagggtctgagcaggaccaggccaagtgttatgagaacggtgctttcgatgagttcatcatctgggagcgggctctgactccggatgagatcgccatgtacttcactgctgccattggaaagcatgctttattgtcttcaacgctgccaagcctcttcatgacatccacagcaagccccgtgatgcccacagatgcctaccatcccatcataaccaacctgacagaagagagaaaaaccttccaaagtcccggagtgatactgagttacctccaaaatgtatccctcagcttacccagtaagtccctctcggagcagacagccttgaatctcaccaagaccttcttaaaagccgtgggagagatccttctactgcctggttggattgctctgtcagaggacagcgccgtggtactgagtctcatcgacactattgacaccgtcatgggccatgtatcctccaacctgcacggcagcacgccccaggtcaccgtggagggctcctctgccatggcagagttttccgtggccaaaatcctgcccaagaccgtgaattcctcccattaccgcttcccggcccacgggcagagcttcatccagatcccccacgaggccttccacaggcacgcctggagcaccgtcgtgggtctgctgtaccacagcatgcactactacctgaacaacatctggcccgcccacaccaagatcgcggaggccatgcatcaccaggactgcctgctgttcgccaccagccacctgatttccctggaggtgtccccaccacccaccctgtctcagaacctgtcgggctctccactcattacggtccacctcaagcacagattgacacgtaagcagcacagtgaggccaccaacagcagcaaccgagtcttcgtgtactgcgccttcctggacttcagctccggagaaggggtctggtcgaaccacggctgtgcgctcacgagaggaaacctcacctactccgtctgccgctgcactcacctcaccaactttgccatcctcatgcaggtggtcccgctggagcttgcacgcggacaccaggtggcgctgtcgtctatcagctatgtgggctgctccctctccgtgctctgcctggtggccacgctggtcaccttcgccgtgctgtcctccgtgagcaccatccggaaccagcgctaccacatccacgccaacctgtccttcgccgtgctggtggcccaggtcctgctgctcattagtttccgcctcgagccgggcacgaccccctgccaagtgatggccgtgctcctacactacttcttcctgagtgccttcgcatggatgctggtggaggggctgcacctctacagcatggtgatcaaggtctttgggtcggaggacagcaagcaccgttactactatgggatgggatggggttttcctcttctgatctgcatcatttcactgtcatttgccatggacagttacggaacaagcaacaattgctggctgtcgttggcgagtggcgccatctgggcctttgtagcccctgccctgtttgtcatcgtggtcaacattggcatcctcatcgctgtgaccagagtcatctcacagatcagcgccgacaactacaagatccatggagaccccagtgccttcaagttgacagccaaggcagtggccgtgctgctgcccatcctgggtacctcgtgggtctttggcgtgcttgctgtcaacggttgtgctgtggttttccagtacatgtttgccacgctcaactccctgcagggactgttcatattcctctttcattgtctcctgaattcagaggtgagagccgccttcaagcacaaaaccaaggtctggtcgctcacgagcagctctgcccgcacctccaacgcgaagcccttccactcggacctcatgaatgggacccggccaggcatggcctccaccaagctcagcccttgggacaagagcagccactctgcccaccgcgtcgacctgtcagccgtgtgagccgggaggctgccaaccaggccag

SEQ ID NO: 11542 - DNA, 1695 bp, Homo sapiens
  source 1..1695: mol_type = unassigned DNA
caccgagcctggctctactgcaggcgctgggggttggggtgggggagaggcccagggcacatgatgccgcccccagcccgcccagcacatgacccaggcaggccggcggggtcctggcacacccgagccgcgtccgcgaacacagcccatggcctccccgcgcctagggaccttctgctgccccacgcgggacgcagccacgcagctcgtgctgagcttccagccgcgggccttccacgcgctctgcctgggcagcggcgggctccgcttggcgctgggccttctgcagctgctgcccggccgccggcccgcgggccccgggtcccccgcgacgtccccgccggcctcggtccgcatcctgcgcgctgccgctgcctgcgaccttctcggctgcctgggtatggtgatccggtccaccgtgtggttaggattcccaaattttgttgacagcgtctcggatatgaaccacacggaaatttggcctgctgctttctgcgtggggagtgcgatgtggatccagctgttgtacagtgcctgcttctggtggctgttttgctatgcagtggatgcttatctggtgatccggagatcggcaggactgagcaccatcctgctgtatcacatcatggcgtggggcctggccaccctgctctgtgtggagggagccgccatgctctactacccttccgtgtccaggtgtgagcggggcctggaccacgccatcccccactatgtcaccatgtacctgcccctgctgctggttctcgtggcgaaccccatcctgttccaaaagacagtgactgcagtggcctctttacttaaaggaagacaaggcatttacacggagaacgagaggaggatgggagccgtgatcaagatccgatttttcaaaatcatgctggttttaattatttgttggttgtcgaatatcatcaatgaaagccttttattctatcttgagatgcaaacagatatcaatggaggttctttgaaacctgtcagaactgcagccaagaccacatggtttattatgggaatcctgaatccagcccagggatttctcttgtctttggccttctacggctggacaggatgcagcctgggttttcagtctcccaggaaggagatccagtgggaatcactgaccacctcggctgctgagggggctcacccatccccactgatgccccatgaaaaccctgcttccgggaaggtgtctcaagtgggtgggcagacttctgacgaagccctgagcatgctgtctgaaggttctgatgccagcacaattgaaattcacactgcaagtgaatcctgcaacaaaaatgagggtgaccctgctctcccaacccatggagacctatgaaggggatgtgctgggggtccagaccccatattcctcagactcaacaattcttgttctttagaactgtgttctcaccttcccaacactgcactgccgaagtgtagcggcccccaaaccttgctctcatcaccagctagagcttcttcccgaagggcctttaggataggagaaagggttcatgcacacacgtgtgagaatggaagagccccctccagaccactctacagctgctctagccttagttgccactaggaagttttctgaggctggctgtaaagtaagtgtaaggtccacatccttggggaagtagttaaataaaatagttatgactg

SEQ ID NO: 11543 - DNA, 587 bp, Homo sapiens
  source 1..587: mol_type = unassigned DNA
taaagatggcaggtttggcgctctaggtggcagagaaaccaccaggaaggcttggtgaatggggagaaaggtatggtgatccggtccaccgtgtggttaggattcccaaattttgttgacagcgtctcggatatgaaccacacggaaatttggcctgctgctttctgcgtggggagtgcgatgtggatccagctgttgtacagtgcctgcttctggtggctgttttgctatgcagtggatgcttatctggtgatccggagatcggcaggactgagcaccatcctgctgtatcacatcatggcgtggggcctggccaccctgctctgtgtggagggagccgccatgctctactacccttccgtgtccaggtgtgagcggggcctggaccacgccatcccccactatgtcaccatgtacctgcccctgctgctggttctcgtggcgaaccccatcctgttccaaaagacagtgactgcagtggcctctttacttaaaggaagacaaggcatttacacggagaacgagaggaggatgggagccgtgatcaagatccgatttttcaaaatcatgctggttttaattatttg

SEQ ID NO: 11544 - DNA, 859 bp, Homo sapiens
  source 1..859: mol_type = unassigned DNA
taccgcggggccggtcacggggagcgcgtccagaggtccagcccgcggcccgaagggtatggtgatccggtccaccgtgtggttaggattcccaaattttgttgacagcgtctcggatatgaaccacacggaaatttggcctgctgctttctgcgtggggagtgcgatgtggatccagctgttgtacagtgcctgcttctggtggctgttttgctatgcagtggatgcttatctggtgatccggagatcggcaggactgagcaccatcctgctgtatcacatcatggcgtggggcctggccaccctgctctgtgtggagggagccgccatgctctactacccttccgtgtccaggtgtgagcggggcctggaccacgccatcccccactatgtcaccatgtacctgcccctgctgctggttctcgtggcgaaccccatcctgttccaaaagacagtgactgcagtggcctctttacttaaaggaagacaaggcatttacacggagaacgagaggaggatgggagccgtgatcaagatccgatttttcaaaatcatgctggttttaattatttgttggttgtcgaatatcatcaatgaaagccttttattctatcttgagatgcaaacagatatcaatggaggttctttgaaacctgtcagaactgcagccaagaccacatggtttattatgggaatcctgaatccagcccagggatttctcttgtctttggccttctacggctggacaggatgcagcctgggttttcagtctcccaggaaggagatccagtgggaatcactgaccacctcggctgctgagggggctcacccatccccactgatgccccatgaaaaccct

SEQ ID NO: 11545 - DNA, 1762 bp, Homo sapiens
  source 1..1762: mol_type = unassigned DNA
accgagcctggctctactgcaggcgctgggggttggggtgggggagaggcccagggcacatgatgccgcccccagcccgcccagcacatgacccaggcaggccggcggggtcctggcacacccgagccgcgtccgcgaacacagcccatggcctccccgcgcctagggaccttctgctgccccacgcgggacgcagccacgcagctcgtgctgagcttccagccgcgggccttccacgcgctctgcctgggcagcggcgggctccgcttggcgctgggccttctgcagctgctgcccggccgccggcccgcgggccccgggtcccccgcgacgtccccgccggcctcggtccgcatcctgcgcgctgccgctgcctgcgaccttctcggctgcctgggtatggtgatccggtccaccgtgtggttaggattcccaaattttgttgacagcgtctcggatatgaaccacacggaaatttggcctgctgctttctgcgtggggagtgcgatgtggatccagctgttgtacagtgcctgcttctggtggctgttttgctatgcagtggatgcttatctggtgatccggagatcggcaggactgagcaccatcctgctgtatcacatcatggcgtggggcctggccaccctgctctgtgtggagggagccgccatgctctactacccttccgtgtccaggtgtgagcggggcctggaccacgccatcccccactatgtcaccatgtacctgcccctgctgctggttctcgtggcgaaccccatcctgttccaaaagacagtgactgcagtggcctctttacttaaaggaagacaaggcatttacacggagaacgagaggaggatgggagccgtgatcaagatccgatttttcaaaatcatgctggttttaattatttgttggttgtcgaatatcatcaatgaaagccttttattctatcttgagatgcaaacagatatcaatggaggttctttgaaacctgtcagaactgcagccaagaccacatggtttattatgggaatcctgaatccagcccagggatttctcttgtctttggccttctacggctggacaggatgcagcctgggttttcagtctcccaggaaggagatccagtgggaatcactgaccacctcggctgctgagggggctcacccatccccactgatgccccatgaaaaccctgcttccgggaaggtgtctcaagtgggtgggcagacttctgacgaagccctgagcatgctgtctgaaggttctgatgccagcacaattgaaattcacactgcaagtgaatcctgcaacaaaaatgagggtgaccctgctctcccaacccatggagacctatgaaggggatgtgctgggggtccagaccccatattcctcagactcaacaattcttgttctttagaactgtgttctcaccttcccaacactgcactgccgaagtgtagcggcccccaaaccttgctctcatcaccagctagagcttcttcccgaagggcctttaggataggagaaagggttcatgcacacacgtgtgagaatggaagagccccctccagaccactctacagctgctctagccttagttgccactaggaagttttctgaggctggctgtaaagtaagtgtaaggtccacatccttggggaagtagttaaataaaatagttatgactgagctctcagcctgacttggattctgtcttaacacttctagcaaaagaaaataaatacatgtacagtta

SEQ ID NO: 11546 - DNA, 1218 bp, Homo sapiens
  source 1..1218: mol_type = unassigned DNA
gatctttaaagggaggggaaaaaagagagagagaggcaggcactgtataaaagaagcttccttgaggtttctaaaatttatacaaaaacatcatatgtaagtaaactcaccagatttggcatctgctctttggtgatggacccagaagaaacttcagtttatttggattattactatgctacgagcccaaactctgacatcagggagacccactcccatgttccttacacctctgtcttccttccagtcttttacacagctgtgttcctgactggagtgctggggaaccttgttctcatgggagcgttgcatttcaaacccggcagccgaagactgatcgacatctttatcatcaatctggctgcctctgacttcatttttcttgtcacattgcctctctgggtggataaagaagcatctctaggactgtggaggacgggctccttcctgtgcaaagggagctcctacatgatctccgtcaatatgcactgcagtgtcctcctgctcacttgcatgagtgttgaccgctacctggccattgtgtggccagtcgtatccaggaaattcagaaggacagactgtgcatatgtagtctgtgccagcatctggtttatctcctgcctgctggggttgcctactcttctgtccagggagctcacgctgattgatgataagccatactgtgcagagaaaaaggcaactccaattaaactcatatggtccctggtggccttaattttcaccttttttgtccctttgttgagcattgtgacctgctactgttgcattgcaaggaagctgtgtgcccattaccagcaatcaggaaagcacaacaaaaagctgaagaaatctataaagatcatctttattgtcgtggcagcctttcttgtctcctggctgcccttcaatactttcaagttcctggccattgtctctgggttgcggcaagaacactatttaccctcagctattcttcagcttggtatggaggtgagtggacccttggcatttgccaacagctgtgtcaaccctttcatttactatatcttcgacagctacatccgccgggccattgtccactgcttgtgcccttgcctgaaaaactatgactttgggagtagcactgagacatcagatagtcacctcactaaggctctctccaccttcattcatgcagaagattttgccaggaggaggaagaggtctgtgtcactctaa

SEQ ID NO: 11547 - DNA, 4082 bp, Homo sapiens
  source 1..4082: mol_type = unassigned DNA
ccgccgccagcatgccccggcccgcgggccgctccgccgccagccacccccgcggccctcggcggcctgcgctcggcccgggggcgcgggaaccgcagccggagccggaggcgggagcagcgagccggagccccgggcgctcgaatgcaggatgctcgtggtccccagcatccttgagccaccaggagtgagggctgctgctccctgagacctggctccaaggaggatgccacagccgcctgccagctccggtctgcaccatgagtgatgagcggcggctgcctggcagtgcagtgggctggctggtatgtgggggcctctccctgctggccaatgcctggggcatcctcagcgttggcgccaagcagaagaagtggaagcccttggagttcctgctgtgtacactcgcggccacccacatgctaaatgtggccgtgcccatcgccacctactccgtggtgcagctgcggcggcagcgccccgacttcgagtggaatgagggtctctgcaaggtcttcgtgtccaccttctacaccctcaccctggccacctgtttctctgtcacctccctctcctaccaccgcatgtggatggtctgctggcctgtcaactaccggctgagcaatgccaagaagcaggcggtgcacacagtcatgggtatctggatggtgtccttcatcctgtcggccctgcctgccgttggctggcacgacaccagcgagcgcttctacacccatggctgccgcttcatcgtggctgagatcggcctgggctttggcgtctgcttcctgctgctggtgggcggcagcgtggccatgggcgtgatctgcacagccatcgccctcttccagacgctggccgtgcaggtggggcgccaggccgaccgccgcgccttcaccgtgcccaccatcgtggtggaggacgcgcagggcaagcggcgctcctccatcgatggctcggagcccgccaaaacctctctgcagaccacgggcctcgtgaccaccatagtcttcatctacgactgcctcatgggcttccctgtgctggtggtgagcttcagcagcctgcgggccgacgcctcagcgccctggatggcactctgcgtgctgtggtgctccgtggcccaggccctgctgctgcctgtgttcctctgggcctgcgaccgctaccgggctgacctcaaagctgtccgggagaagtgcatggccctcatggccaacgacgaggagtcagacgatgagaccagcctggaaggtggcatctccccggacctggtgttggagcgctccctggactatggctatggaggtgattttgtggccctagataggatggccaagtatgagatctccgccctggaggggggcctgccccagctctacccactgcggcccttgcaggaggacaagatgcaatacctgcaggtcccgcccacgcggcgcttctcccacgacgatgcggacgtgtgggccgccgtcccgctgcccgccttcctgccgcgctggggctccggcgaggacctggccgccctggcgcacctggtgctgcctgccgggcccgagcggcgccgcgccagcctcctggccttcgcggaggacgcaccaccgtcccgcgcgcgccgccgctcggccgagagcctgctgtcgctgcggccctcggccctggatagcggcccgcggggagcccgcgactcgccccccggcagcccgcgccgccgccccgggcccggcccccgctccgcctcggcctcgctgctgcccgacgccttcgccctgaccgccttcgagtgcgagccacaggccctgcgccgcccgcccgggcccttccccgctgcgcccgccgcccccgacggcgcagatcccggagaggccccgacgcccccaagcagcgcccagcggagcccagggccacgcccctctgcgcactcgcacgccggctctctgcgccccggcctgagcgcgtcgtggggcgagcccggggggctgcgcgcggcgggcggcggcggcagcaccagcagcttcctgagttccccctccgagtcctcgggctacgccacgctgcactcggactcgctgggctccgcgtcctaggaccgccggcgcctccccacggacgccaggcaggccaggccgctctccggggccgcagcaccaaagacgcccgcctccgccccgcgcgcagacatgcgccacccctcccaggggtgagggggcgttggcctcagcgtttgtcttccggctcctcccagctggccttgtcccaggggcgacggctgccccggacgactgcgctgggcaccgcatgtcccgggccgagtgaggtcgggcctggggagctgagtgacatcccaagcttgggcttgggtagtgagtgacatgtgcacacgtccagctgcgccatcaccagccctgcgcaacaggacgtcgggagcagggaacctgagacagggccactgcgggatcggacaaagccccgctttggagaggctgagctggagccattggcctccccaggggctttccacccacactgcaccataaccgccacacccttcggggggggggagggtacagagggtctctaagcacaggggtgttcagagcccgaacaagctttgatcaggtttccctgcttccgacctgtcctgcctcagtttccccatctgtgatgagcaggtgaccacgttaactctcagggctgtttgaagtctcttggttgtaggccctcgccactgagtggcccaggtgtgagaggtagtctagagccctctgcggcctttgtggaggtccgttttcagcatgtggcctggtgtggctccctaggcctgaggcctcccactctcagtgccccctgcccccttgggaacccacactccaccccagctaagcacaacactgtggaccaccaccaatggcacctgagccaccttgaccaccattagtgtccccaccctcattactctgccgtcgttgcctgtccccaccacatcatctccctccatggctcccaccatgacgctggcaggtgcaagcggagagcacgagggcagcagggcctggccttccgtgtccctgcgtcatccccagcctcactccccacccgtgcaggcctggccaggaagggatcctggcaggggcttccaggttctcagctcaaggcctggtcccgggcaggcgtccaacccctgggagcaatgtatttctttgccttccatcctgggcagaccccttacaggcctgggcattgccatgggccctgggtcttcccaggctaaggagaaccaggaacagctataaccttgagctagtgaaatagggtagatgagaaggctgtctcctccagacccctacccctacacagtggccccacaatatgaagacctggggtaattccaaggtgagcatagagcctgcctgtgcccagttccttctggccctcaggtggccaagcccatctcttcatccttcagatagggtcccactcccagaagaagctgctggggtgggggtgggaggctgcctaagcctgtctgtgcttcagaggcccctccagtccctggctgtggggtaactgggggtatgagctgtggccacaggtgagcaaggcagggaactgcaatccagccctggccgcgggaggggccatctctggccaatgctgctgtgccttcaaggactgacaagttacgtaggggcagaggtcgccagctagccagtgtctcctccatctggggggcgtctgtccacttgtcaccttaggttttcactcatttgtcaccttggggttttgctctgtgtgtttcatatccaacggcaatacttgcagggggacagagtcctctaaatactccaatcctgcggtttttacaaacataaagggggagaccccaagtggaggaccctgggcctggagctccctcccaaactttgtccagcatccagcctgttccctgggctcactggggagggagttgtcttcatagcacacccagagccagggatccctttgtagttttttgacaacggagcatttctcttctgtacaggacccaataaaaacttccttatgatttgcacctggca

SEQ ID NO: 11548 - DNA, 4193 bp, Homo sapiens
  source 1..4193: mol_type = unassigned DNA
ggagcctagcgaaataaccctttgcttctacctgaatgggttgttcactctggattctgagcctgcagccagctccaaaatggggcctctgaagaaaagatttgagttgctcttgtgtcttagtcaaagatctacatccctaccagtgggtaaccaagactgtgaataagcacacaccaacaggggcatgtggtgacatggagcctgaaataaactgctctgaattgtgtgacagttttcctggccaggagctggatcggagaccccttcatgatctctgcaagacaacaattacatcttcccaccacagcagtaagaccatctcttcattatctcctgtcctcttgggtattgtttggacttttctcagctgtggacttctgctgatacttttctttcttgcctttacaattcactgcaggaagaacaggattgtgaagatgtccagtcccaatctgaacattgtgaccttactgggcagttgtctcacttacagtagcgcttacctctttgggattcaggatgttttagtggggagctcaatggaaactctcattcagacaagactgtccatgctgtgcattgggacctcccttgtgtttggccccattctgggaaagagctggcgactctacaaggtgtttacccaaagggtcccggacaagagagtgattatcaaagacctgcagttgctggggttggtggcagccctgttgatggctgatgtgatcctgctcatgacgtgggtgctgactgatcccatccagtgcctccagattctcagtgtcagtatgacggtgacagggaaagacgtgtcctgcacttcgaccagcacccacttctgtgcttcccggtattccgatgtttggattgctctcatttggggatgcaagggtctgctcctgctgtatggtgcctacctggctggcctgactggccatgtcagctcccctcctgtgaatcagtccttaaccatcatggtgggggtcaacctccttgtactggctgctgggctgctttttgtagtcaccagatacttgcattcctggcccaacctggtctttggactcacatctggagggatctttgtttgtacaactacaatcaactgcttcatcttcattccccagctgaagcaatggaaggcatttgaagaggaaaaccaaacaatcagacgcatggccaaatatttcagcactcccaacaaaagcttccatacccagtatggtgaggaggagaactgccacccgaggggagagaaaagctccatggagaggctcctcacagaaaaaaatgctgtgattgaaagcctgcaggaacaagtaaacaacgccaaagagaagattgtgaggctgatgtcagctgagtgcacctatgacctcccagagggggctgccccacctgcctcttccccgaacaaggacgtccaggcggtagcctcggtccacaccctggcagctgctcaggggccttcgggtcacctctctgactttcagaatgatcctggcatggctgcccgggattcccagtgcacttcagggccctcctcatatgcacaaagccttgaggggcctgggaaggactccagcttctccccagggaaggaggagaagatatctgactcaaaagacttttctgatcatttagactcaggttgtagccagaagccatggactgagcaaagcctgggtccagaaagaggagaccaagtccccatgaaccccagccagagtctcctaccagaaagaggcggctcagatccccagagacagaggcatctggagaactcagaggagcccccagagcggcggtcacgggttagttcagtaatcagggagaaacttcaggaggtcttacaagatctgggcctgggccctgaggcttccctctccaccgccccctcttgtcatcagcaaacctggaagaacagtgctgccttcagcccccaaaagatgcccctctccaaggagctcggctttagcccttacatggtgaggagaaggcgggcagctcagcgggcccgctcacactttcctggctctgcaccctcatctgtggggcatcgggcaaacaggactgttcctggggcacacagcaggctacatgtgcagaatggggacagccccagcctggccccacaaactactgattccagagtacgaagaccttcttccaggaagccttcactaccttcagatcctcaagacagaccaggtaccctggagggcagcaaacaaagccagacagagcccgagggggctagagggagcaaagcagcctttcttcgccagccttctggttctggccgggccccaagtcctgctgccccatgcctctccaaagcctcacctgacttgcctgaacagtggcagctgtggcccccagtgccctcaggctgtgcctccctgtcttctcaacacagctattttgatactgagtccagcagctcagatgagttcttctgccgctgccaccggccctactgtgaaatctgcttccagagctcttctgactctagtgacagtggcacatcagacactgaccctgagcctactggggggctggcttcctgggaaaagctgtgggcccgctccaagcctattgtgaacttcaaagatgacttgaaacccacgctggtgtgaaaagcaacagagctggtctagacacagaggtcagtccaagagaagctgtaccaaggcccacaggagaagagccaatttctggtctttggggaacagattagtgccctgcatttgaccagcccataccatgtttcagctaggctcactgtgttactttgagtacttcttgatctataaaaagagaggcattgcctgtcctgttactacctcgcagccttactataaaagactccagttgagtgactatgaaagacactgactccttggataaaaggtgctgaatgaacacataggattttctgtccaggtcagcctacattctgtaaaactcttaatatattcagatggatggctgaatggacagacagatggagagatgcatgggaaatttctgtagaacttgaggtgtggactgtgacccatcaaactggccttttggtggacagacctaccaggaagataagtctcctacatccttgggcctcccactcctggaaggcagtggttttatttctgctgaatgttgtgaacagcacctccctagattccagcttctggccagacccagctcagagccacccctacaccactatttcttgatggtgtctttccaccattatggcactttaccctcctctctgagacagatctccatgcgcccgcaggcttcccagatctctcccctgggatcggatgtacctgaggtcctgactgtccccactgtccccttgtcctgtggctcatcctcgattcacccactgatgcagttttgtactgcggggaggcacacaccagcaatttctgttggggtatgggagaacctgttggtcaagagtgcttttggttccattggggttacatgactaccaacagacacataaacctggaagccaaatggagaaataaaaaggaagacacgagggacacgaaaacaggaaagaaaacaggatttgaatatttcacttgagtccagcatagtacttggcaatatcatatttttgtgattccttttgataaccctgtgaagtagacactttcatttttacagacaaggattatgaggcttagagaaatgaggtagtttcccgcaacatcacactgctggacagagatgtacacacagctcctgggactcaagtaggtgggttttcccagggacacatggcttcatgtgttcttctgggaatggcaggtgacgcttggcagacgagacaacaaagcaaggctcatgtaagaaagctgggatgtgctcccctatagtccagaataatagacctgggtcctcacctcaggaaacgggcctccacttcctcactgccaaaggccacactggcacctcccaagggagctggggagctggtgaaggatgagtgcgaggaactcagccaccaccagagccacagggagagcacacctgggtccactgtgcttattgctgagctggctgtcatgtccaggctgtcccctgccccgagtcctgtgtatacatctgtgggtgtgcacatgtttgcatgaaggaattcaggccttattaaatattctcagaggggg

SEQ ID NO: 11549 - DNA, 4442 bp, Homo sapiens
  source 1..4442: mol_type = unassigned DNA
ggggaccgtgggcgtcctgcacatagcagcgggcttggcgcttctcggcggtccgacgctgatgaggaaccagagtgagggtactcgaacagtgactgccatctggtggttaaccagaatcatcaccttgtgtagcctgatggttactaagatgtccactcttgactcacatggcatgcactcgcagcaggggaccagttgaaggatgtctgactttggagggtcaccagttgaaggatgtctgatgaaggagcctagcgaaataaccctttgcttctacctgaatgggttgttcactctggattctgagcctgcagccagctccaaaatggggcctctgaagaaaagatttgagttgctcttgtgtcttagtcaaagatctacatccctaccagtgggtaaccaagactgtgaataagcacacaccaacaggggcatgtggtgacatggagcctgaaataaactgctctgaattgtgtgacagttttcctggccaggagctggatcggagaccccttcatgatctctgcaagacaacaattacatcttcccaccacagcagtaagaccatctcttcattatctcctgtcctcttgggtattgtttggacttttctcagctgtggacttctgctgatacttttctttcttgcctttacaattcactgcaggaagaacaggattgtgaagatgtccagtcccaatctgaacattgtgaccttactgggcagttgtctcacttacagtagcgcttacctctttgggattcaggatgttttagtggggagctcaatggaaactctcattcagacaagactgtccatgctgtgcattgggacctcccttgtgtttggccccattctgggaaagagctggcgactctacaaggtgtttacccaaagggtcccggacaagagagtgattatcaaagacctgcagttgctggggttggtggcagccctgttgatggctgatgtgatcctgctcatgacgtgggtgctgactgatcccatccagtgcctccagattctcagtgtcagtatgacggtgacagggaaagacgtgtcctgcacttcgaccagcacccacttctgtgcttcccggtattccgatgtttggattgctctcatttggggatgcaagggtctgctcctgctgtatggtgcctacctggctggcctgactggccatgtcagctcccctcctgtgaatcagtccttaaccatcatggtgggggtcaacctccttgtactggctgctgggctgctttttgtagtcaccagatacttgcattcctggcccaacctggtctttggactcacatctggagggatctttgtttgtacaactacaatcaactgcttcatcttcattccccagctgaagcaatggaaggcatttgaagaggaaaaccaaacaatcagacgcatggccaaatatttcagcactcccaacaaaagcttccatacccagtatggtgaggaggagaactgccacccgaggggagagaaaagctccatggagaggctcctcacagaaaaaaatgctgtgattgaaagcctgcaggaacaagtaaacaacgccaaagagaagattgtgaggctgatgtcagctgagtgcacctatgacctcccagagggggctgccccacctgcctcttccccgaacaaggacgtccaggcggtagcctcggtccacaccctggcagctgctcaggggccttcgggtcacctctctgactttcagaatgatcctggcatggctgcccgggattcccagtgcacttcagggccctcctcatatgcacaaagccttgaggggcctgggaaggactccagcttctccccagggaaggaggagaagatatctgactcaaaagacttttctgatcatttagactcaggttgtagccagaagccatggactgagcaaagcctgggtccagaaagaggagaccaagtccccatgaaccccagccagagtctcctaccagaaagaggcggctcagatccccagagacagaggcatctggagaactcagaggagcccccagagcggcggtcacgggttagttcagtaatcagggagaaacttcaggaggtcttacaagatctgggcctgggccctgaggcttccctctccaccgccccctcttgtcatcagcaaacctggaagaacagtgctgccttcagcccccaaaagatgcccctctccaaggagctcggctttagcccttacatggtgaggagaaggcgggcagctcagcgggcccgctcacactttcctggctctgcaccctcatctgtggggcatcgggcaaacaggactgttcctggggcacacagcaggctacatgtgcagaatggggacagccccagcctggccccacaaactactgattccagagtacgaagaccttcttccaggaagccttcactaccttcagatcctcaagacagaccaggtaccctggagggcagcaaacaaagccagacagagcccgagggggctagagggagcaaagcagcctttcttcgccagccttctggttctggccgggccccaagtcctgctgccccatgcctctccaaagcctcacctgacttgcctgaacagtggcagctgtggcccccagtgccctcaggctgtgcctccctgtcttctcaacacagctattttgatactgagtccagcagctcagatgagttcttctgccgctgccaccggccctactgtgaaatctgcttccagagctcttctgactctagtgacagtggcacatcagacactgaccctgagcctactggggggctggcttcctgggaaaagctgtgggcccgctccaagcctattgtgaacttcaaagatgacttgaaacccacgctggtgtgaaaagcaacagagctggtctagacacagaggtcagtccaagagaagctgtaccaaggcccacaggagaagagccaatttctggtctttggggaacagattagtgccctgcatttgaccagcccataccatgtttcagctaggctcactgtgttactttgagtacttcttgatctataaaaagagaggcattgcctgtcctgttactacctcgcagccttactataaaagactccagttgagtgactatgaaagacactgactccttggataaaaggtgctgaatgaacacataggattttctgtccaggtcagcctacattctgtaaaactcttaatatattcagatggatggctgaatggacagacagatggagagatgcatgggaaatttctgtagaacttgaggtgtggactgtgacccatcaaactggccttttggtggacagacctaccaggaagataagtctcctacatccttgggcctcccactcctggaaggcagtggttttatttctgctgaatgttgtgaacagcacctccctagattccagcttctggccagacccagctcagagccacccctacaccactatttcttgatggtgtctttccaccattatggcactttaccctcctctctgagacagatctccatgcgcccgcaggcttcccagatctctcccctgggatcggatgtacctgaggtcctgactgtccccactgtccccttgtcctgtggctcatcctcgattcacccactgatgcagttttgtactgcggggaggcacacaccagcaatttctgttggggtatgggagaacctgttggtcaagagtgcttttggttccattggggttacatgactaccaacagacacataaacctggaagccaaatggagaaataaaaaggaagacacgagggacacgaaaacaggaaagaaaacaggatttgaatatttcacttgagtccagcatagtacttggcaatatcatatttttgtgattccttttgataaccctgtgaagtagacactttcatttttacagacaaggattatgaggcttagagaaatgaggtagtttcccgcaacatcacactgctggacagagatgtacacacagctcctgggactcaagtaggtgggttttcccagggacacatggcttcatgtgttcttctgggaatggcaggtgacgcttggcagacgagacaacaaagcaaggctcatgtaagaaagctgggatgtgctcccctatagtccagaataatagacctgggtcctcacctcaggaaacgggcctccacttcctcactgccaaaggccacactggcacctcccaagggagctggggagctggtgaaggatgagtgcgaggaactcagccaccaccagagccacagggagagcacacctgggtccactgtgcttattgctgagctggctgtcatgtccaggctgtcccctgccccgagtcctgtgtatacatctgtgggtgtgcacatgtttgcatgaaggaattcaggccttattaaatattctcagaggggg

SEQ ID NO: 11550 - DNA, 2525 bp, Homo sapiens
  source 1..2525: mol_type = unassigned DNA
acaggggcatgtggtgacatggagcctgaaataaactgctctgaattgtgtgacagttttcctggccaggagctggatcggagaccccttcatgatctctgcaagacaacaattacatcttcccaccacagcagtaagaccatctcttcattatctcctgtcctcttgggtattgtttggacttttctcagctgtggacttctgctgatacttttctttcttgcctttacaattcactgcaggaagaacaggattgtgaagatgtccagtcccaatctgaacattgtgaccttactgggcagttgtctcacttacagtagcgcttacctctttgggattcaggatgttttagtggggagctcaatggaaactctcattcagacaagactgtccatgctgtgcattgggacctcccttgtgtttggccccattctgggaaagagctggcgactctacaaggtgtttacccaaagggtcccggacaagagagtgattatcaaagacctgcagttgctggggttggtggcagccctgttgatggctgatgtgatcctgctcatgacgtgggtgctgactgatcccatccagtgcctccagattctcagtgtgacagggaaagacgtgtcctgcacttcgaccagcacccacttctgtgcttcccggtattccgatgtttggattgctctcatttggggatgcaagggtctgctcctgctgtatggtgcctacctggctggcctgactggccatgtcagctcccctcctgtgaatcagtccttaaccatcatggtgggggtcaacctccttgtactggctgctgggctgctttttgtagtcaccagatacttgcattcctggcccaacctggtctttggactcacatctggagggatctttgtttgtacaactacaatcaactgcttcatcttcattccccagctgaagcaatggaaggcatttgaagaggaaaaccaaacaatcagacgcatggccaaatatttcagcactcccaacaaaagcttccatacccagtatggtgaggaggagaactgccacccgaggggagagaaaagctccatggagaggctcctcacagaaaaaaatgctgtgattgaaagcctgcaggaacaagtaaacaacgccaaagagaagattgtgaggctgatgtcagctgagtgcacctatgacctcccagagggggctgccccacctgcctcttccccgaacaaggacgtccaggcggtagcctcggtccacaccctggcagctgctcaggggccttcgggtcacctctctgactttcagaatgatcctggcatggctgcccgggattcccagtgcacttcagggccctcctcatatgcacaaagccttgaggggcctgggaaggactccagcttctccccagggaaggaggagaagatatctgactcaaaagacttttctgatcatttagactcaggttgtagccagaagccatggactgagcaaagcctgggtccagaaagaggagaccaagtccccatgaaccccagccagagtctcctaccagaaagaggcggctcagatccccagagacagaggcatctggagaactcagaggagcccccagagcggcggtcacgggttagttcagtaatcagggagaaacttcaggaggtcttacaagatctgggcctgggccctgaggcttccctctccaccgccccctcttgtcatcagcaaacctggaagaacagtgctgccttcagcccccaaaagatgcccctctccaaggagctcggctttagcccttacatggtgaggagaaggcgggcagctcagcgggcccgctcacactttcctggctctgcaccctcatctgtggggcatcgggcaaacaggactgttcctggggcacacagcaggctacatgtgcagaatggggacagccccagcctggccccacaaactactgattccagagtacgaagaccttcttccaggaagccttcactaccttcagatcctcaagacagaccaggtaccctggagggcagcaaacaaagccagacagagcccgagggggctagagggagcaaagcagcctttcttcgccagccttctggttctggccgggccccaagtcctgctgccccatgcctctccaaagcctcacctgacttgcctgaacagtggcagctgtggcccccagtgccctcaggctgtgcctccctgtcttctcaacacagctattttgatactgagtccagcagctcagatgagttcttctgccgctgccaccggccctactgtgaaatctgcttccagagctcttctgactctagtgacagtggcacatcagacactgaccctgagcctactggggggctggcttcctgggaaaagctgtgggcccgctccaagcctattgtgaacttcaaagatgacttgaaacccacgctggtgtgaaaagcaacagagctggtctagacacagaggtcagtccaagagaagctgtaccaaggcccacaggagaagagcca

SEQ ID NO: 11551 - DNA, 2422 bp, Homo sapiens
  source 1..2422: mol_type = unassigned DNA
ttttcctgtcccctggtcctgccttatctttccagtcgtccagcatgctctgcccaccccacgccgaggtgcactgaccatgagcctcaactcctccctcagctgcaggaaggagctgagtaatctcactgaggaggagggtggcgaagggggcgtcatcatcacccagttcatcgccatcattgtcatcaccatttttgtctgcctgggaaacctggtcatcgtggtcaccttgtacaagaagtcctacctcctcaccctcagcaacaagttcgtcttcagcctgactctgtccaacttcctgctgtccgtgttggtgctgccttttgtggtgacgagctccatccgcagggaatggatctttggtgtagtgtggtgcaacttctctgccctcctctacctgctgatcagctctgccagcatgctaaccctcggggtcattgccatcgaccgctactatgctgtcctgtaccccatggtgtaccccatgaagatcacagggaaccgggctgtgatggcacttgtctacatctggcttcactcgctcatcggctgcctgccacccctgtttggttggtcatccgtggagtttgacgagttcaaatggatgtgtgtggctgcttggcaccgggagcctggctacacggccttctggcagatctggtgtgccctcttcccctttctggtcatgctggtgtgctatggcttcatcttccgcgtggccagggtcaaggcacgcaaggtgcactgtggcacagtcgtcatcgtggaggaggatgctcagaggaccgggaggaagaactccagcacctccacctcctcttcaggcagcaggaggaatgcctttcagggtgtggtctactcggccaaccagtgcaaagccctcatcaccatcctggtggtcctcggtgccttcatggtcacctggggcccctacatggttgtcatcgcctctgaggccctctgggggaaaagctccgtctccccgagcctggagacttgggccacatggctgtcctttgccagcgctgtctgccaccccctgatctatggactctggaacaagacagttcgcaaagaactactgggcatgtgctttggggaccggtattatcgggaaccatttgtgcaacgacagaggacttccaggctcttcagcatttccaacaggatcacagacctgggcctgtccccacacctcactgcgctcatggcaggtggacagcccctggggcacagcagcagcacgggggacactggcttcagctgctcccaggactcagggacagatatgatgctgcttgaggactacacgtctgatgacaaccctccctctcactgcacttgcccacccaagagaaggagctcggtgacatttgaggatgaagtggaacaaatcaaagaagctgccaagaactcgattcttcatgtgaaagctgaagtacacaagtccttggacagttacgcagcaagcttggccaaagccattgaggccgaagccaaaatcaacttatttggggaggaggctttgccaggggtcttggttacagcacggactgtcccggggggcggcttcgggggccgccgaggcagcagaactcttgtgagccagaggctgcagttgcagagcatcgaagaaggagatgttttagctgccgagcagagatgagggcctcagggtgccgtggggctgcagcctgagaggctggcccggggaggagttcccatcaccgcctgtgccgcggccttgggagcatgtcactgtgtacagctggccacacacagggaaggagcagcatctggtatgcagccaccaggacaaggactgaaaataatgtctacagtccacagcttcagcatttccagagaccacatgtgagcttcttttaggtcccagtgatgggaccagaagcatctaaagcaaaaaaaaaaccaaaaaaaaatctagagatgtggctgtggctttttgggaggtggggcatgggaggaccagagacgaagggcttggaaggagacccccacatgcatcatttcctcctcttcacagtgtgctgggagtccagccgtgcactgtgccagatgcctcaggaggagaaccctccccagtgtactgtgaaggatgacacagcacttcttcctaatgacacgcgaccgtcctggtgcctctacatggttgatgcgggcagtgtgggaccctcagttctaggactggtccgcagagaaagcacccaggagcagagcgcttcggagcggtcctcagtggcgccacctgctggtgctaatagggacagccacaggcctcttgcagactggcccaccctgcctacttccctactgacaagttctttggtatttcaaaagggagaaaccactataaaagacaagaggaagggcaggtactaggtgtttcatttccagaatt

SEQ ID NO: 11552 - DNA, 2152 bp, Homo sapiens
  source 1..2152: mol_type = unassigned DNA
gtctgtgtgatggagagagacatggaaaaggcgacgtcccagcggctggaactggggcggaggaacgggaacagggaaggcctgagttaggcaccacaaaggttttcaggagaaaagtggggcgagccgagaggcctggtgcactgtgcgtcctctgagaggtgaaggagcactgtgtggtcagagggctgcgagctctctgtttgggttccgaggaagacagaatgggctgaactggaactgacctaaatgtcagcaagaggagtcgtccagcatgctctgcccaccccacgccgaggtgcactgaccatgagcctcaactcctccctcagctgcaggaaggagctgagtaatctcactgaggaggagggtggcgaagggggcgtcatcatcacccagttcatcgccatcattgtcatcaccatttttgtctgcctgggaaacctggtcatcgtggtcaccttgtacaagaagtcctacctcctcaccctcagcaacaagttcgtcttcagcctgactctgtccaacttcctgctgtccgtgttggtgctgccttttgtggtgacgagctccatccgcagggaatggatctttggtgtagtgtggtgcaacttctctgccctcctctacctgctgatcagctctgccagcatgctaaccctcggggtcattgccatcgaccgctactatgctgtcctgtaccccatggtgtaccccatgaagatcacagggaaccgggctgtgatggcacttgtctacatctggcttcactcgctcatcggctgcctgccacccctgtttggttggtcatccgtggagtttgacgagttcaaatggatgtgtgtggctgcttggcaccgggagcctggctacacggccttctggcagatctggtgtgccctcttcccctttctggtcatgctggtgtgctatggcttcatcttccgcgtggccagggtcaaggcacgcaaggtgcactgtggcacagtcgtcatcgtggaggaggatgctcagaggaccgggaggaagaactccagcacctccacctcctcttcaggcagcaggaggaatgcctttcagggtgtggtctactcggccaaccagtgcaaagccctcatcaccatcctggtggtcctcggtgccttcatggtcacctggggcccctacatggttgtcatcgcctctgaggccctctgggggaaaagctccgtctccccgagcctggagacttgggccacatggctgtcctttgccagcgctgtctgccaccccctgatctatggactctggaacaagacagttcgcaaagaactactgggcatgtgctttggggaccggtattatcgggaaccatttgtgcaacgacagaggacttccaggctcttcagcatttccaacaggatcacagacctgggcctgtccccacacctcactgcgctcatggcaggtggacagcccctggggcacagcagcagcacgggggacactggcttcagctgctcccaggactcagggacagatatgatgctgcttgaggactacacgtctgatgacaaccctccctctcactgcacttgcccacccaagagaaggagctcggtgacatttgaggatgaagtggaacaaatcaaagaagctgccaagaactcgattcttcatgtgaaagctgaagtacacaagtccttggacagttacgcagcaagcttggccaaagccattgaggccgaagccaaaatcaacttatttggggaggaggctttgccaggggtcttggttacagcacggactgtcccggggggcggcttcgggggccgccgaggcagcagaactcttgtgagccagaggctgcagttgcagagcatcgaagaaggagatgttttagctgccgagcagagatgagggcctcagggtgccgtggggctgcagcctgagaggctggcccggggaggagttcccatcaccgcctgtgccgcggccttgggagcatgtcactgtgtacagctggccacacacagggaaggagcagcatctggtatgcagccaccaggacaaggactgaaaataatgtctacagtccacagcttcagcatttccagagaccacatgtgagcttcttttaggtcccagtgatgggaccagaagcatctaaagc

SEQ ID NO: 11553 - DNA, 2400 bp, Homo sapiens
  source 1..2400: mol_type = unassigned DNA
gttttgtgatgactgctccctggccttttggttccgagggagtgcagggcagcagtgtgaagacctgtttacgtccactccccactccccggggctggcttcgggacgaattcactgtggtattaacagagcccgggacagagcctggcagaaggcagatggatgctcgtgcccgtcggctggatgaatgaaaggtgagcagcaaaggcgataccaggatcgtccacggcgggactggaggaggagaatgggactgtgcggagcctgcgggaagaatctgaaagtgtctgtgtgatggagagagacatggaaaaggcgacgtcccagcggctggaactggggcggaggaacgggaacagggaaggcctgagttaggcaccacaaaggttttcaggagaaaagtggggcgagccgagaggagtctcaccctgttgcttaggcagatggcgcgatctcggctcctgggttcaagcaattctcctgcctcagcctcctgaatagccgggattacagtcgtccagcatgctctgcccaccccacgccgaggtgcactgaccatgagcctcaactcctccctcagctgcaggaaggagctgagtaatctcactgaggaggagggtggcgaagggggcgtcatcatcacccagttcatcgccatcattgtcatcaccatttttgtctgcctgggaaacctggtcatcgtggtcaccttgtacaagaagtcctacctcctcaccctcagcaacaagttcgtcttcagcctgactctgtccaacttcctgctgtccgtgttggtgctgccttttgtggtgacgagctccatccgcagggaatggatctttggtgtagtgtggtgcaacttctctgccctcctctacctgctgatcagctctgccagcatgctaaccctcggggtcattgccatcgaccgctactatgctgtcctgtaccccatggtgtaccccatgaagatcacagggaaccgggctgtgatggcacttgtctacatctggcttcactcgctcatcggctgcctgccacccctgtttggttggtcatccgtggagtttgacgagttcaaatggatgtgtgtggctgcttggcaccgggagcctggctacacggccttctggcagatctggtgtgccctcttcccctttctggtcatgctggtgtgctatggcttcatcttccgcgtggccagggtcaaggcacgcaaggtgcactgtggcacagtcgtcatcgtggaggaggatgctcagaggaccgggaggaagaactccagcacctccacctcctcttcaggcagcaggaggaatgcctttcagggtgtggtctactcggccaaccagtgcaaagccctcatcaccatcctggtggtcctcggtgccttcatggtcacctggggcccctacatggttgtcatcgcctctgaggccctctgggggaaaagctccgtctccccgagcctggagacttgggccacatggctgtcctttgccagcgctgtctgccaccccctgatctatggactctggaacaagacagttcgcaaagaactactgggcatgtgctttggggaccggtattatcgggaaccatttgtgcaacgacagaggacttccaggctcttcagcatttccaacaggatcacagacctgggcctgtccccacacctcactgcgctcatggcaggtggacagcccctggggcacagcagcagcacgggggacactggcttcagctgctcccaggactcagggacagatatgatgctgcttgaggactacacgtctgatgacaaccctccctctcactgcacttgcccacccaagagaaggagctcggtgacatttgaggatgaagtggaacaaatcaaagaagctgccaagaactcgattcttcatgtgaaagctgaagtacacaagtccttggacagttacgcagcaagcttggccaaagccattgaggccgaagccaaaatcaacttatttggggaggaggctttgccaggggtcttggttacagcacggactgtcccggggggcggcttcgggggccgccgaggcagcagaactcttgtgagccagaggctgcagttgcagagcatcgaagaaggagatgttttagctgccgagcagagatgagggcctcagggtgccgtggggctgcagcctgagaggctggcccggggaggagttcccatcaccgcctgtgccgcggccttgggagcatgtcactgtgtacagctggccacacacagggaaggagcagcatctggtatgcagccaccaggacaaggactgaaaataatgtctacagtccacagcttcagcatttccagagaccacatgtgagcttcttttaggtcccagtgatgggaccagaagcatctaaagc

SEQ ID NO: 11554 - DNA, 2676 bp, Homo sapiens
  source 1..2676: mol_type = unassigned DNA
gtaggtgcgtgcccgggactctgccgatgcgggccgcgccccctggggccaagagactccacgtcccgctcagggcaaagggtgtggggagaagcggtcacgcccctcggctggaatccgtgaggaccaggtctttttcagtgtgctcaatatggtcaccaagcctggaaacatagagtctcaccctgttgcttaggcagatggcgcgatctcggctcctgggttcaagcaattctcctgcctcagcctcctgaatagccgggattacagtcgtccagcatgctctgcccaccccacgccgaggtgcactgaccatgagcctcaactcctccctcagctgcaggaaggagctgagtaatctcactgaggaggagggtggcgaagggggcgtcatcatcacccagttcatcgccatcattgtcatcaccatttttgtctgcctgggaaacctggtcatcgtggtcaccttgtacaagaagtcctacctcctcaccctcagcaacaagttcgtcttcagcctgactctgtccaacttcctgctgtccgtgttggtgctgccttttgtggtgacgagctccatccgcagggaatggatctttggtgtagtgtggtgcaacttctctgccctcctctacctgctgatcagctctgccagcatgctaaccctcggggtcattgccatcgaccgctactatgctgtcctgtaccccatggtgtaccccatgaagatcacagggaaccgggctgtgatggcacttgtctacatctggcttcactcgctcatcggctgcctgccacccctgtttggttggtcatccgtggagtttgacgagttcaaatggatgtgtgtggctgcttggcaccgggagcctggctacacggccttctggcagatctggtgtgccctcttcccctttctggtcatgctggtgtgctatggcttcatcttccgcgtggccagggtcaaggcacgcaaggtgcactgtggcacagtcgtcatcgtggaggaggatgctcagaggaccgggaggaagaactccagcacctccacctcctcttcaggcagcaggaggaatgcctttcagggtgtggtctactcggccaaccagtgcaaagccctcatcaccatcctggtggtcctcggtgccttcatggtcacctggggcccctacatggttgtcatcgcctctgaggccctctgggggaaaagctccgtctccccgagcctggagacttgggccacatggctgtcctttgccagcgctgtctgccaccccctgatctatggactctggaacaagacagttcgcaaagaactactgggcatgtgctttggggaccggtattatcgggaaccatttgtgcaacgacagaggacttccaggctcttcagcatttccaacaggatcacagacctgggcctgtccccacacctcactgcgctcatggcaggtggacagcccctggggcacagcagcagcacgggggacactggcttcagctgctcccaggactcagggacagatatgatgctgcttgaggactacacgtctgatgacaaccctccctctcactgcacttgcccacccaagagaaggagctcggtgacatttgaggatgaagtggaacaaatcaaagaagctgccaagaactcgattcttcatgtgaaagctgaagtacacaagtccttggacagttacgcagcaagcttggccaaagccattgaggccgaagccaaaatcaacttatttggggaggaggctttgccaggggtcttggttacagcacggactgtcccggggggcggcttcgggggccgccgaggcagcagaactcttgtgagccagaggctgcagttgcagagcatcgaagaaggagatgttttagctgccgagcagagatgagggcctcagggtgccgtggggctgcagcctgagaggctggcccggggaggagttcccatcaccgcctgtgccgcggccttgggagcatgtcactgtgtacagctggccacacacagggaaggagcagcatctggtatgcagccaccaggacaaggactgaaaataatgtctacagtccacagcttcagcatttccagagaccacatgtgagcttcttttaggtcccagtgatgggaccagaagcatctaaagcaaaaaaaaaaccaaaaaaaaatctagagatgtggctgtggctttttgggaggtggggcatgggaggaccagagacgaagggcttggaaggagacccccacatgcatcatttcctcctcttcacagtgtgctgggagtccagccgtgcactgtgccagatgcctcaggaggagaaccctccccagtgtactgtgaaggatgacacagcacttcttcctaatgacacgcgaccgtcctggtgcctctacatggttgatgcgggcagtgtgggaccctcagttctaggactggtccgcagagaaagcacccaggagcagagcgcttcggagcggtcctcagtggcgccacctgctggtgctaatagggacagccacaggcctcttgcagactggcccaccctgcctacttccctactgacaagttctttggtatttcaaaagggagaaaccactataaaagacaagaggaagggcaggtactaggtgtttcatttccagaattaaaaaaaaaatccatttaa

SEQ ID NO: 11555 - DNA, 2152 bp, Homo sapiens; identical to SEQ ID NO: 11552
  source 1..2152: mol_type = unassigned DNA

SEQ ID NO: 11556 - DNA, 1878 bp, Homo sapiens
  source 1..1878: mol_type = unassigned DNA
attgtgcgaggctgagggctcagggcgcgggccgggaagggtccccgcccccacggcgctccctttctccccgcgcccctctcggaggtcagggctgtcctccgcccgcactgcgccttgctttggagagctggagctctttgtgggaagatgttgggggcgcgcccctcccctgcggcctggggcttctgagaggcccaccccattctgctgggtgcagcccgccccgtttctccggcgccgcccgaagcccctaaacagtccgctggatgggagggcgtaggtgcgtgcccgggactctgccgatgcgggccgcgccccctggggccaagagactccacgtcccgctcagggcaaagggtgtggggagaagcggtcacgcccctcggctggaatccgtgaggaccagctactatgctgtcctgtaccccatggtgtaccccatgaagatcacagggaaccgggctgtgatggcacttgtctacatctggcttcactcgctcatcggctgcctgccacccctgtttggttggtcatccgtggagtttgacgagttcaaatggatgtgtgtggctgcttggcaccgggagcctggctacacggccttctggcagatctggtgtgccctcttcccctttctggtcatgctggtgtgctatggcttcatcttccgcgtggccagggtcaaggcacgcaaggtgcactgtggcacagtcgtcatcgtggaggaggatgctcagaggaccgggaggaagaactccagcacctccacctcctcttcaggcagcaggaggaatgcctttcagggtgtggtctactcggccaaccagtgcaaagccctcatcaccatcctggtggtcctcggtgccttcatggtcacctggggcccctacatggttgtcatcgcctctgaggccctctgggggaaaagctccgtctccccgagcctggagacttgggccacatggctgtcctttgccagcgctgtctgccaccccctgatctatggactctggaacaagacagttcgcaaagaactactgggcatgtgctttggggaccggtattatcgggaaccatttgtgcaacgacagaggacttccaggctcttcagcatttccaacaggatcacagacctgggcctgtccccacacctcactgcgctcatggcaggtggacagcccctggggcacagcagcagcacgggggacactggcttcagctgctcccaggactcagggacagatatgatgctgcttgaggactacacgtctgatgacaaccctccctctcactgcacttgcccacccaagagaaggagctcggtgacatttgaggatgaagtggaacaaatcaaagaagctgccaagaactcgattcttcatgtgaaagctgaagtacacaagtccttggacagttacgcagcaagcttggccaaagccattgaggccgaagccaaaatcaacttatttggggaggaggctttgccaggggtcttggttacagcacggactgtcccggggggcggcttcgggggccgccgaggcagcagaactcttgtgagccagaggctgcagttgcagagcatcgaagaaggagatgttttagctgccgagcagagatgagggcctcagggtgccgtggggctgcagcctgagaggctggcccggggaggagttcccatcaccgcctgtgccgcggccttgggagcatgtcactgtgtacagctggccacacacagggaaggagcagcatctggtatgcagccaccaggacaaggactgaaaataatgtctacagtccacagcttcagcatttccagagaccacatgtgagcttcttttaggtcccagtgatgggaccagaagcatctaaagc

SEQ ID NO: 11557 - DNA, 1653 bp, Homo sapiens
  source 1..1653: mol_type = unassigned DNA
gactgctccctggccttttggttccgagggagtgcagggcagcagtgtgaagacctgtttacgtccactccccactccccggggctggcttcgggacgaattcactgtggtattaacagagcccgggacagagcctggcagaaggcagatggatgctcgtgcccgtcggctggatgaatgaaagctactatgctgtcctgtaccccatggtgtaccccatgaagatcacagggaaccgggctgtgatggcacttgtctacatctggcttcactcgctcatcggctgcctgccacccctgtttggttggtcatccgtggagtttgacgagttcaaatggatgtgtgtggctgcttggcaccgggagcctggctacacggccttctggcagatctggtgtgccctcttcccctttctggtcatgctggtgtgctatggcttcatcttccgcgtggccagggtcaaggcacgcaaggtgcactgtggcacagtcgtcatcgtggaggaggatgctcagaggaccgggaggaagaactccagcacctccacctcctcttcaggcagcaggaggaatgcctttcagggtgtggtctactcggccaaccagtgcaaagccctcatcaccatcctggtggtcctcggtgccttcatggtcacctggggcccctacatggttgtcatcgcctctgaggccctctgggggaaaagctccgtctccccgagcctggagacttgggccacatggctgtcctttgccagcgctgtctgccaccccctgatctatggactctggaacaagacagttcgcaaagaactactgggcatgtgctttggggaccggtattatcgggaaccatttgtgcaacgacagaggacttccaggctcttcagcatttccaacaggatcacagacctgggcctgtccccacacctcactgcgctcatggcaggtggacagcccctggggcacagcagcagcacgggggacactggcttcagctgctcccaggactcagggacagatatgatgctgcttgaggactacacgtctgatgacaaccctccctctcactgcacttgcccacccaagagaaggagctcggtgacatttgaggatgaagtggaacaaatcaaagaagctgccaagaactcgattcttcatgtgaaagctgaagtacacaagtccttggacagttacgcagcaagcttggccaaagccattgaggccgaagccaaaatcaacttatttggggaggaggctttgccaggggtcttggttacagcacggactgtcccggggggcggcttcgggggccgccgaggcagcagaactcttgtgagccagaggctgcagttgcagagcatcgaagaaggagatgttttagctgccgagcagagatgagggcctcagggtgccgtggggctgcagcctgagaggctggcccggggaggagttcccatcaccgcctgtgccgcggccttgggagcatgtcactgtgtacagctggccacacacagggaaggagcagcatctggtatgcagccaccaggacaaggactgaaaataatgtctacagtccacagcttcagcatttccagagaccacatgtgagcttcttttaggtcccagtgatgggaccagaagcatctaaagc

SEQ ID NO: 11558 - DNA, 2062 bp, Homo sapiens
  source 1..2062: mol_type = unassigned DNA
ccgacacccacgggcggagatcacctgctgccccgcagacccctgtcccttcctcccggaccagcagctagaggatgtccaaacggagttggtgggctggatccagaaagcccccaagagagatgctgaaactctcaggctctgactccagccaaagcatgaatggccttgaagtggctcccccaggtctgatcaccaacttctccctggccacggcagagcaatgtggccaggagacgccactggagaacatgctgttcgcctccttctaccttctggattttatcctggctttagttggcaataccctggctctgtggcttttcatccgagaccacaagtccgggaccccggccaacgtgttcctgatgcatctggccgtggccgacttgtcgtgcgtgctggtcctgcccacccgcctggtctaccacttctctgggaaccactggccatttggggaaatcgcatgccgtctcaccggcttcctcttctacctcaacatgtacgccagcatctacttcctcacctgcatcagcgccgaccgtttcctggccattgtgcacccggtcaagtccctcaagctccgcaggcccctctacgcacacctggcctgtgccttcctgtgggtggtggtggctgtggccatggccccgctgctggtgagcccacagaccgtgcagaccaaccacacggtggtctgcctgcagctgtaccgggagaaggcctcccaccatgccctggtgtccctggcagtggccttcaccttcccgttcatcaccacggtcacctgctacctgctgatcatccgcagcctgcggcagggcctgcgtgtggagaagcgcctcaagaccaaggcagtgcgcatgatcgccatagtgctggccatcttcctggtctgcttcgtgccctaccacgtcaaccgctccgtctacgtgctgcactaccgcagccatggggcctcctgcgccacccagcgcatcctggccctggcaaaccgcatcacctcctgcctcaccagcctcaacggggcactcgaccccatcatgtatttcttcgtggctgagaagttccgccacgccctgtgcaacttgctctgtggcaaaaggctcaagggcccgccccccagcttcgaagggaaaaccaacgagagctcgctgagtgccaagtcagagctgtgagcggggggcgccgtccaggccgagcgcagactgtttaggactcagcagacccagcaagaggcatctgccctttccccagccacctccccagcaagcaacctgaaatctcagcagatgcccaccatttctctagatcgcctagtctcaacccataaaaaggaagaactgacaaaggggatccatcggccacccctctgcaggggcttgtgatggctacaatggctcctagacactcaacgacttcatctgtggcagggagagaggaggccggaagaacaacccctgaacaatggaggcctttctttcccgctaggctcccagcctccttcccgctacagaatcgctcatcggcgaggctcagcagaaagaccctgaaggcaggctgcaaatgacccagaagagggacctgggagtcctggtggggacggggagggagtctcaatactcctttgcagtgcaaggtactctgagtcccctctgtagtgcctctgccagacacacactgcctgagttgaagagacacaggccacacatttcaggctggttgccagcggacgtcagcactcacggcctgcagggactcagcacagctctggattctggatctctcctgctgtaaccccacgcacaagcctgcaacccccagagctctttgacaggctcccaggcctcccagtcctggacaagcatgtgcagtcacgggagctcagctcaggccagggctgggctgtgcacctgcctcccactgacccagacccacttcctccagagaggcctctctccgcctgagctatttcccttgctagtgtgcagatatttccctaacatgtccttttttgtatttgtttgtacggaccataaatataactgtagctttaagacta

SEQ ID NO: 11559 - DNA, 1727 bp, Homo sapiens
  source 1..1727: mol_type = unassigned DNA
gacacaacaagggacccctcaggaatgaagcagcctttcagggccagaggggctgtggtctcccttcctctccttaaatagccagcgttccacccacagcggcaaggagccccctgccaccaccgacacccacgggcggagatcacctgctgccccgcagacccctgtcccttcctcccggaccagcagctagaggctctgactccagccaaagcatgaatggccttgaagtggctcccccaggtctgatcaccaacttctccctggccacggcagagcaatgtggccaggagacgccactggagaacatgctgttcgcctccttctacctcccacttcccaggcagcccaggatgtgtactgtcaccggccttaccgcaggatccacagcacggagcaaacagcatttggaagtcgtgttcgcagtacttccggccttcaaactgcaaaggggtcgcagagagaggacaagcaaaccacctatcatccccatgagcagcccaggcccttgttgggtcaggacctgacagcaggggatgaggcactgaggcaggggcatgccgggctgaggctggagcagtgggtcccaggcctggccagagaggacactggcccttttgggatggtggggtgcaaagggaggtgcccccgtggaagctggagaggtccgtgaggccacctgtcaaagggccactggtgtctactgaggatctggaccctgttggtccggagaacaggctgggggcgaggcggttttaagccaggagggatgagatccagtctgaagtgtagtgtcacttggtcctatttcgtataccttctctgtgggagtatccagctctctcagaggccatgaagacccgggtataggagacagaaggaagggaacgcaggaagggcctgggcacggggaagtgggaagagctcagggctgcggccagcaggagccagtgtgcacaccctccaggcggcagctgccagcgagggcccctgtgctggccacaagcggggccaaagcctgcctctgctttcctctaacaattgtattttctgttttttaattggtttttccctgttctctaaaatgagtgtcttattagactaaactggatatagccctacccagtgacctgtagagtcaggaagggcttaaactctttcagcaatgaaaatcttctgggcacctgctgtgtgtgagagagagaggctttgttctgggcatatggccacccctcctagagctttgcccacccctcccgctgcctctacacttagacagcattcctcaggaggctgaagacactgtgaggaacagcggctcttgctctgccaggcggaccacaggccccacatccatccaccagccagtcccatcagctctaccttgaaacagagccagcatctgacccctggccaccaccgccaccacaagcacaagtgatgttctggtaaatgctcaacagccagctctctggggcgcagaggcaggccctgctgtggggcgtttgccagtgtccatggtgtgaatattcccgtcatggccaactcctggctgccaacatgacatcgatgtggacttgaggggagatgtgcagtggccacaccagcacaatggacagaaataaccccatcagcatagacgatagtaaagtggaacaaaataattagcaagtggtatgctttgagtatttgttacctttgtttttaataaaattgtatcccattgt

SEQ ID NO: 11560 - DNA, 1177 bp, Homo sapiens
  source 1..1177: mol_type = unassigned DNA
gagaaaatactcccagctggcctgatacccaggcacaggcttctcctaaacacaggtctccccacctgtcaggatgtccaaacggagttggtgggctggatccagaaagcccccaagagagatgctgaaactctcaggctctgactccagccaaagcatgaatggccttgaagtggctcccccaggtctgatcaccaacttctccctggccacggcagagcaatgtggccaggagacgccactggagaacatgctgttcgcctccttctaccttctggattttatcctggctttagttggcaataccctggctctgtggcttttcatccgagaccacaagtccgggaccccggccaacgtgttcctgatgcatctggccgtggccgacttgtcgtgcgtgctggtcctgcccacccgcctggtctaccacttctctgggaaccactggccatttggggaaatcgcatgccgtctcaccggcttcctcttctacctcaacatgtacgccagcatctacttcctcacctgcatcagcgccgaccgtttcctggccattgtgcacccggtcaagtccctcaagctccgcaggcccctctacgcacacctggcctgtgccttcctgtgggtggtggtggctgtggccatggccccgctgctggtgagcccacagaccgtgcagaccaaccacacggtggtctgcctgcagctgtaccgggagaaggcctcccaccatgccctggtgtccctggcagtggccttcaccttcccgttcatcaccacggtcacctgctacctgctgatcatccgcagcctgcggcagggcctgcgtgtggagaagcgcctcaagaccaaggcagtgcgcatgatcgccatagtgctggccatcttcctggtctgcttcgtgccctaccacgtcaaccgctccgtctacgtgctgcactaccgcagccatggggcctcctgcgccacccagcgcatcctggccctggcaaaccgcatcacctcctgcctcaccagcctcaacggggcactcgaccccatcatgtatttcttcgtggctgagaagttccgccacgccctgtgcaacttgctctgtggcaaaaggctcaagggcccgccccccagcttcgaagggaaaaccaacgagagctcgctgagtgccaagtcagagctgtga

SEQ ID NO: 11561 - DNA, 581 bp, Homo sapiens
  source 1..581: mol_type = unassigned DNA
gaccaagtcagagtactgtggaacctggattcctggggaatggggtccccatgaggaactccacattggactaagaacagaccctgttcctggaagcagcaggaaaccatctctggtgttagaacttcaggcatcttgaaacactctgaagccgggggcaatcttttcaggatgtccaaacggagttggtgggctggatccagaaagcccccaagagagatgctgaaactctcaggctctgactccagccaaagcatgaatggccttgaagtggctcccccaggtctgatcaccaacttctccctggccacggcagagcaatgtggccaggagacgccactggagaacatgctgttcgcctccttctaccttctggattttatcctggctttagttggcaataccctggctctgtggcttttcatccgagaccacaagtccgggaccccggccaacgtgttcctgatgcatctggccgtggccgacttgtcgtgcgtgctggtcctgcccacccgcctggtctaccacttctctgggaaccactggccatttggggaaatcgcatgccgtctcaccggctt

SEQ ID NO: 11562 - DNA, 2598 bp, Homo sapiens
  source 1..2598: mol_type = unassigned DNA
aaacgtcctgttgtgtccctcagctccagcccaagccccccacccagcccccgcctgctctgagtctctgagacagtcacacactcagactatgtggccaagctgggggcggggggcatgggctagggacacactagaatattcacgctccggtggcagcagcagcagcagccagaggagcagcccgacacaacaagggacccctcaggaatgaagcagcctttcagggccagaggggctgtggtctcccttcctctccttaaatagccagcgttccacccacagcggcaaggagccccctgccaccaccgacacccacgggcggagatcacctgctgccccgcagacccctgtcccttcctcccggaccagcagctagagctctccgccctcaccgtggttttagcagtcctagggaaagtgccagccgagaccagccagaccaagtcagagtactgtggaacctggattcctggggaatggggtccccatgaggaactccacattggactaagaacagaccctgttcctggaagcagcaggaaaccatctctggtgttagaacttcaggcatcttgaaacactctgaagccgggggcaatcttttcaggatgtccaaacggagttggtgggctggatccagaaagcccccaagagagatgctgaaactctcaggctctgactccagccaaagcatgaatggccttgaagtggctcccccaggtctgatcaccaacttctccctggccacggcagagcaatgtggccaggagacgccactggagaacatgctgttcgcctccttctaccttctggattttatcctggctttagttggcaataccctggctctgtggcttttcatccgagaccacaagtccgggaccccggccaacgtgttcctgatgcatctggccgtggccgacttgtcgtgcgtgctggtcctgcccacccgcctggtctaccacttctctgggaaccactggccatttggggaaatcgcatgccgtctcaccggcttcctcttctacctcaacatgtacgccagcatctacttcctcacctgcatcagcgccgaccgtttcctggccattgtgcacccggtcaagtccctcaagctccgcaggcccctctacgcacacctggcctgtgccttcctgtgggtggtggtggctgtggccatggccccgctgctggtgagcccacagaccgtgcagaccaaccacacggtggtctgcctgcagctgtaccgggagaaggcctcccaccatgccctggtgtccctggcagtggccttcaccttcccgttcatcaccacggtcacctgctacctgctgatcatccgcagcctgcggcagggcctgcgtgtggagaagcgcctcaagaccaaggcagtgcgcatgatcgccatagtgctggccatcttcctggtctgcttcgtgccctaccacgtcaaccgctccgtctacgtgctgcactaccgcagccatggggcctcctgcgccacccagcgcatcctggccctggcaaaccgcatcacctcctgcctcaccagcctcaacggggcactcgaccccatcatgtatttcttcgtggctgagaagttccgccacgccctgtgcaacttgctctgtggcaaaaggctcaagggcccgccccccagcttcgaagggaaaaccaacgagagctcgctgagtgccaagtcagagctgtgagcggggggcgccgtccaggccgagcgcagactgtttaggactcagcagacccagcaagaggcatctgccctttccccagccacctccccagcaagcaacctgaaatctcagcagatgcccaccatttctctagatcgcctagtctcaacccataaaaaggaagaactgacaaaggggatccatcggccacccctctgcaggggcttgtgatggctacaatggctcctagacactcaacgacttcatctgtggcagggagagaggaggccggaagaacaacccctgaacaatggaggcctttctttcccgctaggctcccagcctccttcccgctacagaatcgctcatcggcgaggctcagcagaaagaccctgaaggcaggctgcaaatgacccagaagagggacctgggagtcctggtggggacggggagggagtctcaatactcctttgcagtgcaaggtactctgagtcccctctgtagtgcctctgccagacacacactgcctgagttgaagagacacaggccacacatttcaggctggttgccagcggacgtcagcactcacggcctgcagggactcagcacagctctggattctggatctctcctgctgtaaccccacgcacaagcctgcaacccccagagctctttgacaggctcccaggcctcccagtcctggacaagcatgtgcagtcacgggagctcagctcaggccagggctgggctgtgcacctgcctcccactgacccagacccacttcctccagagaggcctctctccgcctgagctatttcccttgctagtgtgcagatatttccctaacatgtccttttttgtatttgtttgtacggaccataaatataactgtagctttaagact

SEQ ID NO: 11563 - DNA, 1896 bp, Homo sapiens
  source 1..1896: mol_type = unassigned DNA
ggcccggaaccgccacgggtgagtcgggtcgtggctgctgccgggtcctgcgcgctccggactgaggtggcgtccctgggccggacggcggtgtcccggcgtggcgggaagccggcactggagcgggagcgcactgggcgcgggaccgggaggcgcagggaccggacggctcccgagtcgcccacctgacgctagaagaagtcttcacttcccaggagagccaaagcgtgtctggccctaggtgggaaaagaactggctgtgacctttgccctgacctggaagggcccagccttgggctgaatggcagcacccacgcccgcccgtccggtgctgacccacctgctggtggctctcttcggcatgggctcctgggctgcggtcaatgggatctgggtggagctacctgtggtggtcaaagagcttccagagggttggagcctcccctcttacgtctctgtgcttgtggctctggggaacctgggtctgctggtggtgaccctctggaggaggctggccccaggaaaggacgagcaggtccccatccgggtggtgcaggtgctgggcatggtgggcacagccctgctggcctctctgtggcaccatgtggccccagtggcaggacagttgcattctgtggccttcttagcactggcctttgtgctggcactggcatgctgtgcctcgaatgtcactttcctgcccttcttgagccacctgccacctcgcttcttacggtcattcttcctgggtcaaggcctgagtgccctgctgccctgcgtgctggccctagtgcagggtgtgggccgcctcgagtgcccgccagcccccatcaacggcacccctggccccccgctcgacttccttgagcgttttcccgccagcaccttcttctgggcactgactgcccttctggtcgcttcagctgctgccttccagggtcttctgctgctgttgccgccaccaccatctgtacccacaggggagttaggatcaggcctccaggtgggagccccaggagcagaggaagaggtggaagagtcctcaccactgcaagagccaccaagccaggcagcaggcaccacccctggtccagaccctaaggcctatcagcttctatcagcccgcagtgcctgcctgctgggcctgttggccgccaccaacgcgctgaccaatggcgtgctgcctgccgtgcagagcttttcctgcttaccctacgggcgtctggcctaccacctggctgtggtgctgggcagtgctgccaatcccctggcctgcttcctggccatgggtgtgctgtgcaggtccttggcagggctgggcggcctctctctgctgggcgtgttctgtgggggctacctgatggcgctggcagtcctgagcccctgcccgcccctggtgggcacctcggcgggggtggtcctcgtggtgctgtcgtgggtgctgtgtcttggcgtgttctcctacgtgaaggtggcagccagctccctgctgcatggcgggggccggccggcattgctggcagccggcgtggccatccaggtgggctctctgctcggcgctgttgctatgttccccccgaccagcatctatcacgtgttccacagcagaaaggactgtgcagacccctgtgactcctgagcctgggcaggtggggaccccgctccccaacacctgtctttccctcaatgctgccaccatgcctgagtgcctgcagcccaggaggcccgcacaccggtacactcgtggacacctacacactccataggagatcctggctttccagggtgggcaagggcaaggagcaggcttggagccagggaccagtgggggctgtagggtaagcccctgagcctgggacctacatgtggtttgcgtaataaaacatttgtatttaa

SEQ ID NO: 11564 - DNA, 1777 bp, Homo sapiens
  source 1..1777: mol_type = unassigned DNA
atgccgggggcgggcccggaaccgccacgggtgagtcgggtcgtggctgctgccgggtcctgcgcgctccggactgagaagaagtcttcacttcccaggagagccaaagcgtgtctggccctaggtgggaaaagaactggctgtgacctttgccctgacctggaagggcccagccttgggctgaatggcagcacccacgcccgcccgtccggtgctgacccacctgctggtggctctcttcggcatgggctcctgggctgcggtcaatgggatctgggtggagctacctgtggtggtcaaagagcttccagagggttggagcctcccctcttacgtctctgtgcttgtggctctggggaacctgggtctgctggtggtgaccctctggaggaggctggccccaggaaaggacgagcaggtccccatccgggtggtgcaggtgctgggcatggtgggcacagccctgctggcctctctgtggcaccatgtggccccagtggcaggacagttgcattctgtggccttcttagcactggcctttgtgctggcactggcatgctgtgcctcgaatgtcactttcctgcccttcttgagccacctgccacctcgcttcttacggtcattcttcctgggtcaaggcctgagtgccctgctgccctgcgtgctggccctagtgcagggtgtgggccgcctcgagtgcccgccagcccccatcaacggcacccctggccccccgctcgacttccttgagcgttttcccgccagcaccttcttctgggcactgactgcccttctggtcgcttcagctgctgccttccagggtcttctgctgctgttgccgccaccaccatctgtacccacaggggagttaggatcaggcctccaggtgggagccccaggagcagaggaagaggtggaagagtcctcaccactgcaagagccaccaagccaggcagcaggcaccacccctggtccagaccctaaggcctatcagcttctatcagcccgcagtgcctgcctgctgggcctgttggccgccaccaacgcgctgaccaatggcgtgctgcctgccgtgcagagcttttcctgcttaccctacgggcgtctggcctaccacctggctgtggtgctgggcagtgctgccaatcccctggcctgcttcctggccatgggtgtgctgtgcaggtccttggcagggctgggcggcctctctctgctgggcgtgttctgtgggggctacctgatggcgctggcagtcctgagcccctgcccgcccctggtgggcacctcggcgggggtggtcctcgtggtgctgtcgtgggtgctgtgtcttggcgtgttctcctacgtgaaggtggcagccagctccctgctgcatggcgggggccggccggcattgctggcagccggcgtggccatccaggtgggctctctgctcggcgctgttgctatgttccccccgaccagcatctatcacgtgttccacagcagaaaggactgtgcagacccctgtgactcctgagcctgggcaggtggggaccccgctccccaacacctgtctttccctcaatgctgccaccatgcctgagtgcctgcagcccaggaggcccgcacaccggtacactcgtggacacctacacactccataggagatcctggctttccagggtgggcaagggcaaggagcaggcttggagccagggaccagtgggggctgtagggtaagcccctgagcctgggacctacatgtggtttgcgtaataaaacatttgtattt

SEQ ID NO: 11565 - DNA, 1790 bp, Homo sapiens
  source 1..1790: mol_type = unassigned DNA
cttccggtcgtgggccatgccgggggcgggcccggaaccgccacgggtgagtcgggtcgtggctgctgccgggtcctgcgcgctccggactgaggtggcgtccctgggccggacggcggtgtcccggcgtggcgggaagccggcactggagcgggagcgcactgggcgcgggaccgggaggcgcagggaccggacggctcccgagtcgcccacctgacggtaccgagagggcggcgcccctccgagcagagccgtcccggccactcccctgggatctgacttggctcttgcggtcgcgggcaccgtgaagccctggggtgtgcgtggctcctcctgctagaagaagtcttcacttcccaggagagccaaagcgtgtctggccctaggtgggaaaagaactggctgtgacctttgccctgacctggaagggcccagccttgggctgaatggcagcacccacgcccgcccgtccggtgctgacccacctgctggtggctctcttcggcatgggctcctgggctgcggtcaatgggatctgggtggagctacctgtggtggtcaaagagcttccagagggttggagcctcccctcttacgtctctgtgcttgtggctctggggaacctgggtctgctggtggtgaccctctggaggaggctggccccaggaaaggacgagcaggtccccatccgggtggtgcaggtgctgggcatggtgggcacagccctgctggcctctctgtggcaccatgtggccccagtggcaggacagttgcattctgtggccttcttagcactggcctttgtgctggcactggcatgctgtgcctcgaatgtcactttcctgcccttcttgagccacctgccacctcgcttcttacggtcattcttcctgggtcaaggcctgagtgccctgctgccctgcgtgctggccctagtgcagggtgtgggccgcctcgagtgcccgccagcccccatcaacggcacccctggccccccgctcgacttccttgagcgttttcccgccagcaccttcttctgggcactgactgcccttctggtcgcttcagctgctgccttccagggtcttctgctgctgttgccgccaccaccatctgtacccacaggggagttaggatcaggcctccaggtgggagccccaggagcagaggaagaggtggaagagtcctcaccactgcaagagccaccaagccaggcagcaggcaccacccctggtccagaccctaaggcctatcagcttctatcagcccgcagtgcctgcctgctgggcctgttggccgccaccaacgcgctgaccaatggcgtgctgcctgccgtgcagagcttttcctgcttaccctacgggcgtctggcctaccacctggctgtggtgctgggcagtgctgccaatcccctggcctgcttcctggccatgggtgtgctgtgcaggtccttggcagggctgggcggcctctctctgctgggcgtgttctgtgggggctacctgatggcgctggcagtcctgagcccctgcccgcccctggtgggcacctcggcgggggtggtcctcgtggtgctgtcgtgggtgctgtgtcttggcgtgttctcctacgtgaaggtggcagccagctccctgctgcatggcgggggccggccggcattgctggcagccggcgtggccatccaggtgggctctctgctcggcgctgttgctatgttccccccgaccagcatctatcacgtgttccacagcagaaaggactgtgcagacccctgtgactcctgagcctgg

SEQ ID NO: 11566 - DNA, 1757 bp, Homo sapiens
  source 1..1757: mol_type = unassigned DNA
gggcgggacttccggtcgtgggccatgccgggggcgggcccggaaccgccacggctagaagaagtcttcacttcccaggagagccaaagcgtgtctggccctaggtgggaaaagaactggctgtgacctttgccctgacctggaagggcccagccttgggctgaatggcagcacccacgcccgcccgtccggtgctgacccacctgctggtggctctcttcggcatgggctcctgggctgcggtcaatgggatctgggtggagctacctgtggtggtcaaagagcttccagagggttggagcctcccctcttacgtctctgtgcttgtggctctggggaacctgggtctgctggtggtgaccctctggaggaggctggccccaggaaaggacgagcaggtccccatccgggtggtgcaggtgctgggcatggtgggcacagccctgctggcctctctgtggcaccatgtggccccagtggcaggacagttgcattctgtggccttcttagcactggcctttgtgctggcactggcatgctgtgcctcgaatgtcactttcctgcccttcttgagccacctgccacctcgcttcttacggtcattcttcctgggtcaaggcctgagtgccctgctgccctgcgtgctggccctagtgcagggtgtgggccgcctcgagtgcccgccagcccccatcaacggcacccctggccccccgctcgacttccttgagcgttttcccgccagcaccttcttctgggcactgactgcccttctggtcgcttcagctgctgccttccagggtcttctgctgctgttgccgccaccaccatctgtacccacaggggagttaggatcaggcctccaggtgggagccccaggagcagaggaagaggtggaagagtcctcaccactgcaagagccaccaagccaggcagcaggcaccacccctggtccagaccctaaggcctatcagcttctatcagcccgcagtgcctgcctgctgggcctgttggccgccaccaacgcgctgaccaatggcgtgctgcctgccgtgcagagcttttcctgcttaccctacgggcgtctggcctaccacctggctgtggtgctgggcagtgctgccaatcccctggcctgcttcctggccatgggtgtgctgtgcaggtccttggcagggctgggcggcctctctctgctgggcgtgttctgtgggggctacctgatggcgctggcagtcctgagcccctgcccgcccctggtgggcacctcggcgggggtggtcctcgtggtgctgtcgtgggtgctgtgtcttggcgtgttctcctacgtgaaggtggcagccagctccctgctgcatggcgggggccggccggcattgctggcagccggcgtggccatccaggtgggctctctgctcggcgctgttgctatgttccccccgaccagcatctatcacgtgttccacagcagaaaggactgtgcagacccctgtgactcctgagcctgggcaggtggggaccccgctccccaacacctgtctttccctcaatgctgccaccatgcctgagtgcctgcagcccaggaggcccgcacaccggtacactcgtggacacctacacactccataggagatcctggctttccagggtgggcaagggcaaggagcaggcttggagccagggaccagtgggggctgtagggtaagcccctgagcctgggacctacatgtggtttgcgtaataaaacatttgtattt

SEQ ID NO: 11567 - DNA, 2147 bp, Homo sapiens
  source 1..2147: mol_type = unassigned DNA
ggcccggaaccgccacgggtgagtcgggtcgtggctgctgccgggtcctgcgcgctccggactgaggtggcgtccctgggccggacggcggtgtcccggcgtggcgggaagccggcactggagcgggagcgcactgggcgcgggaccgggaggcgcagggaccggacggctcccgagtcgcccacctgacggtaccgagagggcggcgcccctccgagcagagccgtcccggccactcccctgggatctgacttggctcttgcggtcgcgggcaccgtgaagccctggggtgtgcgtggctcctcctggtaggcgccctttcccggcgtccggcttggggtggtggtggcgttgactccagccccgcctctccctggagaggagggctccactcgctccttcggcctcctcccctggggccgcagcgactcgggccggcttcctgcttccctgcctgccggcggtcccgctggctagaagaagtcttcacttcccaggagagccaaagcgtgtctggccctaggtgggaaaagaactggctgtgacctttgccctgacctggaagggcccagccttgggctgaatggcagcacccacgcccgcccgtccggtgctgacccacctgctggtggctctcttcggcatgggctcctgggctgcggtcaatgggatctgggtggagctacctgtggtggtcaaagagcttccagagggttggagcctcccctcttacgtctctgtgcttgtggctctggggaacctgggtctgctggtggtgaccctctggaggaggctggccccaggaaaggacgagcaggtccccatccgggtggtgcaggtgctgggcatggtgggcacagccctgctggcctctctgtggcaccatgtggccccagtggcaggacagttgcattctgtggccttcttagcactggcctttgtgctggcactggcatgctgtgcctcgaatgtcactttcctgcccttcttgagccacctgccacctcgcttcttacggtcattcttcctgggtcaaggcctgagtgccctgctgccctgcgtgctggccctagtgcagggtgtgggccgcctcgagtgcccgccagcccccatcaacggcacccctggccccccgctcgacttccttgagcgttttcccgccagcaccttcttctgggcactgactgcccttctggtcgcttcagctgctgccttccagggtcttctgctgctgttgccgccaccaccatctgtacccacaggggagttaggatcaggcctccaggtgggagccccaggagcagaggaagaggtggaagagtcctcaccactgcaagagccaccaagccaggcagcaggcaccacccctggtccagaccctaaggcctatcagcttctatcagcccgcagtgcctgcctgctgggcctgttggccgccaccaacgcgctgaccaatggcgtgctgcctgccgtgcagagcttttcctgcttaccctacgggcgtctggcctaccacctggctgtggtgctgggcagtgctgccaatcccctggcctgcttcctggccatgggtgtgctgtgcaggtccttggcagggctgggcggcctctctctgctgggcgtgttctgtgggggctacctgatggcgctggcagtcctgagcccctgcccgcccctggtgggcacctcggcgggggtggtcctcgtggtgctgtcgtgggtgctgtgtcttggcgtgttctcctacgtgaaggtggcagccagctccctgctgcatggcgggggccggccggcattgctggcagccggcgtggccatccaggtgggctctctgctcggcgctgttgctatgttccccccgaccagcatctatcacgtgttccacagcagaaaggactgtgcagacccctgtgactcctgagcctgggcaggtggggaccccgctccccaacacctgtctttccctcaatgctgccaccatgcctgagtgcctgcagcccaggaggcccgcacaccggtacactcgtggacacctacacactccataggagatcctggctttccagggtgggcaagggcaaggagcaggcttggagccagggaccagtgggggctgtagggtaagcccctgagcctgggacctacat

SEQ ID NO: 11568 - DNA, 1676 bp, Homo sapiens
  source 1..1676: mol_type = unassigned DNA
ccttcggcctcctcccctggggccgcagcgactcgggccggcttcctgcttccctgcctgccggcggtcccgctggctagaagaagtcttcacttcccaggagagccaaagcgtgtctggccctaggtgggaaaagaactggctgtgacctttgccctgacctggaagggcccagccttgggctgaatggcagcacccacgcccgcccgtccggttggagcctcccctcttacgtctctgtgcttgtggctctggggaacctgggtctgctggtggtgaccctctggaggaggctggccccaggaaaggacgagcaggtccccatccgggtggtgcaggtgctgggcatggtgggcacagccctgctggcctctctgtggcaccatgtggccccagtggcaggacagttgcattctgtggccttcttagcactggcctttgtgctggcactggcatgctgtgcctcgaatgtcactttcctgcccttcttgagccacctgccacctcgcttcttacggtcattcttcctgggtcaaggcctgagtgccctgctgccctgcgtgctggccctagtgcagggtgtgggccgcctcgagtgcccgccagcccccatcaacggcacccctggccccccgctcgacttccttgagcgttttcccgccagcaccttcttctgggcactgactgcccttctggtcgcttcagctgctgccttccagggtcttctgctgctgttgccgccaccaccatctgtacccacaggggagttaggatcaggcctccaggtgggagccccaggagcagaggaagaggtggaagagtcctcaccactgcaagagccaccaagccaggcagcaggcaccacccctggtccagaccctaaggcctatcagcttctatcagcccgcagtgcctgcctgctgggcctgttggccgccaccaacgcgctgaccaatggcgtgctgcctgccgtgcagagcttttcctgcttaccctacgggcgtctggcctaccacctggctgtggtgctgggcagtgctgccaatcccctggcctgcttcctggccatgggtgtgctgtgcaggtccttggcagggctgggcggcctctctctgctgggcgtgttctgtgggggctacctgatggcgctggcagtcctgagcccctgcccgcccctggtgggcacctcggcgggggtggtcctcgtggtgctgtcgtgggtgctgtgtcttggcgtgttctcctacgtgaaggtggcagccagctccctgctgcatggcgggggccggccggcattgctggcagccggcgtggccatccaggtgggctctctgctcggcgctgttgctatgttccccccgaccagcatctatcacgtgttccacagcagaaaggactgtgcagacccctgtgactcctgagcctgggcaggtggggaccccgctccccaacacctgtctttccctcaatgctgccaccatgcctgagtgcctgcagcccaggaggcccgcacaccggtacactcgtggacacctacacactccataggagatcctggctttccagggtgggcaagggcaaggagcaggcttggagccagggaccagtgggggctgtagggtaagcccctgagcctgggacctacatgtggtttgcgtaataaaacatttgtattt

SEQ ID NO: 11569 - DNA, 2377 bp, Homo sapiens
  source 1..2377: mol_type = unassigned DNA
gcaaaagcgctagggttgcaagtggcaccagagacgtgcccttgtcccggggtccatttgagggtgagcgtgttggtgccgagctgtttttttgttttgttttgttttgttttgtttttgagaccgaatctcgttctgtcgcccaggctggaatgcagtggtgtgatcttggctcactgcaacctccaccttccgggttcaagtgaatctcctgcctcagcctcctgagtagctgggattactggcacccaccaccacgaccagctaatttttgtatttttagtagagacgggttttcaccatgttggccaggatggtctcaatctcctgacctcaggcgatctgccttcctcagcttcccaaagtgctgggattacaggtgtgagccaccgcacccggccagtgctgagctgttttgacaacttggaccccgggtcctctgtgggtaggaaaatcagctccctctttgctcctctggggcagctgcacctcgggccagctttctgcctgtctgcctgccggcactgctgggtcgctgtacccaaacgcacagccggtgccccgtgctagaaggtcttcagtttccagaagaaccaaagcatctttggacctacctagggaaggacctgcctgtgacctttgccctgtcctggagggtccagctttgggctgaatggcagcacccacgctgggccgtctggtgctgacccacctgctggtggccctttttggcatgggctcctgggctgctgtgaacgggatctgggtggagctgcctgtggtggtaaaagaccttccagagggttggagcctcccctcatacctctctgtggttgtggcgctgggaaacctgggtctgctggtggtgaccctgtggaggcagctggccccgggcaagggcgagcaggtccccatccaggtggtacaggtgctgagtgtagtgggcacagccctgctggcccctctgtggcaccacgtggccccagtggcagggcagctccactctgtggccttcctaactctggccttggtgttggcaatggcctgttgtacctctaatgtcactttcctgcccttcctgagccacctgccacctcctttcttacggtctttcttcctgggtcagggtctcagtgccctactcccctgtgtgctggccctagtgcaaggtgtgggccgcctcgagtgcccaccagcgcccaccaatggcacctctgggcctcccctcgacttccctgagcgttttcctgccagcaccttcttctgggcactgactgcccttctggtcacttcagctgccgccttccggggtctcctgttgctgttgccatcactaccctctgtaaccacagggggctcagggcctgaacttcaactgggatccccaggagcagaggaggaagagaaggaggaagaagaggctttgccattgcaggagccaccgagccaggcagcaggcaccatccctggcccagaccctgaggcccatcagctgttctcagcccatggtgccttcctgctgggcctgatggccttcaccagtgccgtgaccaatggcgtgctgccttctgtgcagagcttttcctgtttgccctatgggcgcctggcctaccacctggctgtggtgctgggcagtgccgccaacccccttgcctgcttcctggccatgggcgtgctgtgcaggtccctggcagggctggttggtctttctctgctgggcatgctctttggggcctacctgatggcactggcaatcctgagcccctgcccacccctggtgggcaccactgcaggggtggtccttgtggtgctgtcgtgggtgctgtgtctgtgtgtgttctcatatgtgaaggtggctgcaagctccctgctgcatggtgggggtcggccggcattgctggcagctggtgtggccatccaagtgggctccctgcttggtgccggtgccatgttccctcccaccagcatctaccacgtgtttcaaagcagaaaggactgtgtagacccctgtggcccctgagcctgggcaggtggggacccaactccaccccacctgtcttcatcgtgaggctgccacagtgcctgactacttgtggcccaggcaggcttcccccaacacaggaacgctcatggacacctgcacactccacagaagacgttggcatgtgaggccagggtgggcaccaaagaccaggcccagagccaggggacaggttggggctgtgggcttggacccagggcctgagacctttgtgggatttgtgcaataaagtgtttttatttaaaaccaaaaacaaaaacaaaagcctaatgaaaaccttataagaaatatataatgaaatcaggaaactggattaaataatttttcatacatata

SEQ ID NO: 11570 - DNA, 2412 bp, Homo sapiens
  source 1..2412: mol_type = unassigned DNA
agtgtcgcaaaagcgctagggttgcaagtggcaccagagacgtgcccttgtcccggggtccatttgagggtgagcgtgttggtgccgagctgtttttttgttttgttttgttttgttttgtttttgagaccgaatctcgttctgtcgcccaggctggaatgcagtggtgtgatcttggctcactgcaacctccaccttccgggttcaagtgaatctcctgcctcagcctcctgagtagctgggattactggcacccaccaccacgaccagctaatttttgtatttttagtagagacgggttttcaccatgttggccaggatggtctcaatctcctgacctcaggcgatctgccttcctcagcttcccaaagtgctgggattacaggtgtgagccaccgcacccggccagtgctgagctgttttgacaacttggaccccgggtcctctgtgggtaggaaaatcagctccctctttgctcctctggggcagctgcacctcgggccagctttctgcctgtctgcctgccggcactgctgggtcgctgtacccaaacgcacagccggtgccccgtgcctattacctgccagcctgtctgtttccctccagctagaaggtcttcagtttccagaagaaccaaagcatctttggacctacctagggaaggacctgcctgtgacctttgccctgtcctggagggtccagctttgggctgaatggcagcacccacgctgggccgtctggtgctgacccacctgctggtggccctttttggcatgggctcctgggctgctgtgaacgggatctgggtggagctgcctgtggtggtaaaagaccttccagagggttggagcctcccctcatacctctctgtggttgtggcgctgggaaacctgggtctgctggtggtgaccctgtggaggcagctggccccgggcaagggcgagcaggtccccatccaggtggtacaggtgctgagtgtagtgggcacagccctgctggcccctctgtggcaccacgtggccccagtggcagggcagctccactctgtggccttcctaactctggccttggtgttggcaatggcctgttgtacctctaatgtcactttcctgcccttcctgagccacctgccacctcctttcttacggtctttcttcctgggtcagggtctcagtgccctactcccctgtgtgctggccctagtgcaaggtgtgggccgcctcgagtgcccaccagcgcccaccaatggcacctctgggcctcccctcgacttccctgagcgttttcctgccagcaccttcttctgggcactgactgcccttctggtcacttcagctgccgccttccggggtctcctgttgctgttgccatcactaccctctgtaaccacagggggctcagggcctgaacttcaactgggatccccaggagcagaggaggaagagaaggaggaagaagaggctttgccattgcaggagccaccgagccaggcagcaggcaccatccctggcccagaccctgaggcccatcagctgttctcagcccatggtgccttcctgctgggcctgatggccttcaccagtgccgtgaccaatggcgtgctgccttctgtgcagagcttttcctgtttgccctatgggcgcctggcctaccacctggctgtggtgctgggcagtgccgccaacccccttgcctgcttcctggccatgggcgtgctgtgcaggtccctggcagggctggttggtctttctctgctgggcatgctctttggggcctacctgatggcactggcaatcctgagcccctgcccacccctggtgggcaccactgcaggggtggtccttgtggtgctgtcgtgggtgctgtgtctgtgtgtgttctcatatgtgaaggtggctgcaagctccctgctgcatggtgggggtcggccggcattgctggcagctggtgtggccatccaagtgggctccctgcttggtgccggtgccatgttccctcccaccagcatctaccacgtgtttcaaagcagaaaggactgtgtagacccctgtggcccctgagcctgggcaggtggggacccaactccaccccacctgtcttcatcgtgaggctgccacagtgcctgactacttgtggcccaggcaggcttcccccaacacaggaacgctcatggacacctgcacactccacagaagacgttggcatgtgaggccagggtgggcaccaaagaccaggcccagagccaggggacaggttggggctgtgggcttggacccagggcctgagacctttgtgggatttgtgcaataaagtgtttttatttaaaaccaaaaacaaaaacaaaagcctaatgaaaaccttataagaaatatataatgaaatcaggaaactggattaaataatttttcatac

SEQ ID NO: 11571 - DNA, 2989 bp, Homo sapiens
  source 1..2989: mol_type = unassigned DNA
tcggcctcccaaagtgctgggattacaggcctgagccacggtgcctggcctatctttcattttcaaagcttgtttttgagtggtggcatggggcacacccctgtactgctaatgcaaaggaatattagaatcaccatttgtgaaagaaacttggcagtctgttacaagagcctcagctatgtcatacagtttcacccaataattctatttcaagagacttatccaggaaaaaaaaaaaaaaaaagaccaaaataagaaaagctttgtaatgagcccttgttgcttttacctacccagtgcctctgttcctcttctggtaactgaattcctccttcatctaccaatttatagcagcagggtttgagattctttcactgaattccaaccaatcaaattatctgaaaagtattatttttcttttttcagacagggtctcgctctttcacccaggctggagcacggtggtgtgaccccagttcactgaagcctcaacctcctgggctcaagggatcctcccacctcagcctcctgagtagctgggactataggtgcacatcagcatgcccaactaaattttattttttgtagagatggggtttcgccatgttgcttgggctggtctcgaactcctgggctcctgcgatccgcccatctcagcctcccagagtgctgggactacaggcatgggccattgcacctggcctttaaaatattcttttcttttcaagtgagaaatggtatcctactgatgtcttaatttgcctttctttgatatatacagtcagggagagcatcttttccacatgtctattggccatgtgtatttcccatgaaatatttcataccacccccctcaccattttacaatatgatctttatcaatgtcacagtgataggatatgtctctaacctgtatcttttattttctttctttccttttttttttttttgatacggagttttcctcttgtcgtccagtctggaatgcaatgacatgatctcggctcaccacaatctccgcctcccgggttcaagcaattctcctgcctcagcctcccgagtagctgggattacaggcatgtgccaccatgcccggctaattttgtatttttagtagagacagggtttcgccatgttggtcaggctggtctcgaactcctgacctcaggtgatccacgcccccttagcgtcccaaagtgctgggattacaggcacgaactactatgcctgggattaacctgtatcttttgacttattaacttgtctgtgcttactggagtggcactctgagctgagcctggacagctagaaggtcttcagtttccagaagaaccaaagcatctttggacctacctagggaaggacctgcctgtgacctttgccctgtcctggagggtccagctttgggctgaatggcagcacccacgctgggccgtctggtgctgacccacctgctggtggccctttttggcatgggctcctgggctgctgtgaacgggatctgggtggagctgcctgtggtggtaaaagaccttccagagggttggagcctcccctcatacctctctgtggttgtggcgctgggaaacctgggtctgctggtggtgaccctgtggaggcagctggccccgggcaagggcgagcaggtccccatccaggtggtacaggtgctgagtgtagtgggcacagccctgctggcccctctgtggcaccacgtggccccagtggcagggcagctccactctgtggccttcctaactctggccttggtgttggcaatggcctgttgtacctctaatgtcactttcctgcccttcctgagccacctgccacctcctttcttacggtctttcttcctgggtcagggtctcagtgccctactcccctgtgtgctggccctagtgcaaggtgtgggccgcctcgagtgcccaccagcgcccaccaatggcacctctgggcctcccctcgacttccctgagcgttttcctgccagcaccttcttctgggcactgactgcccttctggtcacttcagctgccgccttccggggtctcctgttgctgttgccatcactaccctctgtaaccacagggggctcagggcctgaacttcaactgggatccccaggagcagaggaggaagagaaggaggaagaagaggctttgccattgcaggagccaccgagccaggcagcaggcaccatccctggcccagaccctgaggcccatcagctgttctcagcccatggtgccttcctgctgggcctgatggccttcaccagtgccgtgaccaatggcgtgctgccttctgtgcagagcttttcctgtttgccctatgggcgcctggcctaccacctggctgtggtgctgggcagtgccgccaacccccttgcctgcttcctggccatgggcgtgctgtgcaggtgctgtcgtgggtgctgtgtctgtgtgtgttctcatatgtgaaggtggctgcaagctccctgctgcatggtgggggtcggccggcattgctggcagctggtgtggccatccaagtgggctccctgcttggtgccggtgccatgttccctcccaccagcatctaccacgtgtttcaaagcagaaaggactgtgtagacccctgtggcccctgagcctgggcaggtggggacccaactccaccccacctgtcttcatcgtgaggctgccacagtgcctgactacttgtggcccaggcaggcttcccccaacacaggaacgctcatggacacctgcacactccacagaagacgttggcatgtgaggccagggtgggcaccaaagaccaggcccagagccaggggacaggttggggctgtgggcttggacccagggcctgagacctttgtgggatttgtgcaataaagtgtttttatttaaaaccaaaaacaaaaacaaaagcctaatgaaaaccttataagaaatatataatgaaatcaggaaactggattaaataatttttcatacat

SEQ ID NO: 11572 - DNA, 1755 bp, Homo sapiens
  source 1..1755: mol_type = unassigned DNA
cattctgatgcccgagtccaagtggcttttccagcgacacatctttggtctttgttctcagtgttgggggttgcgttgtgaggtgttgtctcttcatgagaaggcagtgtgacgtagtgatcacatcccaggctctggagttcaactgcttctgtctgaatgccagctccactgcttcttatttctagaactttgggaaacttcatggtgttatggtcaacttgccgcacaaccgtgttcaaatctgtcaccaacaggttcattaaaaacctggcctgctcggggatttgtgccagcctggtctgtgtgcccttcgacatcatcctcagcaccagtcctcactgttgctggtggatctacaccatgctcttctgcaaggtcgtcaaatttttgcacaaagtattctgctctgtgaccatcctcagcttccctgctattgctttggacaggtactactcagtcctctatccactggagaggaaaatatctgatgccaagtcccgtgaactggtgatgtacatctgggcccatgcagtggtggccagtgtccctgtgtttgcagtaaccaatgtggctgacatctatgccacgtccacctgcacggaagtctggagcaactccttgggccacctggtgtacgttctggtgtataacatcaccacggtcattgtgcctgtggtggtggtgttcctcttcttgatactgatccgacgggccctgagtgccagccagaagaagaaggtcatcatagcagcgctccggaccccacagaacaccatctctattccctatgcctcccagcgggaggccgagctgcacgccaccctgctctccatggtgatggtcttcatcttgtgtagcgtgccctatgccaccctggtcgtctaccagactgtgctcaatgtccctgacacttccgtcttcttgctgctcactgctgtttggctgcccaaagtctccctgctggcaaaccctgttctctttcttactgtgaacaaatctgtccgcaagtgcttgatagggaccctggtgcaactacaccaccggtacagtcgccgtaatgtggtcagtacagggagtggcatggctgaggccagcctggaacccagcatacgctcgggtagccagctcctggagatgttccacattgggcagcagcagatctttaagcccacagaggatgaggaagagagtgaggccaagtacattggctcagctgacttccaggccaaggagatatttagcacctgcctggagggagagcaggggccacagtttgcgccctctgccccacccctgagcacagtggactctgtatcccaggtggcaccggcagcccctgtggaacctgaaacattccctgataagtattccctgcagtttggctttgggccttttgagttgcctcctcagtggctctcagagacccgaaacagcaagaagcggctgcttccccccttgggcaacaccccagaagagctgatccagacaaaggtgcccaaggtaggcagggtggagcggaagatgagcagaaacaataaagtgagcatttttccaaaggtggattcctagcaaggattgtaaattcttggaagcaacggggagcttccatattcccaccagagtgtgggaatgctgtggccatgtgattgtatgatctccttgcaactcagtgtgagttgattcctccaatatgggccagatgcttttgaatgatagggaaatctacataaaatccagtgtcctctttattga

SEQ ID NO: 11573 - DNA, 2816 bp, Homo sapiens
  source 1..2816: mol_type = unassigned DNA
tgggggcgtcctccttcgtccccgcccggctgtcaagctgtgttctagcggccgagggaccgaggggggctaagaaagggggcgcccagccatgcagaggcaaaaaggcgctgcggaacggggtccccgtcgccagtgctgaggcaggaggtcggagccacaagtgaggggctgggaagcaggacccagcacgggcgtcttggcaggcggccgggcgcagggccaggctgctggggacgctcagggctttccacccaagccatgggcgctgtcgggcactcgggggtcccctcgtggctccggccactcggcgtgggcattacgttggcttcacatcgccatccagcctcgaagccaacaggactgaaaaatagcttcggccaaacgttctcctcccgctaaggagaggggtcgagtgcgtcagcccgaggggactggagagggatgccctagccctcgaggggcggaggacccgcggttgaaggaggcagcgggagcggagagcgccctccttgaccatcgaatgcctccttctgtgtttccattcctgtcgagtgggctgggccacgctgaccaccctggaggagggacggacgacgctcggcgggctctgaccgtgccgccttcttgtggctgctgactgggatccaggagggagtgggcatggggcgcagccgcgcctccctccctccccgcctcccgggcgccggggttggcgatgtggagacgtgaggggacccgtcggctgctccggcttctccaggactccgccaggcgcccgcgcgtccctcctcacccggaggaggagaggctccgcgcggggctccgaggcgggcggcgcgcggagccggagtcccagcctcgccatgggacataacgggagctggatctctccaaatgccagcgagccgcacaacgcgtccggcgccgaggctgcgggtgtgaaccgcagcgcgctcggggagttcggcgaggcgcagctgtaccgccagttcaccaccaccgtgcaggtcgtcatcttcataggctcgctgctcggaaacttcatggtgttatggtcaacttgccgcacaaccgtgttcaaatctgtcaccaacaggttcattaaaaacctggcctgctcggggatttgtgccagcctggtctgtgtgcccttcgacatcatcctcagcaccagtcctcactgttgctggtggatctacaccatgctcttctgcaaggtcgtcaaatttttgcacaaagtattctgctctgtgaccatcctcagcttccctgctattgctttggacaggtactactcagtcctctatccactggagaggaaaatatctgatgccaagtcccgtgaactggtgatgtacatctgggcccatgcagtggtggccagtgtccctgtgtttgcagtaaccaatgtggctgacatctatgccacgtccacctgcacggaagtctggagcaactccttgggccacctggtgtacgttctggtgtataacatcaccacggtcattgtgcctgtggtggtggtgttcctcttcttgatactgatccgacgggccctgagtgccagccagaagaagaaggtcatcatagcagcgctccggaccccacagaacaccatctctattccctatgcctcccagcgggaggccgagctgcacgccaccctgctctccatggtgatggtcttcatcttgtgtagcgtgccctatgccaccctggtcgtctaccagactgtgctcaatgtccctgacacttccgtcttcttgctgctcactgctgtttggctgcccaaagtctccctgctggcaaaccctgttctctttcttactgtgaacaaatctgtccgcaagtgcttgatagggaccctggtgcaactacaccaccggtacagtcgccgtaatgtggtcagtacagggagtggcatggctgaggccagcctggaacccagcatacgctcgggtagccagctcctggagatgttccacattgggcagcagcagatctttaagcccacagaggatgaggaagagagtgaggccaagtacattggctcagctgacttccaggccaaggagatatttagcacctgcctggagggagagcaggggccacagtttgcgccctctgccccacccctgagcacagtggactctgtatcccaggtggcaccggcagcccctgtggaacctgaaacattccctgataagtattccctgcagtttggctttgggccttttgagttgcctcctcagtggctctcagagacccgaaacagcaagaagcggctgcttccccccttgggcaacaccccagaagagctgatccagacaaaggtgcccaaggtaggcagggtggagcggaagatgagcagaaacaataaagtgagcatttttccaaaggtggattcctagcaaggattgtaaattcttggaagcaacggggagcttccatattcccaccagagtgtgggaatgctgtggccatgtgattgtatgatctccttgcaactcagtgtgagttgattcctccaatatgggccagatgcttttgaatgatagggaaatctacataaaatccagtgtcctctttattgagggagtatatgtatccatctcagtgatccatgtccttagtgaagtccacattattctctgtggggacaagagctgggcagttttgaatgggtcttgaggtgggtaccccatgtgcactttctgaggatgcctcacttccctgggctctgcagagaacacacagagagaagactttcagagctcacaggagcagggagcaggagcactctaagggaattc

SEQ ID NO: 11574 - DNA, 2816 bp, Homo sapiens; identical to SEQ ID NO: 11573
  source 1..2816: mol_type = unassigned DNA

SEQ ID NO: 11575 - DNA, 1698 bp, Homo sapiens
  source 1..1698: mol_type = unassigned DNA
agtaaaatgtcacactgcaaactctgggcctggggtcccatgggacttcagtggttccaggactgatttcactgccatcacttatatatgatgatgcagacttcaagcatcaaagtacacaaactgaagaaactttatcctttgtatataattatcttaaatatatgccatcatttcaaggggagcttatgctaagtgtgacttcataaacaaatcatttgtgaaagagaaaaaccacatccagggtaaagtcataaggtgaaaaagcctatttcagagagcacttcctgaaagagacaaagcagcaattaaagtcagcccagcaccaactccgacgccaagcgttacactggaaactactttttaaagcaacaaaagagtctaaaacaaaatacaacatttcttaaatacactgtttccagaaagagctattttaacagaagcaactcaaagatatcccttcgacagaagtggaagtgctgaaaaatgctcatctctcacacagacttttgatggacaggagtttctaagtatcatgcctaccaacaagctgtaaaatgatcaccctgaacaatcaagatcaacctgtcccttttaacagctcacatccagatgaatacaaaattgcagcccttgtcttctatagctgtatcttcataattggattatttgttaacatcactgcattatgggttttcagttgtaccaccaagaagagaaccacggtaaccatctatatgatgaatgtggcattagtggacttgatatttataatgactttaccctttcgaatgttttattatgcaaaagatgaatggccatttggagagtacttctgccagattcttggagctctcacagtgttttacccaagcattgctttatggcttcttgcctttattagtgctgacagatacatggccattgtacagccgaagtacgccaaagaacttaaaaacacgtgcaaagccgtgctggcgtgtgtgggagtctggataatgaccctgaccacgaccacccctctgctactgctctataaagacccagataaagactccactcccgccacctgcctcaagatttctgacatcatctatctaaaagctgtgaacgtgctgaacctcactcgactgacattttttttcttgattcctttgttcatcatgattgggtgctacttggtcattattcataatctccttcacggcaggacgtctaagctgaaacccaaagtcaaggagaagtccataaggatcatcatcacgctgctggtgcaggtgctcgtctgctttatgcccttccacatctgtttcgctttcctgatgctgggaacgggggagaacagttacaatccctggggagcctttaccaccttcctcatgaacctcagcacgtgtctggatgtgattctctactacatcgtttcaaaacaatttcaggctcgagtcattagtgtcatgctataccgtaattaccttcgaagcatgcgcagaaaaagtttccgatctggtagtctacggtcactaagcaatataaacagtgaaatgttatgaataataaggttctttcatttcaatcccatcaaaattcacttcactaactactctggcgtcaatggatattctgtataatactatcaagtcccttttctcttgaaaaaataaattcattatcttcattttaaaaacttatataaaa

SEQ ID NO: 11576 - DNA, 1468 bp, Homo sapiens
  source 1..1468: mol_type = unassigned DNA
aagtcataaggtgaaaaagcctatttcagagagcacttcctgaaagagacaaagcagcaattaaagtcagcccagcaccaactccgacgccaagcgttacactggaaactactttttaaagcaacaaaagagtctaaaacaaaatacaacatttcttaaatacactgtttccagaaagagctattttaacagaagcaactcaaagatatcccttcgacagaagtggaagtgctgaaaaatgctcatctctcacacagacttttgatggacaggagtttctaagtatcatgcctaccaacaagctgtaaaatgatcaccctgaacaatcaagatcaacctgtcccttttaacagctcacatccagatgaatacaaaattgcagcccttgtcttctatagctgtatcttcataattggattatttgttaacatcactgcattatgggttttcagttgtaccaccaagaagagaaccacggtaaccatctatatgatgaatgtggcattagtggacttgatatttataatgactttaccctttcgaatgttttattatgcaaaagatgaatggccatttggagagtacttctgccagattcttggagctctcacagtgttttacccaagcattgctttatggcttcttgcctttattagtgctgacagatacatggccattgtacagccgaagtacgccaaagaacttaaaaacacgtgcaaagccgtgctggcgtgtgtgggagtctggataatgaccctgaccacgaccacccctctgctactgctctataaagacccagataaagactccactcccgccacctgcctcaagatttctgacatcatctatctaaaagctgtgaacgtgctgaacctcactcgactgacattttttttcttgattcctttgttcatcatgattgggtgctacttggtcattattcataatctccttcacggcaggacgtctaagctgaaacccaaagtcaaggagaagtccataaggatcatcatcacgctgctggtgcaggtgctcgtctgctttatgcccttccacatctgtttcgctttcctgatgctgggaacgggggagaacagttacaatccctggggagcctttaccaccttcctcatgaacctcagcacgtgtctggatgtgattctctactacatcgtttcaaaacaatttcaggctcgagtcattagtgtcatgctataccgtaattaccttcgaagcatgcgcagaaaaagtttccgatctggtagtctacggtcactaagcaatataaacagtgaaatgttatgaataataaggttctttcatttcaatcccatcaaaattcacttcactaactactctggcgtcaatggatattctgtataatactatcaagtcccttttctcttgaaaaaataaattcattatcttcattttaaaaacttatataaaacatttttgtgaattattc

SEQ ID NO: 11577 - DNA, 1660 bp, Homo sapiens
  source 1..1660: mol_type = unassigned DNA
aagtcataaggtgaaaaagcctatttcagagagcacttcctgaaagagacaaagcagcaattaaagtcagcccagcaccaactccgacgccaagcgttacactggaaactactttttaaagcaacaaaagagtctaaaacaaaatacaacatttcttaaatacactgtttccagaaagagctattttaacagaagcaactcaaagatatcccttcgacagaagtggaagtgctgaaaaatgctcatctctcacacagacttttgatggacaggaggtgctgctttctgtgaaccactgaagtagagcagctgaaatcacaaaacctggaagacttggctttacgtactcccaattgtgcactagaaaacagctcatctattgctctaacagtctagttcttgatctgctgaccatgacacaaaacattgctgtttctcaacctatgataatttaaagagaacataagtttctaagtatcatgcctaccaacaagctgtaaaatgatcaccctgaacaatcaagatcaacctgtcccttttaacagctcacatccagatgaatacaaaattgcagcccttgtcttctatagctgtatcttcataattggattatttgttaacatcactgcattatgggttttcagttgtaccaccaagaagagaaccacggtaaccatctatatgatgaatgtggcattagtggacttgatatttataatgactttaccctttcgaatgttttattatgcaaaagatgaatggccatttggagagtacttctgccagattcttggagctctcacagtgttttacccaagcattgctttatggcttcttgcctttattagtgctgacagatacatggccattgtacagccgaagtacgccaaagaacttaaaaacacgtgcaaagccgtgctggcgtgtgtgggagtctggataatgaccctgaccacgaccacccctctgctactgctctataaagacccagataaagactccactcccgccacctgcctcaagatttctgacatcatctatctaaaagctgtgaacgtgctgaacctcactcgactgacattttttttcttgattcctttgttcatcatgattgggtgctacttggtcattattcataatctccttcacggcaggacgtctaagctgaaacccaaagtcaaggagaagtccataaggatcatcatcacgctgctggtgcaggtgctcgtctgctttatgcccttccacatctgtttcgctttcctgatgctgggaacgggggagaacagttacaatccctggggagcctttaccaccttcctcatgaacctcagcacgtgtctggatgtgattctctactacatcgtttcaaaacaatttcaggctcgagtcattagtgtcatgctataccgtaattaccttcgaagcatgcgcagaaaaagtttccgatctggtagtctacggtcactaagcaatataaacagtgaaatgttatgaataataaggttctttcatttcaatcccatcaaaattcacttcactaactactctggcgtcaatggatattctgtataatactatcaagtcccttttctcttgaaaaaataaattcattatcttcattttaaaaacttatataaaacatttttgtgaattattc

SEQ ID NO: 11578 - DNA, 741 bp, Homo sapiens
  source 1..741: mol_type = unassigned DNA
cagcaattaaagtcagcccagcaccaactccgacgccaagcgttacactggaaactactttttaaagcaacaaaagagtctaaaacaaaatacaacatttcttaaatacactgtttccagaaagagctattttaacagaagcaactcaaagatatcccttcgacagaagtggaagtgctgaaaaatgctcatctctcacacagacttttgatggacaggaggtgctgctttctgtgaaccactgaagtagagcagctgaaatcacaaaacctggaagacttggctttacgtactcccaattgtgcactagaaaacagctcatctattgctctaacagtctagttcttgatctgctgaccatgacacaaaacattgctgtttctcaacctatgataatttaaagagaacataagtttctaagtatcatgcctaccaacaagctgtaaaatgatcaccctgaacaatcaagatcaacctgtcccttttaacagctcacatccagatgaatacaaaattgcagcccttgtcttctatagctgtatcttcataattggattatttgttaacatcactgcattatgggttttcagttgtaccaccaagaagagaaccacggtaaccatctatatgatgaatgtggcattagtggacttgatatttataatgactttaccctttcgaatgttttattatgcaaaagatgaatggccatttggagagtacttctgccagattcttgga

SEQ ID NO: 11579 - DNA, 1700 bp, Homo sapiens
  source 1..1700: mol_type = unassigned DNA
aaacttacttcagtttggacaactactcacagctactacacagagacccgaacgagtcactgatatacacctggaccaccaccaatggatatacaaatggcaaacaattttactccgccctctgcaactcctcagggaaatgactgtgacctctatgcacatcacagcacggccaggatagtaatgcctctgcattacagcctcgtcttcatcattgggctcgtgggaaacttactagccttggtcgtcattgttcaaaacaggaaaaaaatcaactctaccaccctctattcaacaaatttggtgatttctgatatactttttaccaccgctttgcctacacgaatagcctactatgcaatgggctttgactggagaatcggagatgccttgtgtaggataactgcgctagtgttttacatcaacacatatgcaggtgtgaactttatgacctgcctgagtattgaccgcttcattgctgtggtgcaccctctacgctacaacaagataaaaaggattgaacatgcaaaaggcgtgtgcatatttgtctggattctagtatttgctcagacactcccactcctcatcaaccctatgtcaaagcaggaggctgaaaggattacatgcatggagtatccaaactttgaagaaactaaatctcttccctggattctgcttggggcatgtttcataggatatgtacttccacttataatcattctcatctgctattctcagatctgctgcaaactcttcagaactgccaaacaaaacccactcactgagaaatctggtgtaaacaaaaaggctctcaacacaattattcttattattgttgtgtttgttctctgtttcacaccttaccatgttgcaattattcaacatatgattaagaagcttcgtttctctaatttcctggaatgtagccaaagacattcgttccagatttctctgcactttacagtatgcctgatgaacttcaattgctgcatggacccttttatctacttctttgcatgtaaagggtataagagaaaggttatgaggatgctgaaacggcaagtcagtgtatcgatttctagtgctgtgaagtcagcccctgaagaaaattcacgtgaaatgacagaaacgcagatgatgatacattccaagtcttcaaatggaaagtgaaatggattgtattttggtttatagtgacgtaaactgtatgacaaactttgcaggacttcccttataaagcaaaataattgttcagcttccaattagtattcttttatatttctttcattgggcactttcccatctccaactcggaagtaagcccaagagaacaacataaagcaaacaacataaagcacaataaaaatgcaaataaatatttcatttttatttgtaaacgaatacaccaaaaggaggcgctcttaataactcccaatgtaaaaagttttgttttaataaaaaatttaattattatttcttgccaacaaatggctagaaaggactgaatagattatatattgccagatgttaatactgtaacatactttttaaataacatatttcttaaatccaaatttctctcaatgttagatttaattccctcaataacaccaatgttttgttttgtttcgttctgggtcataaaactttgttaaggaactcttttggaataaagagcaggatgctgcaaagttatgagt

SEQ ID NO: 11580 - DNA, 1743 bp, Homo sapiens
  source 1..1743: mol_type = unassigned DNA
ctttccgcctagtgagaggcggtccgatttggcccttggggagtgtccgtcgcgttgatctgatggattcacgtacacaacaccacattctatgagattttgcaggcaaaagtccacaagctcgatatatgggacacctgcaccggcattggatttggccccgcaacatcttaaaggaagcaggctgtgagccaaggggaaggcagaggacagaaatgaatgtgtttccaggctttcctggtggtttatggcattctccaaactcctatgcaagggctattcctgaccaagaagatctaaagagaacgtctctgaaatcaagtccggatgaagaattaagagaaaaaaagtgaatatggtttttgctcacagaatggataacagcaagccacatttgattattcctacacttctggtgcccctccaaaaccgcagctgcactgaaacagccacacctctgccaagccaatacctgatggaattaagtgaggagcacagttggatgagcaaccaaacagaccttcactatgtgctgaaacccggggaagtggccacagccagcatcttctttgggattctgtggttgttttctatcttcggcaattccctggtttgtttggtcatccataggagtaggaggactcagtctaccaccaactactttgtggtctccatggcatgtgctgaccttctcatcagcgttgccagcacgcctttcgtcctgctccagttcaccactggaaggtggacgctgggtagtgcaacgtgcaaggttgtgcgatattttcaatatctcactccaggtgtccagatctacgttctcctctccatctgcatagaccggttctacaccatcgtctatcctctgagcttcaaggtgtccagagaaaaagccaagaaaatgattgcggcatcgtgggtctttgatgcaggctttgtgacccctgtgctctttttctatggctccaactgggacagtcattgtaactatttcctcccctcctcttgggaaggcactgcctacactgtcatccacttcttggtgggctttgtgattccatctgtcctcataattttattttaccaaaaggtcataaaatatatttggagaataggcacagatggccgaacggtgaggaggacaatgaacattgtccctcggacaaaagtgaaaactatcaagatgttcctcattttaaatctgttgtttttgctctcctggctgccttttcatgtagctcagctatggcacccccatgaacaagactataagaaaagttcccttgttttcacagctatcacatggatatcctttagttcttcagcctctaaacctactctgtattcaatttataatgccaattttcggagagggatgaaagagactttttgcatgtcctctatgaaatgttaccgaagcaatgcctatactatcacaacaagttcaaggatggccaaaaaaaactacgttggcatttcagaaatcccttccatggccaaaactattaccaaagactcgatctatgactcatttgacagagaagccaaggaaaaaaagcttgcttggcccattaactcaaatccaccaaatacttttgtctaagttctcattctttcaattgttatgcaccagagattaaaaagctttaactataaaaacagaagctatttacatatttgttttcactcaactttccaagggaaatgttttattttgtaaaatgcattcatttgtttactgta
